United States Patent Application Publication US 2015/0376612 A1 - sequence listing, part 15

SEQ ID NO: 37414 - DNA, 1101 bp, Homo sapiens
tttgtgatttttttcctctggtgtaatcaatttgcaaggaaatatagcatacgattagcatgaaaaagaatctagaggcaccaagcagaaaaagtcttctccattctcctacatttttccttttatttaggctggaatgggaaaaagaaggaatccagggagtgtttgaaaagagaatcgaggaaatttaaaaattgtagaaatcatatcatgcttgttcagcgtgcatgtttatggggtgtgtgtgtgtgtgtgtgtgtgtgtggtgtatgtttgcatacgtgtgtgtgcatgcatgtagcatacctggcttaatgctataatgtattatacatgaaagtaagctctgcattccccctctccttcaacaaaacacctaagctgtcctaggcagagctgagtgtgaatggattgtattttatgccaggaacagtggtgaagcagacgacatcccgtgcaccctgtctttcgggaccctcagatcttggttcacatagatagaattcaacataatgatctgcctggcttcctgctctgcaaacttccagctccaatgctgagggtacttcatgcatactttcaggttcacctcccagagtcctagacagtggacatttaaagccctgccatataaactctgagccaagcattattagaactgctgtttctctttgtcaccgtatgtagcttttaattgctgcactattgatttgtttctttggaccacaatcctacttggttttccagttgattccccggatgatattccaccatttcccaaatttaacctcaccagtgtttgctgagaaaagaatccaactactggcaagacatactcttatgcccaggtctctgctctatgatatagagagtctgtgtacttagagctttacctgttgttttttgccagatatttccagaaccccttatattccctatcccacaacctcactttcacacacactgtattctattttacacatactccatatagtatgccttgctcgacttgtctcatttctgcaactttccgtagcatctcttctgacttttttcactcttgggtccctgaaatttaatcagacattcttaacttcctgt

SEQ ID NO: 37415 - DNA, 1050 bp, Homo sapiens
atccctttgaataaactttctactcctatctcctttactttctctttaaggccatcaacccttagattggccactttgaggctattttctagatcttttaagtatatttcattatttttattctattttcttttgtctcccctgactgtgtatcttcataaagcctgtcttcaagttcactaattttttcttctgcttgatcaattctgctgctaaaaaactctgatgcattccattgaattttgtagcttcagaatttccgcttgatatttaagaattatttcattctgtttattaactttatgtgataagattctgaattccttcttcatgttatcttgaatttcattgagcttccccaaaatagctattttgaattttctgtctgaaagtttgattatctctgtcactccaggtttggtcactggtgccttatttatttcagttgatgaggtcatgtttgtctagatagccttaatgatggtggatgttcatcgatttctgggcattgaagacttacgtagttattctaaactttgcaatctgggcttgtttgtatctatccttcttaggaaggttttccaattattcaaagaacattaagtgttgtgatctacatctttggtcattgcagccacatgtgcattagggggcatctcaagcctagtaaccctgtgactcttgcagacttgtagaggtaccaccttgatggtcctggatgagatccaggagaattctatggattaccagcaatctcttattctcttcccttactgtctcccaaacaaatggagtcactgtctgtgctgagctgcccagaactggggaaaagattatgcaagcactcccataaccaccactgggacagtgctgggtcacacctgaagctggcacagtactcagtgccaggtcttgccgaaggcctgtagcaactattgcctggtaccactgaggtttattcaaggaccaagggctctttagtcagcagatggtgaatcctgccaaatgtgtgtctttcccttcatggcagcaggttgccttcttgcccca

SEQ ID NO: 37416 - DNA, 1050 bp, Homo sapiens
gaccaaattcctgcctttgtggaatttataatctagtggagaaggtgccagtcaacaaaccagtgaaattaatgataatatcaagtagtgaaaagtgccataaagtaaatgcaaaataaggcaaaatcgatagagagagagtatgtaaatgggattgctgttttagatagagtagtcagaggggccacctctctaaagacttgttgaatattgaataaagtgagaaagcaagccacacaatataagttttggggagaaaggcaaaagtcaagaccctaaagaaggaataagcttagtgtattagagaaaaagaagaccactgtgaccagagcagtgcgagaaagtcagagatgctgtagatgacattggagaggtatgcaggacccagaccattcttagccacctttgatttgtgtgtgataaaaagatatttgagactttgagcaaggaagaagtaacctgaacttgtttgtagttttaaaaggtaatgttggcatatatgaagagaattgactgtaggaaagcaagagtagaaacggcaagatcagttagggtcatctaagaaaatattgcaatactcaggtgaaaaataagaaaggattttgaacttgggtgatagtaatggagataagaagaaatgcacagtcagtataaattttaaagatggacttacatgatttggcagaatgaatgtaggctttgagggccaggagaaatcaagtatgatttcaagttttttggccgattgctaagatacagaagattagagaaagagcaggtctaggatcctgtgggtttgcagtggacagtgatgtagctactaaaaatgtgtaaagacacagataatgtgaaatgtcattaacagagaaggatatggaaacagaaggcaatgttatataaagcaatagataacacagtatgctatagtcagaggtttagctttaaaagttctcactggagcatagatggtaccttacacgctgagatgtgacatggagccatttttataaggacttgtttcatcccattttacatacaatccctgacttt

SEQ ID NO: 37417 - DNA, 1045 bp, Homo sapiens
gaggcaggagaatcacttgaacccagaaggcagaggttgcagtgagccgagatcaagccactgcactgaagcctgggcgacaaataagactccgtctcaaaaaaaaaaaaatttccatttgcactattttttaatgctattgaaaatgataagaaggtttttgtacaaggttacccatcataagaaaaaaaagcaaagtgatatttatagccattattaattacattattaatttctatttttatgataccttgtcctatagttttaaaataaaatatggaacaaaatttgatagcagttacattcagggttgtattatcattatggcattgggtgtatatgattactattgctattctatatgcaacataattagcaaaaccaaatgtggttaagagggtttaaggtaaatgagtggaacaactattatttgagttaaactctgagtcacttttcaccccattcttaacatcctaccacctattaaaggttcaatctttgtttatttcatgaaaaagcactgtagggttttaatccccaaagctgtaggatttgatggccctttgttaaataccacaggacccatctgttctgttaggcatatgccttacgatgtgggaaaatctgtaatacacggtaatgaatccaaagtcctttagactgcaacactaaattttatatatatctatatatatatataggtagagatatacacaaatataagtatataagtatatacatataagtatatatgtaagtatatgtatatgtgtgtgtgcatatatatgtgtgtatatacatatatacatatatagtatatacatatatatactatatatgtatatatatatgcacacacacacattttctacaagctgtcttaaagctctgtaatgagaaatagggaaaattctaaaaataaagcagctttaaagatctcagtgggaaaaagcacaccaccagctgcctgtatcttcttacatgttggtgtcaaagtcattttctcaaagcatggtttggagacctcctgcatcagaatcagctg

SEQ ID NO: 37418 - DNA, 1028 bp, Homo sapiens
tggcctggagcagtggctcatgcctgtaatcccagtactttgggagaccaaggcgggcagttcacttgagttcaggggtttaagaccagcctggccaacatggtaaaagcttttctctactaaaaatacaaaaaaaaaaaaaaaatagccaggtgtggtggtgcacacctgtaatccccgctactcaggaggctgaaatgagaattgcttgaacctgggaggcagaggttgcagtgagttgagatcatgccactgtactccaacctggcaaaagagagagactgcttcaaactaactaaataagtaaataaatacataagtgttttgataggttggattaatttcttgaaaattttacagactcctgctgtaacatctaatacaaatcttattggtatctcctatgtgctagaatcatgctatttgatatgaggaattactacaataaagcataagggttactgagatgaaatagaggcatggattctttgttaaagagcttaaagtagatgtcatcgtttctggagttttgtttggccacattccccggagccatagaaaaactaggttacatctcaaggtgactttgtactgtaagacaacttattgtttaacatatatcaaagtatttatgtgaagaaaattccataatccatatgcttaaagtacatgggtaacaatttttaaatgagtcatataatgagagtagaattgggctgaatcatttccagattatatttaattttggcctttgagagtataaaattaaccaagctatgatttaaaatagacaacaatcaatatttattgttatcttctttttattttaatcaaggcctggaaagaaaaatagggagggcaaaatttccatctctcagccagagatagaacccagtaaagatatttgttttcttacgtactaatccttggaaaatatagcaaatttcaaataagaattaacacctttttaatacaatgtgttcatataaccccacaatgtctttatctgctaaggtttcattgtgaaa

SEQ ID NO: 37419 - DNA, 1033 bp, Homo sapiens
tataagacactgatttgctaattcacagccagaagtaagaagaagtaccaaaccacacaaccataatgtcagcaggagtttggctgccagcataatgacaaatactagtaatgctaatacaaccagacttgccctgggccctccttttgcaagaccctatgtctctactagttaagatcctgacatgtcttctgcatacctgaaaagaagggagattcttttaagttccttaaagaaaacagttacttgagttcatgaaatcttgcactgaaaacaatcctataattagaacgttatcttgaagcctctgaaattgttttcaactgagttaggaaaatcaaccatcgcagtattcagttccaattatccacctcctcaactttttttggagacagattttcactctgttgcccaggctggagtgcagtggcactatcatagctcactatggtttccaacccccgcgctcaagtgatccttctgcctcagcctgctgaatagatgtgactacaagcatgtgccaccatgcctggctaattttttgttttattttttgtaaagaggggtctaattatattgcccaggctggtctcaaacttctagcctcaagcgatcctcccaccttggactctcaaagggttgtgattataggcatgagccaccatgcctgacccactttattttcctagaatgagtctgatgttagatttcagactgatcttccatcagtcagaaaataatcctttcatagattggctggagaagcttacagtgtgttttctaacgggatgaatgtatcctgcctcacaacataattgccaatttgcccctaactctaggcacgaataattcagtagttccttgggaccatataatgcatttacttcttttttcatgaagcattgattgagattatgttggttttgttctgaatatgtacatgaagtgttaaaaagaacataaatgaataggctctgtactaaagttgatcccagtattaaatttaaaaatagtatacagagaaacatttaaa

SEQ ID NO: 37420 - DNA, 1029 bp, Homo sapiens
caaaaaaaaaaaaaaaaaagaaaaaaaaagtttgatgactcctgatatagagatttaagggaaaagagtagaaataaatgaatgaaatgaatgactaaaagaataaacgaaatttatataagcatcagtttttaaaacaacagcaaaacaaatattgttcttttaaaacctgtgccggtaagcagttttcttgactcacctgcttcagtagtttggaaaacattgttgtgttttcatagggatctactgagtgagagtctcccatatgttttatgttgttcaatctgtacctatttttagaagttttgaattagtttttgctagcatgaaatatatccatttctttttgtacttgcctttgactacgttttcttttttgaaagttttgcaaaaatgcttggttaattttctagaccttttaaaaaaacaaattatcttgatgcataaatatactttttcctggcatctgttcagctattcatataaattaaaaatggagcataagcaatacatcatctctttctgaaccaccttgtgtcttgcccaactagggagcaattaattgtgacatgaactttttttaaggggaccctactaaatcatctggaggagagctcagatattttattactccatttctcaaagtcagcatctggcaacattgtatttggagagctattgctatgctttaattcaattcttaaattcaacctaagtcatagcttttagattggaagagtatcttatttttaaaattattgctatttatttttacccactataaactaatttaagggtaatgagtagtttgaaaagaacatttgagcaattttccatctttctttgtggaaaatagtgtgttcagatgacatttccttggcagaatatgcttaggatgtctcaaatcaggagggttctatctttctataggcaagagaactaatgacataggttacctgataatataattacagaaggatttaagtggttaagtatgtcttccatggtgaaatgggagatgttacaaaa

SEQ ID NO: 37421 - DNA, 1049 bp, Homo sapiens
tactgacatggaagagtgttggtggtgtacgaagagaaaaaattaggtcagataacaacgtggtgtttaatattattctatttatctatattcacagaaagatgactggagatatgtgaacagaattccatttaaaaatggaatttatatttaaagaaatatgcttgcttcatttttcaaaatggcccacaattatgtttgtcaccaaaaatgtattttaaaatgtgactcacaaaacattattttcttcaataatgaatcgtgtcctacttgagtcagcagatggttaagtggattactactgttagattagagggatagctggttgatctattaatacttgctagatcaattcattacaatccaccataacctctagctcttggaaggagaaacaagctgcttcaggtcaagcagggccagagaacacacatggaacggctattgtcaattaaactcctctagaccatgaagtttctacagcacaagcctgcggaaaaatccgatgcactgttgcctcaagaagcctgcttgggaaagcaagctgttattctttataaataattgtagcaagacatgtttataaatttggcagtagaagttaagaatattattcagctcttaaaaggaatgttacattatatagtaaagagaagagaaaagggggctataatatagttaaaatgtcaggctattattagcaatgttcattaggattatggactagtgctgttaggtatcttaagtaggaattatgtttattaaaataataattgaataaacttctttatttccataatccaagaggtaattaaatatgatttttatttaacaaagcacgaaagaggtttcaagtgtaacattgctcaacaaacactagatgtatgaatcttgtacaagttttgatggtactttaaatagtttgaaaatattatgatacttatgccttcagtagaaattggagaccttctgtgtgttggtgaattctctgggtaccatggacaaggagagaaacctaccacattggaaagtcactaatatgtttcagt

SEQ ID NO: 37422 - DNA, 1050 bp, Homo sapiens
aactaagatagtctctaaagttcttttcccatctctggcactaataaaatgagtactatcaaaaagtgatgggatccatagatcgtggtgggactgaaagtttgaattggggttctaaagggaatgaataagaagataggaagtgatggtttattgtttaatttattgttttgctagttaattttttctgtcaggccacacattttcaaatgatatgtaggtagaatatatattatttttcataattttatgctgcatttgccttcactggaattttacttatttttttcattctttatttagtataattcttacttctattatatgagatatgctttcccctcagatatggagtaacctaacttcatttcttacacataatattattatgctatttattgttattttttatcatgtacatatgtactaaataataatgcaacacacaaatttctgcccttagctttttttatttcatattggtagggggtctttaagtattcatgatcttcttgaaattattttctctctctctctctctttctctctctctctctctctctctctctatatatatatatatatacacacacatatatatacacatatacacacatatatatacacacatatatatacacacatacatatatacacacatatatatacacacacacatatatatatatatatatatatactttttatctatatgtatctcttgctatatgttgcagattttctgtttctaactcatccctcagcttaaactgcacagcctgggagaatctctctctggtcatcttatccaagtaactcatgctcacacacacacttacatacacatcatatttccctgttattattctgtcactgtaccattattaaatatattataacacttttcaaaaatcatagttatataatcatttatttgctcatttattttttatcttatttccaatagactgtaagcttgatgaaggcaggaagaatatctctgttccttaatgtatacccagctccaaacgtggtaccttacatatagta

SEQ ID NO: 37423 - DNA, 1615 bp, Homo sapiens
cagtaatgcccaacaatattgtttttaaacaaaaaatgtaaacattcaaaagaatctctctaaatcactgattaaatcatttgactgaaaacaagcttccttctctattatttgttactgagtcattcacctttattatacaggtatatttatgaatattatatcaaaatagctacatcatttggcttcataataggaataaagacttacctaaaatggttgacaacattcatctggctaagaaatgaaagtacaaaggaccctggcctccgatcactctctcttataagataactgccagacttccctgcctgcctgaggcgttcttctgctatcgttctgtcaagttttccgtgataccacctaggggaaaaacagagaagatattacaatataaatagcaagtgcagaatttctatggacacttgaaaaacatactactagaggttttaaatgcctacatgtaacttaaacatttacattttactctgaaccagttattccaattttaactcaatttaacctcagtctcaaaaaatactcatttacttggtctttaatttgttctaaaagctcagtcctagtcatctcatatataaatctcttccatttctacccatctccctacttccaggattgcctgctattcaaaatataaacactactgcaaccagatctttacttagaaaaataaaagatagacaaatggaaatgattaatttactacctcgatcttatactgaggaaccatgacttcacaaggcacatggaacctatgagaatataaaatgttttattccattttagtgtttgtgccctgcgacaggaaaacagaattacactgtctaaaggatgctattttaatttcctgtttgaacgtgaagctgattaatccctttggctctaagataatctactccatgactatacattttacatttgcactcaactttccaaatttatgtaacaaacatgtgggagaataaatagcacctttgtcccttcacccttcttgctctcagtttaactgtgttctacctacatactatcaaatgatctacttaagaaactggctgtaactctagcataccaagtatgcctataaaagcctcatggactgatataaacagaaacatgcttagaaatatactagaagtatcatacaggcatggtaacaaatctccaaagtaattgctataaaatatttttacatttgatagtttagccaaactcatccttagatacttacagcctaatttgaaacatccagagaaaaacaataaacattcatattacattgatatattcaattatgtaacataatatagtacttcagctttaccaaagtttatttgtaatcttatatgtgtaataatgtatgtattttatataatatataagccaatgataaaagcattatgttactatgactatttttgtaagcttgttgtaataaaagcccattatttttgactccttaatttttaaaaataaaacaaaaacacagaaacttaaaacttatggaaagaattacttttagttttcttctaaaaccaagctatttatttagagccctatgcataaggctgaaaataatgaacttatttatagcgtt

SEQ ID NO: 37424 - DNA, 1045 bp, Homo sapiens
ataaatctaagttatgctgtgggattttcataatcctctatcttgaaacattatgctgtttcatcatcctaggaactatttcatcattactcagaattattcccaagttaatgctacaaaattactaaaataataagaaaatagaagaatgaattgcttacagcagggctgacaaactgtggcacgcatgctaaatccagtccaccacctgttttttatacataaagttttactggaacacagccatgctcattccctaacatgctgtctgtggttgcttccagataaaaagacagactttagtggacacactaaatgaactgcaaaaccctttacagaaaacttttgccaaccgctggcctagaggatgatataactgaaataaataatctctactgcatcactctgggtgtgtgtgtatgtgtgtgtgtaactgtgttgcaaagtattgcggcatcttttgtaaaaacataaaaggccatctttgctgtctttttagctttgattgaacatacttaaaatattcagaactctttattttctgctcataaatgataaagagaaaaaaactgatccaggaagatgtttgacaattagaaaaatcagaaaacgaatgcaaagaaacagcagcactctagactcttatcatgatggcagaattgattttgataaacctcagactgtgatttttcagatgatgatatacttgaattttctcaaactcaatcactgagtgaaccatattacttctattatcctgttttgctaaaaagaaatgagactaaatttttgtatgtacatcaaaatttacttaatatgatttgtgaatgggcaaatattaaagggcctttgtataaaaaattactgaaagtaaacatatagaaattgtaaaattcactggattgatcactcttataaacatcaatgttaactggtgttttaaaatctaaacaaaaatattttacaattatggagcaatggacactgtactctccaacaaaattatgagccatcagagttttcaaaagtactgcattttgctcac

SEQ ID NO: 37425 - DNA, 1239 bp, Homo sapiens
atgcgcactaatcacctactgcacaaggtggctgttaactttcacattagtcttcttctaaatgctaaaggtcagcatatcaggttctatgtgtacacaaagcaggaaatgttcaatgcctggcattaatttgataataaagaaaaagatattaacattcatttataatttccccttttgtcctctggtatttgcatcctatggtaatacataatttatcaacctatttttctacttgtcctattatatggtacagatgtcttctcatttccttgaaatgtactttgttaatgctatttgccttggcattcagtctttctcactaagtgcttctctatttcacaggaaggcactttaaaaaaaatagttaataataaagtagcatactttgaaaaaaaaatttttgttgttgtttttggtttagttttgtttgagaccgggcctcactctgccatgggtgtagtggtacagtcagctcactgcaacatcctggcagttgtgagcctgggctcagacaatcctcatacctcactctcctgagtaggtaggaccacaggtgtgcatcaccacacctggctaattttttaattttttaaagagacggggtttgccatgtaggcccaggctggtctccaacccctgagcttaagcgatcagcccaccttgggctcccgaagtgctgggattacaggcgtgagccactgcgcccagtcttaaaagaaaaatctgttttctaaatgagagacttgagtttagttctcatgaacataactttttcatactaggtttcagacctggtatcattaaatataattcattacaaagactttttctaatgtcttcaaattctttaagtcaccttcaacaagaaactgtacaagaagcaagctacaaccttacagcaagtggtaaatgtatatttattgctttccccctaccagacagaaactcctttcttgttactaaccagaataggaatcattcacaatcttcaacttgtgcttcaaggatctgatccttctttttactctggcaattctttctcttttaccatcaagtgtaatgtggacctttcttttgattgtgccaacagacttccaatctaactgcatctgttcatataaactatatcaaaataatgctaaagcttttcttcaatcttacagatattgcaatattcatcttaatacttccttaagattcatctaattgcagttgtaagtatcattagtgaatcat

SEQ ID NO: 37426 - DNA, 1053 bp, Homo sapiens
ctgagacgctaagcagaaaatagttcctaaaaggctaaaaaattaactacaaatccagtagtttgatagtgctaggagaaaaaagaatgaatttcaggctttccattgagacccctgaagggctgtgccttcatgataagggcaaaccagaaatagaacagcctttacaagatgtactaaccctataccatccgtaagaacaattctttctggacgcaataacattagtttccatagtttttcatgtacaatgtctaccacttagtcaaactaagtagacactacaggcatcaggattaaatggctaaaagttaagatgaaaaaccagaaagacatacatataatgcagatactgaagacagacaagactttcaagtaattataattaaaatgtttaagaaaataggtaacaagaattttgccagaaactgtatctttaaaaaaatggaaattctaaattgaaaaaaatgtaataaaatgaagtcctgaaaaagtggatttaactgcagaatggaagattagtgaactgaaagatcagaagaaaatatataggttggtacagaggaaaaaggatgaaaaacagaaaacagcatgggaaatagtgcaactttttttttaaccagactccaagaagaaaaaggaatgtggcagaacaactgtttaaattagatactaaacatttaaacagatactaaccaagagttttctaaaactgacaaagaacatcaggtctcagattgatgaagcactacaaacctaaggataattttttttttaatttatagttggtacattttagttttcccactaaaaatataaggaaaaatctcaaagcatccagagaaagttgtgtgagatacattacctctaagagaaaagacaaagatacattacctctaaaacagaaacaatttgaatgacaacgaaaatgttggaaggcagaaaaccatctttaaaatggcaaaataactgccaatcttgaatttaatatccagcaaaacattttcataaataaatgtaaagcaataaataccacagtgagatccagctatg

SEQ ID NO: 37427 - DNA, 1042 bp, Homo sapiens
agttgtaagctcattcaggtttattctgtgagtctcacgctaggatctagttttaagagcatcttcctcatatctagggttggcaaattatatttccaacaaagccactttcacttcttaaccacctttaagttccttcgttagaatataagcagaaatttagctgtatttgtataaaatacaaccatatactccagaaatattagggttcaaagaaagcaaaaaaattttttaagagacagtgtctcagtttgttgcctaggctggcttacagtgtctcgatcttactcactgtaactcaaactcctgtgctaatgcaatcttcctgcctcattctacccagtggctgggactacaggcataagccagaacacctagctaattttttacttttgttatagaggtgggttctccctttgttgcaaaatattttttaaagagtgttttttaaaaaatattatttcttcacacaattacttaatagacgctataagaaggacactgcacatggattaatagctaatctaaagtagacattatatctcgacttggcttagagaatagattcctaaaatatctttccttgtgttgactgacttttattttcagacatggagttcaaccagtgaagaataatgcttgttagcaaaactaactggttaactggcttacctttggattatactgagatgacctataacctttatgcagagaggattttaaatgagcattctcagttggcctcaacatcatagagtatttaaaggtcaatttaaaatggagttttcattcctaataacccttcactgtgtttgtttttgcatttctttcagaaaactttttacatatgaaatctcattccttaaaataagagatgattagatttcaggcgttctgtcactttatcttgaatgcgatcattttctattccagttaataagaaaacatgggctaacataaaagtatactgtagtttgagaaacagtaatcttacctctgcttgttctggagtttctcctgcaaagtaaaagatgtaatgttc

SEQ ID NO: 37428 - DNA, 1027 bp, Homo sapiens
ttttttgaaagaggccaaaataagtttttgaaggaaaattaagtgcccaacagaaccgtttctgctgtgttggtttagtgttgttatttaaagtggaagaataatctttcttatgtttttaacagttggcatggactaagaaagaacattctctttcataaagaagtaacgttttcctgctactgaagcaagtggcagcatggcttaaccccatatgatgtccaaaacagttcagataaaaataaaataaaaagagcaaagtgttagagcaaaatgtgacaattaaaaatccaagaaaattaagcttcacctgacgaaggcgtttattggatgtccctggactacttttccgtaaattgcaaaatgcctgcagacctttcatccaatcctgcaaagaaaaacagcacttcaaagaaatatacactagtttatttggcttccaaatcatcagttaggttttttttttcaaattcaacaattttttccttctctagactgccatttctattctcagactatactgtacttcataacaataaccaataataaaataacaataacataacaataacaataataaaacaaccaaaacaattgtaattctgtataaatctttgtttgaatttatgtatgaaacacatcgagtggccattaattagccaaaaaatcaaatttacattaaagaaactatttctcccaaacagatactaccttggggaaattaactgtataattaagctgttatacttgaggcaagcttaggtggaatttaacttgatacactttgtgagagggggagagtgctgattgtaaaaccaactgataatgtgatgaccgatcccatgacaagcatattaatctatactttagaccatgatacaggtagaaatgtataaggggatttgggttatttttaagcttctcaaatataacattagattttaaaaatcattttagcctaatattcaaatcaaattgcagccatatttttaaaatgtttatctagtgctttggggaaaaggagaga

SEQ ID NO: 37429 - DNA, 1616 bp, Homo sapiens
ggtggaagtatttctgaagccatgaatattttctccacaagctctgaaagtatgttcaataggtgtgttaaattagtgttcacatcttcatttttttctaactttgatggacttaactaaaagaaggaataaatcaatataaatgcatgttggcaatgacaaatgcaaatgaatagaggaaaacaagtagttatagttttcgaggttgtctatttttcggtatctctgtgtgtattgatcttttttctttgtataatgggagtttttaagtagttttctctatggaactcctcctggtaggtctgttaccatttattcccaattagccaactgaaaagcaaacagtgcttagtcaattctatttatttgaggggaaaaaaagctgattaaaagcttttctgaatgaggcttatttaatggctaataaaaatatcaaatgccttaggcagaatcacaaacctttctcagaacttttcctgtaacccttctgatctagtgtcagcagagtacatttatctatggaagtcggaattccgtagcctatctctaaagtccagagactccctacctacctgctgcacttctgtgtcatccttatgttaggccaactatggcattaccccacatttccaacattaaatcactaatttcttcccttcaagttattagtatgaatcgacaccttcgtgcaggattaacatttgctaggtcccagtgtccattgtcaaaaacaattccttaaactgatttttatatcagatctaatatatattatttctttgtagttgctttaccattaaaatgagagaatatgtgtgtgagattccacttactgtcttaatagtgtattatgaatttatactgaaactttaataatcctaaaaagatttttttgttttagttgaggttatctcataattctcccctcgcaaaaaaaccttcaagaacaaaccaagatgtaatgaagtgctacataggttatataatgagtcactaacaaaaccttcaatttatcttatgcacgctttctgtaagtagtatatagattattagtacagtagaggaaatgacaaagtattttcatgaatttctggtgcaacttgatggtttttaatcccaaaataaagtacatcttttttaagaagtccattttgcagaacatttttataaatgtattacagacaggtgtaactgctatgaggaataattttagaaatttaatatattttccttaaaatgtaattggctacaaattattacctattaaaatatgttctttgcaaaaatacttattaaaacattaaattcttacctcacaagactgcttgctttccattatctttaaaatagagtctttcaaagcatgatgaacaaactgtgtagcagtggctttcatatactgctccatcaaggtgcttgcaagtgttgtggctcgaaatagggtagtggcttcatctacacaaatatttacattagaagattatttgtaaaggactgacctaatgtgaccaaattggaaattaagtgaattcattttacctcaacaggaatagccacttaaatgtgctttttgcgtgcagcgttgaaagtactaattacaatgacatcctatactt

SEQ ID NO: 37430 - DNA, 1910 bp, Homo sapiens
aaacatcattgttaatgaaggctggcgaaagcctacctgctgtgcaccacgctcattactgagcgttcgaagttcatctgaatgagccacgcaaatctcatgcaatgctgctaaatcacgggacaggtccgttctagaatgctctgtagtgtccggaagttcaggtacattctttaagggaatcgtaaaattgcatttagaaatacaaatcttctttttttttgttttttttgagacagagtttcgctcttgttgcccaggctgaaatgcaatggcatgatctcggctcactgcaacctccgcctcccgggttcaagcgattctcctgcctcagcctcccaagtagctgggattacaggcacctgccaccatgcccagctaattttttgttacaaatacaaatctttctctgtagtctcatgtgaaaagattctaattgggtatattagataatttttttaatactcaaatttctcttaaaattctaaagattcttattgaaatataatattcagtattaatgatggtaaaatatagactttgtaacctttgtattcacatgaaagccagattccatttttttccgtagcatgacagatgtgtacaatattattgctattctaaaaataaggggtggggggtgtggcttcctaacaattagctttgtatctgaaaaaatctagaacatatgccaaatagtgtaggttaactgctaatctggattaaatgcagcctaaacttaaaattcctagatgaaatttcattattaagctcctgtagtttgtctaagttgataatgcatataagtaggaactgcactatgaaaatgcaatgagaacctgtcaggtttgcaattatctgtggactatgctcagaatacttgctaatgtgtgggaataatcagtgttaattatggtactttcagataaggttcataaagtaacttagtcactataatgaaagtttatagtataggttgaatatcacccaaaatgcttgagaccagaagtgtttcggattttggaatatttgcagtatacttgccagttgagcatccccaatccaaaaatccaaaattggagattttccaaatagcatttcctgttggtgctcaacaagttttggattttttagcatttcagatttcagattagggatactcaacctgtactttattatcgacactaaatgccagtgttattttaagccttggaataacatttaacaagggcttggattaccagtaaaatggtgacagtatttgctttacattgctaaaaactgcaaaacaatgttatctatgggacagagaaacacagttactcagaatacattcagtgattaaaggtttatagcgatgaaagactccatatttgccttcagagaactgactccagtagaaaggactttagaataaagtaatcatagcaacacagaattatatatcacagatacacaggggatgcttaggaggtaaaacaaaagttattttattcatgtttggggttcagcaaaagcttcctgaaggagataataattgaggtgggtcttcaaaaataaatttggcttattatacaggtggtgaagaaatatggtagtattatatttggattctaagcagtatgaaatcttagattgtgtggcataacttctcacacagttccttaaacattatagtaaaaatattttccaatgattgaccaactatatcccagttcacatatagaagcatgatggacttttagcatttttgtccatttcactataaatttcactataaatatggagctatgccataatttttcatacactagtttttatacctgaggttgcaaactagtgactcaacggcattcctgatttgtttgccacaaattgtggtggtctttttaactgaatctgaatacatt

SEQ ID NO: 37431 - DNA, 1032 bp, Homo sapiens
gttaagatttattctccaagagtacaggcattatagagttgtgggttttttcattttttgcatacttccttacgtacagtactgttgtccattattaaagggatttttctctcttctgtctttatttaatgaagaatccttcctgtgttcatagaaagcagaagcaatatgtatacatactacatttttgctttttttcttattctccaaggatttttcccttacccccttttaaaaaaaattttctatctgtcaagtcaaataagtgaataatcagaggcaaaaggtcacagccataacctttattcctcactggaggagtctggtgagaccatgccaacattactaacagtgaactattacaaaatttcctggtttatcttttgtaatccacatgggtaaaaggaggagaacattttcttaaagggaggtaagaggtaaacaatactggttatgcttcagtgttatccttaccacactttttttccttcttaggaagaatggactgatgacgacctggtagaatctctctaaccatttgaagttgatttctcaatgctaactaatcaagagaagtaggaagcatatcaaacgtttaactttatttaaaaagtataatgtgaaaacataaaatatattaaaacttttctattgttttctttccctttcacagtaactttatgtaaaataaaccatcttcaaaagagctagaatagcacctgttttgaatattcttattccatcgtgactaatatcaaattaaagctgcaactcatttgcctaattttttaagcaaaatatgataggcaaacctatgctttttttaaaaaaggcaccacaaaaaacaaaacttagtagccagctttaaaagtgttaaggaatgtgttttgccctctagaaacctttataaatggctttttgaatgccatcctgatatatttagctatttgtccattactattaaactgcagaaggtatttcaactgttacatggtactgaaagccagtcgtctgggtaatgaatattatttt

SEQ ID NO: 37432 - DNA, 1025 bp, Homo sapiens
tttaaaaaaaaatcactagatgtatacttttgtaaaattcaataaaaaatgaattactagaaaagtgaagacaaaaacataagctcaagttttattagattcagcagtcataaaattattatatcaaattgctattaaaaatttctagggccgggcacagtggctcatgcctgtaatctcagcagtttgggaggctaaggcgggcggatcacctgaggtcgggagttcgagaccagcctggccaacatggcgaaaccccgtctctactaaaaatacaataatcagctggacgtggtggtgggtgcctgtaatcccagctacttgtaagactgaggcagggagaactgcttgaaccctggaggggtcacagtgagccaagatcacgccattgcactccagcctgggcaacagagcaagactctgtctcaaaaaaaaaaacaaaaaaaaaattatgaaacacaattcctgtacttaactcactgcaaactggaaactgttcatggaccagctctggtacttgctaccatgagtagtgctactttaggactaaatatttgttttccttgatcttcaaaattattttacctttagttttcatgacacaaaaactgttttgtcattgtcagtcaatacaagtgaaaccaaagttccctttgatcaaaacccaaatctgtcatgacctcagaagttacttagcagttgtttacctttgccagccttttctctgcacgtatatccatatatttatgaaataagcagcgtttttttcttctttgcatttttcatacatattgtacaatgggtgattatcaatgcttagcttttgctagtctgggtgaaaaagtatcacattggtattttaatttgcattttcttgattatgggacattgaactttccatacttaacagtcacttatatttcatctgtattgcttatttatcccctttgcccaattttctggcttttttgtttgtttgtttgtttttgagatggagtcttgctgtgtcacccaggcttgagtgc

SEQ ID NO: 37433 - DNA, 1027 bp, Homo sapiens
aataatacactctttgtatatttgggtactcttatgttgggtgcatatatatttttaattttatattttcttgctgaattgatctttttgtcattatgtaatgatcttcatccctttttatgtttctttgtttataatatattttatctggtataaatatatctttttctgtgtgcctttggcatctgtttgtgaggaatattttattccattccttcactttcaatcttatgtggtctttatggtaaacagagtttcttataggaagcatatagttgggtcttgtttattttttaactcatgcagccagtctatatcttttaattggagactataactgctttacattcaaggttggtaataataagtaaggacctactcctgtcattttgtgaattgttttctagttggtttgtgtatcctgtgcttctttattcctctctttttgtttatctttgtagtttattggttttctgtagtgatatgtttgattcctttctctttctcgtacgtttatctgttgtgccagtgagtcttattcttttaggtgtttttataatggcaaatattcagtttttgcttctagatgtaggtttcctttaagcatttctggtagggctggtctaatgataataaatttcctgtttttgcttgtctgggaatgacttctttttcttcattcctttaagatggttctgctgggtataacattcttgtctgacatttttgtttggtttggtttccacactttgaatatattttcccatctcttttggcctgtaagatttctgctgagaaatctgctcttattctgatggagattcccttatatatcacttgatgcttttcccttgctatttttagaattctgtctttgtctttgacttttcagttttactataatgtgccttggagagggacttttggattgaatatattttggtatctttcaacttcttgtacctggatgtccgtatctctttcaatacttgggaggtttcagtgattacttcattaaatagatttt

SEQ ID NO: 37434 - DNA, 1024 bp, Homo sapiens
ctacaagggtaatatttctgattaccctggtttacagaaacctccagcagtctttgaaacatctcacatgactctagttattgattgcttttaatggttttatggtactgttgatagtcatagtggctgcctatagaacaatcttcaaactgagccatgctttaggggagggaaaggggctaaagtctcttctgttggtaatttattagttactcttgaaacaataaaatccaacagaaaggaagagatagctactgtatattacagtaaagaaagctgcatagttattttaaatttaatggagatgaatatggttaaaatatataactactgctgcttgagaatagcaagagtattgttttaaaacatattccacccaacttgagagttcttttaaaatgattggccatatgaacatttgtaatcttgccattaggtttggacctgccatattttgttttattctgtgatcctaactagttccttttaataggctaaaatatttatcaatactgatcagactttaaagaaattactttgtaaacctgctgactacctgtatgtattgtatatatattatatattaaatatataatatattgagattataaaagatgaaaatattgaatccttataatattttaagttgcagaatgtatgttaaaaagtgacttgaatgagatgtatttgtatctagaaattttatttctttttggaatgagattaaaatacattttgaaagttcagcagagtaagcaatttatttgtgttgcctatgtgtgagtgtatttaaagttttatggacgcttaatggtttctcccaaattaaaattctttttctgtcatttccaaaaatcagaatctttccctctcaaatcaggtctacaggtatcatgtatgcctttgttaaataggacttgttttaaatttgtagtttctagaattagaaatatttttgttttactggccaaaacggataatttgaatgaaacattcaagggaaatgaaaaaaagtaaaactctt

SEQ ID NO: 37435 - DNA, 1047 bp, Homo sapiens
gtatttcacatttgtgataagagtaatctgttgtttttttttttttcccccacagggtttacaaatttttcagacagtgcgatgcagtttcttgaaaagcaaggtttagaatctcagtaagtttttgaaaaattaagcattatttaaatttaaccttttctatttttaataaagcagtatttactataaatagctgttttaaattagtaaagagttttaagttggactgtcacttctagaaacatccttactcataatttttatgactatataaagttagtgtcttttatagaattcttatgtaaatttgcatttcttaaattcctctccctcaagagattaaatttatatccaagttatatgtcaattccctgttgaatgtgtaggttaggttgctgtgactatgactaaagagatgcctcatttagtttacagttcaccagaatccattataggtacttgaataatagcaatctttttgtagaaatttgctttgttttactgttattgttatttgtaagataattgattagaagaaaagaaattcttcaaaagctaattataaaaatttatcagctttttaaaaaattttatttttaggagtcctgtttcaaaacttactttcaaatttttcctggctattttctgttcattcattggggcttttttgacatttcctggattacgactggctcaaatgcatctggatgccctgaatttggcaacagaaaaaattacacagtaagcggaaaatgtacataagcacatgcagataaatatatgttttccatcttaatgaaggtataatattgtaatgtaatcataaattattgtattgaaaattaataaccatttgatgtcacactacttcctctttcaactataagcaagtttcttttatttgcttctaaattttaagtcttgtatttaaaaagatacatcatcgattactaaatttgtcttacctgttaaaatgaaaatctcaaaatttatgttatttctaattcaggggcttatactgcaatctctacaactaaactgaggatc

SEQ ID NO: 37436 - DNA, 1033 bp, Homo sapiens
ggattacaggcatgagtctttgtgccctgccagtattgcttattattgaatattcttttcctcactttcttcatggtttacacatatgtgggaatacatatacttgatatgcagttttattttaatgtgattgagcccttgatacatatgtaccagagaaattagaaaaatatactttttaatagctattcatattgtttatgtgagtaaattttatctttcattttactctataatgcctaataatgtgggagcaaaggtcccacacagcctttagcactgaactgactttgcttcgttttaagtaatccattcctgaaaggcatcaaacagtaacatctctgcaggaatcctgtagctcgctggctgtctccctatcccagagaggacagaaagttctgaagagcttacaggccaagctactttctgccagctttgattctccaaaaagagggtggggaagaaggcagtaaaattgtgtgtatgcttgagtatgtgattttttttttgttcaaacctgtagcatgtgataaagttacctaccacctttaaaggcatataggagaccagaattaaattccagatatccagtttaacaccagagagaaataagtttacatcctatcttttatctttagttataacataacctgtttttcctttcataccctatgattggaatatagcagaagtaacccctgtctggcttctctttgttttcttattgtatgtgcctacttagtagtcaaacacgtgtctgcattgattacacaggacaatagctttgcttgattccatagtcatacatacctcagttaattcagaaattctctgcagttgttactgatgaaatgttccttgttaaaatggtccccaaattagacacataaaactttaaaaatcagttcacttaaaaggaagcaaagtatttaacttccatggtcattttgttgtctttcccccctcactgatatgtgacatacataagacagcaaattatgctttctacagaatcttaaaagttctaaaagca

SEQ ID NO: 37437 - DNA, 1750 bp, Homo sapiens
tagaaaacctaaagcagggctgggggcagtggctcatgtctgtaatcccacctcttttggaggctgaggcaggaggatggcttgagcccaggagtttgagaccagcctgggcaatatagtgaaaccacgtctgtacaaaaaattaaaaaattacccgagtgtggtggtgtgcatctgtagtcccagttactaggaaagctgaggtgggaagattgtttgagcccgagaagctgaggctgcagtgagctatgatcacaccactgcactctcagaaaacctaaagcagttaacctaaaagttaaagtacgttgaagcagattaagaatgttaaaataacttgatgcaaatttaaaaattaatcataataggattttggaaaaatgttatgatcatcttatagaaatggtacaaaatttggttagtttgttttgatactacttttaataggtcttactgtatgtgatattttcaaaatactttttctataaggatatcgtatcttcaagtgtaattgcattatatttcatgactaaaaattgtccaaagcaatgcagatcattttattatgtgccataagaacatctgaattgatggttatgtacatgatttacttccacatttttaggaggccttctaaaaaatgatgttgatgttttggactacactctggtagaagtaaaccagaatacctatgccacctgagatgcaaagggtgatggaattatatttactttcaaagaatgttaatttcaatgtaaactcttaagaatggaatagtttgttgaaggggtatggttttatagaaaatcaacagacattttataaacttttttgcagaacaaaatagggtataagaggtatatttagtttattattttatttttcttgagatggagtctctctctgtcactcaggttggagtgccatggtgtgaactcagctcactgcaacctctgcctcccaggttcaagctattctcctgcctcggcctcccaagtagctgggactacaggcacctgccacaatgcccggctaatttttgtacttttagtagaagcgggatagtcttgaactcctgacctcaggtgatccgccaaccttggcctcccaaagtgctgggattacaggcgtgagccaccgcgtctgttcttgtttattattttaatctgtagtatctcacagaattactagtttacaattagtacagccaataattgtaacataaagttaaactcttacttcacaaaagtgaacagtataactaaattgttgtgttccagactaagttgttttctgaagttaaggtatcatagctagatatttaaaagaaaatatttactaataatttctgtaaaaagtagctaatcagttaagacaataccagtaaatttgcaatcatactttaccaacaacttaaataacttttggtaatcttttaacgtttattttaatttgtgaggtattaaaatttagtttgggatgctaacatcctcagtctatttcttgcatttttagattcatatatttgtaaatcttacattgcaaatgaacaaataaagtctagcgtattttaattataaataaatcctcataagttatttatgaaaatgtaagtgaaactgttttttttgaccttttttttttttttttttttttttctttccagcattgcattactttccagaataccagtggctggtggatttcacagtggctgctacagttgtgtatctagtaactgaagtctact

SEQ ID NO: 37438 - DNA, 1029 bp, Homo sapiens
aaggcaacagtctgccttattgtttcggctgtcatactgtaaacaaatctcctttttatgatctgtttagggccacatttttttacaattttgcttttcgttggtgatcttgctgtttaaaatggcccccaagcatagtgctgaaggtagtgtctagtattcgtaagcacaagaaggctgctttatggaaaaaaattgctggaatgacacacagaactaaaaaaaaatgctatacttaatgattactggtattaggtaagctttgctcagggatgagttatgcttttggctgtgaattcaatgttagtgaatcaatgatatatattaaataagatatctttaaacagaaacacacataaaagaagcttgggtattgatcagtttatgaaaatgttatgaccagaggctcgcaggaacctaaccctgtatttcccctaggagcaatggttcagtgtttgtggcaactttataaaacctaactaccgcgaataacgagaatcaattctgtaagttaaaattctggacttcagtataaattcaggaagtgcctccttacctgtttattgtaatttagggacttttaggttgggatatatatattttttatcgtaaattcattaggcaaagaactgaattccgtttggttcagttactgtttttgagcacttgctctatgccagtaactgtactaactttgaagtatacaaaaagcaagaaagccataaaatcttttctccaagaatctttcacttagggtaacattccattttaatccaacttatctgaaaccaactgagtatactgcacttgtattctgacagtaattacctggagttagtacagaccccacaggttaaaggcgaagttctccgtaagattgtcaccacttcagataccagtttcaagttttcagagtacccaggccacctgcacttctcacttattaataggctacaaatttgaggattcccatgatcccctcagatccagtaatctgctagaatgattcatagtacttaggaaactgct

SEQ ID NO: 37439 - DNA, 1058 bp, Homo sapiens
cagcatttttaagttcttgatttcttcctgatctcttccatatcagaaaaggtaccatcatcttcaaatcagaaatgtagatattatcctttattgcttacttttgttcactctctacctttagtccatcagcaagacctgttgattcactgcccttgtctccctctaattcacagaacaaccaaagggatcttaaaatgtgaatcaaattatttatctacattgctttgagaccattatttagcataaaatctgaagtccatactatgacctattagcctttgcatgatctgttcccttcttacctcttcagtcccctcttatgtttctccttgaagctcttgcctcattgccttttagttactgtaatgtcctatgttctttcatgcctctgtgcttttggatttggtgttctctgcctgaaatgctcttcttctgttttctcattctttaggttgctggttaaatgtctcagagaagtttttcctcacctaatatctaaggctgtctctcacattttcaccacttgtttcattctttcatgtggtatgacaatttatttttcactatttaattggttaaattttaccccaactggaatataaccatcaaaaaggcaaaggctttggctttaattggttgtgattatatctcctctgcctagcagagtatctgaatacagaaggttctccctaagtgactgataaatgaatgaatgggtaggtgaataacagactagaagtgaccctaaaagtatcgagcatccttagattccaactttgaacaataattctcactaataaagataaccctgagttatcccataggaaatgtaataaatctaagccattttagagaaatgagtttacaaaataagatttaacaaatatgagtatatttaaaaagaaaatgtgtcttaaggccaggcgcggtggctcacgcctgtaatcgcagcactttgggaagccaaggcgggcagatcatgaggtcaggaggtggagaccatcctggctaacacggtgaaaccccatttctactaaaaaatacaaaaaattagc

SEQ ID NO: 37440 - DNA, 1050 bp, Homo sapiens
attattgattttatccttttggcataattattattttatgagccttttgtaatatataataattctgttttaatagaaaaaaacctaaaattataaattgcctatgtaaaaatattactgatcagaaatgacagtttgcattttaaatcatatgatgcagttgggttgaagagagaaatccgagggcattctttagggtctataaagtgcttaaaggaatttaaggagaggatcatgaatttttttttacaactatgaatagtgtaggatggcttgggagtgactatattgaatagaactatttaaaagaactattcaagtaaatagatgtgtagataacatgagagattaatcatgagtatgacagaagaaatttgtttctgtgtatatcatgttaatattcatttattccattggtatcctaaattgtaaataaatgttcttttttttttgttatggcttctcttttggtgtcaattaatctgtcctgtctctcattgacctctttccctttgaaatggagagtttgaagttgcagccgattgtagtgcagttcgccctccatatttctggattcagccaatcatggatcaaaaatactcagaaaaaaaatacaagtttaagttaaaaacatacactataaaagctatatagcatctgtgttgtattaggtattatgagaaacctagagattatttaatatataaaggagaatgtgcgtagtttttatgcaaataaaaacttttgtataaggagttttagcatctttggattttggtattctggaaggggtgttgggggcattggatggtcccccacctacccccagtttccctcagatacctggggacaattgtatgtcgacttaatgagtaagccattttcctgaaagagttaataccttgacaaaataagcaattatacttgaaggaataagcagcttttacttacaaattagtttgttgatttttaatattaaaaaattgactaattttgtagctcttgttaaataacacatattgctattagtattttttttagactgttctt

SEQ ID NO: 37441 - DNA, 1098 bp, Homo sapiens
taataattctggggagtagggatgcttcctctactccttctctggaaatacctcttgcttatatggtaaaaacctggaaaattacgatctgagttttaaaaaaagtttttgggttgagttgccattggaactacgtgcaagattgaaagaaaaaaagattttagaaatcttgtattccaaacaattgaaaagaggttaaataacagtgtcatgactagccttgagaatccccttgtgcagttagaaatgctttgcaagctcaaaaatgactgtgctaggctccttctgggaagagtaatggtgactgcccagcactgaagctcagtagctaaggcttttaccttttgtgatgatggcctggattcaatacctggcttagggactgagtcctttctggtttgacatttatgagacattttgcctcttattgacccttttccctcccatggacagctttccatttcctgctttctttctgtggagggcatacagggctttgaggcctttgtatgtagatggttagctgggaaactgagactctggagaatgtggccagacctaaatgtgagttgtacccagtttgcgtggcaaaactttcctttctttgtgctacttttgccatttgtaaaaccactttccatttctttggaaatacctaatgtgtcagtggttaagtcataatcttagttaaggcttactggggaaaaaaaagaaggcttaaaagccagaggtgtcatctgtttgtcctggctagagtgtggtaaacagagatttaaaaggatttccttaaaagagctctatggttaaaagtcaggttaattaaaagctggtaggtaagctatacatatatttaaaaggcctttataagcttttttgtcttcttggatcttgtttttttgaggaaaagttgtttttttttttttttttctcagtcgactgaattgtttctccatttgcttctgtctgtcctcttactacccatgatgcccacatgagataacctaaggcaatttctagcagcctgggtctccctgggaaaaacagaggtaccacaattttggaagaaatctctgttttcctcatggaaccgcaagaatt

SEQ ID NO: 37442 - DNA, 1061 bp, Homo sapiens
ataggcccccattttttacttccagtccagtttactgtgtctgtaagcgctgcaggtatgttagaaaaccagtgaaggccacagtagtgggataccagagatgctctatgggaaggaagtctgctggtctcttcatgattgttttgtgctgcttttatcagctttggcattatatgggagaatttctcttctggattagacagtcctcagacctaccaaagaacctattggaaataaccatcttcaaaaacccagtttgggtccatcagttccacatacatagtttcatcacacttttcttctcaagtttctagacctcttagtcacattgccagagtggtaattctggtttttatcttatgacatgacatttttttcctcctttgaagaccctgatcttggtgtggttattcttcaaatttttctttcaaaccttgtccattttggtgctttctttggttcttttgattacccacttaatcatcctggattttcctattcttgtaacctgtataatgtcccatgatgatcaatcttttttttttttttcccttaaaattttttttacagttacagagggtctcactttgtcaggccggagtacagtggtgcactcatggctcactgcagtctcaacctactgggctaaagtgattctctcacctcagccttctgaatagctgggattacaagcacatgccaccatactcagctaatttttttgtttttacttttggtagaagggtgtctcgctatgttgcccaggctggtcttgaacttcttgcctcaagtaatcctcctgccttggcctcccaaagtgttgagattatggacatgagccaccacatcctgctaaatcaatcatttttctgatgtttttacctaatatgctgaatcatgcagatttgcaggtgcttggcaatcattcaatcaattctatgttcctcttttgtcaaaattttcacaaattttagctgtcccttcttcctctcctttcttttacagctcaactccttaccccattgtggttcttaggagatgatctgagaattttgaatttt

SEQ ID NO: 37443 - DNA, 1046 bp, Homo sapiens
tagcatattggattaaaaaagaagtggatatggtccttcgatagaatgtgaagtgtttttttaaaaatcagccaagaactatgcctgtctttttttcacacctgtgattctttcagcaagttagaaggatagcaagagaatgtgcatccttccccaaaccccgaagacaggcagctttggcttaaatatgcttatttattttcaaaattagaaaataaacacattaatgtaaatatgttgagacagacaaagaaatttgtctgctacttaataaacacgcgatttatactttttgtcttctaattaattgtcgaccctgaataaggtggtacaactaaggcatattatggaaaactggcattattgcttaatgtaacatgagggattggaatttctttaaagtaattttaagatatgattatttagcagaaatattcactggagcattttacttttagaaattatcgtcacacaaggaagcctttataggaccgactacctaattgcagtcaaagatctcttgaatgaatgaacacacacacacagaagaacacacattttaagaatatagtggtcctatatttttaaaaatttttgccacattttttatatctgaacagaacgtatgtgtctaagcagatgttttaagttatatccttcatgtaggtgagtctgtaaatgtaccatttaacttaaatggctttgtgggaaggtagtttgaggagtttaaaaaggaaaaaaaaaaaaaaaaaaaactccagttactacagtttcagctctttctttttaaaaaacagtaattacactcaggataaagaaagaaaaataaactcttttaattctttgtaacatccacagtttttcaggtagagttctggtatatttttattcctgaatatgcagggcaggtactggcagcagagctacaaaatgaaaacttcctggctgcagaccagatactgtgcacagtgccacatcataaacttcccctcttctgtctcggagtgatttcagccctaactaatgtcctttatttccccctacat

SEQ ID NO: 37444 - DNA, 1051 bp, Homo sapiens
agtatacctttgtgcatttccttccctcaccaaagtgccggcttgacagagggcttcttaattggtgtggacaaaaagtaatatccctgccatagtagtctacacatttcacaattcacgttcgatttcagcatatggattgctgttcaggtcaagtcaaatacatagctgtttaaaagcaagcaaggttaagtcacttaaattgccttctctttggacttggaatgaaagttaccaaactcgatgataaagtttgtcacaaaggaagtatatatagatgtggcacattgtttattttattattaaatattgtggaagtatttaaatttaatgctaatgttaccttccttccctgaacatggctattgctttttaaaggaaattttatatctgaatcacttctgactattctaagtccagtagttatcattctttggggagagcctttttttgtcacattttaggaatgcgtgtcttttgtataaaatactttatatgtaaatgctgacagtagactaagtagaattgggctctctgccagttccttaaccggtcctcagtggagaattgctttgacacaaagtgcgttttactattgtgaatctgaaactaactctaatagtaactgtcttatgaaatgcttggggactgcatataatttctaagtgctataaaggaaactccagccacctcattataccagtccaaaaaaaaaaaaagcgactagcctactttcactggcaccttgcaatggaattgtggttgcagagtaaagatgtttatgtggagtataataactccaatccctagagacttggtaggacatggaaatgtgaccacctgtgaaccccgtttaacctcgtattgcataccaattttagctttaaatagatcaacaatctctaatttgaaactaaaacatcttatttaattttaaaaaatgtcagttttggctagtctttaaaaacattcagcatgtaccaatatggtataagcagtatttttgtttctccatcagtttcaactaaagataatgcagttaaaaagccat

SEQ ID NO: 37445 - DNA, 1063 bp, Homo sapiens
attggtaccatttcttctttgaacatctgatagaattcagctatgaatccatccggtcctggactttttttgttggcaattttattattactgtttcaatcttgctacttgttactggtctgttcaaagttgctgtttcttcttggtttaatctacgatggttgggtatttccaaaaatttatccttcttctctaggttttccagtctgtgtagataaaggtgttcatagtagccttaaatgatgttttgtatttctgtggtattggttgtaatattagtatatcctgttccatttttaattgagcttatttggatcttctctcttcttttcttggttaatctcactaaaagtatacaaattttgtttatctttacaaaaaaccaaatttttgttttatttatcttttgtgttttttttgtttcaattttatttagttctgatctgatcttggttatttcttttcttctgctgggtttggatttggtttgtccttgtttctctagttccatggggtgtgatctcggactgtctatgctctttcagactttttgatgtaggcattaaatgcttaactttccttttagcattgcttttgcagtatcccagaagttttgataggttgtgtcactattggtattcagttcaaagaatttttaaatttccattgtgatgtccttgtggagccaaaaagcattcaggagcagattatttaatttccatgtatttctatagttttcagcgttctttttggagttaatttccaatttcattccattgtggtctgagagagtacttaatattttttattaagtactcttatttttatttttattttcttaaattttttataatttttattttcttaaatttattgagacatattttgtggccaattatacgatctattttggagaatgttccatgcactgatgaaaagaatgtatatcctgcagttgttgggtagaatgttctgtaaatcagtccatttgttctaaggtatggtttaagtccattgtttctttgttgactttctgccttcgagacctgtctagtgctgttag

SEQ ID NO: 37446 - DNA, 1027 bp, Homo sapiens
gtagaataaagattataaagagggttgtttaaagaaccttgaaatgtcaagcatttaaaatgttttagcaagtatgtacaaatatgactgtgattgacttttttggtaacattatcttttccccagttaatattatagaatactaatttgtaatgtttatcacattatatgtatttttgcatccaagaagttacatttaataaacatgttccacttcctaacaaagaagtaaaagcaaaaagccatgtcttaatgtaataattttgcataatgtaaaattttttaaatacttagtgtaaaatggtagtcgtggattctgaaaaaataaaatgtttatatttctgactatttcattttctttcttaccacagtaaaccaagaggagttcattgctattatgactggtgacatttaaagaattacaaggataaacactaagaatgttgcagttaccatcttatattctatttttgtgcctggagccatgtgaaaaaaaccaacttagttcttttatcctaaaggaccaaaaataagcatcttatatatctgtattttactactgttaagtttctttgtatgaactgtgttgttagtactcagatagtttagctttgtatttataatagagcttttatataaagttttaaaaattgaatgtgtgatatgtgttctttgaaggttttttaatttaacatttatagtcactttttagtgcacacattttccagactttcgttaataaaatatttattttattagaattttaaagtttggtaaatttgtttttattcctagtatctgttaaccctcaagagtggatttcttaaatcttccctttataattttactagtttctgaaacaaaaattgaaatacaattagcaatagagtggcacatttttccattacctaacatttcatcaattttgacattctatattttaatacaagctgactcaatataagcctaattccttttttaagagtcctgtctttgagtttagaaggaataagtattgtgcagatag

SEQ ID NO: 37447 - DNA, 2139 bp, Homo sapiens
atgcctggctaatttttgtatttttagtagagatggggtttcacctgttggccacactggtcttgaactcctgacctcaggtgatctacctgcctcggcctcccaaagtgctgggattacaggcatgagccaccacgtctggctgacttcaattacatttttgctgatagtccataaatctgtgtctctagccgagatcgttcttgagtttcagacatatatctacaactctgtcctgaacatcttccacttctgtatctcaagcagctccaagtcagcatatctaaaatctgcatttagcctctttttaccctccacagtgttccatttctcaatgaatgccatcgtccatcaagttgaccaaaccagaaatctaagcttcatactagacccactttatctctctgacatgaatcaggtgatacatgattaggttttaaagtattgatggaaatgaatgggactaatagatggtgggagagcctggcataccaattggtaatctgccagacactcccctcttcccccaacacagtggaataggatatacagacaggttatctcacagtggatgggataatacaaacaggttgaggaatgtataatatatagagaaaaagcttataaaagtgattaatcttgaaagtagttgaataatgcatttacactgagaagtttgggagggaaatggcttcagaaataagggggataaattaccaattttttaaattctaaggtatatatgcttttccacacattttagcatctttttttggaatggtggcatcttcaatttttggtgaagttttttttttccctagatatacataaaataatactgcatcttagagttatggcatcttagttttgataaaatatggtagttttagttgggtagcatttgtctatattccagtttccaaactggaataaagaacataactacccataatccttccttcacaaattgtttacaagcagaaggactgtggtatttatgcatgatgcacaaagggaagcagcaaaggattctagaatctacttaaatagcattaattagtgttactaacatatatgggtgatagtaaaaagtagttggtgatttcctaagattggtacatctaaagtggtgtagaattctcatctacaaataaaattaaaatttctctgggtgcaacttaatactactaataattcaactttttttttcctccaaaagtaactagaatgaatgactattgctgcctttattttgattggaattcagttgtatgttgcttttttttcccccccacaggtagcagatatcaagagagttaacaatctcatcagtgatcaagacttttttgcccttaggtctatcaaaattccagtaaaaaagttcagttccttgaccgaaacactttgtcctccaaaaggaagacagacttcacgtcattcatctgttcaatactcttccgaacaacaggaaattttgccagctaatgattctcttgcttacagtgactcagctggtagctttttaaaagaagtagaccgagacatagaacaaatagtaaagtgtacagacaataagagagagaacctcaatgaggtagtatcggccttaacagcacaacaaatgcgttttgaacctgataacaaaaacactcaacgtaaagacccctattatggagcagactggggaatagggtggtggacagctgtagtgataatgttgatagtaggtataataacaccagtgttttatttgttgtattatgaaattttagctaaggtggatgttagtcatcattcaacagtggactcttcacatttacattcaaaaatcacacccccatcacagcagagagaaatggaaaatggaattgtgccaactaaaggaatacatttcagccaacaagatgatcataaactgtatagtcaagattctcagtcacctgctgctcaacaggaaacatagcaattagctcataatcaaatgttagtggtcacatgtgcatctggaatgtggtgaatcagttatatccaataatagcttcaaaggcagaatttagagagattgaggatgcttttgtttttaacaaaagggtttcacactttgaaaattttttgagcaactagttgttgatgttgaga

SEQ ID NO: 37448 - DNA, 1029 bp, Homo sapiens
tttgggaggctgaagtgggcagatcacctgaggtcaagagttcgagaccagcctggccaacatggtgaaaccctgtctctactaaaaatacaaaaattagctgggcgtagtggtgggcgcctgtaatcccagctactcgggagactgaaacaggagaatcacttaaacctgggaggcaaaggttgcagtgagctgagatcgcactactgcactccagcctgggtgacagagtgagactccatctcaaaacaaaacaaaacaaaacaaaaaaacgaacttaaacctaaatgtttaaataactaaaaccattaaaacaaaaacaaaagattgtgtcctgaatgtacgatgcatgcaaatcagtcagttggatcagctacattccaaaattttctctgctttttttttcctccagattttaacattatggcagggaggcatcagaatcgtagttttcctcttccaggagttcagtcaagtggtcaagtacatgcatttggaaattgttcagacagtgatattttggaggaggatgctgaagtgtatgaacttcgatccagaggaaaagagaaagtccgaagaagtacatcaagagatagacttgacgacattatagtattaacaaaagatatacaagaaggagatacattaaatgcaatagcccttcagtactgttgtacggtaagttttaatattacataatgcaattcagaagaaattatttgtttacgcacactgaaataaattctgtgtccttttttaccttgtttattcctttctccattttttgctcttattttttgcatagaaatctgtgtcacatgggctgggcgcggtggctcacgcctgtaatcccagcactttgggaggccgaggcgggtggatcacgaggtcaggagcttgagaccatcctagctaacacagtgaaaccccgtctctactaaaaatacaaaaaaattagccgggcgtgttggcaggcgcctgtagtcccagctactctggaggctgaggcaggagaatggcatgaacctg

SEQ ID NO: 37449 - DNA, 1033 bp, Homo sapiens
ctgtagtgaacatggtaatgtttttgtttttgtgaacttgtgctgctatttctgtaagatagattcctagaagtagtactgctaggtatttgattaataataatgaggaactcataggttgggaaggattctgagagtgctcagtttatccaacacacccaggaaggtttttttcttgctatgacattgaatagtccagagagtgaaactccatattctttttcagtaatgctttcagtgacttgaaatcaaaattgattataaaagaaatggtagcaattatgatgctgtggccaagagagttggaagtgaaagtgaaaggctgaatcctaacataatactgtggtgagcctggtggacaaaccagtcaggtaacacagataaggggtcagcaaattatgggagcctcagatatttggatgaatttacattcatatagtagggaggtttttatttatttatttatttatttatttatttatttttatgagacggcgtctcgctcttttgccaggctggactgcagcggtgcaatcttggcttactgcaacttctgcctcctgggttcaagcgattctctgcctcagcctcccaagtagctgagactacaggcgcatgccaccacacccagctaatttttgtatttttagtagaggcggggtttcaccatgttgtccaggatggtttcaatctcctgaccttgtgatctgcccaccttggcctcccaaagtgctgggattacaggtgggaagtttattcttttatactttatggagaatagctatgagagattagttcactctgggtgtccaaaactgcaaacctcaagctggtcctcggcaagctggccccctttaggcctcggctgtcagtcaccaggaagtaggtgacctattgagagtctggccagactttaagggacctgaaatctgcttctgccacctattccacagtgcatcaggcctaaagaatagttggctatcctttacctggattgctttgcttgtgtcccaaggctgtttcccttgcagag

SEQ ID NO: 37450 - DNA, 1076 bp, Homo sapiens
gttccccgtcaggcagcgttgcaaagcaatcaatcttgctctcactctcacttggcggaagtgccacgacacgaagagtgcagtgcttcgctcttgccatgaagcctgggtgacaaaagtttttacaagaagctgactgtatttggggttatgaatatgcaataactctcattagtattgaagcaccagagcaggggctgacatcccccgccactttgagttgctgcagaatcgactaatgaattgtctcactccctcactcacacagtctgctattgtggctcctaagttccaaggggagttgcccattttgagaagaccattgactgcaaaaattaattgtcgaggactactcttgatttcatgaaacaatgtttagacagtgcttagattgtcaaaacagaaaagcactaaactctgcataagataataacatgaatagaaaaatttagagacacaagaaggtatatattatgtacttatattcatcattgtgtacagatatgcttccatcctggatcattgtacaatatgtgtaactgtatatagatgaaaccaagtcacagaaacctgacattctgttggtttgtctattatccttccaaatggaacagagatgatagaaaattcccagaatgaatagggttgaaacacaaagatattccatcaattctttaccatattctttcttttgtattcttgggtctctgccaaacattttgcagctcatacacataccatctttcatgaatatgttactgataaggatatgtttatagccactgattaagatatctgagctgatttgcagtgtgtaagaagatgcaaaagagctcagaaaccatttagaatgtcccctttcaatagaataaattaaatgtgtttttccacatccctcctcccttgaaatttcctttcaactagaagagcacttctgtgacttgctgcagattgtcacaggatggattgaattgaaattgataatatatgctaaaaggtaagggatattttgtaagctgtgcaaatatggcagtgaacaaagagttaaactcttatattaggatgcttgcttctgt

SEQ ID NO: 37451 - DNA, 1050 bp, Homo sapiens
ttttttcttgtaaagttgtttaagttctttgtagattctggatattagccctttgacaggtgagtagattgcaaaaattttctcccattctgtaggttgcatgttcactctgatgataatttcttttgctgtgcagaaactctttagtttaattagatcccatttttctattttggcttttgcagcaaagctgcaaggtgtcaggagaattcttaggcaggtatgcagtagcatttattaatataaataccactgtaggaatgggagatggttattcaggaacagcttgcgctagatgatactactgaaggtctgttttacctttggaagagtactgcagaaccatgatggaataggtgacttttcctagcaatttctcattgatttgttctttcaaaggccaacatcagtgatgttgagtggaagtaaatgttggccaattcagtaaatattgttttgtgggcttatgtatcaggtgctgctagatgtttttgcaaatgttaggctgcatgaatatttgtttccgttttcaggagaaaaaaacctgaagctcagaggccctattgggccatagctacttcaagtacttgattagttatctgaatattcctactaaaataggttctttgcctgaattcttaggtaattgcaacattgtagatatggttcttaatcatatttaatcatgtgctgttaatcacatgattttaaaatacttaaaaaactcttaatcaaatttaatcatgtgctgttaaatttctaagactatattagaagggtaattgaaaacatctattttaaaacacattttctaattttctagtaaataaagggctttgtggttgtattagtccgttttcatgctgctgataaagacatacccaagactgggcaatttagaaaagaaagacatttaatggactcacagttaatcatggctgaaggtaaaaggcacatctcacatggcagcagacaggaaaagagagcttgtgcagtgaaactcccctttttaaaaccatcagatctcttgagacttattcagtatcatga

SEQ ID NO: 37452 - DNA, 1112 bp, Homo sapiens
ctacaaaaatcttactggagttttagggaagatgataataagacaaacatactttatgagaagtatatataaaacaataatgtgaattgattgataagattgcattttatcagtgagagattcaggaaaatatctttattcttcaataaaaactatataatagtttgtattaactgtgtaattgagtgaatctgctgttagatttatttttgagtctggttaataggtgccattctagtaaatttattgttgactagtgcattgcatggtggaagaagaaatgtaatattccaaatgaaatagtgatatttcttttctgataatataaaagactcagattattctgtcctagtttctaaactcacagaaatacactgctagtttaatatttggtgttgccactatgtattttaaatacctctaactttacattactgtttgtggtacaatgaaaagatgaagagtcagaacatctgggttacggtcttggattttctgcttattagttttgtatctctgacagttcacttaacttttttggccattaatgttctcgtttgtaaaatagggctaacagtattatacttacttatataacttatagggttgttgtgtagcttaaatgagaatttatgtggaagtgccttgtaaattataaagtactgtttaatataccatctaaaatactttctttagaatgggaagggatataaagaaaaacagtacaaatgtaagttatttattattatttctttttacattaatatgagagatatcaaccatactctttattagaaagggtgagaacacttcagaaaggtcaactgttttgtctgttgtcagaggattagagagaagtttaatatgggccatagatttcaggtcatgtttgtccttatatttaaaattcccttcaggttagagtcttgtaatcttaccttttgaccttgtttacttcctttgaaaacactctgtaagtgtgtttgtgtggagtatatataaaatgcacatacacattttgtctggatgttgaaaaatactgcagtaggcataacaagaagtagttccttttgaggagaagacttcattcattcattttttgcgcagttatt

SEQ ID NO: 37453 - DNA, 1074 bp, Homo sapiens
ctgtatgaatttcaggatttttttttctatttccatgaaaaatgtcattggtattttgacaggtattgcattaaacctgcagatcactttgggtagtatgacagttttaacaatattcttccagtctatgaacatgggatatctttccatttatttgtgtcctcttcaatttctttcatcagtgctttatagtttgcagtgtagggatctttcacttccttggttaaggttattcctaggtatcttactttttggtagctattggaaatggaattgttttctatgtttttttcacatagttcactattagcatatagaaattatgctgatttttgtatgtggattttgtatcctgcaactttactgaattcatttattctaacaatttttttggtggagtctttagggttttctatatataagatcatgtcatatgcaaacagttttacttcctcctttccagtttgcatgtcttttatttctttctcttgtctaattgctctacttagaactttcagtattatgttgaatagaagtggtgaaagtaggcatccttgtcttcttcctgatcttttgcatgatgttagccataggtttgtcatatgtggcctttattgtgtttaagtgtcttgtatatttaatatgttgagagtttttatcatggagagaagttgaattttgtcaaatgcttttctgcatctattgaaaagattttatagtttttgtctgtctttctgttaatgtggtatatcacatttactgttttgcatctctacgatgaatcccacctgatcagaatgaatgatctttttaatgtgctgttgaatttagtttgcttgtgtctttttgagaatttttgcgtctatgcttatgagggatattgggctatagttttctttttttgttgtgttctcagtatctttttatttcttgcttcttacagacttattctgttgtatacatcaacatgttaacactgttttaaagtttcatgttgtcatgtatatgctgattgtttaaaatttttccgtttattgtagaaggaaatctctaaggacttctgtttctatttta

SEQ ID NO: 37454 - DNA, 1019 bp, Homo sapiens
tgatatcattgatgttattagattagacgtacctacagaataactctttttttttttttttttttttgagatggaatctcgctatgtcaccaggctggagtgcagtggcgcaacctcggctcagcgcaacatccgcctcccgggttcaagtgattctcctacctcagcctcctgagtagctgggattacaggtgcaccaccacgcccagctaatttttgtatttttagtagagatggggttgcatcatgttggccaggatggtctcgatctcttgactttgtgatctgcccacctcggcctcccaaagtgctgggattacaggcgtgagccactgcacccggccgaataactcatttttttgcatggctattacaaattactaacaattactctaattttatatttaagattaagactttaagattaggatttcatataatttattaagattattggaaattcttcagagtatgctgcctggggactcaaaaataatagcaggctgtgtaaagtcaactattttgagatgtctgtttcttctccaagattaaattatataatgtgccaacccatataattatatattctatggcataatagaatccatgctagtttttataataatttagcgttaatgaaagtttctgtcttctaatgattatgcaacttttgacaaatgactgtaatgcaccatttgcctttttgtcttggctgcctgtgagctcattgtgaaaattagttttcacttttattaatttcctgatctatggttcctcatataatcatgttctatatttgttcatttaattactgagttcccacttatctttagttttaaattaactttgtataaaaatattttattttattttttgagctagagtctcaaatattttcatttcttaggtcctgttaagtacttagtccctcctttcccatttctcttttcttgctttgcaggaatctaatgaccattgaactgtggccatgacttcaattacaagtattttcttcacta

SEQ ID NO: 37455 - DNA, 1030 bp, Homo sapiens
ccttctgcttgaaaattatgaagagtaaatcaaaggaggagcccatttgttatcatatttaaagttcaatttactttaaagctgtgtagttctgtgtcatgcagtgctgatgaaaaagcttataatggccaatattgtcagaatggcacattcttacatggctcagtagtttacactttgaaaaacactcatttatcacattacccctttagtaatatgtcaggctataagttgattttatattttgtctatttactgagattttattaattagaggttaaatgttctttgactattgtattataatatagttttaactgaggaattacaatgaagatactaaaaggaagcttaaggtttctggtattaactaggttctgttaaatgattttacttgttttagaatatatagaaatatactgagttagaatgagtggcgtattttctaaataattcaaataaaatggggagagagaggaggagattggaaggaatgaaattttcctgttcaagctgtaaacactaaaacctttaattttgtaggaagacattatatactctggtcattcaacttgtgtatccttagtctatttagtagtcaaaaacttctaagtaaatatgtgtgatttaatttgtgctgctgagaaacagtgatcaaaaatggcaataaaagtcacataacgaaataagaatactaaaaaaaaaaaaacctaagaattttactgtgtcccattcttcattcaatttctggcagccttcatgattacaaatcacttgattaactaactagacattatcaaagtgaattatgaatcaggttcatttttcctggttgatagttgacacatgctgtaactttcactttgtgatatatcaaattcttgtaacagtaataagagatataatcagctctttatttcaggaaaactacattgccttttaaaaaaatgaaatgcacttgctaacattttaacaacacaatgtaattcctgccttcggatttcagggtggaatccacagtgatgatgtt

SEQ ID NO: 37456 - DNA, 1086 bp, Homo sapiens
tctcaaaccggtcatttaaagcacgtgttttgaaaaagagagataagggaagcacttctccttttggcctaggcccccagttagagggcccaggagaagcagcaggaggaaggacggcaggagagcaagcactgacctttggatgcaaatcgagcctttttagaggaggaaaagtgacaatcattcttagcacaccagtgaagctagagccaaatatttactttttataaaaatcaagtcttagctatctaaatgcatttatgcaaaaagaaaaaaggaaataattgaagacttttatgttataaaatttatttattttaaatacccagcttgagtgaagaataaaaccgcatggctattctttccagggaaaatggattaggtttggatgaaagttgaagttttgaaatgagtctgaaggttgttggagtaccctgagaatacaatcaactgctctacataatcatttcccttaatagttacctgtcagagcacctatttcttctactacaggattagcccatcagaagtagatctgagttggatatttcactgactaaagactgctctaatatgtttcagtgtttaatgtcactttctttactgcctatgagataaactagtggaaaagtattggctcaaaaagccagcaggtctgctggtgttaccagtcatgttgcaattgtatttacctatcagaacgttgatctaaataataaacctaacatttccttctaaactgtcagtggaaagatatatttattacaatgtcctccatcgttgaggagagaggaggtttagctaaagtttaaatgaaaaaaaaaaaaaagcacaagcataggacaccactgatataagcaatagaacagtaaacaattatgccctttgttatgctatatatattttatttacccatttcaaaggtggaaaataaacctagcccatctttggggggagttaataaagtattctgaatgcatgatctaacaaaactcggggatcgttctatgttttattgttacccccctgcataaagtcttctgaagctgaaaagagaaaggaaagggcttttgtgttagttgatcc

SEQ ID NO: 37457 - DNA, 1027 bp, Homo sapiens
gaaaggaaacccctgcagaaatttaatggaaacatacatttaatactttatattctgttttttctggtatactggtgacctctcagtaaagaaatgttttctatttgagtctgttcttttgttggaccatccatatgttcaaatcttattccccattgatcaacagtggataattgtgaactttctgggaccctttaagggttcagtctgcagttggggtgtgtgtgtgtgtaaaatattaatatatgacatatatttatccgtattaaaacttttgattgcaccaaaatggcttctaaaattccacactggtataccaatgtggtatattattttcccattttctgtgctaacacgagcagtaaatgcaatagatctcattactttcagaaagaagtaagcaatcacactgtcttacactgaaaccaccaactggcttatattctagtagccctatgctgtagataagagcctgggatctggactcagctacttcaacgagtatttattgggagcctcttatgtgtggcactgtcacaggaaataggaataaagggtccacaaaacaaacttcctgccttcatggcacttatattcttacttactaagcactatggccttcgctgtatgatctctacagatctcagtttcttcatcagcaaaatgaggataatactacctgttttgaaagattattttcagggtacatgaattagtgtatgaaggggcacagtgccataccaggaatatagtaaatacttaattttaactttcccttttgtttattaatgatgataatacttattagaaatacatattaaaacttaaaatcgatttgcttaaaattgaattttaaaaagtcttaggctaggtgtggtggctctcgcctgtaatcccagcactttgggaggccgaggcgggtggatcacctgagatcaggagtttgagaccagcctgaccaatgtggagaaaccctgtctctactaaaaatacaaaattagccaggcatgatggtacatgcctgtaa

SEQ ID NO: 37458 - DNA, 1035 bp, Homo sapiens
tggaagattcgatggacatggacatgagccccctgaggccccagaactatcttttcggttgtgaactaaaggccgacaaagatgatcactttaaggtggataatgatgaaaatgagcgccagttatccttaagaacggccagtttagggctggtgcaaaggatgaactgcacattgttgaagcagaggccatgaattacgaaggcagtccaattaaagtaacactggcaactttgaaaatgtctgtacagccaacagtttcccttgggggctttgaaataacaccaccagtggtcttaaggttgaagtgtggttcagggccagtgcatattagtggacagcacttagtagctgtggaggaagatgcagagtcagaagatgaagaggaggaggatgtgaaactctgaagtatatctggaaagcggtctgcccctggaggtggtagcaaggttccacagaaaaaagtaaaacttgctgctgatgaagatgatgacgatgatgatgaagaggatgatgatgaagatgatgatgatgatgattttgatgatgaggaagctgaagaaaaagcgccagtgaagaaatctatacgagatactccagccaaaaatgcacaaaagtcaaatcagaatggaaaagactcaaaaccatcaacaccaagatcaaaaggacaagaatccttcaaaaaacaggaaaaaactcctaaaacaccaaaaggacctagttctgtagaagacattaaagcaaaaatgcaagcaagtatagaaaaaggtggttctcttcccaaagtggaagccaaattcatcaattatgtgaagaattgcttccggatgactaaccaagaggctattcaagatctctggcagtggaggaagtctctttaagaaaatagtttaaacaatttgttaaaaattttccgtcttatttcatttctgttaacagttgatatctggctgtcctttttataatgcagagtgagaactttctctaccgtgtttgataaatgttgtccaggttctattgccaagaatgtgttgtc

SEQ ID NO: 37459 - DNA, 1020 bp, Homo sapiens
tcgtttaaaatgtatacctgaatctaacttttctctaatattctatgtctccccatcagttaagctgttaggatattctgttttgatggatttgccttagggatgatttatgagacaggaagcttcaatgttatctaacattaggtacatcatacctgaaaataaccaagttgtacagtaaagatatatgcatgtaagtagtgtaaaaattcatacaatatttgctaaatcattcaatggctttctgctaagaatattattagaaaagtatccatggtcttaaaaatgataggattctaattcccaagcctgctgtttccatataattgtatataaatatacaattattcttccgtttatgtctttctaagaatttcacctggaatttgtgttacttattattgtcaaaaaatgttatttcctcaccagatagaatttgtgcaatcccagttagaatctccaggtgtctaactagtcaaggagcaggacagagcaaatacatagttctgcaaggctccgtagcccactcctacagccacatggacctctgggcctctgttctgatctcatctagatttttcatctagtatactagtgccgtttctacctagaatggctgtcatctgacaactttttagtagtttagaattcacgtaacttgaaacttggtacagaacatccctgttgtctttactggcagtcgcagcagaaaccaggctgttgtctaactgtgaaggtagtgtctgagcacaagcctgaagctccaggggaggacagatttttacatttatttgtggactctggacatttggcaaaatccattgcactcaatagacagcagtcaaattaacagggagattgttctccacttatcgaaactgtcaaaaaactgagggaaggggggattccaaagagctgctcctagtgcattctttttatattaatggttagtgaataccagtgtcagaagttcacatcacagtacgaataagatgattggattttaatttttagacaaaa

SEQ ID NO: 37460 - DNA, 1046 bp, Homo sapiens
catgagcatgggatgtgttttcattggtttctgtcacgtatgatttctttcagcggtgttttgaagtttttcttgtagaggtcttctgactccttggttaggtatattcctaagtggttttgttttgttttttgcagctattttaaaaggggttgagttcttgatttgattctccgcttggtcgctgttggtgtatagaagagctaccgatttgtgtacattaatcttttatccagaaactttgctgaattctttcatcagttctaggagctttctggagaacttttcagggttttcaaggtaaacactcgtattgttagcaaacagtgacagtttgacttcctctttaccgatttggatgtcctttatttctttctcttatctgattgctctggctggaacttccagtgtatgttgaagaggagtcatgagagtggacatccttgtcttgttccagttctctatgggaatgctttccacttttctccattcagtattatgttggctgtgggtgtgtcatatatggcttttattacattaaggtatgtcccttgtatgccaattttgctgagagttttaatcataaagttttgctggattttgtcaaatgctatttctgcatctattgagatgatcatgtgatttttgtttttaattctgtttatgtggtgtatcacatttattgacttgcatatgttaaaccatccctgcattcctggcatgaaacccacgtgatcatggtggattctctttttgatatgttattggattggttagctagtattttgttaaagattttagcatctgtgttcgtcaagaatattggtctgtagttttcttttttggttatgtccttttcctggttttggtattggggtgatgctggcttcatagaatgaattagggagggttccttctttctctatcttatggaatagtgtcaaaaggattggtacaaattcttctttgaatgtctgttagaattctgctgtaagtctgtctggtcctggactttctttactggtaattttttattaccatttcaa

SEQ ID NO: 37461 - DNA, 1035 bp, Homo sapiens
actgttttttaatttttgtatcatggccgttcttgcaggagtaaggtgataccacattgtggttttgatttgcatttccctgataattagtgatattgagcattttctcatatgtttgttggccatttgtatatcttcttttgagaattgtctattcatatccttagcccccttgttgatgggattttttctttattatactttaagttttaaggtacatgtgcacaacgtgcaggttagttacatgtgtatacatgtgccatgttggtgtgctgcacccagtaactcgtcatttaacattagatatatctccaaatgctatccctcccccctccccccaacccacaacaggccccggtgtgtgatgttccccttcctgtgtccatgtgttctcattgttcaatgcccacctatgagtgagaacatgcggtgtttggttttttgtccttgcgagagtttgctgagaataatggtttccatcgtcatccatgtccctacagaggacatgaactcatcctgttttatggctgcatggtattccatggtgtatatgtgccacattttcttaatccagtctatcattgttggacatttgggttggttccaagtctttgctattgtgaatagtgctgcagtaaacatacacgtgcatgtgtctttatagcagcatgatttataatcctttgggtatatccccagtaatgagatggctgggtcaaatggtatttctagttctagatccctgaggaattgccacactgacttccacaatggttaaactagtttacagtcccaccaacagtgtaaaagtgttcctatttctccacatcctctccagcacctgttgtttcctgactttttaatgattgccattctaactggtgtaagatggtatctcattgtggttttgatttgcatttctctgatggccagtgatgatgagcattttttcatgtgtcttttggctgcataaatgtcttcttttgagaagttcctgttcatatccttcacccacttattgatggggttgtttgt

SEQ ID NO: 37462 - DNA, 1034 bp, Homo sapiens
gctctgactgtggtagtatctccttttattatacttctgattacaataaacgttcccctcaaggagtcccttttattctttttcaatctagatttcttcttttgacttctctcaaatgtcattcactctcctcccttcagacacattgatgttttgttgatatttaaccgccatcctttcatacatatatgcctaaaagaacaatatagaagctatctagcaatttatcacttcccttgtactgtacgtcttcagtaaaatttttctgaaaacacctctcttgttctcccatttctgtgccatgtctatttcacttataatcacattagataaaacctgtgtgtaattctgttttgtatattgccttttatattattaacactcagtaaaatagtttaagaattgcagtctgtagtactgtcagtctgtcacctttcaggcactactttaaaattctgaaaatgtaaatgaagtaattaacctgatatgaaacagtgatacataattgactttctaaattagtgaactactgactcttttatatatttgccattttatagaatttcatattggctacttaacaaaaggtgtgatgtaacaaaaattctgcctcctaccataataaatactgatgcttattaaacactctgtactgtgcttcctaagtatatttattttagaattttgctgtttgaattatttcatactcatgaaattgaggcaatacttaatgataatagaatagagactctgaatcattgactcaactgatggaatgtcctccaaagaagtgctaaggaatagacacatgaaagaaaatggaattttttaaagtagcctagagaataattcaccttcactcacacataaacgcttcctcagtgtaaatttttcagtgctctcatgcatcagagctgtcagatgtctaaatgacgggtttcagagttttcctcttcctgttagtgatctgaagtgctactccagtattttccattagggtggatattgatagaggaaacttgttgtatagtgga

SEQ ID NO: 37463 - DNA, 1005 bp, Homo sapiens
ggccattccactttagccattcaggccatgctgcctgtattgtgtattcagcagttcctattagatgtcttcacagtgagtgattctgtagggcttgctgacacccgcttcatgcatggcctgctgtgctgggtggaattttttttctgagctgcctgaaacattaaagacatcttggccatgtcagtctgtgtacagtgtgtgtgcatgtgccctcacatgtgcacattcctgagcaagtcagtattaaataaatgatgtgggtgtgcttttatatacatgtaaagtctaaaatttgaataatgatgaatttatcatgtattaaaacatatatttttaataatttagttcagctaacattagcaacttttctctagcttttattgtctgtggttattgacactagggggcactgcttatccttggttgcatctttcttcaggaaatgaataaaaatactcggctggtttctgtgctctcactttaattaacaattgaatttagagaactctaggctgtttgatcctttgttattttggttttatttctaatgcctatatgtagtgctaacaaagggggttggagctattggttctcacaaataaatagagtatccagtgtcccatacagtaactttttcttccattggaaatgtcattcttggcaaaaccagaagggcaagtttgcccagtgatgaggcttagatcccttgccagctgtgcttctagccagcaagtgtgatgaacagctttagaaatcaagtgagagaaagcattcaagagttagtgtgattcatttggataaaggtcaaaagaaagataagcaaaggattaagaatgaagagcacaaatagcaacaatttgtacctttttacttataaaaattactgtcagtgatcctatttgtaatttttcacatgttcgtagttcaaaagtaacttaaagtcttttaaaactatattaaagattgcatttcattctctatttcagctgatcatttaaaaat

SEQ ID NO: 37464 - DNA, 1044 bp, Homo sapiens
cctttctggaaagcagtgtgctttcaaaaaatggcaattctgagtttcaaaaaaactcagaattgccattcaacccagcaatctagtgggatttatttttatggtggaatgtattatattcctttgggtatattggatatataaatcattctactataaagacacatgtatttgtttgttcattgcagcactattcgttgcagtagcaaagacgtggaatcaatctaaatgctcatcagtggtagactgcagaaggaaaatttagcacatatacaccgtggaatactacacagccattgaaaaagaatgagatcatgtcctttgcagcaacatggatggagctggagatcactatctggagcaaactaatgcaggaacagaaaaccaaataccatatgttctcacctataagtgagagctaaacaatgagaacacgtggacacaaaaagggcctacttgagggtggagtgggaggagggagaggatttttaaacatacctattgggtactatacttattgcctaggtgactaaataatctgtacaccaaaccccacaacacacagtttacctatataacgatcctttgcatgtgtctctaaacctaaaataaaacttaaaaaaagattgagtgctgcaaatagtatcttgacacctaaaaggtagaaacaaattgatagtctcaaggtatctccagcttatagacttttttttgtctattttcattatgtttaaagttgaatcttgtgaaattgccatttttcaaggtccaaaatttctaatactggtaacttatatggttcaatttaatattttgggactgaataatgtccttcaattttgaatatgtttttagtatatgcatgttatagtgttacttttatgcatccagtatacacctagtactttaatcatcattaaatacaaatgcatacaatttgtaaaaaagcatacatttaaaatatgccaaaatgaagaaaacattttaatctaaattatttaattggataaaataaaattacatctcatgtgacaaggtaaaata

SEQ ID NO: 37465 - DNA, 1095 bp, Homo sapiens
catacaatgggaaccatagtagtagtttaatacatgttaattcataatacatgtaatatatgtacgtaatacctgtaaagtgcttgatccaaagctggtaagtagcaactacctgataaatgttagctgctataattagtataataattagtagtaacaagatatagtccctccccttaattttatattaacaattttatattttagtatatgcagtgttttcaacagatcaaaataaatataattatttttcttattttttcaaatattttaaaactttgtaaactaggatatgtttgctatacatgagaaattttttaaatagaatggtaaagttctctctgcattttgtgatggacaataaaggaaacatttggtgtgcccttattctaaaatcagaactgctgataaaatatactggtttgttattttactaaaatatattacgtttttcagttgaattgtttatatgttaagaaatctagctttgctagacttcagtggaggaaggaactgcagatgaggtggaaacagcaagagaactagaattagaaatggagcctcaagatgtgactgaattgctgcaatctcatgatcaaacttgaatgaatgaggagttgcctcttacagatgagcagagaaagtggttgtataagatagaaactacccctgctgaagatgctgtgaacactgttgaaatgacaacaaaggattacaaatattacgtaaacttaattgatacaaggacaggttttagaggattgactctagctttgaaagaagttctactgtgggtaaaatgcgatcaaacaatggttcatactacagagaaatctttcatggaagggtgagtcaataaatgaggcaaatatcgttgtcttatttcaagaaatttcttccatcacttcaactttcagcaaccacctccctgatcagtcagcagccatcaacattgaggcaagacccttcactgacaaaaagattgtagttcagtgaaggttcagatgatcgttagcagtttttagcaataaagtatttttaaattaaacatgtttttgaagtaatattataatattaataagtatattttcaaga

SEQ ID NO: 37466 - DNA, 1060 bp, Homo sapiens
aatgattagcagttttcattaaaaaccattatttctgtttagattttttacattttcttaattgcttgtgatactattgacatttgttaggtagatcctcttacagtgtctggcacatagtgggtacaccaaatattagttaaatgacagggtgatcgatacattttttgttttgacaaatatggcaagctgatattcttatgggcaaaccaatacagtggaatctagtgactagagaaaataaatacttttttaagactctaaaaaactaaaacaaaaaattttaaaattttaaagaaaatatttaaaaatatatttatgaagatatgtgtcatatttctttcaatggataattttaagtgatattaaattatgtcaatagtttgaatagcaatagcaaccattgagctaaaattatgcaacaaatagttgcttgttaacctaagatatttcaacatttttgaaagattagtaataaaacatgccatatttaaaaagccttaatgtgaatcttctctccactgtagttcaggggacactcaggatgctagagtaatgctataaaaaaagccactcagacaggtgcagtggctcacacatgtaatcccacctactcagaagactgaggccggaggatcacttgaagccaggagctcaagaacagcctgggcaaaatagcaataccctcctctctaaatatatataaatatatatatatagataattagttgggcatggtaatgtgccggtagccccagctactcgggaggctgaggtggaaagatggcccaggaatttgaggctacagtaaactatctcactgcactccagcctgagcgacagaatgagactccatcttttaaaaaaaaaggcactgaaatgaccccatcaaatccaaccagctatgccaggctctatttccatcctatttctgaggagtttttgtccttgctgggtttcctttggcttcatacccagattctgcttgccctatataacatggatggtctgtctgtcctttgttcagtacctgctcaagatgccacttgcccagagctag

SEQ ID NO: 37467 - DNA, 1864 bp, Homo sapiens
atatattttcatctgaatatataaaagtagaatatcctattttccttttgagctatgtcattatactgctaaaattatggatgaaaatggaaatgtttcaacctgacccattgcaatttctgtgttacacatttgctcttaagagtacagccaggctgctggggttactctaccctgtacaaactttgtgctttatggaatctgtaacttcaatttctgttctttcctgaatccaaaattctatccacttacaacccacgttataagtgcctagctgaaatgccacctcttcctctcactataaccgatgacccctccttactgagactcatggaatgtataatgattagctaatttacatggaatttaccaggtactgtcttgatatgtctcttgtatttttgtctaataatttaattaatattaccaattattttcatgcctctccactagatctccccataatcctttagatctttgagcgtgctttatatgttttggcattgcatgtcaatccttaaaagcagatatgtgctgctttttgcattagtacagagcatattatgagggagtcaggaactgatactagaatttaatcccttggatggagaacaaaacaacaagattaggcctaagtgatacctagataaaggaacctgcagcataggaatgaaggttattctgttatcaaactggagcataagaggacaactaaatcaaggaaggtcagttaatagaattttagagactatgtgtagagtataggcaaaagtgacttgatgctgatctgtctaatgttgggttggaagtgcttgaacatctctttcctaaagtgagacttatttgtagactctactgatgggaagtaaaggagaagaattagacccagcctctgaaagaaagcaaaaacagatgctaaggatagaggggaagagaattacatggacacaaaacgaaaagtccaaatgttaaagaaacatttacagaatagaaatcttagcaaagcctggaattgcacatagagatgcttaaatatttatcaattatttgttgacatccgtcaaaaatcttattctttaatatgtaagatagttggtgttgcctagttttctgattgatttttttcagcattcatgtgaatttttgcaatagtttagaaacagccaactctgataaactaaagctttctttccaaaaatatgtttttgatgttctgactggggtatgttcacagttctgaatctcttctgtgcaaatgccattgaagtcatttctatctagtattttagcaaccaagttcaatttatttgtattacaaacaatgattgtttaatttctgaaactattttattttccaagtatattcaagtatttggattttcttttctctagtatcttgtaaatagccagtctcctttcaaatttttgcaagtatctagtatacacaggcaaaagtaaatttgggcctaaaactttaagattagcaaagtataattttattttacttgctgagtataaatagatatgactggtagattatgtagcacttttctgagacattaggagcagagcatgagagatcaaagaacttactatttcatgtggcaagttttcttaactatgaaatagtgtacttgctagcatatattatggtttattaaggggattgatttggtctaggcaatacacatcatgtcagacttgcctggcaggaaaacctgcttaatatgttttgtaataagatggaattttttgttctcaaaaacatctgccaacagaattcaagagtgaaaacagaaaatgtcatcaatttagtggtaatcctataaatttagtttctttttgagcaagacataccaagaca

SEQ ID NO: 37468 - DNA, 1066 bp, Homo sapiens
actagattacctaactcttacgatctaatttaaagtagattacttaactcttacgatctaaaagctggggaaaactttttaaaaataagtctgttatgatgtgttcatatagatctctttgcctgtgcttagataaaaaaggagccacataacttgtgtttatatcagttgtgtttcatttgtaataagcattgtgctttgcagagaagtgctttacacaaaacagtataagattcaatatcttgttatttggaaaatttttaggctaccatattttaaggaaggtgagagtaagtagtaggaataaacatctaaatctcatttatatttgcctatggatgaatttgaatttaaagttaacattggtccgttagacattcagggtactcataacaaatacttcaatcaaactaatgaaatctcagtgtgaaaatcgaactctaaaactgcctcggttctttctcaattcttttatttttcccatttcatattttggatgaatagcattgcaatgagattggtacaaaagaccaacctcagcagttcttcctgagttgtagagaagtaatcaaagatgttagcttacaaaagttatcctagtttctaatcctaagtggatatataaccttaactttccataacttccagttcctgctggactaaaagttgtattccaaatatgaaaaaaaaaaaggaattggtaatgttgattttagaattgaaactgaagctgagctacgatgtctacagacagaaaattaatgatttttatagataagcccttatttggatatttgataattggatatcagtaatctgtctccctcttctcttctttttttcttcccttttctctccctctcccctcctcttttttacatgtatatactcataaattagcaagtcataatactagggtatcaaattactgcagtttgtcaattctctaataagatgcacattttcttaatattttaacacctcaaattggattcagctgtcttttctccacctaaattcggaaccaattgagagaacaagagtcagatgataaagatcaatgtgt

SEQ ID NO: 37469 - DNA, 1027 bp, Homo sapiens
taatttttgtgtggccaggctgatctcgaactcctgacctcaggtgatcctcccacctcagcctctcaaagtcttgggattataggcgtgagccgccacacgtggcctatagattacatttctgcaaaggaaaaatctcttgtctcttacagtgttggccacacatgtcagattatgacctggtttttggttttctggtgtctgttttttagagagtggggtaactgctccttacttgaacttacaactaaagcccctgtttttagtgttatggcctacccttacattccaaggttttccaagataactggtgccccaatttctgagtatttctggacttctatgggtgagttggcttacttttaagtcattttatccttctggaggcacttaagtttgaatttttgctgtaatgtcaagccagtacctactcctccattaacttagtcttctacaaatatatacagaggtgacatctgtatcctccattttctcttctaccatttattttgtcctgatgtttgaataccacccctctttcttctttttcatctctttctgtcttttgttcttttgttctttcattcttctcttcttcccattctttccctccttttctccctcctccctatctcctcacccctcccctcccctcccctctcctgccctctcctctcctcttttcttttcatgaggcagagtgtcacccaggctggagttgagtggcatgatcgtgactcactgcagccttgacctcctgggctcaagtgatcctcccacctcatccttctgggtagttgagagtataggcacacttttatttatttatttttttggcgagatggggtcctactatgttggcgaggctggtctcaaactcctgagctcaagcaatccttctgcgtcagccttccaaagtgctggaattacaggtgtgagccaccatgtctggcttttctttttcttcaatgagattttagtgacatttgtggcaagaatagagataattaaataattcaatgtagca

SEQ ID NO: 37470 - DNA, 1050 bp, Homo sapiens
aatatgtatccttaacttaccacagtttatcttcatagaaaatgatgccacttcacatataatgtgagagccttataacattgtatttctacttctctctatatctgggtttccatctggaatcattttctttagcttaaagaacttactgtaatatttgtcataccagtctgctggcaattaattttcttggcctttgtttatctggaatggtctttatcttgcttcatttttgaaggataatttgaatgtatgtagagttccaggtgatgggattattattttttcttggatgacttttaaagtgttggtccattttcttctggcttgtattatttctgttgaggagttgtatgtcttatctttgttaccctctatgtaatgtgttgtttttctctggcagcttttaagattttttttctttatcactggttttcagtaatttgattatgaatgtgccttagagttattttcttcctggttattctgcttgttgagcttcttggatctgtggccttacagtttttatcaaatctggaaaatgatctacccttatatcttcaaatattttatcttttctcccatccacaattcctatattctaattacatttgtgttaaacttattgtcattgtcccactggttactgaagcagtgttcattttttcagtcttgccaatcttttatttgagggagctttattgctatattttcacatttgcttatctattcttctgtagcatgtaatctgcagttaaatctatccattatattgcttatctcaaatgtatttttttttcagttcttggcagttccattttttatttttttaaatctatttcttttctcattatgcttttattttcctctatgtgattgaacacttttgtaataggtggcttaatattcttgtctcctaatttcataatctctatcacttctggtttgtttttattgactgatatttttctggttatgaatcacgttttcctgtttctgtgaatttctctagtaatttgtattggatggtggtcattgtaaatattatgt

SEQ ID NO: 37471 - DNA, 1035 bp, Homo sapiens
cctgactcatctcccttgctcaagttgtgctttttgccagttgttctctgaaaccaaaatgaggttccaaaatgacagattttgttaccttatatttctcagtgacttaggttccttgatatggcttacaggcctcagctgacctgtgtagcgtattttcctctgacacactctacactcaacccattatgaacttttttagttgttttaattttccttttgtgcctttagttgttttaattttccttttgtttttatgtaaaatagaaaaacctaccattaaaataataataattatactttttggtggttctatatttagtataataatataacaggaaaaaaccttacaattcaaagaaagtgagattgaggttaaggtaaaatgtattcttagatttatatagactgtaaatgagaaggctccagagaacttgacagtttagagatcccttcaagataacactataaatgatgaaaaggaattattattattttcctgaagatcttgggaaagcatcaactgcttgaagctaaggaaagaaaagtttgagctgaagattcagaaagaaaagttctccacttttacaatgagaccatattctgggccgtaatacaagccccaaaaggattaaagtcataaaatgtatgttttctgactatatacaatatgctttctcggttagagagctacctggaaagtctccaattttattgtttaaagctaagcaaaatgattctaaattatccatcattcgaagaggaaattgcaaagaaaattagaaaatacttaaaatttactgaaaatgaagacgcaatatatcaaaacttatggtatgcaactaaaacaatgcttgcaggagaatttgtagcactaaagttttttattaaaaaagtagaaaggtttaagattggtgacctaaccttccaccttaagaaattacataaagaagagcaaagtaaatccaaagtaagctgaagaaagaaatgatgaaggtaacagcagaattccattaaatagaagagagcaatgca

SEQ ID NO: 37472 - DNA, 1563 bp, Homo sapiens
gttttgagtattggtgtctattaccaggtatgcaaagcccagtccagagtaaatgtcttttcctgtcacacccatgacagcctcctagggctacaggcagtggtccaacgtagtttgttttccagctatgtgcagagcctttaccctagggaatctgtctcatcattgtatgcagtctttctgactggtagattggactgttcatgttgccattttgtgcctcagagaatacaagaggaatatgctgattatcagccaccatctgtgtccatacactttatgaacccaagtggctaactggagtgagcaccctaaggtattcacttgttggtttcaatcatcctttgattctggaagataataataataattgttattattatttgggacagagtcttgctgttgctcaagctggagtgcagtggcacgatcttggctcactgcaacctccgcctgttggttttaatcatcctttgattctggaagataattattgttattattatttgcgacagagttttgctgttgtccaggctggagtacagtggcacgatcttggctcaccgtaacctccgcctcccaagttcaagcgattctcctgcctcagcctccctagtagctgggactacaggtgcatgccactactctcaactaatgtttttgtatttttagtagagatggggttttcccatgctggccaggctggtcctgaactgacctcgggtgatccacctgtctcagcctccgaaggtactgagattacaggcatgagccactgcgcctggcctggaagagaattattttgatgtgtatcaacatgtcctactttaatgagttccttaagtttctgtagaaccataccttatactcatgggtagcactcatggactgcaaactccagtctccatttcttcattacttcagtagtccagtttcttattgtccatctgtttgaccgtataaccaagctgttcactcccacctctgagtcagaatacacacaaacttcagagctcttgctgttgtctatgtcttctgttactgcacggataacagcatgcagttgagctcagtgaactgatttattcttaccttctttgatcagagttttttttccatcagttagtcacagtatggcagctttccaaacaggatgctgtccatcaccttggaactgccatctgtaaataaagtggctttttgtttgccaactagggcctggtagaagggcacacatatgtggcagtaggatctagtaattctccagatgcctccagaatcagtcataagttaagggaggctatctgcttgtgaatatgatgagtatttccttgcttttctcttttcctgtataaaccatttccattttattatgaaaattctcagtactgccttccttgttagaatgaatgtttctctgagataacccaaaatgttatatgtattgcagctttcaagattttttttttagtcgtggaggcagtttgaattagtgaccaataacaagccagtgttttatcttattttatttatttattacactgtaagttctgggatacatgt

SEQ ID NO: 37473 - DNA, 1052 bp, Homo sapiens
gtatccagtcttgggtatgtctttaagagtgaaaacagattaatacgccattatacagctcttcactgaaataattgattcagattaggatcactaatggacactaattcctttaggtgaaaggatatgaaggaatagaatatttgcacagtaccaaaatatcacctcaaggtttattggaattgtgtagggaagaatataccttacaacagagatttagctgttacaactttacctaagtgaacaaagttaggatcactgataatacagcagcctgacattgtgtgttttctgatgtgatgcaacttgaagcacatagcattaactgtgaatcttcttttataagttgaatctgactgtattcagacctttaggtacattttccaattttaatgaaatacaggggatagatgaaaagttaaataacatcacaaggacacaattagacaaatctagaacacaggacatacgaaaagataattggcctggtctcttcaaaacataaatgtcattaaaaatgttaagatgaatgtgttggaaatcagggagactgttacacatgaaaatgattaaggagatatgaagaccaaatgcaggccagatgcagtggctcacacctgtaatctaggcaccttgggaggctgaggcgggtgaatcacttgaggtcaggagtttgagaccagcttggccagcatggcaaaaccccatccctactaaaaatacaaaaattagctggacatggtggcatgctcccataatcctagctactcggaatgatgaggtgggaaaatcgcttgattctgggaggcggatattgcttcactgcactgcagcctgggtgacagaccaagactctatctcaaacaaaacaaaataaaacaaaacactccctccccccgccacccaaatgcagtgtgtgaaccttgctgtgattttggtttaaaaactaataaaaatacctatacttttaggggcaattgggaaagaattaagtttcttaagggagataacggtattatggttatgtagagaaatgttcttattcttaggag

SEQ ID NO: 37474 - DNA, 1030 bp, Homo sapiens
tcatagaataataagacagatattatttgctacttttaaaggccaagtagaatgttttctgtattcttttgagaaatagtgacatccttgcatggtgaaattcttcattcaagtgaaagaaccaagtaacaagtaacaattttctgtagttgtcaagttacgtgaactaatggtcatgaatttgattcagcttatgcatttcaaccttgagcgttcaactccctggtatccaatttgaactcctaattaaattatagagaaagatgctactgtttcacatgttatttagaataaagtgtctggcaataattatctgtgacaatgttttaaagtagttttccatgatttttcaggcaacatccttgttttaaaatttattaattcagttctgaatacaataacctttacacttgggatgtggaggaacatactgtagattgcaaggatgtttctggaacagagaatcatgtgtaatacacccttacacttgaagggtaatattattacagggtaggtgcatctgagttgtagttttctattggttgttctgcattaaccgaattggtgctttgtcatcactgtatttgtggatattcctttccaatatcagttatagatattaagagttatggtgacagtcatcgtgtactaagatgttgagtttaaaataagagactagaaactttgatcttttctctgatattaatttttatactttttaataaaagttattttataccagtagaagtagtaatatttgttgcgtggaggggaagaggagtttaagcaattggcctgtagtgtatttctctcctgattaccccgggaatacccctggggaaaaagtcatgtccaggagacaagtggcttcgtcttttctccttataaacatgctgataattaactcatttaataaattagactggccaggtgtggtggctcatgtctgcaatcccatcactttgggaggcagaggcgggtggatcacttgtggtcaggagttcaagaccagcctggacagcatagtgaa

SEQ ID NO: 37475 - DNA, 1203 bp, Homo sapiens
taaatgtgtaaatggatgaagagagatgaatattccatacagaataattccaataatatatttaggtgttctttgctatgggaggtagagaataattcctcctctttttccctgagggtgggccagacatagtcacctcgaaagaatagattatgaagaggaaaaaaacagtaacgttatagtggagaggcctggcatatagtaccttaaccaggtaatgaaggctagcatcactggtgatgtcctgttgataccatgttccccttgccatgatctgttgagaatggcagttgacctcagtgatattctttccagaaatcataaccctagtctaatcataagcagaaacattagacgaacccaaattgagggtcattctataaaatacctgacacagtcctcaaaactgtcaagatcatggaaaagaagggaagattgagaattatcacagaccacagagactggggagagataataattacatgtaatgtggtgtcctgaatggaatcctggaaaagaaaatgaacactaatggaacaacttgtgaaatatgaataatgcctgggctttagtttgtagtaatgtaccaatattggtgtcttcattttgacaaatgtgacatgatgttataaaatgttactaataggggaaagtgagtaaagggtataacacactcttcgtactgtctttcaacttttccatcaatctaaaattactccaaaactcagcgaggcatggcggctaagcctgtaatcccagcactttgggaggctgaggtgggcagatcacttgagttcgggagtttgagaccagcctgggcaacatggtgaaaccccatctctgtgaaaaatacaaaatataacctggcatgggggcacccgcctgtagtcccagctactcggaaggctgaggtgggaggatcacttgagcctgggaggcagaggttggagagtgagccaagattgtgccactgcactccagcctaggtgacggagtgagacctcatctcaaaaagaaaaaagaaaaagaaaaactccttgacagagtttttttggttgcatggattcaaatgatgtgaagaacagaaactatgtgaaataatttttgctagttagcgtgttttattttaacagttttccccctaaaaatggaataatatgctatattaatactatttacatttataagtttctttattcgtaa

SEQ ID NO: 37476 - DNA, 1022 bp, Homo sapiens
caaagcagaaaaataatttctgacagttcctttctgtatgtcttctcaatgctaatgaaataaaaaaatctatatcaggttctctagttgacaggaaaaatttgaggaatgtctttttatttagttgttcgttttatcattcaaaggaacattttgagcaaagccaaagcacatttttgtattcataactgtttattctatataatcagagaaaaggagggctagagtattataaggttgatatagcatatagaatcagtatggtgatttttgaaagagtgctgactttggcttttagggatatgcttattttattaatcccatctactactaagctgtgattttggacaagccattttacctgagttcattttcttgtctgaaagacagtgaatatgataatacttgttactatttcataggattgtgatgatcaaatgaagtaatgtatatgaaagtgctttgaaatctttaaagtgatatatagatgtaaggctgcatttatggtctaggctaacagatacagaaaagagctgttagaagcaagatctgcttatgtatggacagtttcgatgtctgattaaaaggtttgtaagttttgaattgtagatgactgcgaagtcaaggaatctgattttgtcccagagcctcaattcattggaagaaggaaaatgagaacattctggctactgcaagtcaatttttgatattaaaacccttctgtctttattttgaaaagatttacaaggtggtaagaactttactaatgaatgaagaattgtcaacatatgtccctttttaaacccagtatatgtgacatttttgtcttactagagtgtacaaactttttttttatattggggatagtatatttttatgtgagttgaatttgatataagagttagaagagtgctaaacagtggttcttttaatgaagcatttgatggcttgtttttgtgttctacagagagaggctagtgactgaaggtagacaaaatacttttttctctagcatattttga

SEQ ID NO: 37477 - DNA, 1031 bp, Homo sapiens
actttttattactatttgatctcattactcacaactggtctgttcaggttttctatttcttcctgattcaatcttggtagattttatttgtccaggaatttattcacttcctgtaggttttccagcttgtacagttgtttataatagtctgttatgaccttttctattactgtggtaattgtattgattcctttatcattactgattttatctgggtctcctgggtttttatgtgtgtgtgtgtgtgtgtgtgtgtgtgtgtgtgtgtgtgtgtgcttagtctggcaagctgtttagaaatttatctttttcaaaaaagttaccttttattttgttgatttttttatctgtatttcatataattctgctctttattattttatcctttctaattttgggtttggttttttcttctcttcattgaggtgcatccttagattatttgaaatctttctacttttttgatgtagtcatttattgctgtatcgtttccttttacccttgcgttttctgttttgcgtaggttttggtatgtcgtgtttggttttcatttgcttcaaggcagtctttattttttcataatttcttccttgactcagtgctcattcagaagcaagtttagtttccatgtatttgtacattttctgaagttcttctttttattgatttcatacatgatatgatttttttttggtaaaatttgttgagtcttgttttgtggcctaacatatggtctatcctggagaatgctccatgtgttgatatgaagaaaatgtatactctgcagctcttggatgaaatgttctgtaaatgtctgtttggtccatttgatctaatgtgtagtttaaatctgtttctttgttaatattctgcctagatgatctgtctaatgctgagagtgaagaattaaagtccccaactattattttattggaatctatctttctctttagatctaataatgtttgctttatatgtctgtatgctccagtgttgagtgcatatatgtttagaattgttatattctattg

SEQ ID NO: 37478 - DNA, 1028 bp, Homo sapiens
ctttctggctccgtcttgggagggtacatgtgtccaggaatatatccatcacatctaggttttctagtttgtttgcgtagaggtgttcatagtagtttctgatgcttgtttttgtttctgtggggtcagtagtaacattcccttagtaactgctaattgtgtttatttggatcttctcttttttcttcttaattagcctagctagtggcctattttattatttttttcaaaaaatcaactccttagtttgttgagcttttgaatggttttttgtgttttgatttccttcagttcagctctaatttttgttattgcttgtcttctagctttggggttgatttgctcttgtttctctcattctttcagttgtgaagttaggttgttaatttgggatgtttctagttttttgatgtggacatttaatgctttgaatttccattttaacattgctttagccatgtcccagtgattctggtatgttctatctttgttctcattattttcaaggaacttcttgatctctgccttaatttgattatttacccagaagtcatttgggagcatgttgtttaattttatgtatttgtatggttttgagcgattttcattgtgttgacttatatttttattgtgctgtggtccaagagacactctgactttttgagttgccatagtccttccacgggttcttcatctttgtggcctgatgttcctttaatctttgttgttgctgtcttttggatgggcctttttgcttttatactctttgatgcctttgagggtttgactgttctttaagttggtttcagtcagctgtcttcatttctggatgatttcaggggaccaaggttcagctcagcactcctgggctgcatgctctaaccctgaagggttgtgtccaggctcacagctttgttctctggccccttgaggttaagcacctgctgtgctggaggagttgaggtgttcccagttcactggtagcaacactcatggagggtgctgacagaatcccttcattaagccag

SEQ ID NO: 37479 - DNA, 1026 bp, Homo sapiens
tatagtttgaagtcagatagtgtgatacctctggcttttttctttttgcttaggatggttttgggtattcaggctatttttcagttccatatgaatgttagatattttttctagttctgtgaaaaatgtcattggtagcttgataggagtagcattgaatctgtaaattactttgagcagcatggccatttaaataatattgattcttcctatccatgagtaaggaatatctttccatttgtgttgtttccgatttcttcagcaacattttgtaattctcatcgtagagctctttcacctccctgttgagctgtatgcctaggtattttatttcttttgtggctattgtgaatgggattgcattcttgatttggctctcagcttggacgttattgctgaaatgctactgatttttttgacattgatttagtatcctgaaactttgcagaagttgtttatcagatctaggaaccattgggtagagagcatggggttttataagtgtagaatcatatcatctgtgaacagagatagtatgacttccttttaatttggatgcctttcatttgtttctcttgcctaattgctttggctgaaatttccagtactatgttgaatagttgtggtgagagtgggcatgcttgtcttgttccggttttcaagggaaatgtctctagcttttgcctatttagtatgatgtttgctgtggatttgtcataactggctctttttatttaaggtatgttccttcaatgtctagtttgttgaaaatttttaacacatgttaaattttatcaaaagccttttctgcacctattgagatgatcatatggtttttgtttttaggtttgtttatgtgttgaatcacatttactgatttacatatgttgacccaaccttgtataacaggaataaagccattttgatcatggtagattaggtttttgatgtgctgctggttttggtgtgctagtgtttgttgaggatttttacatctatattcatcagggatattggtctaaagtt

SEQ ID NO: 37480 - DNA, 1043 bp, Homo sapiens
ttcactttgagacagaatagagaagcagtggtaattttagttcatctactatcaagataaacgacagtatgataggtataaattcaaacctggattccagattttcagttcagcgcacctgactttttggaagtgctaaaccttttgttttgttttttgtttaaatttctactctttggtagaatgaaattgtatgtcccaaactagtgagccattctctattaatgtttaacatccataatacattaacgttcacttgatccaactcagatactttggcaaggaagaggattagatctaccaaatctgggttctacatctaaaaagatttggggccatgatacaaaaatgactaatttggaagtatatgttttaattctaattggaaataactatttataaatacttgaataagggcttttggggtctatatttgttaaaggcaatatgatatattacatatataacaatactgcatattttgttagaaatatggtttaatagtcactttgctgacttaatattgttgatctttaactctgcaagtagttaaaaaacccagaacagagttcattatacttctgttttaaaaagggggtgggagggatcatctcttgaaaaacaaaaagtattaacattctaaaaaaaaaaatcacttatatctagtactaaggattgtatttcaagctttttaaaaaacatagttcaagtgtatttataatcaaaactatatacttacactaaaaaagacatagtaatacattcaaatataaaaagtattaggaacagcttgtacatattttagatgttctgtaagataagtacttaagaggacaaactttttaaacatctaataatcaataatgttaaaaatgttttatttcctttgaaaaggtcttctttgagtaggatttgccttaccttgaaaatgtatactcagagccaagtaaaacaacacttcaaccttttctaattaatttatagcctataataatttcaaaatatatatcacaacaaataactaccaaagtatattctccaac

SEQ ID NO: 37481 - DNA, 1023 bp, Homo sapiens
atttgatgacagattttaaaaggaaaattttatcccaaagcatttgcttttcaaaactgcaccaacattacaaaccatattattttgtcttttggcagttgagggtaagggagtggcggtggactgggtgggagtgcagtagtaacaaagcaaatgaagaatgagcgaatatttaaaaatccttagccaataatcatacatcagcacttggattttaaagtggctattaaaaattttcttcacagatgcctcaagtgacacatcttattaatgaaggtcctgcatttaatatttgcttacctgcatttaatatttgcttaccttattgacattaaatgtggtggtttctaacacatctttcactttctaccttcaaatcaagtttctggatttcattctcttgctcaagattttagctctatggtgattctcaaggctagattatggtgtctgcattttcgaaacattttgaaatcatttttctttatctcaaaggaattctttgtaggaactgaaaccttcctggattgaataggaaggtcatatggttattatagagtataggctctggagttagccaggcattgtcccaacccaagttctgtcactttttcctgagcctcagtttcctcttctgtagagtggagaaaaataactacattgtaggatggttgtgagtattggatgaattatgagaaaagtactttacactacttaatgagtgtctgtttatattccatttctttccaaaaataatttaagatagcttataaaaatattaaaaatagacaagccaagtaccagttcatttatttcttctaaccatcttcctttagtaacattaaagaaaattggggaaatattcttattacaaaagtaaaatatgaattgcaaacaatttgaatattacaggaaggtatgaagaagataaacttccattactggaatattttcatgcatctccttcatcctttttttccccaacataggcattttaaacctaaattaggattacactatata

SEQ ID NO: 37482 - DNA, 1048 bp, Homo sapiens
tgtattttgccttagcacatttgtactacgtgcacttctcctggttaattccttcccatcattgttatcttgtgctggttcttgcttgtatacttccaggtgatcctcacttactcttctcttgcaaatcacattcttttggggatttggccaatgggagatactggaaggagactgggaaaagggaagaaggaagaaaacaggacaattctcttctctcattctccctcaacccccttgatatgtctctctggtttcacggacattatccagcagtgactaggtgactgggtctcctctgtggttcagttctccaccagacagatccctccataatcccaaatattgtactgccaagcacccgctccatggtgccactcctgccacagagttggtccatgtgaccatcatctgggcttcagtaacgtccctctgctagtggctttctgcgttgctcatgtctgccacactctatttgatgctcaattcttccatcacctgtgtagctacttccttgtgttcaattccctttgtttgaaatacttagagtagtttctgttttcctgaccaaaactgttctcaactacagagttttatcattagagcagccctcactgaccactgggtcactgtccagcccatgtacccatttcaggtctcttcattgcgctttttactatctgctgtttttgtttgtttatccatgtatttgcttggtgctatcttgcttatcattgtatccccagagtccagtatcctcagagcctagaatagtgtctgatatgtagttggtgttcaataaatatttattgagtaaatgaataaaagaaatgaattgagatttggctaaacaaaatactactcaaatgaagagatgacatgaatgaagtgaatgataagcaggcccctaaatacaaactctagccagtgcgggggaaagaaaatgagagagaaatcaggcagaaaaaatgaaaatattaccgtttgggaagaaagacagtgggtgagaagaaaactagtatttatatagtatctattagcatgccag

SEQ ID NO: 37483 - DNA, 1032 bp, Homo sapiens
taaatccttttaaataatttctagaaccatgggatttctctactctcatccctcttacagagggaaaaggccagggttttgctcattgctgaaatctaagcatttggcccagagcataaaacatgtaaggcagtaagtgtgtgttcactggagcctggttctattgtttctgtcttcaaaagcctgtgatggtttcatgttgcccacagagtgaaacctccttagctgggcctcactgtatatcagtcttcctttccaccttatttctcatacaatctagtgatgcgctttttgatgattgcttaccatcgggctcatgttgattttttctgatgctccctccttccaaatcttcacttgtcaaagtcctgcacatattttcagaccctgctccatggttatctttatgaggcctcctgagagtcttctcccatcataattgatccactgtccttctctcccaatgacttcataccttcagtatattacagtcagtcttttattatagctcctgaatggacagggtttcattttaagtgctaatttttatcagttggtaatggctgcctagagcactgtattgagaaggattctaagggtatacctgggttcctcaaacagggtgccaaagcagattggatgcattacatgagtgtaggagaagagagagaacaaactgcccatggattcgccaactttatttagattcccattgatgtttctactcagctggatcaggtgctcgtaaagatatctttctatccttgtagcctctagcataattcattttcaatttgaagcttaaatactctattccatgattttaaaggttcataatttaaaatgacaaatatgacatttgagatagaatgtggtaatggaaaataaagatataaagtgctagtgaaatggtccttgaagactgggtagaaagacacgggaaacaagaagggaaggcagccctggtcaagagtgaaggacgaagatacaagtttttaaagtgtaagttctattctgttaaggaaaaatgat

SEQ ID NO: 37484 - DNA, 1124 bp, Homo sapiens
gtaaaatagaataattgctccgagtagtacctgcttcacagagtttctgtgaggattaagtgggatggtctatggcaagcacagagcagagtgctgctccatggtgccaatgattacaaacatattttttagttgctgtgagttctctgcccttttccttaaggcgtatcttcaattcttaacttcatatttcaaggtcatttctggacatctagagacctgggtaaggatgctttgaaatgaatggccacggggttagagtgagagtaagtgagaagttagatcaattacttaagatcccaacgggccttgcaggttggccttgtgttagggattttcccactgtctgtggtctggcccaaagccccgtgggcccagaaaccacacttgtcagcagcttcagagcacatctgtcctccagaactggactcatattaatgaaactcttacaactaatgtgtgagatcagaatgccaatgtttccatttagaatgagaagtgaaacagctgaagatgggcggctcatcttcccacccagcgcattttgctcctgtaggcagactacatggggagcaaatcgctaacccggctgtcagtttattaatttataaggagagacctagctgctgagttgctcctcaactccctcaagttttaagcaaggtctccctaaagacatgccagacaggatcccatatttgtgtcagaaagcagcttgatgagcatggaatcagaagggcaagctgttctcagacccatgggtataatgaaatgagagaggcagagccacaaaagggaaggccaccagcctctagcaccctaccccagtgtttcagtggctactgcctgtgcttacttccaaggctgctttttgcctacttcctggtctgagacggactgtccatgggacacttctggcctttaaaagcttttgtttgtctcatattgtgtagaggctaagatttaaacatcaggaatattcatgtaacaacccagagctgtagcctttcttgaaaaaatccagagatctagccccttcccacatctggtcaaccatctggagctgagcagagactgtctcctttaaaggaagcttgagtgctgccttcattcagttcactgtg

SEQ ID NO: 37485 - DNA, 1036 bp, Homo sapiens
ttggtgcatctatcattgcatcacctagttattaagcccaacatgcattaactatttttcctaatgctctccctccctccacctcaccccttgacaggcccccatatgtattgttcccctttcttctccctgtgtccgtgtgtcctcattgttcagctcccatttataggtgagaacatgtggtgtttggttttctactcctgcgttagtttgctaaggataatggattccagctccatgcatgtccctgcaaaaaacatgatctcattcctttttatggctgcatagtattgcatagtgtataggtaccatattttctttatccagtctatcactgatgggcatttggctttattccatgtcttttctattgtgaatagtgctgcagtaaacatatgtgtacatgtatctttataatagaattatttatattcatttgggtatatactcagtaatgggattgctgggtcaaatggtttttctggttctagatctttgaggaattgctacactgtcttctacaatggttgaactaatttacattcccaccaacagtgtgaaagcgttcctatttctctgcaaccttgccaacatgttgtttcttgactttctaataatcaccattctgactggcatgaaatggtatctcattgtggttttgatttgcatttctttaatgatcagtgatgttgagctttttttttttttttttttttttttgagacggagtctcgctctgttgcccaggctgcagtgcagtggcgcaatcttggctcactgcaagctctgcctcccgggttcatgccattctccggcctcagcctcctgagtagctgggactacaggcgcctgccaccacacccagctaatttttttctgtttttagtagagacggggtttcaccgtgttagcgaggatggtcttgatctcctgacctcgtgatccacccgccttggcctcccaaagagcttttttttcatatgtttgttggctgtgtgaatgtcttcttttgaaaaatgtctgttcatgtccgttg

SEQ ID NO: 37486 - DNA, 1104 bp, Homo sapiens
gttgaagagagggagaagggataccaaggcttagaaataatgattaccaagacatgtacatgaggagaagcaagtgcttaaatgttctgggaaggtagaaggctgatgctatgcaggagatgaggataataaagtagtttagggacagattttaaaacctacttcaattatattgaaatctactctaattgtaagcttccaagtggatgccagagttggctttcaatacatttgcttgtgattctctgaaatgtataatgtttaatgaactgatttggaacaataaaccagtttttactgtagttgttttcagtttattgaaccaaaatactattatgcttactgcattagtcagggttccctagagggacagaactaataggacagacacatatatataaaggggagtttattaagtattaacttacacaaacacaatgtcccacaataggttgtctgcaagcttgaggagcatggagagccagtccgagtctcaaaactgaagaacttggagaatgatgtttgagggcaggaagcatccaacacgggagaaagatgtaggctgggaggctaggccagtcttgcttcttcacgtttttctgcctgctttatattcgatggcagctgatcagattgtctgccttccccagcccactgactcaaatgttaatctcctttgccagcaccctcacagatacacctgggaacaatactttgcatccttcagtccaatcaagttgacactcagtatcaaccatcacactaaagctaatgatatttcattcaacttgaaaacttgtttattttataggactttttggattcaggttataaacaataagtcatagttatcattaatattctcaattcaccaccatagtgtatatttttctttctttctttgtgatttgttgatattatggtccctgactgaaaagttgagaatatgtattcttattatctactatatctttccagagttatagaatctgtctccatatttgttttgcaaacataatttcttttctttcagatttgtttctttatactggtattggaactatgcctgatctagtgaaatactgattttcacatacctcagta

SEQ ID NO: 37487 - DNA, 1073 bp, Homo sapiens
acaaaacccatatgattatcttaatagatgtggaaaaactgatgaaatctgatatcccttcatgttcaaaaccctcaacagcttatgcattgaagacacatacctcaaaataataagagccattcatgacaaacccacagtcaacatcatactgaataggcaaaagttggaatcattcctcttgagaactagaacaagataaggatgcccactttcaccactcctattcaacatagtattggaagtcctggccagtgcaatcaggcaagagaaagaaataaaagacatccaaataggaaaagaagtcaaagtatctccctctgctgaatatataattctatacctagaaaaccccaaaagactgcaccaaaatgttcctggagctgataaatgacttcagtaaactttcagtatacaaaatcaaatacaaaaatcagtaacatttctatacaccaataacatcctagctctgagccaaatcaagaacacaatcccatttaaaatagctgcaaaaaattgaagtatctaagaatgcatctaaacaaggaggtgatagatctctacaaggagaaccataaaactgctgaaagaaatcatagatggcacaaataaatggaagagtattccatgctcatggattagaagaatcaatatcattaaaatggccatatttcccaaagcaatttacagattcaatgccatctctatcaaaatatcaacgtcattttttccacagaagtaggaaaaaaactattccaaaattcatatggaaccaaaatatccaaaataaccctaagtaagaagaacaatgtcaaaggcattatgtgacctaacttcccactatactacaaggctatagtaaccaaaacagcatgggactattataaaaacagatacacagaccaatggaacagagtagagaactcagaaataaagtcacagaggtacaaccatctgatcattgacaaagctgacaaaaatgagcaatggtgaaatgattccctatttaataaatggcgttgggataactggttagtcctatgcagaaggatgaaactagactcataaaaccc

SEQ ID NO: 37488 - DNA, 1052 bp, Homo sapiens
tgtccctaaatttgcttttgagtttaactatttatctaaaattacagatgctatttaagtgagttaaattccttttggaaaatgttgggaataggcttgatattccttgttgttatttttaaaatctggcttcttaacaatggcatccttcttaaaaagtaccagatttactatttattgctatacatatcctgtaatttaaaaagccatcacagccttttgtatttccatttttatcatattttccatctcagccaggctctcaagttaatttgtacccagaggattgtataatttttgcaaagctgcaatgcacaaaggcctatagaaagtgaaatccatcaaaaaatgttttgtgactaaaatcttgagatttacaataaatgaatgatatgtgatgatgaaaaatgccagtggaatgtgtttaccattttaagaatgtttacaaaaaaagcaagatattgtcacagtccatattgtgcaggtctgtgtttgtggaattgactgccaggctcaatatgtaacattttcgttgtgtctacttaatatcaattctatttatttacttaattaaccaagggctttctttagtgagatcatgtatgatttgttctaggtattataggtatagtagatgtagacttgcactaaacactgatttttaatgaactacaacaggggttggcagatattttctgtaaagaaccagtaaatattttaggctttgcgggccatgctgtttctgtcatgacaactcaacattgccggcgtaatgggaaaacagccataaacaataaatgaaggaaagggagtgactgtgtttcaataaaacattatttataaaaacaggcatctggctgacttggcccgtgagccacagtttgctgatccctgctccatgtaatcatatattaatttcaaaattgagaagctcttttaggccatgattgcatggtgactttgtttgtacattacttttccataatgagaaatcttaaaattttttcccagtatttttaatggtatatttagttgtttatcccttgatttga

SEQ ID NO: 37489 - DNA, 1050 bp, Homo sapiens
atctccctgctgccatctgattctccttcactatttgcaatttgtctaatcatatcactcctttgattacaaaacttcagtaacattctatggctcacaagagggcatcaaaatttctgccgttgtatacaaagcacttcatgatctggcttcttctgcctacttttccaacttcttctcctgggctttctgcatctgtgcccttcatccttacctagctacttgcagttccccaaacatagcatgctgttctcacgccttcatatatttccaggtgtgttgactcttttgcatatggtttaccactgcctgcttatctgcttggtaaatttcttatctgctaaaactcagcttcaaggttaacccctttagagaagatctctatgatcactctaggtagaacttgatgcttccctctttgtgtttctgttttattcatagtacttgccttatctctacactgtatggaacatcttccagagaaatgactctcaagcttcaatgtgcttcagactcacaagtggaacttgaaaaaaaaatcaaagttgtgcttcagaaattctgatacactgggtatggatggtgctaagcttctatatagttataaaatcctaagatatatctggtacatactcacattttagaaccattgttgtgtcttagtaatctctttatccttagaacttaacatagtatatagtacatgcattatgggcacttcacaaatgatttttgaaaatagaatatgacattcttttgctggtgagctgtatacatagtgatagtataactgatatacttggcacacagtagttatcagaaagtgtgtaatgtttggatgtaagaataaatgaatgaaaagagcttagggaattgagagaaagcaactattagcatagcctcttgaatctctcaaatattgcaaattccatatatgttttctgagttttgggtaattaggatttgaagtcaatcattgatgtcttcaaaggcatatctggagacatgatattgtggtttggaatttttatactaagttagtagacacag

SEQ ID NO: 37490 - DNA, 1046 bp, Homo sapiens
aaggaatagagggaaagggtaccaatgtttgttgaaacaggtgccagtcagccacactgagtgaaaaccaaactgagtccaggaacacgagtttggtttcaagcttcttgtgccatttcctgcgtgtttgcctgctaaagggcagttgagtgttcaaagctatccctctcaattgaaaactcatctgacaataatgaagcgtgtcagctcagaaaggcattaggagctggagacatagccaagtgcttgtattcaacattgattaatgaattggttctaatctcagagcatcattttcacttataatttttaactcaaaaaattgatttaaaagtgcaatataagtttaattctatttttttcccactgtgtctggagaacaagtttttttcttgcatttttccctttttccctcaatttacttaagcatagattttatgtcattctctcatcacataccaaaaaacttagcagttgtgccaatataataaatgttgaagtaagaaagacagggagacaaatggaaaaaaaagagaatacaaaaagtatggctaacattatgtaagaagaaaaatacaaatggctttctagtaaccaaataagatgtacacatgaacttcataaatatcctattgctttgtggagactttcgttttattttagaataattaaaaatagtaattaacagtttattgagtacttactttatgccaggctctgttctcaggactactcatgaaataactcacagaatccatacagcaaccttatgaaggaggtctgaggggagtccccattttacatgtgaattacgctgtgaggcaagggagctgaagtagtttgccaaaggtcacacacctagtaagtaggggaacagattcaaacaagaatgagacagacattttctgttatttttcacatgcaaaaatgtctctattctacctcaccatttgattaataattctgggctaagaaataatttcttttagaatttgaaggcttgttcttataacttttaacttgtaatatttttttgagaaatctaa

SEQ ID NO: 37491 - DNA, 1071 bp, Homo sapiens
tctggttccttctcatttggataggctatgtcagagggaagatctggaactcaagtgctgctgttcagattcttttgctccatggggtgctcctttgatgtggtgttctcccccttcccctagggatggggcttcctgagaggcgaactgcagtgattgcttttgctcttctgggtctagtcacccagcagagcctaccaggctctgagctggtactaaggaatgtctgcaaagtgaaatagactctgtgtgggtccttgcttgtatttttctttagtgtgctggttttgtgttggttggccttcagccaggaacacaagagtgcaccactgcactctagcctgggcgacagagcaagactctgtctcattttccagagcgtatcagctgcagctgtataagcaggatcaggcagtgggtggggttatagagctcccaagagattatgttctttgtcttcagctgccagggcaggcagagaaagaccactaggtggggacaaggataggcctgtctgatctcagagtctccttgggtgggccttgctgcagctgctgtgggggatgggagtgtggttctcagcccaatggaggtatgttcacagggggattatggctgcctttgctgagtcacacaggtcaccagggaagtgggggaaagacggcagtcacaggcctcacccagttcccacatagcctgcagtccacttaggagcatgctgaccaaagtcaagagtttccccattctcaaaacactacagaaatttgatttgtaggcactacatttttttgctttcccaccacctcactgactgctttatcgtaatctcttttactaaatttttcctattttacctctacaatttgggatcccacctggtatagtacttaacttcctcctgttttctgtctagtaattccttatatgatctcaaccagcttgggttttaaatagacacaagcaaaattccaattttggttaccagtcagtgtacattaactgtggtaattgcaataaagcacaactgctacctcttcagtccacaaatcactatgcaaataacgaatgtgc

SEQ ID NO: 37492 - DNA, 1026 bp, Homo sapiens
ccccaaagcctaaactgatttaagactgcctattctgtttctgcgcgtcttcaggagatttctccagggtgcttagatgtgcatcataacattttcagaattttgccactggagggctcaatggcctttttaatgtttcttctacgagaccaaatgttacgtttgtgtaacagtgagatgtgagaccaagttttttctcccctttttgagaaaatctgttttgggtggtacagttagatgcatgatagccaaaaagcttttgtaaattccctgaaagatggaaatttgtcatagctacatgtatactgaaatcaaaaaggatgccattcatctctccccagagaatacaagggaattgagattataccgagcaaggcttgtgctgagttagatgtgctgcatatacgcggtgtgcttgtgtatgtatgctggtggcagtgtggaaggtggtggaatagtgagggcttaggggtctgtagtcatccaggaattgtatgattaatgtagttggtatgagaatgagaataattttaaggactaattggaagaatatgaggcttggtatcaggcgactagtgatcatgcattgttccaggattcctgctgcatgttcggttataaaggttgtgacggcagttctgcttttcctgaatgagctatgtgtgcctgtggtccaacctctctgaggctggtcctggatcctggactgagcaagtgaactctgatatgagtgacacattgatttggcatctgcgtaattttttgtgatgtttaggagtaacaatgaggtgttatgaaaaaagttggaaacagtgttagcccccatgcaaaagtataaaatcaacataaagcagagagatagaaatatcagaatgcctctcccagaatgtagcaaaaacgcaattctattacatttggtatatgattaagagttaactataaactaactgaaagattcacgtatttaatgattaataataatataccaatccaaagacagatggctgctcagactgaaacctcctt

SEQ ID NO: 37493 - DNA, 1025 bp, Homo sapiens
gagagagagggagagagagagagaagacaacaaaaaaggaaatacgaggatttaactagtcagaatttaagctgtaagtatgaaaagaatgtggataataaaaggaagataagagattctaaaggtagaggaatgtttagattaaacctaaaatggcacactgctaagacttcagtgtacatgaccaagttttaaacctgccagcctatacacacctaacaaagatctcacaaaaataagcctgcactgatttgatagatatgtttgctgaatatttttaaaagtctgttgaatattcactatttgtcaaacactatcctagacaaataaggtaaagcatctaccctcaaaaggtccatagtgcagtgaggggaacagaagcagaccagaaattactgtcaagggcttagggatggattgaagttcagccttggcctcactgctccacccaaaccttgagaagttctcagcctttgaaagctcaagagcaaatgcccaccttcactttgtttctgccatccctgaacttgcgtgtgaacaccaggttagcatcatatctaatctatactactacatctcttatgtgtgcaaggcatgattctcaaacttaaggtcagtatctgaatatcagcttttaaatgcaggtaagcattgtagatataacctaaaatgaaaatagccttatgttatttttatgtcaaatgttgaattccaaaaaattaaatagaaataggcaaattgtacaaacattaagagatactgatttcgctagttaactatatgaagaacattatatgttttcaatacatatacagttataaaaattatgaaatttgtatgtaaataaatatatattataaaagtttaaatgccaatgcaaagaataataatacagatgagatcatagtatatttccaacctttgtagaatcgttaacccatatagaaaactttatgactcaaaatttcatgaggaggaaaaattggataaaaatgtgtaataacatatgtaagaaatcttcaatt

SEQ ID NO: 37494 - DNA, 1048 bp, Homo sapiens
ggcctaggagagttgcctgcccctgggtggagactggactggttgactttgcccatggggaagagaggtggaggcagactgtcttccagagcttgagtaagtcttaacctctctaaacctcacatttcttttctgtaaatctgggggaataacataccaacctgatggtgctgttaggagggtacaatgaaagttcctggcacatggcaatgctcaatacacattctttattctcctccactccatcacttctgatagtcgttcatctccacttttgaggcagcaggtatctttaaaagttatactggtgtctcttggagccttcaggaatgaccatttatactttagcatgaattaactcagctaggttcttgccttctaatttctggatagaacattgtaaattttgagcagtgggcgtgggtgagagtgatttagctcaatctgtagaatttgtggcagcaacctgggcctggatgggtgccacaggacttagtatgggggaggtgacaagaggctggaaactagtggagctttgaatggaggtgcatgggaagggaggcatgagatgctaactacagacttgctttgatccatagcttggctgaagaatggctctgggtctggcaagggaatgggaaactgccctgttctcctctgccaccgtcctgtccctcatgatttcttgctctcagaacttgggctggagctgctagaagtacattaggaggtctcatctggaaaccaactcccattagtgacattgcttctctgggcaaatgaagccagtaaacatagcttcctagtgaactctggaccttccccagttcaggaagccagagactgcttgcactgcatagataatgttttcataaggcttagccttcgtacacttgcacaatttttctgtcacatcttaaaatggaaggtctaagcaggagtcacttgtagtcactccctttgcttcatatatgctttgcacatagtaaatgccccataatgcgaaatcaaattgaataacaaatatatgatttgtctactgattgaa

SEQ ID NO: 37495 - DNA, 1052 bp, Homo sapiens
tttgcttataaaggacgtttttctcccatggaggactagactagagcagattttttcactgagcatggttcattgtctctgtgtccttgtccctttccctcctatttttaaacatctcacatgcctattctttaacatccacacccactttcttagtcctgccagctttcttctttctccttaatattctctctcatcccgactttctctgcttgcaagatctgattcttgtaacaaccatttagcatccagagatgtgctgttccatgtggcaactgctacccgcattttgctatgggactttggaaacatggctagttagaattgagatgggctataagtgtaaaatgcatacatgcacactgaattttgaagacttgtacaaagaaaagaatatgaaatatcccattattaaactttttatattgattgcgtgttgggataacattttggatatattaggttaaattaaatataatattaaagttagttttacaagtaaaattacatatgtgtctcatacttgtatttttattggataacactgatctaaagcagggatttcaaactccaaactccaatgcccacaggggccaccaaagtaaagacaaggagccaagagggtttggtggggccatggtggaccagggagcccctgccctctggaaggagcagctgcttctcagctgaatactggcacctgggaaagaaaccgtgttgccagagcttctagattctttaatagaagccaaatcccagatttttgtgtgaagtctttagattcctgaatttttgtcaaataaataatatatttttaaaagcatcataggttaaataaaatatatctctggcatgaatttagctatcagttagaacttctgactcagagaggtcatatctggtttctcctctccccacttccccttcccccaagtgctgggcaagtgctaggcatgtgttgtctggggcaatacatgtaagcatcaatatgacatgtaggcgtcaatacattttacaaactaatgggatgagttcaccagccaggagaaatg

SEQ ID NO: 37496 - DNA, 1033 bp, Homo sapiens
tgcttttactagaaattttatgtgtgggacccacaatgtgtcccactgaatagccgtttttactccctcaatttcgaagaggcactgctctttttgtaaatgtttatcaaatcattttaattctagaaaatattttggaagtttcactctgccagagacctaaagaacatttttctcccaatatatcttagtttacttacactttctcattgttttgactctgattaattatgttagatgaatgacacttgcattaaaactttagttattagtagattaaaagctcagctacaaagaaacaggctgtgtttgaagggtaagatacgggaatagataggctttcagttggaagtttttatagttcatggactgatttcttagtgtagctccagaaagtaaagcagaatatgaatatgttttgttccttaataaacaaaattgcttgctgtaagcaaacacctgatgatccagaaaaatattttattctcagaagagtaagtagagataatagtgacaaaaagaccaaatacatttacctttcctgtcatcttgaaagtgaactggatagagcccctgtttttggttttaaaagtaaagtgataaatggttttagaagaatgttttaaattcagtatagatgaatactatatattaaaggaagtatttatttttgagcgtgtacataatcctaatgtagaagaatttcagagttggggaactttacatttttttctttcactatcaaggataatagaataacaaataataattgaattattttgaaaggtatatatcatattaccgtgaatgttaacttattaaatcacattacagttcactgaaccaagatatttttaaagcaaaaatagataactctgaattttttatgttcctttttgccaaaaagttttcagaaactgtcaatctttattaaaaaaaacactactatgtaagtatgaattttgtatacaaaagatataaacttattctggagaagatactaaattaacactattatgtatgccttcaccat

SEQ ID NO: 37497 - DNA, 1111 bp, Homo sapiens
gaaagaaaataaaaaccaaaaatcttgttaaatatccaactctttttagtcgttaagacatttccctgcctgcccatagggaactgagcatgagaaggaaatacacgttgtcagcaggttatttattccaatccttgagggacttctagtgactagtccccttccctcaacttacttttctttaaatatttttctgtatgtacaagcaagggcacatgaaagcattcaatttcctggcttcctaactcaaactactaatatataaatagtttcaagggtgttttctataaactccaaatatgtcaaaactttaaactgtgacatagtcatttcctatatttagatttttggaatatttagaactcaaatgtcatatatgatttcacttactaagaggttatttagatgttattttcctgaaagtctaaaatctaaatatatataagtgcttttgtggtaccaacttaataaaatatgaataagctattgtaactagcaccaaagaattagtagaattaaatgaacaaaaatctgtggattcagctaaagaggaaggtaacagaatgctattgcacagagataaattaaaatacctttttttttttaagggcaattttgttgttacagactgcagaagaccaagatacttacaatgttgcaataagaaattacggcagattgttatggtaagcgtattttttctccattaattctgtcaattgattgtatttttctggtgaaagctatgggactgctgatatgctgactagttcctagaatactggtacatgtaggatacataatttccatagaaacaggctctgttaacagtttcctatacctataatggtaaccaaccccagtgtgctttatgtggagcagagttagaactcatggtttgttgactggagatgagaacatttggaagagaggtagtgactgtctctaacagtagaagcctcgttaattggaagaggaattagatttattctgatttgctatatattattaaaccggggagggacattaggggtccagtaacccctttgaaacagtacacaaaaattgttgtgtgggtaccttttggggatggggaatgagctctatatct

SEQ ID NO: 37498 - DNA, 1071 bp, Homo sapiens
tctcaacattgttgtcctggagattgagttcccaactcatgagctttgtggggatgtagtcaaaactacacagcatgagagaagatctaaaagcaaaaacctgagtttacaactgtcagttgtaagagagttacaaactttactgccttggtcattgcttaaacacaaaaagcatagttttaacattttaatattaaaaggaaattggtcctggaaaacttatttatttatttgcgtgattgctgctacttctaataaaaatggtgaagagtaacaaaaaaaagtgtccacaaaatttctggcacttaaagtaatcccttcctccttccctttctccttttcttcttcccttcctattagggaggtgatatgatatgattcagttaggaggagactagtaaagtacttaatgtacagtttttctgttttaagtaataatcagggagataaacttcatgctttttataaataatttgtaagaatcacaatgtttctttttttagtgctctacagcatcgagctgatgtgtcctgcctctggaagctagctggggatgcttgtacctgtctgtatgctgtcgcaccatctaaagtgaatgttcatgttttaggagtccttctaggtcagaaagaaggaaaacaagtattaaagaaaaatgagctcctccaccttggaggaaggtaatttgcaaagattgccagttaataacatttgaattgaattaaggcattgtaacaaaaaacattcacttttatattcccgtaggtgttatggtcgtgcattaaaactgatgtctacatctaatacatggtgtgaccttggaattaattattatcgccaagcacaacatctagcagaaacaggcagcaacatgaatgatcttaaggagttgctggagaaatctttacatgtatggtataaataaattttttataaaccttttcaaaaacataatgcttttctcgaagttgttttggatgaagtaaatagtgttttcacataaaaccacatatatcttgatatacatgctgctattccaagaaataaaaattaatctaatttaacttcttt

SEQ ID NO: 37499 - DNA, 1021 bp, Homo sapiens
tgacaaactgagatggacacctgtcctggtaggatagaaaactcgagttcttcaagataatcaaggaaaagaaattttgttcagcactttttcaaaaaaagcattttattcttattctgaaattaaaataacatttcttagcattaaaaaaatcataaaaggaacaaatttatctgctttaaatagcacttttataagtagaaggagccacagatatatatgtttacttgaattatttattttatattttcctttcagatttggagatagttccatacttttagttctcttacggttttttaaattttagtttacaggcagcattaagagcagacccaaaggacttcaattgttgggaatcgttaggagaagcatacttaagcagaggaggctacacaacagccttgaagtccttcacaaaagccagtgagctgaacccagaatccatatacagtgtgtttaaggttgcagcaatacagcaaatcctaggcaaatataaggaggctgtagctcaataccagatgatcattaaaaagaaagaagattatgtgcctgctttaaaaggtaatttatttttagtagctcctttgacttttatgatcctgaagtataaaatccttgagtagatttcctgcctaaatgtattgaataacttgaaaaggacttctttagtcaacagcaagcatccatatgaacctcttacagtatagcttatataaatttgaatataaaaagatcaaatcttgtttcacaagttaataaatagtaatgtgacagagatttaacttttagacaaacagtatgataactattagatctaaaaattgatctctaaaacatgtttccctactcttacattttgataattaattcatcatgtctccagaatatcttaatacctttaattactttgtaagttatacaagctcattaaattttttttaaacttcagagacaacttgcattgttttgtagttatctaagttatttttggtaatataaaataaaataccaccatcca

SEQ ID NO: 37500 - DNA, 1021 bp, Homo sapiens
aaaaaaagacagtcagacacaaccaagtgcaaatacacctgaagacctgaagtatccttgggaatcttcaaacctctgaacccaactactaatatacagaaaatacagggaaccaaggaacatgttaaacaccttgagaatacgtttagcaaaatccagactctgagaaactgtgacaaataggccatatttttcaacagttaaattgtaaggaagaaaaaaaaaagagaaggagggggaccttattgattaaaagagacaaggcattatcattaagttcaaatgtatgtgtcttatttagattttgatttttaaaattgttaaaatatgagacaactgagaaatttgatagtgttaaggatgttgtttttgtttaggtatgataatggtaatgtggttatgcaacttagaaatgaacttttagatatagatactgaagtattacaggtaaaaagttacaatatctgggatttgtgtcaaaatcatctgagcagaagtgtggtaaaattagtggaggtatagatgaaaaaaatgattgcttgtgagtttgtggttttgtagctggatgatgggtacatgtgggtttattatactagtttctgtaatttttttatgtatatgagattttccttaataaaaaggttatgaagagtgaagatgtgttattagtgatagaaatcaggacctctatttctttattctattaggaccatgcttttctgtgttcgttcgttaattaaagcaaacattgctgtggttgtgttgaaggagatttatagcagttctttacaattattttctagatttctgatgcagataatatcccaggacttttggttctcaaaagcttggcctatcggaacaaaggttcatttgatgaagctgcaaaggttggcttttttattcaaactgagcattttttgagttaaaagcatttttatttggctatagaattgacaggtgtctactttatagattatggaagaccttctctcttcttaccctgacctagctgaagttc

SEQ ID NO: 37501 - DNA, 1025 bp, Homo sapiens
gtctttccataaggaagtcagggaagaatttatatttagctttgagttattcttcatgtatattgttttggaaatttatgcttattgtatctgcaatttattatatgtcatccttaaaaaagaaaaaataaacagaagtgatatggctgtcttcatttggatacccttaattttgtcagctctgaagatcgtagataatcttggtgcgtctggtaacagtctttatcagaggaatctttgtcttcatttgaaagcagaggctttgattaaactctcagattatgactcttcagaggaagcaattcgtacgcttgatcaggtagacttgtcaagtttttttcttcaactctagttagtttccaatcaaccaggcaacaaccattctctgcctaccacaaaatttacttatatggattttgtgttagaggtatgaattcaccacatctgcacttttataagtcattcatacatttgggaacttctaaagttatttgtttgctttttgattaaggacttatagtactcatcatataagactatttcgttagttctagacttcattctcgtttcttccttttgccctcttaggttattactacttgattattattaatttgagattccaaattttttccttcaggaagtgttctgcagatttgacaagaataattaaggacactgttagcttcatggtagagaatgtttatttgtttcattcaaagaaagattcatatttcataatgaaaccgatttcttagtgttttgagttaaagcaatttgaaagtccatagtgaaaaaaactataactggtaaattatgaattatagcattatgccctaaagatttttgtcaggtaaagactattactggtctaaattaaaattgagtttttaaatcagttttatgtatttcaaagggctttgtatttcataatatttctttaaaatcagaaccgttgtcagcatctttcaacaattaatattttcttgttttctttttgccatcccaccaataatgtgttttgt

SEQ ID NO: 37502 - DNA, 1023 bp, Homo sapiens
aaaagtaaattgggagggagagggagggagggagggagggaggaaggcagacatgtagatatatatgcattaggaacttaggctttaacttagtcttactaggtatgatgtttctggaagaacctacattcaaattatagatctgaatggtaaatacaagccaggtaggtggttgaagggaatgggaagaacattttaggcagagatgaatctgtgaaatagcctgagctaagaggaaaactgttgttcagagaactgcaggtagttcaccagggtttgagaatgaagtgtatgtacaggaggggacaagaagtgagattgtagaagggcctagcaagacttggtaaggagtttgcacagtatcctgacaacagtggggaatcagtaaaagatttttagcaggggaattttataatctgatttgtctttttagagatattctagctacagtgtaaagaatgcattggggtggatggcaagcacttgtagtgatttgggataaagatggtggaggtctgaactgacgtggagatggagaaaaatgtatggtggggaatgaattgaggcagagaatcagtgtgactttgtgactgatgagatatgagagatgaagaggggaggagtctgatttggagagtaggcattggtgctgttcatctatgtagtcacagaaaccttgttttttgtgattgtttttatccttttagggttaaaggaaagccctgtctgcacaagtggatggtatcatctggcagaagcccaagtcaaaatgcatagacctaaagaagctgttctttcatgcagtcaaggtatttttgatactttttgggttgacatataagggtgaccaaccctatttgtttttatcttaaaggacaaagatagtgatttttaaaaaccaaaatgctatattttgtattttaaattgctaattttaatttcaataagtttaaataaaagtctgcatgcatgtgtactagtgtgtttatttttaaactgacaatgaatgtttagcaaaatttt

SEQ ID NO: 37503 - DNA, 1027 bp, Homo sapiens
gatacttcaaagaacgtgctagtgatttcagaattgttttaaaaatgatatgtgagcagtagcagctatactagcatataagactatactctggttgactactttgtaggagacagcaggcacttggaagtgcgttttgttaaattaatgttgttaatgtatagttgttacttaccagttgagtgcagtttgctggccagttggagttagaatgcattccaaaacttacatgtacatttttttcctcgttgaagttgtcagggttagactgtagaatacatttgcagttaattgaacgtgtagtttgtgtaagagagtcttatacatttaatcatttgtcatttaagtatgatacagatgatagcttttttatttgtttcagctttttactgcttttgagaatgcactgggattatcagataagattcctagtgaagatcaccaagtactttataggcatttcattcagagtttatccaaagtaagttgattttttaaatctctaatgtgacttgtatgtatttctaattaggaaagtgttcataaatacattttactactactagaatgtagtgtattttgcttttatattttcaagtttcctcatgagtctgctagattgaagaaggcctgtgaaggaatgataaacatctatcctactgtacagtatccattagaagtgctttgtttgcatttaattgaatcaggtaatttcttccttattatagtgtgtgtcctagaggtgtgtgattatgtgagtgatgttattaatcaaaaaatgttttagtgtctaccatgtttaaggtgttgtttctgtgtttctggacataaaaagaagtataatgtgtagtctttgtgtatatgaaaagactaataaatataggaaagtacagtaatacagaagaattatgagttgccagatttattgttagtcagtgaaatctttttaatggtggaaattggagggggtcttgaattttttatagaaactaggtaaacaggagtaggtgaaatatattccagctgg

SEQ ID NO: 37504 - DNA, 1032 bp, Homo sapiens
ttaatttttaattttcataagtttttgaggaacaggtggtatttggtcacgagtaagttctttagtagtgatttgtgagattttggtgcacccatcacccgagtagtgtacactgaacccaatttatagtcttttgtccctcaccttcccccaagtccccgaagtccattgtattattcttatgcctttgtgtcctcatagcttagagtgagaacatacaatgttcttatcatatgttcacgtatgagtgagaacatacgatgtttggtttatcattcctgagttacttcacttagaataatagtctccagttccatccaggttgctgcgaatgctattaattcattcctttttatagctgagtagtattccattgtgtgtgtatgtgtgtgtctgtgtctatctatatgtatatatatcacaatttctttatccactcattgattgatgggcatttgggctagttctgtatttttgcagttgtgacttgtgccgctataaacatgcatgtgcaagtatcttttttgtataatgacttcttttcctctgggtagatacctagtagagggattactggatcaaatcgtagttctacttttagttctttttttttttttttgaggcagagtgtcactctgttgcccaggctggagtgcagtggtgcaatctcggctcactgcaacctctgcctcctaggttcaagcaattctcctgcctcagcctcacaagtagctgggattacaggcatgtgccacgatgcctggctaatttttgtattttcagtatagatggggtttcaccatgttggccaggctgatctcaaactcctgacctcaagtgacccgcccacttcagccccccaaagtgttgggattacaggcgtgagccactgagcccagcctacttttagttctttaaggagtctccgcactgttttccataatggttgtactagtttacactcccaccagcagtgtagaagtgtttcctttttaccacatccacaccaacatctattttttttattttttg

SEQ ID NO: 37505 - DNA, 1047 bp, Homo sapiens
ctgtgtgtttgtgtgtgtgtgtgtgtatgtgtgtatatgcactgtgagggagacagtcttctatttgtgtatctgcatgcacgtttgtcagtgtttgtgtgtctgttgggtcttgaatgtagaatacaggaaggggatgattgtggtataaaatgaaaaagtccatttctattggagtctatcttccatgtgtaagaaaaaagaaatatattttaattacccaaaactctgaacaatatgtgaataattgatgatttaatgcctataggtttttaatttttatgaaactattttattacaaaagaaatacatgtttactattttgtttcaaataaataatccaaccacccattgataatcacttgatatgtacatttccatatatttttatgaatatatgatatatatccttccagatatttttgaaaaatgaattttttttttttacttttttttgagatgggctctcactctgattgcccaggctggaatgcagtggtgcaatctcggcccactgcagcctccacctcccaggttaaagcaattttcctgcctcagcctcccaagtagctgcgactactggcgtgtggcaccaggcccagctaatttctgtatttttagtgtagacaaggtttcaccattttggccaggctggtctcgaactcatgacctcaagggatccacctgtctcggcctccaaaagtgctgggattacaggcataaaccactgtgcctggccctaaataaaccattttttaaacaatgtagcatggagtcaataaatactttttcattctatccctaatacatagcacagcatggtagacattcagaaagtatctgttaaagaaacagagaaatactttgtgatcatctgtataagttctttgccattttccctaatttcaaatgtttttgtactcatttataaattccatatgaagtgaggattttagccctttgctaaatatgttccaaatactgttttcccctgcttatacttaaactttcctttaccaaaagaacagaaaataatactcaaacata

SEQ ID NO: 37506 - DNA, 1049 bp, Homo sapiens
catgagaacccttaattctattttctttgtttctttgttgtgctgtagctagtatctgggactctgggaatctgaaagcagtatttttttttttttttttttttttttatggatagggcacttgggaagcagtgtttgctacccttctagaggagcagcaggcatctgtaatttttcagccttccatggacacctgttttagctgattcattctcataccttatctttctgtattttgagtttgagacagttggaaatattgctagttgttttcattatttgtttatttttccagataccttatttggtttccatttacactaacacttaagctttgacccagaagacttgtagccccttatttttctctaaattatgaagattcagaatgagtatagttaacttttgattatccgaagagcttgttaccagaaattacttcaaaaataaaacatctcattatagtaaggaaggcatgtgtgtgttagaatcaaacaggtcagaattggagtgggagctccccaatattgtctttgtattatcaaagcaaacattttttggcacttactgtgtaccgggccttgtgccaaacaccttagatgggttatctctgaacttcacatcagtcatatgaggtgggtaatatcattatctacattttacaagtatggaaactggggattactgaggttatttgcccaaggtaacacagatggtagattctggagccagagttggaaactgggtagtttgctccagacccaatgatctagcatcctagatgtggtccattagggctctctcttttcatccgtttgtaaaagagaagttttcactttcttctcaaaccattgagaaacaacttggaactggaagtgcaaagggagaattctaaagaaagcgttttaaaaaggagaaagaacaagaaagcaggacaccatttcctacctttggtattctccaaatagttggcaccaattctcataaaaaaaaaatggcacaaaatggtgcatatttttacacacacacttttgtaatgttcatttaag

SEQ ID NO: 37507 - DNA, 1016 bp, Homo sapiens
cgtctttctggacttttcttttagccatatatcataaaccaacacagtaattgccttacatgacttgaaagatataaacagatcttctatcagtagcagtattgttacttctttccaggatgcaaggtctattatcccaacagaagagaaaatatttttatatttaaggattatgctgcactgtactacaaaattgtagtacttttttttgttttcttttttaaagaaatggaaaatgtttactattacagggacctcaacactgccctcccatacaggctggataaaactgtttttaagtcagtgattttagactgacctccatttaaattatgtttatatatgaactttactctgacctgtgatcatgtttcaggaaggaatgaaagagagttctttcttaataaagaaaaacactcaaggactttgttcatttccaaagctacttgtttacattgtacactgcgaccaccttgccgcttttcatcacaagcttgaatatttaaattctgtacttatatctgtaaaatagccaggaatttcctgtttgtgatctattatgcctttttacaaaaaaaatggctgtaaattattgtaaatattaaaggaactttccttacttccttccctttctcaggctttttttgactgttcctttccctaccaactcaggccttcttattaaaaaaaaaaaaatcagtgtaataacactttttaatgatttgtcttgatggaatcattgtttagaatgtaaaaatggggaaaggggccacttaattccattagtcctctttttatactgaatattttattagatacatgttattcccttttttttccttttttagtcaatattgtgtttgtagttttaaaaaatggcgagatatgtaaaatctaaactgcatgctctggaaacacttttttcagatgcatctggtttaaaagggtaggtgtataaacacttttcagaatccaaaacggccaaaagttattgtaaatccgtttgttttcccgtt

SEQ ID NO: 37508 - DNA, 1060 bp, Homo sapiens
tgaaaccagcctcgtagcatctagtcacctcccatcgttgccggccacttctctgacttacttggttccagcgacactggcattcatacttttttaaaaaacatgtcaaacaagttttaggactttcatgtttgttttttcctctacttggaatggcttgctccttcattttctttaggtgtcctctcaaacattgcccttctttgaaatcttgcttatgataagataggaagctccctgctctttcttcctttatttttctttatcacagttgttgtcatctgacatactatttcttgttcatttactggctctcttatactagagtccaggttccataaaggcaggatctgttttacttacagctctatttcctgcatctggaacaatgcctagaacatagtatgtactaaacttacatatgttggataaattattttctaacagaatataaactgccaaagttgaacaaaaaataggaaacataaaagcaatgaataaactaaaagttagaaaggaaattaaagattttccctttcttaaagcatcagatctgactgaattctaattttatttataataagagaggtccttcaaagcagtggtgtgaggatttattattttatttttttgaaatagggtctcacttttgcctaggctgcagtgccagtggcatgatcacagctcattacagtctcctgggttcaaacagtcctcccaccttgacctcctgagtagctgggactacaggtgtgcgccaccatgcttggctaattttttttttttttttttttttttttttggtatagaatcaggatctcactgttgcccaggctgatctcaaactcctggactcaagtgatcctcccgcctcagcctcccaaagtgctggggttacaggcctgagccaccatgcctggcccaatttcttaataaatgatgttggattatctaaatgcattgtctgatgttgacccatcatccttatattcctagaactaaaccagcttgctttctgtgaatatgatgttaaatttttatttgtttttgcatttacaaa

SEQ ID NO: 37509 - DNA, 1022 bp, Homo sapiens
gtttagaattcattctcagaaaaattaaatttttggctctggcatacgtataaaaaatacattttgcattgagtttattcctacaaatattaataattgaaacttgttggtgaactatatatatatttaaatggttaagcattttttagccagtacatttctcatgttatttattaagacaatctgaaaaaatttattgctttttcagattcttccagatgatcccgataaaaaaccacaagcaaaacagttgcagacccgtgcagactacctcatcaaattacttagtagagatcttgcaaaaaaagaagctctttctggtgcggtaagttaaagcccacatgcctaagaccagtttactttttagtaaggtaaattttgtttacttcaccatgctaaacatctgaagtcaatatgagcttatataaatggatttttctgtaattaagtagttttatttgatgttgccatatttaaattttaccttaaattatctcagcatacatgttaaaactgatgaatcatagctttcagaagtaggattctgttttttttttctagttttagagagggatagagaaaactcgtttagcgtgcggagtactttttgagaagtcaagccttacatagcctacatgactgttttacttggagtcattagaatgcttaagggacagcgtcataggttgccaagcttactgaaaaagaaggaaaaagacaccaaaaaggaggtgattggaaacttagagcaactgttagaagtttacctgtgaccataatgtcaataactacctgtgtagcgttaaaaatcattcctaatgcagtctcttgtgctatagaattaagctgaaggccataataatctcagagggtaaaaaatttgtttctacttctctctgatcctttttttaaaggaataataatggctagtatttattatttacattaatattatatttgactcattaagttatatcacctttattgagtttctgatgttggtacagcttattaccaataga

SEQ ID NO: 37510 - DNA, 1014 bp, Homo sapiens
aggaatacttattgttaaataacataagtaatagcatcagttgcttggtgttttgtagaattatgttttatacttttaaaaatactggtttttttaaaaaaaatcaaggtggtagactcggaaaagtgaagggtccaacattccgaatatcaggagtacaggtgaatgccaaactagtcatctcccatgaagaagaattaatacctttgcacaaatccattccttctgatccagaagaaagaaagcagtgagtgatttattttctccattgtaagatttttgttattcaataattgcaaaatgaatgtgctgaatttttatggtgttattggctagttttgaaaaaaaaaaggaagaaataaagcatattattttgaagttctaatgactcacgtttttcaaaattaatttttcagttaaggcaattacaaacttatcattagttattaactttgatgccaggtatactatcccatgccacacaaaggcagctcattttgatatagactggggcaaagaagatgattccaatttgttaattggcatctatgaatatggatatggaagctgggaaatgattaaaatggatcctgacctcagtctaacacacaaggtatttatctatttctgattctgttaaccattcatgttgaatttaatttattctaattcttgcttttaaattatgttggaaataatggaaatctggaaaccaaggcactagctggttgtgtgaccttggtgcgtttagaagatgctttgcatgaaaggatcaaatttaaatgatttctgagattttgcgttactgtgaaattatatgttattaaggcattaggtgtattatttttcaaattacgaggttaaaagtcttattccatcattagctttaaaaaaatttttgatgcataatagatgtacatatttttggatgcatgtgataatttgatacaatcatataatatataaagatgcaatcagggtaactggaacatttatcaccttaaatatttatct

SEQ ID NO: 37511 - DNA, 1035 bp, Homo sapiens
aactgtagtcccagctactcaggaggctgaggtgggaggatcagttgagcccgggaggcggaggttgcagtgagctaagattgtgccagtgcacttcagcctgggtgacagaaggagacactgtctccaaaaaaaaaaaaaaggattctaatacttgatttgtctaacttcttcatgtaactgttgtaaaggtgaaaatgtcagtaattaataaaagtgctgtgtaactgttatatttttaactgttaatgttaagcatttttgtttttcctgttttagttctactcctttcaataaagaagagttatcagccattttaaagtttggtgctgaagaactttttaaggaacctgaaggagaagaacaagagccccaggtaaaaaaaaaaaaaaaaaaaaaaaaggcctgcctcagaatatgtgtcatatatttgacaggatgaaaggattcaagtatatttaaatattgtctttttaattataggaaatggatatagatgaaatcttgaagagagctgaaactcatgaaaatgaaccaggtcctttaactgtaggagatgaattgctttcccagttcaaggtagatttaaacaaaattttccttgtaattacataaattgagaggaattgagttatgtcatttagtggtttgttaatctttctttaagcataatcaggaagattgctgtgttatgtaaaaactactctctcttgttcagacaaaccagtagcaaactgatttgaaagagaccaaacccatttatgaagttacatttagttgggtggaaagagctgttgtttcctaattagcaactagaatagtgtttggcaaatagcatgtccttaaatacttaggtaaataaatgaatcagtgtgatctcttacttagatttccatgactgaaagctttcagctgatatttttttgaagcagtttttgacattaacttatcacaaataagaaaactcaagtaaatcagtcaaagtaagcaataagctactatatattgatacttaatatccctggtttgttgagg

SEQ ID NO: 37512 - DNA, 1039 bp, Homo sapiens
gtgatttggtaaatggtaatctaaaggacatcttgacctcacatcttaacccttcctggtacttctggaagataagtcagaagtgcgaaggcacagctgcaatccagccactgtagtgcattgaagggctaggatcagcatctagaattaatacattagaatgcatttgcttactctttttaaacctttggttgcttagttgctgctgcttctgatgtcattgttcttcagctaagatttttggagaaacactgtggtatagtaactagcaaacagagtgaacagtacttttttcctccccgatagtataacaaaacctaggtgtgatatggcaaagggtattttagcttcagtcatagagtgaaatggtaaaggtcttagaaaattttgaaaagtgaaataagttgttttctaacatgaaaatttaaaatctcaatttaaaataattcaggcaactaaagtgttacgtggacaacttaccatttatgtcttttaacatataacaacttgaattgtttctgtagcacttaattcgtagtagcggaaaattgattcttcttgacaagctattaattcgcctaagagaacgaggcaatcgagttcttattttttcacaaatggtgcggatgttagatatacttgcagaatatttgaaatatcgtcaattcccctttcaagtaagcatttaattgtatttgttgttttaaattttatctaattcctgtgcatattttacagaattaactgaaattattttataagtgtttaggtttttatataaactgtactttttctttaaaaagatgtatctgctttaaaaaatatttgtcattcccggtttttcttgactttacatattgcaacaaaacaatttttcttcctttcctgtgatttttattttcttttaattctgtctttttcttctatgcttgctttagattttaaaaactgaactaaggcagaattttcttgattggatagatctaaaagcaggggagcctttagtcttcaatctgaatgaggaaaacagccagtagtc

SEQ ID NO: 37513 - DNA, 1032 bp, Homo sapiens
tttaaaattttcacaatttaggaaattattgctctctcagcagaatcaatttcttgataccaatattcagtatcagtgttcaagttttctctgttgtctcaaaaaatttttttacgtttactcgaattgggattgagataggttcatatatggcaattgatttgtctctgagtttattatctataggtacttcttttttgttaaaatgtatacgatggggaaaacagttattctgtagaatttttccacaatctagattttgcatagtacttccctctaaaatagtttaacagtatcctctgtatttcctacagattggtaggtagatgtaggtgcttgataatattcaaattaataattatgagaagagtatattttgtagtacacaatggcgattatctaattttgttatggggttctttaaaaaaagtaatgcattttgtagaatatttagaaagaaaagtcaaagtaggaagaagacacattcacctgtaattctcttagtgctagtcatatatcatggatgttgaacttaaactcttcaaggtactttttggcaactaaggtaataagatactgccataaatttctggaaaaattcttagaatttttacctctagagaaattaataataaattttttctggataaggaaaaatattctttattcttgattacctcttagggcattgagcattgtccatgggtttcgttttgcttttcattccagttttggggaactgcctgtataactagtggtaaagaatggtaataaaagagtatgtacactagatatttgagactttcaagtcccttcaaaaactgaccttgtaaaaaggaagaaaataaaaggtggaaaaggtcatggtgagaggaaatttttcttttcttttttaaattcagcttttattttagatactggaggtatatgtgcaggtttgttacatgggtaatattgcatccaggtagtgagcatggtacgcagtgggtagttttcaacccatgttcccctccttcccccctctagtagtcg

SEQ ID NO: 37514 - DNA, 1046 bp, Homo sapiens
taaaatatcatttatttgctgttcactgacgtataactaagtgattagcaaaactagagttgtgagagaagtctatgaagaatattttccagagtgtttttgttttataaatatttcatttttagcatgagtaaaagcaacagtatttttgatagcgaatatagtttggttgatttgatcatctttgtattagggataaaacttgccatataagtacaaataaaaatactttataaattttgtctgcagtgaagattggcaaatgtctgggtcaggatctccatctcagtctggttcagattcagaatctgaagaagagagagagaaaagcagttgtgatgaaacagaatctgattatgagccaaaaaacaaagtcaaaagcagaaaacctcaaaataggtatggtctcagtttggtgctgaaaattgattgtggaaagtatttgttctttttgtatatagtttctcaaatcttgtttttttttctctttgcactttcctagatctaagtcaaaaaatggaaagaagattcttggacaaaaaaagagacagattgattcatctgaggaggatgatgatgaagaagattatgataatgataaaagaagttctcgtcgccaagcaactgttaatgttagctataaggaggatgaagaaatgaaaacagattctgatgacctactggaagtctgtggagaggatgttcctcaacctgaggaagaggaatttgaaaccatagaaagatttatggattgtcggattgggagaaaaggaggtagtttttaaaaaaccatttattgtttggttatttaaataatatttacaggagtagagggctgggcacagtgggtcgcccctgtaatcccagtactttggggggccgaggccgatggatcaggagttctagacctgaggtcaggagttctagaccagcctggccaacgtggcaaaaccccatctctactaaaaatagaaaagattagctaggtgaggtggtgcgcacctgtagtcccagctacttgggaagccgaggcaagggaattgctt

SEQ ID NO: 37515 - DNA, 1050 bp, Homo sapiens
ctataggtatgttgactactgactatagttaagtaaatagaagagtcatattgtccacccacaattttttttttcttttcttttcttttgagacagggcctcactctgtcacccaggctggagtacagttgtgtagtctcagctcactgcagcctctgcctccacctcctgggctcaaacgattctcccacctcagcatcctgaaaggcgtgcatgccaccacactcagctaattttaaaattttttgtagagatgaggtctcaccatattgcctcagctggtcttgaactcatgggctcaagcagtcctcccaccttggcctcccaaagtgttgggattacaggtgtgagctgccacacccggcctcacattttcttattcatagttggaatggaatggttagtaggtagaaatacctagaggaaacaaaggaaccaaactattcataaaataggagataagactcgagagtaaatcttctagttggatatgcagacagatcatgtgctggtatattctgactacttacctgttccaatattttatatatttttctgccatatctaaagcgaggaggagtaataagtccaatttgatactacaggtgaaaaaaaattaaaccttgtggccgggtgcggtggcttacgcctgtaatcccagcactttgggaggccgagcaggcagatcacctgaggttgggagttcgagaccaccttgaccaacatggagaaatcctgtctctaccaaaaatacaaaatgagctgggtgtggtggcctgtaatcccagctgctcgcgaggctgaggcaggagaattgcttgaacccaggaggcagacggaggttgcagtgagccggagattgcgcgattgcactccagcctgggaaacaagtgaaactccgtctcaaaaaaaaaaaaaaaattaaaccttgcgaaatcaaatttaaggaatcttttacaatgcatactcatcttaaataattgcaaagcatatttctttaattattcggagttgttaattctgctatacaggttttgtgtgcttctgaaa

SEQ ID NO: 37516 - DNA, 1028 bp, Homo sapiens
agcgttttcagaactttctcactcaagtgtatgaagttcttggtgataggagtgagggcttgattaaaggtaacctcctcccacccccccccccacttcatttattcgaccaagttatctaataagactccgttatctactcttgggatgtatgcatatgttacatcgtatcaccttgctttaggagtctataaaaacattgttagttgcagttagtctctaaaaatcctttcactccacaaatattttaattttttctgtccgaagtatattagcagtagcatactaaattctagttagcagtcaggagtgtagttattacaagtctagatattttaagtatttaataaaaggcccccacttcttccttaacagctgtagtctaattggcctacgtagatttatacgttttagacagggcttaatttaccttttttctgcaggaaattttgttaatttattaatatattttctttaggtgaatcaaaggagagtcccagaaaacctgtgactgttgaagaaaattcatctgtgaatttttatattcaaggagtcagtatttatattcatcttttaaactgggaagatttatattttactttaaaacttcttgataataatttacaatgaatggacacagtgatgaagaaagtgttagaaacagtagtggagaatcaaggtaagtaagcactttgttatcaattgtttactatgaagagagttgaaaacttgacttttttctttattgttattgttgttatttagttttcctcataggtagcagagttttcaggttttcctcttagctatccaaatactaaaaaaattctgatatacgaaccttttttcataatacaggttttaattatatttttcattcagatacacagtagatcttaaatatagaaagtttttgtttacttaaatctatttggaagtttatatttgagctaataattaagctggagcatgtataatagatttaaattgttttgactgttagtgaaatttctagatgaaggcaataa

SEQ ID NO: 37517 - DNA, 1048 bp, Homo sapiens
atgtctatattttcattccttcccatcaggtttttttaaatggtatatatttgttatatataaagttttggtgccacaaaaggaatagcacttgaatataaaattttctttttaattatcagcaaggcaacttacttttatagaagggtgcccttacagatggagcaatggtgagtgcacacttggacaagggagaggaaagcgttcttattcctgactcacgtggtccctgctgctgtgtcattcccccgttggctaggattagaccgcacaggctaaactaattccaattggctaatttaaagagaatgacagggggagtgctttggtgggagtcacggcaaagcaggtagcaggtaatctaaatgagttagggtggagcaggtgatcagaatgagtgagggtggagcaggtgatcagaatgagtgagagtggagcaggtgatctgaatgagtcagggtgtagtagttaatgaagaaaggttgctttacgaggaagttcactttaaaagtagaaagcaaagaattgaacatactgacatattaattatttgaaaagtaattttgaactcatatctaacatatttaaagtgtataatatgatgtgctgatgtacatctagtgaaacaattcctacatcaagcaaattagcatagtcatcatctcacataattacttttgtgtgtgtgtggttagttcttaatgaagttgttcatgtcttctcattggctatccttacacatccctagctgaataaagaaaatataaacactctgctaggactaataaatctatgtcaggtctacttttatttttgcttctctaatgaaaccctgaatacaatttgagtgcaatataataccacaggaatcttctgagtgaacaagtttcttttccactcctgagttgttggaaattcacagtaattatgaaatattaaaacctaaaaaaaatatgagccttcaaactccagctatgatacacttctggttaacagtcaaagtttaatatatacgatgaaaccaaattttcacattttttaaacaaat

SEQ ID NO: 37518 - DNA, 1027 bp, Homo sapiens
ttacttttgcacctactacctcaagtggagtgtcctagctaacatctttccgaactgtcccttagacttattggctatgagacacaaataagtttctaaaatatatttgagttagcctaagacaaaaatttagaaatctactgctgaacattttcctcaatatatataaatgtctcctttgtataaatttgtagacgttaatgatcacagatagagattttgatgtaacgcttcaaaaataaaaatgtagtttcaatttcttccttaggttttatatctatatgaataccctagcttgtgtaatctagtgacaatctgcaggaacactattcaacctgcctacacaccttaatctaattaaaagaacaaaaagtttttatatcaacatttaaaaagaaagacgacgtgtgcatcgcatggatccatgttgtaggagaggcagtgagatgtgacagagctgtcaattttcagaggcatttgtggtgctgagcagcacttaatgttgtgtagatttagaagctaaatcactaatgtgaataggaaaattagaactttaaaatgacttcgtaataaagaaaaaacttactgtttccgttaaggtaaatattgagtatttgtactaatttatcatatgggatcatattaagaatgcctgattataacatttgtcagattaattttgttttcaaatattacttttttaacaatttaaaatgttatatgtacaaaccgcatctttctgtattgctaagtggtctcacttgtcagctcataaacattaaataactagaaaatcattggtagtgacaagtagaaaatatgatggaaaatgtgaataagaaattgtgtacttatgaacttcctgaattatcaacttgttaataacctgttacaaacaaaatgtattggtaaagtataactacgcctattagggctcacggtagtaagaaagagcaccatcttgacaatcttagtattatctgagaggaaaagatatcataggtttgaggcctgggcttaagtcgtt

SEQ ID NO: 37519 - DNA, 1041 bp, Homo sapiens
taatggattactatgtcaggatattttggctagaaacaaacacggcaaccaagataggaatcagccaatttaaagcatctagagagcaactgatacttaaccatatttctcagtattattactaagataagtatataaatcacagttcttcttgaacaattcttcttataattcaaaaatacataaaaataattcagttggcagaatttagataaccacatccaccttttcactctatcatggcaggatgagaatggatttaatagtgggactatctggcagactttagggttttgtgctagcaaaatagaacactttgatttatcaccctacaaagatgataggcaatgaattggatgcagtaccccaccttaaaaatgaacaaaaaatgatattagaataaaaaataaaaatattcactcttttgacatttattgaaaataaaatttaacaaaggaagtgctacgtgttttatttcttcctggacacataaggatactatactggctaacatctactccctactttgcatctaaatactaccaaatactggaatgtggataaaaatatcaaatattccaggtctgaatactaaggtatctgccatgattgtccatcctgtctcttttccttatacaaggagttggaagtgaaagaccaggaggtaacagatacaaataatagaagaagatgcatccttactcctggaggaaaacatttaagaaaactatctgaccagaatctgactgtcatgcaattaggaaccagtctttattgagttaagtcactgacttctgtttcttattttaactaatacatgaaaataattatatttggaatttaagtaatgaacgtggcctatcactcatggaaactctctttttctttcttttcctttttttctctctctctccagtaaaccaaattgccttgattgtgtacataagactcaacaactgttactttgtctgaatttccatttttaaaatacgagatatgcttcctaatataaaatataaagttattcaagtggatacaaac

SEQ ID NO: 37520 - DNA, 1035 bp, Homo sapiens
ttggctatgccctgtccccagaggtggagtctacaaaggcaggcaggccttcttgagctgcggtgggctccacccagttcgagcttcccacccactttgtttacctactcaagcctggcaccccttccccagcctcactgctgccttgcagttcgatctcagactgctgtactagcaatgagtgaggccccatgggcgtgggaccctccgagccaggcatggaatacaatctcctggtgtgccatttgctaagaccattggaaaagatcagtattagggtgggagtgatgcgattttccaggtgccgtctgtcacagtttgcttggctatgaaagggaattccctgaccccttgcgcttcctgagtgaggcgatgccttgccctgctttggctcatgcttggtgcactgcacccactgtcctgcacctactgtccgacaagcaccagtgagatgaacccagtacctcagttggaaatgcagaaatcacccgtcttctgcgtggcttacactgggagctgtagactagagctgttcctattcggccatcttggaaccaccccccaaaaccggtaccagccactgcaaaaacatgccaaattgtaaaaaccatcaatgctacgaagaaactgcatcaaataatgagcaaaataccagctaacatcatactgacaggacaggatcaaattcacacataacaatattaactttaaatgtaaatgggctaaatgctccacataaaagacacagactggcaaattggataaagagtcaagacccatcagtgtgctgtattcaggaaacccatctcatgtgcagagacacacataggctcaaaaaaaaagggatggaggaagatcaaccaagtaaatggaaagcaaaaaaaagcaggggttgcaatcctagtctctgattaagcagactttaaaccaacaaagatcaaaagagacaaagaaggccatttcataatggtaaagggattaattcaacaagaagagctaactatcctaaatatatatgcacccaatacaggacca

SEQ ID NO: 37521 - DNA, 1034 bp, Homo sapiens
aatgttagctttaaataatagtataaatgtagcaaactcaaaacagcctatgtcataaactccagtacactgtagcaaaacaatactcatattacattaatgatattagcttgaattttattcagtttgaagctgctggagctctgaaaatgataccataaactttggcacttggacatgctaagtgctttgaactaaaacatgttggagaggactcagaagcagagtcactctgaccttctcctgccctccattctccttgctcctctttctctcccaaggcaagttgtagaatctagaattcctcttccccaatgtggatcatagaaactagaactcctctcctccaaagttagccatgaaccccagaaatactacttcagccttccttcacctttctgtgtaagagctggccataaagaaatggacttgccttgtctgagagcagatcataatactctcattccagaaagggtccggccttatacttgggaagaagaaatgtcacacagagaagccaagaagaatccgatcagacaggccttgctgggtttgcccgctcaatctagtactattacattatttcgtttttgtttaatcacgtgtctccatggctgttcacttgttattgaattcaagcataaaaatgcacggtcttcccttgagtctttaggtcttcatttctcaaggctcctgtgtcatataaaagtttcatcaaataaatgtattatgcttttttcttgttaacttgtcttttgtttgaagaatgtagctaagatccttacgatgggaaggaaatgtatcattcctttccacctctacaaagcttttaaaaaatttgatttttaatagtttgtaatttaactttggttttatttctttataagggccctcagttaactcatatatgagaaacactcttatatatcttctacccctctaagtcatgcagctcaatttaacctataaataagtacattcaagtggtatgttggacagcataaaaatgagcaaattgtgagcttctggcaaaa

SEQ ID NO: 37522 - DNA, 1040 bp, Homo sapiens
atatgttaaacctggaaaccactatggctatatgctaaatcttgacatctagaattatttttccacattattcttcatttgtaaaaacactattttagctctattgttttttatacaatttttagaataatattttctatatttgcaaatatttttgttgagttgggaatcttgcttactctatatatcaatagggggagaactgaattatttactatgttgagatttgcagtccattttatcgctctccattaaaaaattttcttgacttattttatagttttcagcatacaaaccatgaatcttcttttttagatttaaacttaaatattccatcttttgtgcaattataaatgatattgtattttaaattttattccttacttgttcattgttagtagaaagaaatagaattgagtttttgtgttctctcttatctttcaaacttcctgagctcacttttaggatgttttgtttgattctttttttttttttatgtagactgtcatgccatatgcaagaagggatagttacatttccttctgatgtttatgatatttattaccttttctctccatatttcactggttagaaattccaatactatattgaataagattgtgagaacagactgctttatttccaaccttaagagaaagcaatcagccttgctaaacaaaatgtgttagctataggggttttttttttctttttgatagatttcctttattacacccctctgtttctatttttgaaaaattttgtcaagaatcagtgttgaatttgtcaaatggtttttctgagcctttttttatgatcatatggttttttttaatcatttatatgatgaatcgcattaatagattttgaatactgaaccagcattgcatccaatggtggttttgatttgcatttccctaatgaataatagtgttcagcacctttataggtgtttactggatatatatatatatatattatatatatatatatacttgtaaagaattctatgaagatcccttgtccattttgtaattgtg

SEQ ID NO: 37523 - DNA, 1111 bp, Homo sapiens
caagtcagtggcataactactataagaaaataattattcccagtacatttatgctgtatgcactaaatttgtgggatataggtatatatggaggtatgaaaacaatcctctgattgcttccttttttttttcaatgaaacagaaggcaaggagatcagttgaggatgagggtcagtgtgaatgtgttggagctgaattgggaagaagtaagagtgagtggaccatagaaatgagatgtgatttctgtatagcactagaatcacacttgaagtgagtagagatgtatttaaagagatgaagatataagatgaggttagcagttgtgtgtttttctcaagtaaggaccacttgaagatcggtgttctaggtagacaattggcttaaagcaggatagggtttgccaggctagtatcacaaacgaaaaaatcatatgtctggcagttgaggttgtatgcaagagaatagtgataacgatggactgcgaaacttaaggtggatagtgagggtaacatgaaattaagagtattggcagtgaaaaggtcattctactcaatgaataacaggatgaagctgggtcctgaagtgaatccccatctgctgaccgtagaacctgagaaatcagcaacttagctatcatcctcctgtgtgtacagtagtcttcctaaagcctccttgaggcatggtactgagcctttggcatgccttatgttctgaagtatttacaagtggtagcttacgtttacaagctactgagattattaatttttgttcattcacaggacaaaacttcttggtggtttttaaaatttttaaaaagtctgtgtataaaaatagcccaaaagaccattatatggattccttctaagagaagacaatattatatgtatcatcagatatttcctagagagtctatctacaaaatgtgaatagcatatattcatcattctagattcggtaataataagtacctagaggtaaatggatgaaaataacttctgcatgggctagctaagatgcaattctatagcacatttgtatacaacaaagctaaatattagaatacaagttattatcttttttttgcagctataccagctgtgccacttgcttt

SEQ ID NO: 37524 - DNA, 1051 bp, Homo sapiens
gccaccgttagaattttcataacagcagtgggagagggaccatgatctgttctttttgttcttattattcttttttttttttttttttttttttgagacggagtctcgctctgtcgcccaggccggactgtggactgcagtggcgcaatctcggctcactgcaagctccgcttcccgggttcacgccattctcctgcctcagcctcccgagtagctgggactacaggcgcccgccaccgcgcccggctaattttttgtacttttagtagagacggggtttcaccttgttagccaggatggtctcgatctcctgacctcatgatccacccgccttggcctcccaaagtgctgggattacaggcgtgagccaccgcgcccggcctgttcttattattcttacttccccatttgctctgctgtttctggcacctccagaaagggatcggggtagagtcacctagagtcagggtgaattaaattcctctttgtttggagctgatgtaatttggcactgtatgttatatgaccaaattttgtctatctcttgcatgaaactcttttgcttattttttgaaatgctttctttgagggctgctgcactgaacttattacctgttgtaagtaatgctctatttaaataacttctcatatggcctcctatattcctaaccactagcacttcagcatttctattagaacaggggtccccaaccctgaggccccagacctgtacctgctcattgcctgtagggaaccaggctgcacaataggaggtgggtggtgggctgagttctgcctctggtcagatcagccatggcattaaattatcttttttttttttttttttttttttttgagacggagtctggcattaaattatcttaagagcatgaaccttattgtgaaccacgcatgtgaggatccaggttgtgtactcatgagaatctaactaatgcctgatgatatgaagtggtgcagttttatccacaaatcattccccttctgccccgcatctgtggaaaaattatctcccactaaaccagtccctggt

SEQ ID NO: 37525 - DNA, 1025 bp, Homo sapiens
tataaaatgcaactacgcatcaagtctacataacaaccagctagcaacactatgacaggataaaaatcacacatatcaatgctaaccttgagtataaatagtctaaatgtctaacttaaaagacacagtgtcagactggatacaaagacaagacgcaaacatctgttgtctctaagagacccacctcgcatataatgatatccaagggctaaataaaagagtggactaatatgtagcatgcaaatggaaaaccaaaaagagcaggagtctattcctgtatcagataaaacaaactttaaaccaatcaaaattaagaaggacaatgaagggcattacataacgataaagggtacaatccaacaagaagccttaactattctaaatatatacacccccaacattggagcacccagattcataaaatgggttcctggccaacaaaaagacttagacaatcacagaataatagtgggagacattaacaccccactgacagtgttagacagatctcggaggcaaaaaactcacaaagaaactctggacttcaacttgacacttgaccaactgtacctaatgacacctacagaatactttaccctacaactacagaatatacattcctctcatctgcacatggaacatattctaagatcaaccacatgcttggtggtgaagcaagccttgataaatccaaaaaaattaaaatcataccaaaccaaacacactcttggaccacagtgcaataaaaaatagaaatcaataccaagagtatctctcaaaatgatacaaatacatggaaattaaacaacttactcctgaataactcctgggtaaacataattaaggcaaacattttttaaaacttgaaattaatgtaaataggtacacaacttaccaaaatctctgggatgcagcaaaagcagtgttacaaggaaagtttatagctcgtaactccttcatcaagaaattagaaagtctcaagttaacaatctattgttacacctaaaggaactggaataaaaaat

SEQ ID NO: 37526 - DNA, 1055 bp, Homo sapiens
aaaaaaagaaagtgctgaattcacttgcccgttttcattccccttcatgagtgccacggaccatagctgcttctaatcggccatcttggatcatgcgaacagtactgtgttcagcatcatttagtattatttgctagttttcttcattttctgaggcttcctgctgcagagatttggaagtaaagagcagcttttatttaaataattcttgaattcttagttgattaataaggtccttttgtattcactattttttattgaattttaggtagtacagcatatgcatacctaactggatatggatatgcaattaggaaaatgtatcatttaaatgtgaggtgcttttaattttctgtgcaaactttcatgatcctaaaatatagacataaacaaagagctaaaattgaaaaagcaaaagaaactccatagtgttttctctgcaagttctttggaatttccagtaacctttatatttgactatcacatcagcaggttggattaaagcagactgtaatttcattttaaaagtataagctgttatttaaaaaaatagtttaaaaattgtgccattctttttttataaggacattcatttattttgcaattcattttataaggacattcaaatgtcattgattttcctatcaccaagggtttgtctttgctagttcttatattaatggccaggtttctaaaacagactaataagataatagctagtaaagcaaaacaaagccaaaaatgaatcaatcaaccaaaaaataaagacagaatgcttggtgtcttggaaggtaatttgtatattctgcaaagtgaagagttgatgtcaaatcttgcatcattaaatgacttttctcgggaattatcttgacacaattttgaagcatttttttccattagctaaccaatttccacctaagtgataaaatcaagttcaacttgatagttatagcgacaaagattatgctgtcaaatcagatggacctatgtgaaggcattgtttttttagacaaatatagaaaattaagtgctaaagagaagcacaaaaataaaac

SEQ ID NO: 37527 - DNA, 1077 bp, Homo sapiens
ttatacccttgttgtctcccaattttggagggacaattgattacattaattgtcttcaggttagtttctttgcctcattatccactcctgactttgccattttgtagaataagtccccctgctttctgaaggcttagcgggaccacgtgttctctcttgttttaggattctgtcatcctcattgagtacatttgtattgaactctccaactctgagccctagtctatgggagaaagtcatgcaactgcatgagaggcacctatgaattctctctatattgcaacttttttgaaaatttgaaattattcaaaaataaaataaaggttattaaaaatgaaatgctaatcactattatgtaattgatacgattttatatacattattcaaagtaacacttttaatacacattgtaattgtcttgtatgtaatacaatctagtagaattgcatttttttctaacataattatgagtatcattaattatagttgctataggcattatgatgtaatattgagaaacaagtctaaaattgtataatcaattcaatcttgtcaatggctgtatcattaagaatctgctaaactaagtagctaggtcaattggattataaaagatgtcacttcacttttttgattacaactgagtagaaggcattccaggataggctgggtgcagtggttcatgcctgtaatcccagcagtttcaaaggccaaggagggtggatcacttcaggctaagagtttgagaccagcctggtcaacagggcaaaatcctgtctttactaaaaatacaaaaaagattggctgagcatggtagcgcgcctataatctcagctacaggctgaggcatgagaatagcttgaacctgggaggtggaggttacagtgagccgagatcacaccactgcactccagcttgggtgacagagtgagactcttgtctcaaaaaaaaaaaaaaaaaagaaagaaagaaaagaagaaaagggcattccagtgtactttttactgatccaccatgaaaaaaggcaaaaaggcattggcaccaccagtgatgacaaaaatgacaactttccaacaa

SEQ ID NO: 37528 - DNA, 1048 bp, Homo sapiens
ttaacattttaatgtccttcctgggacttctaatagcaaatattgaaataattagaaataaaatcagatggttataaattcagaggctttattcacttacttaacccctgcaaataaaagacaaaggataattggagtctgttatgctataggaattatttttaagaagttaagattgttagatttgtttgttaatattgaaaattagtatttgctatagtgtggatgtttgtccccctaaacctcatattggagggaggtgtttgggtcatggagatggatcattcatgaatacattaatgccctgggaatggggtcagtgagttctgtttgttcccaacaaaactgtttgttaaagagagtttgagctaggcgtgggggctcacgcctaaaatcatttcggaagactgaggcagaagaatcccttgagctcaggagttagagaccagcctgggcaatatagtgagactctacaaacaaaaaaagattctggcccctcccctgtagctctcttgcttcctctctccccatgtgatctctgtgatctctggctagctgccctttgccttctgccctgagtggaagcagctagaggccctcactagaagcaggtgctggcagtatgttcttgtacagtagaactgtgagccaaatcaatttcttttctatataaatacctcaggtgttcctttttagcaatgcaaatggactaagacaatattaaagtattaatctttcccaagatcaattttccaattctagaatgataacaaacaggaaaatattctcaataacaaattatatattacacagcatggttttagaagtgcacttattaggtaagtaggcttcattttagaagtaaaaatagaatatgtaagcggatgaatggagagtatttttaaaatgtggtagagtttggaatgaataagataaggagaataagttatcagcagagagagcacttacatagattctagcacattatctgagattggacaagactgcacaaggcaacttgacataatttcactgggaatagttttag

SEQ ID NO: 37529 - DNA, 1032 bp, Homo sapiens
aagtaattataattacacacacacacacacacacacagattttttgccatgtaaaataccttggatttatcattaatgtttcatttctaaataatacatagcaggcttaatataaagacattttgaaataaaactaatgagtctccttgcagttattgatttaatttttattttatgataagaacttttgtttatgactatttttctgaaagattgtttcctgtcttcaatactcacagatgtactacaattgttcttgcattaaagaaggattaataactgcagatgcagaaggtgattttattgatgccagacccgggaaatgtgatgcaaagtgctataagttacctttgttcattgcttttatcttttctacacttatattttctggtttttctggtgtaccaatcgtcttggccatgacgcggtatgtatatattactcattattattgtttatttaatatataagaaaagtaattttggaaagattttagaatattgtagcaaataatttactctgtgtttcatggtagcaaatgcagaggaaaagttgttaaattgacacaattcatgtgtataattatttctcttttagctaacttatttgcatagagtatgtaaatatcacattgtttaactttaatttaaaacaatgtatttacctaatttaacacacatagaaacattataaatataggaaaaaaatattaattttaacagatttgattataatgttaactcattataattggtcataggaatttattaactatttacatccatattgcttaatttgactatgagaaagcatgagtgtcatcaacaaaggagcataataacttttagaatttcagtatataatttttattattattctaaacaaaaccaacatttattatttatgcgttcttcctaaatatatgaaatccatttaatattcatttgtatcatagtgcagaataattgttttgttattttcaattttttttttcaagacgctaacaaaaaactttaaggcgtgaaaagcctg

SEQ ID NO: 37530 - DNA, 1053 bp, Homo sapiens
cagcaaagtttctggatacaaaatcaacatacaaaaatcaataatatttctatacaccaacaacagccagctgagagccaaattagaaatgcaattctattcacagtttccacaaaaagatttaaatacctaggaatgcagctaacccgggaatttacagatctttacaataaattacaaaacactgctcaaagaaataagagatgacacaaacaaatgggaaaacactccatgcttatgaataggaagaatcaatatctttaaaatggccacactgcccaaagcagtttacagattcagtgctattcctattaaactaccaatgcaattcttcacagaactagataaaaactattttaaaattcatatggatccaaaaaagagctcgaatagccaagacaatcctaagcaaaaagaacaaagctggaggcatcacattacccaacttcagactatactacggggctacagtaaccaaaacagcatcatactggtacaaaaacagacacatagaccaatggaacagaatagacagcccagaagtaaggccacacacctacaaccatctgatcttcaacaaacctgactaaaacaagcaatgaggaaaggattccctattcagtaaatggtgctggtatgactggcaagccgtatgcagaaggttgaaactggactctctctttataccatatacaaaaatcaacttgagatggattaaagacttaaatgtaaaacccaaaactataaaaaccctagaagaaaacctagggaataccattctgcacataggaactggcaaagattttaggacgtagactccaaaagccattgcaacaaaagtaaaagtttacaaatgggatctaattaaacttaagagcttctgcacagcaaaagaaactatcaacagagtaaactagacaatctacagaatgggagaaaatatttccaaggtaagcatctgacaaaggtctaaaatccagcatttataaggagcttaagcatttataaggagcttaaacttagaagaaaaagaaagccccataataaagtggg

SEQ ID NO: 37531 - DNA, 1028 bp, Homo sapiens
ggctcacgcctgtaatcccagcactttggggggccgaggcgggcggatcacgaggtcaggagatcaagaccatcctgggtaacacggtgaaaccccatttctactaaaaatacaaaaaattagctgggtgtggtggcgggtgcctgtagtctcagctacttgggaggcttaggcaggagaatggcatgaacctgggaggcagagcttgcagtgagccgagattgtgccactgcactccagcctgggcaacagagcgagactctgtctcaaaaaaaaaaaatcaggaaattcaaagtacccttgtgagatattatacaagatgactatccccaagagacatagttatcagatcttccaaggtcaatgcaaagtaaaaaacactaaaggcagctagagtgaagggaaaggtcacctacaaagtcaaccccatcaagctaacggtagacctgtcagcagaaactctacaaccagaagagattgggggtctatattctggaattttaaagaaaagaaattagaaccaagaatttcatatccaaccaaactaagcttcataatccaaagagaaataaaatactttttagacaagcaaatgctaagggaatttgttaccaccgagcctgccttataagaagttcctaaggggatgctaaacatggaaatgaaacaccattactgaccaccacaaaaacacactcaagtactattgacactataaagcaaatacacaatcaagtctacataacaaccagctaaccacacaatgataggatcaaatccacacatatgaatattaaccttgaacagaaatgggttatagctcccacttaaaaggcacagaccgtcgagtcggataataaagcaagacctaactgtatgctatcttcaagagacccatctcgcatgcaaggacacccataggcttaaagtaaaaggatggagaaatatctatcaagcaagtggaaagcaataaagagcagggattgctattcttatttcagacgaaaccaactttaaaccaacaataa

SEQ ID NO: 37532 - DNA, 1023 bp, Homo sapiens
cattgtagattctggatactagccctttgtcagatgagtagattgcaaaaatattctcccattctgtaggttgcctgttcactccagtggtagtttcttttgctgtggagaagctctttagtttaattagatcccatttgtcaattttggcttttgttgccattgcttttcgtgctttagacatgaagtccttgcccatgcctatgttctgaatggtattgcctaggttttcttctagggtttttatggtttcaggtctaacatttaagtctttaatccatcttgaattaatttttgtataaggtgtaaggaagggatccagtttcagctttctacacatggctagccagttttcccagcaccatttattaaatagggaatcctttccccattgcttgtttttctcaggtttgtcaaagatcagatggttgtagatatgtggcattatttctgagggctctgttctgttccattggtctatatctctgttttggtaccagtaccatgctgttttggtactgtagccttgtagtatattttgaagacaggtagcgtgatgcctccagctttgttcttttggcttaggattgtcttggcaatgagggctcttttttggttccatatgaactttaaagtagttttttccaattctgtgaagaaagtcattggtagcttgatgggaatggcattgaatctataaattaccttgggcagtatggccattttcacgatattgattcttcctacccatgagcatggaatgttcttccatttgtttgtatcctcttttatttcgttgagcagtggtttgtagttctccttgaagaggttcttcacaaccctcgtaagttggattcctaggtattttattctctctgaagcaattgtgaatgggagttcattcatggtttggctgtttgtctgttactggtgtataagaatgcttgtgatttttgcacattgattttgtatcctgagactttgctgaagttgcttatcagcttaaggagattttgggctgag

SEQ ID NO: 37533 - DNA, 1054 bp, Homo sapiens
gtttgattatggttttgttgtaatcaaatacctaaagttgcttttttttttcacttttctttattaaagcactacagtcaataatggtagtccagaatggctatggacttggtggattaattttctttttgccgctgtcgttgcatggtgtacattaataccattgtcatgctttccaaacaatatgccaggtgactataaaatgtaatttattaaattggaggatagtagtttcttccaccatggttcttattctcatagaatgactgtattacatttttaataaaatgagtatgcctctcgctgtagtggtttgtcatagagatacagtgtcaagtgctagtgttatttaagcaaataaagcagcattacagccaaatattatttgatttatgtaccagaatttcttcttctttgtatttagttttgagacagggccttgctctgtcactcaggctgagtgcagtggtatgatcacagatcactgcagactcaaacttctgggctcaagtcatcctcctgcctcacctccagagtagaattggactacaggtgcatgccaccatgttcagcaagtttttaaaatttttcctttttgttctagagatggagtcttgctatgttgtgcaggctagtcttaaactcctggcctcaaactatccttccaccttagcttcacaacgcgttgagattacaggtgtaggccaccacacctggaccagaatttcattagaattagtgcatatttttgtttctcattatttccttttaaagatgctttatatctagagttcatacagtgtcttgaaaacaagcatatttaaatctacttacctagcatttaatgtattgactaccttagaattgtaagataaaataataactgttaaaattttcttagaaacactgaaaaatacatgtaaagtcaaagaaatcaaataactctcctgattatagtacatttcattggcacaaaatagttttagttatatcaaagattattccctcatattttagggcaaatcaagtgtggctaaattttaaaataaattaa

SEQ ID NO: 37534 - DNA, 1023 bp, Homo sapiens
aaaagtctgtagttatcaagaaaaatagtacttatagcacccagatatctaacattagtttcaacataggacctgtaaatcttatattgtgaaggaaagatgtaacaagcgtcactgcaatattataggtggtagcatattagaaattgtagcaaaatgtcactactgtctatcagggaggaagtaaaaatcatttaccaggaaagcaaagcaaatgagaaaccatttactaaaagagaaaacagttctatatctcttaatagttgaggtcatcttatattaagctacattattataatttgcaccatcatgcggtttatctacttcataggctcatttgctaaaaggattatatgaattatcatcaatatgttactttagtgagtagttcttcctacatgtttagagcatttagcggaaatagatattacatagagaatataaaagagcacctcataaacattcattgtttaatttaagctggtttcttgaatatcttaagcacttggattgctgaactcatcagggaatgctttagttggtagctatatttcattgcctgtatcgaaattttatactataattacttgctaacttttaggaaacatgtaattaatatgcatacattttaagattcaaagataatttttttcacatttaatatttctggaattgagatagttttataactctgatcgacatcatctataaaaagatttttaaaatcagtgatctgtctcaggaaaatacatacaaccatgttaatttcagtatggtcagagcaaaaattgaaaaacaatccaatacccatcaatataaaagaaagtggttaaataaattatagtaaatccataccatgaaattctatcatgcatggtactatcataaaggtagccaaaatgaattaagtgtgatgttttctaaggttaaatgagcaaggtaaacaaatatccacaatttctacttaaatacttagagtacaatttttgtagctggatgacagtgtcctacattatgtaataa

SEQ ID NO: 37535 - DNA, 1075 bp, Homo sapiens
ctgcattagtttgcttaggattatgggctgtagctccaaacatgttgctgcagaaggcatgatttcattcttttttgtggccacataatatttcatgttgtgtatataccagattttctttgtccaatccatcattataggcacctaggttgtttctatatctttgatattgtgaatagcactgtgatgaacataaagtgcatgtatctttttggtaaaatggtctattctcctttggatatattgcctgcaattggattgctgaattgaacggtagttctgttttcagttctttgagaaatgttcaaactcctttccatagtgtgcgtcatgtcctttcctttccaaagctttctcaagagagtgaggcactttgttttttcagataaacttctgacaagttactgagtattaagaaagtcacactgctatcctcatttgtttatgaagtaccaagaaagttggaaatctttttctaaggaaatctattatttctacaatgactttgacacaattgaacaaccctgtttggtttaattgaggatactacgtgatatggcttggctctgtgtccccacccaaatctcatgttgaattgtaatccctagtgttggaggtgggacctggtgggaggtgattggatcatgggggtgatttctgatggtttaacaccactccctagtcctatcttgtgatagagttctcacaagatctggttgtttaaaagtgtgtggcatctccctctttgtcttcctcctgctccaaccgtttaggacacgctggctttccatttgccttgcgctgtggttgtaagtttcctgagtcctctccagccatgcttcctgtacaacctgtggaactgtgagccaattaatacgcttttcttcataaattacgcagtctcaggtaggtctttatagcaatgtgaaaatgaactaatacactatgcataggtattaaaaatatgtgacaatttatttataatgccatagacattttctctctacaattgtgtatagtaagtttattaatatatttgattagcacagaattgaactagggtgaagtctgtttt

SEQ ID NO: 37536 - DNA, 1050 bp, Homo sapiens
aaaagtaatgtaactgtacattaaaaaataactgaaagagtaaaattggattgtttgtaatataaaggataaattgggtgatggataccccatttgccctgaagtgattattatgcattgcatacctgtatcaaaatatttcatgtaacccataaacaaacacagccactctgtacccacaaaagttaaaaatttaaaaagatacttgatagaatttctacttttaaaaatttgtcacaacttgttttgtagtccaagatatggtctatcctggagaatgttttatgagctgatgaaaagtatttgtattctgtagcagttgagtgaagtattttgcaaatgtgtatcaggtccatttggtcaagtacgtagtttaaatctgatgtttctttgtggattttctctccgaatgagctcttcattactgagaatgtggtgttaaatgcccctactattattgcattgcagtctatctctccctttagatctattaatgtttgctttatatacttgggtgttcccttcttgggaacataagtatttataattgttatattctcttacttgtaatatccttcatgattacataatgaccttttttgtctcttttacagtctttgacttgtaatctatttcatttaatataagattagctactactgctcttttttagtttctatttccatggaatatcttcttccataccttcccttttaatctatgtgtgtcttcatatgtgatgtgtgtttcttggaggcagtatatagctgagtcttctttctttacctattcagccaccctatgcattttaattagagaatccagttcatttacattgagatgttattgataagtaaggacttatcgcctttttgttgttggttcttttctggttattttgtaactcctcacttcctgtcttcttttttcactgtcttcctttgaggataattgtttttttctggtggtatcttttaatttgttgctttttatttttagtatataaatatgtattagtctgttctcacgctgctataaggatatacctga

SEQ ID NO: 37537 - DNA, 1033 bp, Homo sapiens
ttgtcattagattgcatgtaagaactgaaattctccatgctgacccaatctcaatctttgtatggtcttcccttccctcagagtggattgttttcttgcttcgtctttcccatgattatctgatgcctactttcaaagaagccctccacatctttgaaatcaatagtctacattcctgaggttgcaggccttctatgttattttgaatccattgcttccactttgtgcctttactgaaagaaaaatttagaaacatggggagttttcttggcatcttattattttcatattttctctttccgtaaaagatgtttcatcccagcaaataaaatgcaatacagttttcaaagtcaaacaaaacccagcatattcacatatggtatttcctttctaaatatttcttgtctcctttaacttggcattctggttgggtcggtgctgagattcatcaatattattttgtgtgatttgacgaaacccatttccttagctcctatcccagagataatttttgttttgtttttctttgtgctctgaacaggcaaagccttcttagctgtcatataatctttagggatgctgttgggctcttgggagaaatattcctttattcaaagaaacgatctgtcagggtaggctagactcagcagcaaaccctggtagtgtttgacccatcacatcaagaaacttagcagcacttgtatgattgggaaggagaagaaggggatgtgaaataattgtattatcagggtctctagcctctctgctcctgtgctaaaaagatactagatgagtagccccaggagtaagtaatagtgaagagaaatgctttaaagtattttctcaaacttagcaaactttgtggactcccaaaaaggcataagaagataaaaggctgagtgatatgttcttctcaccaattgggtgattaaatgtctgagctgggggaaaactcttaccttacatgggccctataagtaaaggaaaaaaaggaaagcatttggctgtgatgttgtaagagaatagttatact

SEQ ID NO: 37538 - DNA, 1099 bp, Homo sapiens
ctctttttgtggctgatatccagtttggtgaccagtaatctcagggtcttttcttcatctcaggtcattaagaccaactaataggtgagaatgtggtaatttatgaactctgagttataactgataaggaagactatttatttcctgtttactggtttttatagtaggtcatggcttaaaacctctgattattctgaaatatacatgcaatacacaaaataacaaattttagatttttaggtatctgcaactacattgtaggagaaatctcgaaagcttcacctcactttgcagaagactcctagccatggatgaggctggcttcatccaggaggagttaggggaagatgccagagaatgtgaattgctttgttgctcagtgccctgggcagcatcttgtgtaggtgagtttcctaaattctgtataaagtgaggacgatggagagtctacctactgccttcatcaggcattccatgctggctgcaagcaacgttattcagtaaaaatctcaccactgttaaagcaaactaaatgtggcctgagaaggactccatacttctatacttgagtccttgtggatgaactgtaacctagcttaacagtcagacaaaattggaaacctaacttagtagtatgcacctgtaacaatagctgaatgttagccaatcccagcagccatacttcaaccactcatagactgctgaatgttcaaactgcctgcaaaataaggcaaatgccgagttgtaaccaatctcactgtttctgtacttcacttctgattcctgcacatcactttaccttttttgtctataaattttttctgagcacaaggcacccttggagtctctgtgaatctgctgtgattctgggggctgcccaatttactaatggttcattgctcaattaaactcccttaaatttaattcagctgaagtttttcttttgtcaccacttaccagtgactttgtaataaaaaaaaaaaaccttgtagaagctggaaacaaatgctttgccttcttccttgtggttatttgttaccaacctgcagaggtatattcatattgcagaaatcacgtgtagctgtgaatacactgtggt

SEQ ID NO: 37539 - DNA, 1050 bp, Homo sapiens
tgcctgcggtcccagctactcaggaggctgaagtaggagcattgcttgaccccaggaggtcgaggctgcagtgagccgcgctcatgccacagctctccagcctgggcgacagggcaagacctgtctcaacaacaacaacaaaagtatccgttaagaattttttctgcaatcataaaatcataaaataaccagtatcaaagattttaaactgtaatttctatgatattcataaatataaaataaatattgttcaataaatatttattctaaagcactatgaaaagaactgtgggaaaagtaaaagatgagtcaaacgtgtacctcattcttataaaggacttactgtctggtaggtaataaactatgtaagccatgtacagcacaagttaaggcatgctaaattgcagaagacaggtgtagataatgtacttagggaggcaaaaagagagaagttgtttttacataggaaatttgtgtttatccttatggaagaaggatcatttaagcttgaccttgaagaatgtataggatttggtaaatggatacaaaagaattaggggagaagtaatacacagaaatggaaaagtattgtaatgattcataaaaaggcagggcttcttgttgtctacactgcctcgggtataaagtgaagaagcaagataatgagggataaagctgaaaaggtaagtaggaaaccttatggagagctttgaatactattaaggattgatatgtgcccctcccaaaatttgtgttgaagtcttaacccccaccacctcaaaatgtgaccttatttggaaatgaggttgttgcaagtgtaattagttgagatcatatttcaatagggtgggctctaatacagtattactggtgttctgataaaaggggaaaatttgaacacagactcaaggagaatgccatgtgaagataaaggcagagtttaagattatgtttctatatgccaagaaatgacagagattgccagaaaactaccagaagttaggggagaggcattgaatacatttttcctcattcctcagaagaccaacc

SEQ ID NO: 37540 - DNA, 1077 bp, Homo sapiens
aaacgttatccatctgactcttttcagatagcttaaaatgtcaagaagtatattttcagatttcctataacctttaaacagccagcatataaaatgaatattgaagagaagagatcttgattagtttttacttttgaaaactgtaaagctagttaaaaataatagtgctttaaaaatacgttgttattagatatataattatttttaagttttcttaatattttcagaatgaaacaggtggtaatacaggtaaaattgatgaacaaaagatcatgatgtattttattcatcgaatcaagacaaattaagaaattatcattccatctaggcaaatatcccaggtagactgtaaacttaagctggaaatagatttttttaaaagtgaattaaagaaaaaattaaaggaagttaaatgttacagtaaatacagcttaagaccattaactttttgaataatcaataccagaaataataaagtagataaaaagatttactcatcatgtctggaatattgaaaagatatttgacaacacataaaagaatacttaacttgtgaggagatgtctgattactaattttatatgtattttgaccacataaacatatttaaaacaattttgtaaccttttcgatgtctgcactcatttcatggtagcgagatcgagttgtgactccatagacagggactgaccctcccagaagttcaggtttccaaggcatgaagcttatgatcaatgcttcagcaaactctattaagggaatgattactaagaaccctagctagaaagtgccttttggtgaaatgtattatagataacattgtgtttctggtggcgttgcaggggatgaaactccattaacctgttaagcacgaagggtgtaaaaatgctaagagagaaaaatcatagagactggagaaaagattttcctgcagtgctgtgttctaaatggatgagagagcttcagatagttgttgttgcatggagctaggtcttaatctctttgtcgtagaaggggagggacattttgaaaatggacacctgctcaatctcctccctcctcaggaagctctggcag

SEQ ID NO: 37541 - DNA, 1028 bp, Homo sapiens
ccccatcggaatgctaaaatctcactgccttttaccatatcctcagagcatgctggtgaatcactgtgaatattaaaggatctgttttcatgtaagacacaaaacatttctatgtatatgttcataaaattttattttttatgtccaaatctgtagataaaagtaataagactattgcacaaaatagaaactaattcaacatacttagttttctctagaaatttacatgcatcattgaactgacctaaggaactttattttatttaaatatttttgctattgtcaatagtaattggtctggagaagtataatcacattgccaccacaaattcgcacatctcttgtgccacaaatgtaccagtagcctgttgagccaaatgtgatccttgattaccgaggcaaaataagttttaaggataaataaaacttttctacgattgacttccacactcctaatgtttcccataactaaagaaaaataaaacctaccaaagcactcgttgaggcattagtctgtcgcatactatggataataagaacctgtaaatatccattcggttatcaattcagtctggccatttaataaaactagattaactgagaggagtggtcgccctctaccaactgcttatggaggggtgtgcctggaggccctgtgtgtttccttcctctgtggtgtcctcttctccccgacctgctccagatcttcactggtttccttacccatctcccttgatcatctcaaagcttaagggaaataaaattatttcctcttcatggagagatttgagcccccttatgtaaatggagaatttttttttttttttttttttttgtagaatttctcttccttatggtcctagaaactaacggacattaaggtccactttttcctccaatattgtaaccaggactgcatagtcaatgaaccttagggaaacttaccctgagtaaatgctgtgcctcaggacatacaatagctttcctgttaaaactgacaggaagagttagagttttttccctgaagc

SEQ ID NO: 37542 - DNA, 1018 bp, Homo sapiens
aacttcccaaagtacccagattgacatgggacacagaaaaggaggattttggctttcagaattaagatttgaagctgaataaggttaggcagagatgttaagtttgactaatgagtacagtgttgggcctgaaaatgtgaaagaaaacaatatttccttccttttctgctaaaactttggttcttcatgaagaagaatggttgttaccttgatgattagggaacttttgagttgtttgaagtctcataatctttgtatttaacttgatggcctgtgtagaagataactaataggagttttttggtagtaagaaaagttttaacttattttaaaatcctttcatttcaggtatttttaaagaccacctttccattctatttctcctatttgaagaaaggcattctccttaagatttatgttcacattttgtatcaactcattttggtttacccagcaatttgtagttaaaatgagacatcatgctaattgcaaagaacagcacaggttggctgcattagcaaaagcaaactaagttgtatgcgaaggaaaatgaaaaacactttttaatactggagtgagaacatttaaattgatatgtcttgttgtatttcttcaacagcagcttataattacctctcttcaaggcatattttaagtggacttgtaacagtagcttgaaatgtaaactagtaagggatccagttgttgaggcatggcagcagaatcaggagtgcacagctctgtgggagcaagggcatgctggccattagcagaacatgccagagtgtcttagtccttcagtccgaagtcagctttaagcctttaactacacagatttgttagtgtacagcattgtatcagctcttaagaaattacccccaaattttgtggctaaaacaacgtttattatttcacagtttccgtggaccaggaatccaggtgcagcttagctggatcctttgagtctctcccaaggcaacggtcatctcaaggctcagtgagaaggattcactttgca

SEQ ID NO: 37543 - DNA, 1098 bp, Homo sapiens
gatttagaaatgccagactaatgagaactcgccatcacttgtgataatggtctatcatttcgagcttgaaccatgtgtacttatttggcctcatttcagaatagtaaattatctcaaactcatttcatttcttgaatatgttcttatgatttaggtcataagttggattatatgaatagtatccctataatccaccatctgaaataagctatatgattctgggctattttaagattgagaaacttcagacatttttcagaaattacataaagggtttacagggtttctcaagcctctaatttacctctttatgctcatgcttgattgttgttccatattaaggtttattttccttttaaaatagctctgcacaaagagaatacactgctaaatactactgcaagggaatgtttacagatgcaaatgacttctatttagggagctcatgattaaaatttgaaagaatgtggcactagaaagcatgtgaataacctttgaaaaatctcacaatagaactgaatatgggatatttatatctagggttgcagatataaagctatgtgtgaatatgtatgttcaatatgcggcaaaggacatcaaattgaaatttgttagtctaatgttactttaatttagacaaataactattttattattgtgaaactgtaatgtagaatgcagtagaaggctactacactaggaagaactagtgttatgtttgcctgcaacgggtgagccaggcattttccacaaatctgtctttctgataaagagaagagacatctaaattctttcaatctctcatagatgcttggatactgaaagtattattcattatttcattttttattgctcacagagcaggctgctaataaagtcagaaaaaaactgtaatcattggcagacataatattttctgtctattcctgtccagagatgtgttcttgttttaaagactaaccttctcgggtcatcaaagggatcacaagttgtgcaactcattttggtggaaatcgtgtctaactcttttgggtatagtaaacactccttctgcttccctgtggatggttctggagactggcgtggttcaggccctgg

SEQ ID NO: 37544 - DNA, 1025 bp, Homo sapiens
aaagaatgagtttagggaattgtgtctgtttcaagttgtccctagtcattttttaggaaagcatgaatgaatttcaagggctcttaaatgaaggttaaataaagaacatgaaagaggatatttagggacttgtggaaattattctgttaattgtaatttcctcttatgaaaacagttatttactgccaggtgccctcttaaccttctgagcatgcatacgcagcatcagctcaggtgctgttggagctagacctgtacctctgccttctggtaatggcttcgcctagcacacttcacatagtttgagtgaaatcaaaggtggaggaggcaattcataggaacacagggtattgaaaagtatttttaaatttgttgacaagttatttgatcaagtagcatggattttaaaaggaaatgcatgccctgttaagtgactaaaggatgagtctagtttaactcctgtttaaaagaatcagagaaattaatgccaggtctgtgaaaaaggaaaatagagcagatatcaccgcttaatagatttttacattgggaccatcttgaaagtttgcaaaaggagccttaaaagttactcaataatcaggacttgatggaaattcacggtataaagccataagaaactgaagactcctaagtacccttcccattgtctgaatttttcaaaggctgtgacactcagacgagaagttcaaaaccaaaataatttttatttgtactgcttttaagaattcagaatgctattatgagacagaggaagcatgtagagttctgacctcctaagggaaaaggaggaattatgtcaccttttgcttcctttaccctactgagactcaatggtgaaatggaaacaaattaaaggattgttctttttatccttaaatgtcaaacgtggttgcatctcctaaagaaataatgcaactgattaattgtgtaatttcacagggaagcagtaattctcagccttataaacatgtaatgcactaatttggtttcagagttaactgaaacag

SEQ ID NO: 37545 - DNA, 1018 bp, Homo sapiens
agtcctcatttaactatcgatgtgtttcaaaaccttatttgcaggtgagttgtttagaattcagaatatagtttttcgtagaagtgcaagttttccataatatggataatctgcttagccataatattgatgaaaagctatatatttcaaagaaaaattgcagaaagcagcatctagaagagttactcaggaaatatttattgcatggataaatgccataataaaccacatatggcaaaaaaccaattaattttttaaatttctaattttgttttttagaaaagcagataaattacagggctcaagttttactgcaccctctccagcagttccctcgtattttagtactttaaaaaaataatatgctaggaatacataacatcaaagcagagagtggaacatggttgttgttgtttgcgtgtgttttttttcttttttttttttcttttttttttttttttttaaaagcacagactctggttaagtgtagctttgggtctgaatcctctttctgtgctcttactagctgtgggaacttgggcaatgtgcttaacttcactgagcttcaattccttcatctgtaaaatgggtgtaataatcacaactcttttctgatttttgagtctcgatgaaatattgtttaaggaaccagttgattgccaaaataacaacttcagtaatccaagtccaaaaagttttgcattttttgaaaagttaaggcaacttgaatatcccagattgatattttagttcagtaaaaaatttcataaatgcataaagattaagttttaagaccatttcctatattcttaaggagcattatgctaggattactatgcataaggaattcttcattcctcttgatgtctgatttttcagtgccttactttagtcatctacattaagaattgttttgctctggacagttcacaccaatcaccttttttacatagtttttcttattgaaatagaagagtgtcaaaatggcacaattatcaaagcaggaggtagtcttttt

SEQ ID NO: 37546 - DNA, 1056 bp, Homo sapiens
tcaatttgtgctgtatccattttgcactcatggatagttcatggtcccttatgagcagaaatagtcagcaggcaataatagaagacatggagcagaaatggttagggccgataatcctttgctccatggtgctagatccatgtcttaaattcatttttagtgtcttaaaaaaaaattctcgtctcatcaatatgaggatggcatcagcaaaatcaaaaaggagatactttccaagcctttacatatgttctgcttttattccaatacagattgttaaatgagggcacagaaaaggtccctacctcttgattagcagagtaggccattcctgcatggaattccttattggctacagtcatcttctgtataacacagtagcctttcctgattttaaaccagaaaagccaaaattgccctaaaaatgttacctctgcagtggttaaacagttcctaaggctaagcgtttgaggcgtgcagagtggaagagagatgaagtggtgatggccacctgtagctgctgctgtctagctgaccctgctgtttgttggcaactggagacaaagttaaggctattaaagctgactccagtcaagctgcccttatcatctgatgtttcctcatatgagattccaggtggtgctgccccactgagacagtgtgaactcaccaatcattgcttgaagctaggaattttcttctgctgtgccattgcgtgacaactcaattctgaccactttccttccactcctgtggagcagaggaagaaactctcaactctcacagggtcttcaattttttttacatttacagaactccaggagataatttttgcagcactgtcctggaattcaggaattcactctactctgagctttgccgttaatgaacttggcaatgttagccaagtgacttcacctttctgggtgtcagttactcaactataaaacatgaacataggataaatgatcttcaggcccacttcactttaaccatctatttttctgtagttctagcctttgttctgctttgttgttctacatttcttttttttttttt

SEQ ID NO: 37547 - DNA, 1092 bp, Homo sapiens
tatcatcactaatactattaacattattatttgcagtagctgagagaaacacggtcttgagtcactgcaagtatagacgcttacgataaaaatatttgatgacgccatcgtaacctagtgacaaaacatgtaataaaacaagtgtttggaagtactggtttgactagttgtgagatctgctagatgtctaattactgtaggttaaattagcccccaagcattgtagagaatggatttgtctttatttcctttaatatccacatttactcttgtttttctggaataataaattattcaatcaaactttatattttgtgtgtatggctttgtgcatgtgttttctgtgaatatctatagcttttcagaacttgtgtatatcactgcagacttaaggctatttgcactctttgaaacaatatagcagttatttctaaaacgtatggacatggatataacttattaaatgttaaaagaaacaatagataaatcttcaactacatgtaagaactactacatatgtaatatcactgtctttattatcccctatagctacaacaccaagctatgaaggagaatactgtattctttgatgtttaaattcttttttcattagttaccattcacatgtggatggatcaccaaatacatcttttcagctgttgtaaataatcacaatccatggtccagccatcactaagcaacatggccttgccctacccataatttacaagtggattcacctattagtagaagtagttcattatcggttatccaggctacattattcagttggaggattaatgtttctatcatcaactgactagcatgaatttgtagaccatgtgccccaaaatgaaggataaagacaagatagtgacatgatccttatcaatgccaaggaatataaaatgttactgggaccatgtctcagatttagaaaaaataatctctgtaactgcacacattaagtgtaataatatcctcagtcctgtgcagtctcagaaagggaagagatcttggtgggctatgaaggtaatgaaagcttaacagaacttaaccactgaagaaagcccagtggaggagtgagggaat

SEQ ID NO: 37548 - DNA, 1146 bp, Homo sapiens
tggcgcattaacatttttaggaacttgaactctacccttttttacactctaccagatattatagttgatgctatttcttgtgccagttaataaacaatttcttagaagcagagagcatctttgatacatctttgtaccccttcacagggcaagaagttgtaggtagatacaaaatacagttgaatttaattttaaataaaagtaatgactattgagtggataaaagtgtatactgttttagcaatacattgatttatggaaaaattgaatgtgagtattagtatatatttcattaagcattcatattaaaatagtaatctgttggcttttcccattttaactagagctttgtgaatatgaagcatattggtggggcacttgggacatggaaatatgtattattcttattttctcatgacttgtttttacttatataagcaggtacttagaggttttagacatcacattgtagaattaaatcagtatgatttcaattgagttttggtatttaatctttctttttgaaaaagggtaatttcggagagtacgagtattgtactcagaatcttctttccttttttagttttttaaaatatactggtgtgcattttttccattactttaagatagtgtagcaaattaagaccatgagctctggagccagagtctgagactcagtttgtcagtgtgatgggaccagtaatgattctttttcatcaggatgttgtgaagacttgagataatacctggaaagctcttagcaaaatgcctgtcacacactcattcaacccctggttaggtaatatattattcttttgttttaattggaatttgcatagggagggagttgtgtattcagtggggaaaaacctctgaatgaaagtctcatggactttctggtgccttcttgttcatgaacaccagtggcaatgagtggctccctagaaaacttccatgtctcgagtaacctcaaaacccacagcgacagtaaatcacttgttggcctgaataaggatagctataatttaggttgttttttttttttaaatgtgttttcatttattgaggtcagtgcatttgtgtcaaacaattgaaacctgacaagaaaaatcaagggtagcctgggcactgctcaattattactct

SEQ ID NO: 37549 - DNA, 1671 bp, Homo sapiens
gaagccggtaggctaaataagtgcctgtgaatatacatagggttgaatttggcagtgtggcttttttctagcagggcctgggtgctctttcacacacactcaggaatcatctgatttgttttttcctttgtttgctatttcatgtccatcaaattattggaattttatttgagttaaaatgaatcaataaggattggtctctgttttactgtaacgcctttaatgtcatttcacctgcgagacactcatttctcgtctcagcctagtgaaaattgcacatttaccctcaacatgacattgtcttggcacgttttaaaggtgaacctgaaagtttaagggcatctaaatatgccgtgctcgcttcagtatccagttggcgaggttcaatagaaaacaaatcaattgtcatcccctgttgaaaataagcacacaaagatctagcttaaaaaaaacgaacattgtaaaatgaattcatacgcagtagaaggtgaggtcgagacccgtggagaactttatctgagacagtgtttgtttacctagaccgaacatttcatcctttcttggtcaatctctttgactttttctttcctactaagcctgacttttaaaataagtgagagtcagtgaagcaaaccccagttccgattagttccccatagcataaagacagaataagtgagtatctctaacttttgaacataatccataggaagtaggtatggcaataattatttctggtccagcacagaaagctaacagatcaattcactctttctcaaggaccaattctatcacaaacattttcttcccagagaaaaaaagagagagagagagagattcattcagtagtaataggacttgctgtttatctgtcatccccaaaacttgaaacagttacactagcacacctcagggggttacttgctggcttccacttctgcctgagaatttgctactgtgaaatgtgtgtatagtcttgctttcttttttacattgaatttgcattttaatgtttttcattcttcatagctaagagggaactttcttttttctagtcatttctaccttgggactgctacaagttgaagtctggctagaattggaccatctagtgcagacaaaagttgagatgcagaaaagggatttgaatagaagtgcaaggaaaaagaacaggattaggaattcaaaccctcctcttagatttgtatttcctaccttttttctttttttaaaaaaatctgctttgttttttcatttttctctgaaatttcttaatttgtatttcctacctttttttctttttctttttaaaatctgctttgttttttcatttttctctgaaatttcttcatttttctttcatctctccatcttccaattttctacttcttgttttttgtggtacctttatttttaagatgtgtttctttttctataaacatctgaattgggtaattactgtacctgcttgcaaatattcctcaactcagaaatctaaaaaaaaaaaatacaaaatcataactatcacagttaacagctcctcatcttccctgtgctctacctaggtaccctgagtgttagatacagtatctcacttaattcttcaccaccatcctatttaattaatttgcctgaagtcctacagctggaaagtggcagagctgagtttcc

SEQ ID NO: 37550 - DNA, 1027 bp, Homo sapiens
ctaagatagctgcccttccagaggtgtctggcatatgtaaaatctttcaaaagcaaaggtaagaacacactaaaagaggagaaatattgtctggtctgtgtgaagattggccatagttggttaaaataaacaaacaaacgaaaaaacagtactaattgagcttagtgatattaacttggtaaattaagccagtttgtctctttgctttatctgtcttgtggaatctgtatcagtggaaattaaatagtctttacatttgatgaaccctgtttaggtgttggaaatacccatctatttgttaaaaaggcaaggtcccatgatttagtgaatgggggatacagacagcctttattcaagtaactgaataaacaaaagaattagagagtgtgatgagtttgaataaaaaatatagttcataaaaaccagaaatgtgatagagcatagtggctggaagaaagttacccaagtggcttgggtagtcaatgaagttgactccaacatgcagtagtacttggactgaggccagaaaaattagaaagaggccaggcatagcaactcatgcatataatcccaaccctttgggaggccaaagtggatcactggaggtaacgtcgacctcaagtgagatcgtgtctctaaaaaaaataaataatttatttttaaaattagctgcatgtggtggcacgtgcctataatcctagctacttgggaggctgaagtgtgaggaccacttgaactcaggagttccagcctgcagtgagctataattacactactgcactccagtctaggcaacagaaggagaccctgtgtctttaaaaaaagacaaagaaaaaaagaaagagagtgagaaagagccaggagacataggttttagtggctctgtgaggcataaagtcctgggtgaccccatggatatttcaaagaggtcttcacatttccttgtatcacaaaatttgatgggtgactaataaaacatgtacagatgtgccttagaatacatgtagcattattatcccccaataat

SEQ ID NO: 37551 - DNA, 1056 bp, Homo sapiens
gcctgtaatctcagcacttcgggaggctgaggcgggtggatcacaaggtcaggcgttcaagataagcctggccaacatggtgaaaccccatctctactaaaaatacaaaaattagctgggcatggtggcatatgcctgtagtccgagctactcgggaggctgaggcaggagaattgcttgaacctgggaggcagatgttgcagtgagccgagattgcgccactgtattccagctcgggcaacagtgcccgagactccatctcaaaaaaaaaaaagaaaaaagaaaaaaaggttgttttaaaagaaaataaagtttatctgaataacccatttatacatctacttatatgattatattataccctttgcagttcaaatttcatacatgaaacaaaacaagaacatgggatgttttggttttctggctaatagacaaaatgccaggtcatatttatgtccagaaacttagggggaataaaagcacaaatattttttcccaacacaaaggtattttttcctgatttatccaggagaaaataaagtaaaaatctggcattttgtggctaatatggttggttattctgtatcaaaacatgtggtacctatagtcaatatattaaaagaacagcataggtgaaggccctatttttttccactttaagccatcttgtcataacttgtagacttttctaatggttttataatattttcctggcattgtaagctattttattactatattgaagaaagtagaatttcccattgcacttacattttgtcctcatacttccatttttactacatgaccttattatttaggaatttgctctccttctgatctcctagggataacttgctgctctactgatttagttgttagaataaaataatgtactttcacattcagaagtaaatcctgttcttttctatatacttttcacttgggaaactaatcagagaatctatttataatccatgactgaatagaaaagcacatataaagatgatttctagaaaggcagaactcatatactttttgccttatgaaatacagcag

SEQ ID NO: 37552 - DNA, 1065 bp, Homo sapiens
ccggccgaaaaatctacttcttatcctattgagtataagtttcctgagggtgccgtgtgttccctgtgtctccaaactgtaaattgtgttttgaattattgtcagtgccaaaacatattttttgattgccatgttggcaggctgattgcaagactttgagctcctgtttgatatattttaaataaataccttctgccttaagaatttggacatagaattcatcaatctttattttaagggtggtatgttgaccatcctttagaaataagattataaacagtatcctatgtgtgctaggcatgcaatataagaaacaaaagtatagaataattctaataacaatgtatgtgaccaccagtagtataaagatacagttgagtgacttatggtaggaaatgaaggatttgaaagaagttttaattctttatgtcagtaattttctgccctagttatatgttaatcacctgagttgctaaagaaaaaatatcagatgcctgggctctgtccctattaaattaggatttcttctctgtgtagagggtcggcctgttgctacaggtgaatggtatgaaacaagcagattatttgaagatttccatgtgccaccatttaatgtcttattattaaacttagctgcttctctggcagtgagaatgttgaaaagaaatagaacaaggagtaattgtatggtgtcatctgagtcttattagaagttcagtgaatgcctccctcatatcagtcaggtacgtggtgataaaagtatgcaaactggctcaagcagtggttcctgccactgatgagtgcttggctagtggggagagggatatagaggattccagggaatcagcagggaagagagggtgcactgtgccttaaaagggtaagggaagaatgagctttccagatagacaagtgtagactagacaatgagtgaggaattctggctatttataaaacaaaccatgttagtatttcctctaaaccctgcacacagtattgatgttccatcaatattaactgggagtaatgatagtgatgatcttcatgactaacattaattaaaat

SEQ ID NO: 37553 - DNA, 1025 bp, Homo sapiens
tacagtaggcgaatgaagctacagtaagtaatacaaaaagctacttcttttgcagcttgattgaaacagtccactggtggttgcttggttgtcagtttgagcttgtctgtgtgacttcttttctgctccttacttccatccatcattgcagagagcacagaagaaggaatatatatagtgccctgtgcttgcttaggccttagcaaatatcaattcatcaccaacttggctctaaaagagaccattcattggcatgttagaacattacaatttacccagtgttccctggtgttgaaggagtcacatgaccggatctcaaaacaaaaaagaattccatgatatgttcttggagttattaataaaaataactgctggttgacaggaaaggcatatggcaaatttaagatgcatggccacagtattttatttaaaaaaaaaattctttcctacaccaggggtgagagtgtgtgtgtgtgtgtgtgtgtgtgtgtgtgtgtgttttacgcaccagaaaaaccttcaactctgacaagccattgacgaggtgtttcagtcttcactagcttcctatttcattgctctgccattgagcccttgtaatactacgatgaataaagtaatcaaagcaattggctgcctgagatcttttttaatgcactgcttcggacgcagtacatatgctgtgcaaataaatacagaattagtgttcctgttggaagcatttggtgagaatgagtgatttgtcttgcttatgaaaggtgcatacatttccgctcatagctgtttatcagccagcctctttctgcttatggattctgaggtggaattcatcatttgtcagcacctgagcagatgtgctggagatgaccagattgatttgtgaggatgagcagagcagccgcaccagtgctaggagggcggcccctacaaattgtgttatcttttgagacttgtctactagctcttttctatacttcaggaagagaaggaaagctacctttttctgcttctcacttctgtatttg

SEQ ID NO: 37554 - DNA, 1090 bp, Homo sapiens
gacttccatttccagagagccataggtactaaccaatccctttttacatttgagaggtgctatttctgcatgggtcaggcaaccccatgggtgctgaaggatctggacagcataggaggcctgggaaggtggctgctcattcctcatggccagagccagaactcagggcagcaatgcctgatcccaggacaaggcccaggccactgccaggactcttacagggacatccctacgcagaggcatcctacatcagaggactggcccttctcccttccctcttaccactgtggaagcctgggacccaacaggcttgaaatgagagctgaagagattgaatttgatgactgtgagatagagaaagatgtgggtgctcggtatggatgagcacacaattcgatggtccaggcccatctgttcaaaagaaccccagtttactcttagggactggatacttctctcttagtctgttcgaggggactaacaagctgctacttattaacaatatgagtatggtaaactatgagcatccacttccttacctgtaaaatgaggatagttcttgccttgcttatcttaaagactttgtggggatcaaatgaaataatgtctgctttgtgttaaaggattacagcatgtaattctttcctgattaattaccagacaaattggtgaggtgcctatatatttaaaagcctcagtgtttttgaccactattaattgttaatccgaaagaaaaataaagcattctggaaaaactatcatgtaaatcaattacaatttgggctttctttttttcttactctgaaatgtgtcaggaccactattttaggaagcaacattcttggcatactttgaatgaatttttacttctctagagctagattgcatagaaaagaaatatccagcctgcaaagtaaagcattctggaaaaactattgggtaaatcaattacacaattgtaattgcaaaaatgtgtatgtgtaagtgtatatgttttcttactaagtgtgagaattgtgtcattttacttaattcagacactggagggtttggggatcttaatctcgtctagagcaaatcctctcgaaga

SEQ ID NO: 37555 - DNA, 1064 bp, Homo sapiens
caggaggctgaagcaggagaattgcttgaacccaggaggtggaggttgcagtgggccaagatagcgccattgcactccagcctgggtgatagagcaagactccatctcaagaaaaaaaagtgtacttttttcctggtatttaatgactaagaggtgcttgtcacatggctcttaacacaagtggtaccaggtagcatagcagagtttattttgaattttataaattgcattttatggctatttcttactaatgaccctgtaaagaccaaaatcatggctttaaattgttaattcttagaaggcatttcagcaggaaaggcaggtttcagttgtcttgtgcactgaaattgtccaggtatgcttaatttgctcatcaggcctgtaaagaggtagagtttggggaacctaggatagtgaacagggattatatcccttatacagcatctgtctgctgtacctgttcttaatagacatagttaattaatggataaagtctcatgtctcatagacagcagtagttgcctgttggttgaaaaaagagcattgtctttagaacctgatgtaaaggtggcgctcacattacagaactatagggcttagttctggatccttagagcttggtccatgcagccattcctggctctgcctcacctttgggattctgatctcagggagcctcactccatgcattgtctaagcaagtcgctgttacgatggatgagggcctgtccctgcagtacgatatggagggtagttggggatgggagcaaggagaggagcccaagtctaatccatcccctttttgagagataaagaatctgataaccacaacgttaagccacttgtccttgctacacagctaggtagtagcatatgtgaaactagaacggatatttaagagcttgacttaacgtttgtggccagctaaagtatgagcacagttcacagcggcacgggggagatgactcaagtagttcaatggaaagaaggacaagtgggtaatattaaaggtgaataacaaggtattttttacttagattttaacacagccaaattcacctgct

SEQ ID NO: 37556 - DNA, 1050 bp, Homo sapiens
aaatttcttgatggaggagtctgtcttctgcacagtaggtactcaacacagtttgatattcacaatggtgagtttactacatattaggaacttttttaaaaaatgatgctcagcttcttttataggatccttcattactttatgtctaattctagttttttttaatgggccatgggaccaagctagaacataccaattatactatattcaaactttgattctcaagtcaaaatctgttacagaaatactgttgctgtgggtgcaagcaacctaataaatactttcaacttcatttcacaaaaagtgacctagaatgctgatttagaaaaaatataagcttaaaaatgacgctatctgcttgtatgtgagagagagagagatggagagagagacagacgatgggcggaggggaggaaagagctaggtagaatgataaatgaaaatctaaaaaggcgggcttcacttcactggtattaatttggtaaattatccataatttattagagcttgtaaacattgtggcaaaattttttgccctgtcagtaatgaattgctacatcattaattttgtcaaaggatcaagaaacaacattgctgagctcaaagaaactcctagatgaatgaatatagttgggttgaagtgctggtgtggttagttgaattcagcagttgaatccacatgaccgtttctttcctcatggtcagcctgacctcaactgccaagggtggcagggtgcgtcccatcccccagtggggaggaggctgtgtagtcaacactgcattcggttccttacgtttccctgtgacactgtcctggcctgtatatatttatatattcacttacttcaggcatgtctaaagtggtaaatgaaaaaatacattaaaaaaaagtcagttggaataaaaattataaactagaaatgtattagatgagaatattttatggagaacttaatgtccactatctgtttaagcattaaatttggcatttagtctcctgttagctgtggggaaagggaaacctggttattcatatagttgtaattttct

SEQ ID NO: 37557 - DNA, 1044 bp, Homo sapiens
tctgtacatatgacaaaaggatattccaaaacaatgtgtttagtcactgaatgaagcagcagctaaagtaaaattatgcagcgtcatgtaaaattaactttttctcctccatcttcttcctaacagtggaaaatagattgactcagctcttatttttctgttttcactcagctattttgtgatttatagaactttaatcatttaaccatataagttaaaaataatttatgcccccttaacacgtaaatatgaatattataaaggaaaaagttttcttgcaggcttttgtgtttaatatatatacctagcattatttggctgttataaaacaggaaaatacatatttctagatggacataaaacatatgtatatatattagataaacagcaaactttgttgtgcaaatgatgaaaacataatgtaggagcatagtaatgtgattgaattaaatttatacacacaaacattatttcccagactaacattaaaaataaaagttgaactatgaaaatattagcaagaactactcaagtatttattccgagatgcttcaaatctggatttgatataatgtaatttatgtaaacataaacagagatgaaatatgagaagccctaatattaatataaaacaaaatgaaaacttggcatttaggtcacatagcatagctatgcgtactattttcctaactctatcttgataaaattgaaagttacccataaaaatgctactctgtggtctttcagcgcatattttttttgttcctggtgtggtttgaatttcatattgtgtttgtttttcttcattctcttcatcctcaccctgaaaccacagaaggtttttcagtggaaaggagagtattgtatcacacttcctggttggtgccaattagttccagcgtggactttctttatggctttattttggaatgatatcatattattggtcttcacgtttgctagaatagttccagttttccatcttttagcacaaatccctgaaaaggtcacatacaacttacttactggccaagcacacacgct

SEQ ID NO: 37558 - DNA, 1034 bp, Homo sapiens
aagaaaaccaattgatagttatcatacttatccccatacttgaaataaaatagtagtgagcctaagattctgtttttcttacagattattttgcacatatgtgcatgtgagtataaatatagatgtgcattttggtgctttagggtgtaatagaacagctaaaatcaccccaagtcttatgaggctcctgctagccaagtggtaaagaataaaaatccttactttttggttatgaaacctttagcctcttgtggacacagggccaaacagattgcaaatgtcttgacagctctattcacagcagaagcttattcccaaaactggtgcagattgattttgttcgttctaaaactgttccgttctccccctcttataaataaaaatagacccacacactcattcccagaccttttgataggtaagggttgaactctctaaaccatagcatggaaacccacgtaatcatgttattccctgggatagacatccatagtgcaagctaaaagaagtggtgaataaaagccgctgttgtattctgtactatccacataggatattttggcaaaacaggtctaacactgaataaatatttcttgaacaaataaataaaagaatgactacaaactctcattttacctggacagtcttctgcttgcataaggagcatgaagaaacaaaacctaaaaattacggccaacaggattaagtaaagaagcactgagatatctagctttggaaaattcttttaaattctgaaatgagagcatttgtccttggggcctatattccactggcacttcttaccccctggtttcatatgtaaaccagaaaatgaaaaccagacccactgacccaaaggagatgaagcatgtttcttttgcccattatatttctctgctcacgcctagatgccttgccttctctgtcctctgtgtttgaagttgagagctgggaacagacatgagattgaggtcccagggagaagccaagttcagcctgagctggtgaactcactgagactaagggcagataat

SEQ ID NO: 37559 - DNA, 1030 bp, Homo sapiens
tttataaacagccattgtgttttcctctcacatgagtctgctccaacatgctggataagcagtggtaattgataaagtcatgtatacagcctttatttccatgggtaaatttatggtcaggaaaatatctgaattagtcttgtctaagacaattgaaagaaatgtcggcatagttcctgatgatggatttttttcatgtaattcttttgcatttggcaagattctaaattgattttatgaataggacggcagattaacctttctgtaacaggctggaaaaatgatcacttggaaacatggtgccccctaatagcattctttgtagcaatcagagataatctgcttgtgtgcagtcatgttattagctcatttccttaagccgtttcctaaacttgttatgtgattgccgtgatggtcccagttactggattggggatagttcctctactggatgtaacttttctcacttaaaaagagtatgataatgatgatggaaatggttgtttctgtgagaacactgtaggaaaagcagaaaactagaaaacatccatttacaacaacccattttgtaccctgccgatgcatttggagaactagacatttagcttaaacaagttctggacagttatcattaatggcatccttgggtgagtgtttaatacaaccatttaagttactgtttgcctggcatttcctcctttaggaaatgaggcagtttgcagaaaagaaattaaataaatcctgcctttcctttttattgcctttgagatttccatgaaaacttttatttcttgggacctctaagtatatttgctattggcaaatgctgatgttctcttaactaaatgattttggaaactgctagaaataggtcatgttaaataggtggaatcctagatgctgtcttttttctttataatctctttctccctgataccttgaatttttaccaaatcttttcattctgtggcccaattctcatagtggaatgtaaactcctcaagggtaaggactatgtgctgtgctactt

SEQ ID NO: 37560 - DNA, 1094 bp, Homo sapiens
ctttcctccattaaaaaaattaaaattttgtcttatgactgtgttggtgtaaatacaaatgtgatcaaggctggattttatttattttaaaagaaattaaaacactgctggggtcttaggcactgggcctaccatgtccagcgtagaagccagccccatatcatcgcaggctcccttttaatttcagacagcagtgtcatttccttttgcgaatcatgttgccatcatgtcctttttactgcaaaaagaattctgcttggcaaatgtacatgggtatgagtgtgtgtgtttggggagaacaaaagtctgtcaccatcagtattaattggacagatgctctgaacagtggatgcttataagggtgcctcttgcctgataagtctgaggtaggccatttatcatttattttttctggtattcttttacatatattacaatttttagaacactcagattcaaactgaaagttatgtatttaaaaggtctagaaatttctcactttttttcctctactgattagaactgggaactggttttggcctcgtgtggccccctcttgggactctctgggttggtgtccagggcagttactccttgcccgaaaccacccctgaaatccacaacccaaaactgattatcatcaacatttctcaatttccaaaatgaaatttgtagttacctcagacttcatggattttggcctggtatacatgcataaccagttggattgactcatagctagtttaattacgtggtgctttgcttagattgcagacttctctaggagaggcacacttttgcatcttctcagcacctaagcatttaataaattcttgttgattgaatggaggaatgactggctggcaaagaaccagtcagttatgtcaaaggtgccaatttgattgtcttgagacacaatccattaaaaactcagctgtttggcgagagagtagaggcctcaccaaaagttgagaattcgagagaaatcttttataatcttatcaggacccaggctatgttctttgatcagttaaggaaaaaaatgccaactgtcaggcataacctaagatttcaggaagtcttccacagcaatg

SEQ ID NO: 37561 - DNA, 1012 bp, Homo sapiens
gttggtttgattaacttcttgccaacccatatttttgtatgagttattacatcagccaagggagagagtcattgggagtttttagcttcatctctgcacaggttaaattatgtagccttcttcccaatttttctgggttagttactttcttttgtgcacgttggtttgcagcctggtgcctggcaccatagagcctgtagttgttgctttagcatgccgtgggtccacttgtcttcgcatctcctgctacctggattgctttcctagatataagggagtagtgaccccagaagacaggaacagtcatcgtatattaaaactataggtggcaggccaggcgcagtggcttacgcctgtaatcccagcactttgggaggccgaggcgggcggatcacgaggttaggagatcgagaccatcctggctaacatggtgaaaccccatctctactaaaaatacaaaaaaattagctgggcgtggtggtgggcacctgtagtcccagctattcaggaggctgaggcaggagaatggcatgaacccgggaggcggagcttgcagtgagccaagatcgcgccactgtactccagcctgggcaacagcgcaagactccatctcaaaaacaacaacaacaaaaactataggtggcaaaaacaaggagaaaactgatgtcattgtcttagagcatgataactgttacatatacagtttcaagtgtaaatgcttgatttttcataactttaaaaactgtacgtatttcttgccacttttcctctcctttttttcccagcatacaagtaggtcaagaagtcttctgagagtcctgaaataactttcaggtttctttggaggccaagaggcttccacttttactacttctctaggataagaaggaggagacaaggacaggagggggagaaggggaagagaaatggcatgattcgttaagcatgttatcgagaatttttatatgtcatgaatgttaatcatttaagtgggttttggatgctattagga

SEQ ID NO: 37562 - DNA, 1089 bp, Homo sapiens
gcgttgggaccagcctgcttggggccatcattaatgccattgtggataaagggtgaaggctgtggccacatgcagctctgctgacactttgtgaaaggtgagcccagccatgaagtcgtgggtgtgtcttgcccagtaggaagataaagcacagccatgaagttatagttgacttggtgcctccatctcctgctttaaggggcacctctcttgggagctcaggaccttgctgctggtggcctcccggcaccatgacatgcaggggacaaagggaatattttgcaaagaacatattcagctgagataggcaggcagaaagatctgtctacatgggacataacatttgaaagtgtctgcatgaacaagaaggaaaactagagtttgagcagtgaatttttacgatgaatgaggcttaacattttaagttgtgtatgagactgtggaccacagcatgggaatctgtcttcattttgttgcatcgatggctacatcaagtctcctaacacggttgctcaaaaggaggtacaatgtgaatcacagaatggcggagccatttggggactgaactgaaaagcaagcattctgagcagcaaacaagacacctagaggccggcatctgtcatttagcttttgaagcctttgcttcaggggaagttacacatttctgtatgataagtacaactcatgcttcagaattaattgcagcagcagtgatgtaacattgccagccctcttcagagaataactcagtctgtgttcgttttgacgttgctgaacgttgttttcctcatatggtgctgaattttaaaaatttccatgaaatttgcaagcagatggagagtagatcgcttggactaccaggctctgacagcttatctgcattttattgtgaaggtggcagctttggaaggttatgagagaagtgttagggggaggaggaaatgctgaaggatgtaataggtttgtctggtccaggtctttttatagatgtgggtcatgcaccgtaagcaaggtgaggccctttgtgacactgaagatttatttgttttttgctttcctccctcctatggtcatacactccctccttcc

SEQ ID NO: 37563 - DNA, 1049 bp, Homo sapiens
tttttttgttttaaacagagacagcgtcttgctattttgtccaggatggtctcctgtgcctgggcttctagcagtcttccccacctccgcttcgtgagtagctgttatagtaggtacacaccactgtgcccagcttgaagtgcatgatttttgaatctgagttttttataggtccacttactttaagtagatgccctcctatcaggcaaaaaattaaactgtattgtgtttccacttctatttgaatttcactctagccgcaacagagcacttcagtccaaatcctgcattgcccatctcaagttctcccactagaaggtagaaaagaagaatagtacttatattattaatagttattaattcttcctatttccttttgaacaagtggaaactcttcaggcaaacttgcctctcaatacgcattttcttttcttcctattttacttactttcccgcttcattgtcatgtctgaaattgcagataatggtggcggggaaagctgttgtgagcattgggtggtggtgctggtggtgactctttacctgcttctctgattagaaagcaaacttccccaaaacaggcagaaatctattctatcaactttgatatctctccaggtttttaaaacagtgaccagcatctggttggtgctgaatgaatgttcctagaattaatggttaagtgagtaggaaatactgttccagttccattttctcctgtatttggagactctgtggttctctctctctctctttctctctctctctctctctctgtgtgtgtgtgtgtgtgtgtgtgtgtgtatgtgcacatgtaagtatgtgtaatgtttagtttttttatgggtttaaatttatggtaaggtaggataagagtagcggtatctgctgaattagggttaatattttctgtgttaaagctgaagatatgcagtgggcaaaagcctttagatttggttcttggtgatccttccataaaagtacattaagggtgggtcagagtttcctccacaaaactgctaatgtgctctctgcccttagacataaca

SEQ ID NO: 37564 - DNA, 1853 bp, Homo sapiens
ttaagaaatattcactaaagagtacatatcctgaaataattaactcttggaatacattgaataagggtcttttgcagtgttatcttatgttgcatttgccaaatatagtgaaaaacaatttgctctcttgaaaaggaagcaatactgaaaatacagaacccattattaagtcagaaaaaaatgtattttttaaccatctcttttagctgacttggtacttctctcattgggagactgtatgtatagacttaggcaaaagagaaatgaatcttaactttctgtgtataacgttcataaatatgtaaatgcacaatcagtttgaaataagtaagttagagtatttggtaatttacggtacaaatattgacagattgctgctgaattggtggtgaaagtaaatgaaacgtggccagcacaattaggagttgcccaaatgggaatcttgtttttgttttttagaaaatgagaaatgccaaatgttaacaaagattttgtcaatattctttattgttggagatttgtgcaacttcatttataaatgaaaatcagatgaaggttgacagagctggagttgttagagggcttggaaggaagtgtctgaataaggcactctgtatctcctatctgagaagctcactgaggtttgctactgtcagcctacagtgcttctgcagagatctgtagccatttagtgccctcgggctgatttcttttggagatctatttacaaatgggaaattggaggagtcacagttttgtagccagaggtagaaacaaaggtcttagctctgtgtactgtctcttagagaaacgagtaagctgttctttctgtaattcacaattagtagaatatgattgtgtgtgggggcctaaggattgtgatgctactgaaagacagaagaaagtccagctgataggctaggcgtggtggctcatgcctgtaatcccagcactttgggaggctgaggtgggcggatcacaaggccaggagttcaagaccagcctgaccaacatagtgaaaccccgtctctgctaaaaaatatataaaaattagccgggtatggtagcatgcctgtagtcccagctacttgagaggctgaggcaggagaatcgcgtgaactcaggaggcagaggttgcagtgagctgagatcagaccactgcactccagcctgggcaacagagagagactctgtcttaaaaaaaaaaaaagaaagtccagctgatgtagaattcagaaaggagcatgatttagattagaatttaccttcttgcattttaatttgctttgattttttaaatattttatttggcaaggcttgcatggatgacatgcaaggtcaagtggaggtatgctatgtaatatattcagttacattttggtttctcaacagtttctctcaatgctgttggttacttcactcatgagacacatatttataagagtacacaactggccgggtgcggtggctcacacctgtaatcccagcactttgggaggccgaggtgggtggatcacgaggtcaggagatagacaccatcctggctaacacagcgaaaccccgtctctactaaaaatataaaaaagaaattagccaggcgtggtgtcaggtgcctgtagtcccagctactcgggaggctgaggcaggagaatggcatgaacccgggaggcagagcttgcagtgagctgagatcgcaccactgcactccagcctgggcgacagtgcaagactccgtctcaaaataaaaaaaaaaaagagtacacaactggcataggcacattgggaatgtgaagaggaatgattatgggtatatcccttaagaaggagttaggatggttttctaagcaaaaata

SEQ ID NO: 37565 - DNA, 1062 bp, Homo sapiens
ctgtgtactattctgtttgctaggatgatgacttgtgaatttcaaatggtggttctgcatttactaaagttattaacaaccatttgtacacagcaccacattttaattggactaggacttctatttcactccagtacctaggtgcagccagtgcttcattaaataacactgataatcagttcataagatcttacttcagtgagtgatcatctgtcatgacagacttgaaaacaggtttgtaatgcatgaatttatcagttgtcataagcaagcaaaggaattggctttcaatgtgtctgtagctatagtaatgaggagatttgttgagcctatacttaatcttctatattgtaatttaagaaaaccaacttaactatgttcaactaaattgtacatttcattaaaatttgaaaatcatagtaacaagacagggatttctgagttataatcaataagactaatttaatttaggggtagctgaggagaaagatgaaaatcaagtactgtagtttgaattatggaaagtgtcatattttaatttcacaattggttctggtgtgtttggggatttagaataattttataccttaacattcaatctttattttccagtgaataagctaattttagatgattgctaaacctgtttctgcttgctgttatgcaatattagctttggaataatctggtaattcttacttaacaccaattaataaggaattagagtaataattttagatgtgaataaattgcttcaaattataacatgttttgtagtttatataaattgttattagtgatgggaaaataatcaacaaggcatgctgcctgctggtgattttttttttatttttctttgttctgctttgtacatatatattgggagaaattggtgattgaattcaataatcattctttcttacttattggtggtagctgcatataagaatgcatagacaatctcaaaaacctcacctgtgaaattagagtatataccagctggccacctaatgtcaaaacagccaatgaaattttctcagttgagtcaaaccaatggctatt

SEQ ID NO: 37566 - DNA, 1045 bp, Homo sapiens
tagcggggattacaggtgtgtgcctccatgcccggctaatgttgtgcttttagtagaagcggggtatcaccatgttggccaggctgttctcaaactccttacctcaaatgatccacccttctcagcctcccaaagtgctgggattacaggcatgagccaccatgcctagccacatctcataatgttttaagaaagtttacagatttgtgttgggctgtattcaaagccatcctgggccacatgtggcctgtgggccataggttggacaactttagttatgagcatttttagatttgcagcaaaattgaacagaaggtacagagatttcccatatactccctgctgccacaggtgcacagcttctcccattatcaacatccctcaccacagtggtacgtttgttacaattgatgaacctacactgacatatcattgtcacccaaagtctacagtttacattaggtttccctcttggtggtgtacattgtatgggtttggataaatgtatgatgacatgtattccactattatagtatcatacagagtagcttgattgcccccaaaatgcaatgtgtgtgtgtgtgcctgtttgtattccattaacatatatatggaaaggacagggcttaatgtattttttaaatacagtttcatatttttctccttgggtaattgctttaaatgtagaatatttagaatcatttagtaatcatttattaatattttaaataactaactttaaattgggtttgatgaattttttgtgtgtgtagactgacacttaaaatgttagttttattaaactaataggtaatacatgcacgtagtaatttttaaacaatataatggaagttcaaaggtagagattaaaaacattctatgcctttgaacattctttccttcctttcactagagacaaataaatgacactttaggaaaatcacttaggatgccgaagaaactacagtttcagataaaatagagctcttaccatttattttctgtatttgcagaaaatacaatgattatatgagatagtttgtcc

SEQ ID NO: 37567 - DNA, 1049 bp, Homo sapiens
tgaaccctctcactgtgaggctgtctgttacctaaggctcaaaatctatcataattaccatttctcttaaacacccatcattaaggagtgcacaaaatgcttgccttaaaaggatagtttcatggagattgcttcttgggtatgtgtcagcacaaaatgaaatccctggggttaagaaaaaagaagcacttacacattgaaaagtggtgaaaaaatctacaaattcaaatactgccaactgaaaagcagttaatgggttgcatgttggtgcaaccagaggcagccagctctgtgtcctgctgaaccgctgggggaagatttccttcattcgtggtggtttgacattgaaaaccaggaacccgttatgtgagaagtagcttgttttgcctagacaagaatatacatttaactttgggctaaaaattataaggagttggctcaaagcaaaaaataaaataaaagcagttatacattaaagtaaaaacccggcatcatgatttattgactttggccgtatcaatttgctaaatcatatggatgcgatttaagaagaatgttattttaagaagctttgctccgctttaatttgacatgactaaacctgaagccttctggaaaccacagttcaaaatggtttttccccctagagttttcatcaatttgcatttagaaatgtaatattagctctcatgtagactaagaattaattttggaatatttctagataatggaagtctcattccagaagtgaagttgactatcatttgacgtaagttaaatgcgtttcttttgaatttcgtatattttaaggtcactttttgatttgtcaacatccttactggtatctagttttattcctttccctttcactcttgtatatgctattggggttgttctaccttttttaaacattagaaatcttgcattataccttggaaattatctccatgaagatcaatagacttgagacagttatctgaacttctcccatttgaaatactgtcattatttttggtgtgggtatacgcccttaaggactcaggttaaaa

SEQ ID NO: 37568 - DNA, 1030 bp, Homo sapiens
cctttttttttctcttaacattgatataatgagtattcttctcatacttctggaagcaggctgaatgatactgaaaactatccttgtcaagggctgcatatattatcatcgagattagccatcctgttcctgggcactttagttcaatgggaaaccaccttcccccaaagtttccgttacccagtgtgtctgggaaatgcagattaaaaaatggcgttaagtctcagcctctcagtatctttgatatattaataaccactgacagaccaagatggagaaatctagttatatgaggcatatcccaaacctcctattttcaaatactgacctactgttccttattgttagacacctatattgttttcagtttttcataagtgacacataaataacttaaacaatttttttggcttaaagcttttcttatattttagtatatctctagggtgcagtattaggattatgggatcaaactattaacatggtataattcttagtaatattgtcggtttatagtttcattacactcttactggcactgggttttttttaagaaacaaaaaatgtgttttaatagacatttgtttgataatgaaatggaggcttatttgtttactgtttacaaaggcactaataattggtaacgcttgctcttattaacctatgccattagaaaaaaaatactactaccagctaccacactgctgagttgagccctgtgctgggcacttaatacatttatagtctgcacaatagccttaagataaacaaataaaaattacatagcacttcccatgtgtcagtctcttttcaagcactgtgcatatgtaaagtcatgtaatttgcctaatgaccctatgaggtaggtactattactgccatcttcattttgcagttaaggataccaaggcattgagagattattggatgaaagttacacctttagtaagtgacagaattggaattatgaaccgtggaagttggttccagagtctgtgctcttaagcacttcactgagcttctgctgcta

SEQ ID NO: 37569 - DNA, 1099 bp, Homo sapiens
ggatttaagaagtcatcccctgtattgtctccagcacaaaaaccttccgcctgcatctttcagcttgtatcgccacttctaaaggatccatgggcaaactgctgaatttttattaatcagcttaacttaatgagatgaaaagacttttcccaaagaatggagaagggagagacagatactgagagctactctaattcttttccatgaaaaaaacattttcctccctgattttctagggaagacatgttcagttgtttccaggtaattcatccgaaaagtctttctaattttcacacacagactttctctagccatgtgctgcctttattattattattattattattattattaaagaaaatagacagctataaagaagaattaatgagagttgaggggggaaatacctttgggaaagaaggcaggaaagcttaagctgataaaacatgactcttttttgatgggggctctctttggataacttgcccttgtctaaattcttctctcttctggtccttcctgtccccactcccccattcactccccctctcgtcaagcttacttcataaatggtaccagctggagatcttttagtggcattcagggattacttcccttcggggttttaataagccctgatgcttgaaacacagtgaaggtgcttctggagacaatcacctttcaggctgggaccatgggacccttttgggggcccagatggttgtgtctggagagcaccccaggatgtgctgcagatggcagatcactgaagcagggtgtccacgggcctgaatgatcaggaagcaatcaatagagggatgggtttctgtgcagtcaatagagggtgcttcctatgatttctcaacccacttgactcacaacccacaaatcctcctgtaaatggttggatttgaatctatgaccagccagaattgctaccactaaagtccatacagtccagtgcttatcagaacccctatgatgggacccccacccctgcacaatgggggcactagcatggcaagattctgatttcatttgttagatctacttaggagttatttaaaggactaagtcagccggtgcaggggcatccgtg

SEQ ID NO: 37570 - DNA, 1032 bp, Homo sapiens
gaggttaggcttgttctcatccaagtagattgatttgtgagcagcagccattaccgacagtaaaatgtgtgtttgctggtgtttctgcatttagtaatttgttggacatgaactgaatgtttttcatttccttgttatctaataaaagctgttcaacttaacttaatccaagttgaacttttgtggaatctattttattcctctccattattttataattctgtaatcttaaattttttgattatcagaatgagcattaaagtaggtctgttttactaataattatttccagttaccaatatagctattttcattgaaagatattcataaaataagagctcattataattgcaatgccagttatggggctatgattttgaactatgtttctcttttataaatattgagttactgttaatttattgtagacagttatacccacgatgcattgtgagatgctgaagaaagtgtatatagtagctacatatttacaccaagaagtttgcttgtctggctcttaaatttccagaattgaatatgatagaaataggttgatattttgttaagatgcaaaataaatcattttacttaaatacatacatatactgcattttacataatcttatcaactatatttcattttcttgtgttttatattgtcagggtgataacatcacagagatgctatttttgaaaaaattttgcattataggggctttatgcatttcataattgtctttgatatgttatttaaaatatgcttaatagttgcctacaatgtactgacagtcatattcaaaagtctcaatttcagtggaatatatataataaaatactatttctggagaaacttagagaactgacccaaatgtctgtacttttctcatacaggaaaatcccatacaatgaagctttttaaataagctttaaaaaaatttatttgtggtcaaggacattctatattaagaaccactttcagtgatagtacccactgatagtaagtagaagtatccccctcaccatgtaaatatt

SEQ ID NO: 37571 - DNA, 1087 bp, Homo sapiens
gtggagtgtgaatttaaggttgtgatttttgtttttgactttttaaagactttatttatttagagcagctttaggttcacagcaatattgagaggatggtacagagatatctcatatacttcctactcccacacatacacgaggctgcatttttagtaggggaaggaggaccattatattgcattgttctttgtaacagatggattaacagggtcttaatatgtattagaattgttctgcactgttgtatatcttagccactgtttaattgctttgtaaatataacagaatactggtaaatgttgaagatcttcaaattaggcttcatttgtaagtggttaagtggtgagatgataaaaatcagagtaattttaatatttccagatgaaacttagggtgctctattatatctgaattgtttccctgacatgtggattaagcaattgttttcaaagcttttttttttttttgccaaaaaaccattgttcacaaaaatcattagcgaaagtctaatgtgtaaaacggaaaaacaaatgccaaaccaccaagcaaacatcaagttgtagttggagagattgggcggtcggctgtgctctgttcccaggcttcttgagaggcctgcgaggaccccctatggctctttgaatcatgttttcaaaaccttcctagttagagtacaggctttggcatttacttaggggcgaatagaaacaatgctgtggaagagattcatttttgctttataggccacagaagtacttatgtgcccctctaggaattgacttgaatagctcccatttattgagcacttactgtgtctgagcacagtcctttatagactaaatcatcatttttaaaaatcctgacaaaagctcttgtgagggaagtattataattcttgttttgctgctgagaaaactgatttttacatactttatactagccaaaggtcccttggccagtaaatggcccttaccactcagctgggctatgtggagtgatacagtttgtctaacagaacttgatgaaatgttgaagggtgaccttggggcagaatttccgaggaggtgtagtggaggagaatggt

SEQ ID NO: 37572 - DNA, 1039 bp, Homo sapiens
aattgtatcattttgtaatatatgttgttcctgagagatgatttgtacatttacattgggttttatttaaaggaatttacattttaggttttatcttgtgatttctaaaagagtaataatgtgtaaagactgactcttgagaggcaagtcttccaggaccttcttcccgggaaagggattttgaatctcctttgtaaaattggccaggtttatttttaatgtcctcccttctcctctcagtttgtctctgctatattgtttcttctttgacttctaaaaccctgatattctactttggacttcatagttataatgagatatctccatctcaaaggagaaattaatgaataccgacatcctcttggagaatgcttgtatttccaatgaggagcttgttgaaacaaatcaattcctgtctgggcctgctccttacgggcagctgggctgtccctgggatccttggatttttctgaattctgctgccagaagagcagggtttaacctcttgacgctctgcttgagaactcttgctattgactatcttaaacttagtacatattatacacacattgatgttagaggtataaatagatcataacaacatgtagctgagaaaggaaacaggatttgtcaaggaacacatattttaatgcattgaaacctgagtaatagattactgccaaagggctgctttcctatagcattgtcaggtggttattcaaagccaattttacttcctatgtttatagttatttagatggatagcaaatatgcctgttacttgttaaaaaatttccatcatatacttacataatcattttgtaatgttgttttactcctgaaggtacaaacctcatttatgccaggaaaaagtaattcataagggaaattatcaatgatccttatgcgctgtacccagaaatttagtgatgttggtgggcagaacttggccactagtaataaaaatactgggtctaacataagccataccaaaattatttgaaagaacactgtgaactctgcataacagatttctctt

SEQ ID NO: 37573 - DNA, 1754 bp, Homo sapiens
agcatccctgtcatcatgaagcattcggttagtaatttctaggtcactgtttctcacactgtaaggtgaacacagacctggagatttcgttgaaatgcagattttaatttagtgggtctgggctacatagggccctgacagtctgcatttctaacaagctcccagatgacattgatgctgctggcccatgaaccgtggtttgcacagcaaggttctagataaaattaagtgggagagagatgacttctggctcttcttcaaggactcttggttgtatttgcgctgaacttttcatagagttctgcagtttctaaaatggctccgtatttatgtgaaggaaaattatttgccatttaagaagcccagaatgcctaatgttcctttctaaccactttccttcaaaactcagacaaataaaacagatttttacattgaagtttatgcttcattgaaaatacaccactaacaaaggtaatgggacagggatttcattataagatttggtctctgtagacaaattccactggaataaaaatactaccttggtccaaaaagtttaaggaggatcctgtcataaatgtctaaagatattaagcaaaccctcccaagatgtattttatgtggcaatgccagaattacaccgcagaaacagatttttaacactttccaacttaaatccgtatggttaaattaaccccaaatgttctttttacattaacataaaagatgactaacagtttttctactttcaatgtctgggtttcttgtgggtggctttcaggagcctgtaatttcaatggagttataaaagacttgggacaaaatgcgttctttctgtaaagttctatgattctagtagtcttagtgagaaacttttgctcctgtagagtctaggtaatataagatctgcaaatatgcttctgctttcctcacagcgtatgtattatttgctttttcaaagcaaatctttgtattaacaagtaaggaatggaactagttaaattcagaagattactctgcgttttttgttttttgtttttactgatcttcactctgtgtatataaatacaatattactaatctaaatgaactttcaagtctttgaaagcatcagttaagtagactgacttaattgaaatgtacctctatggaatgattatttttaaaagagataaaacggtttgtactttaagtcaggtgtatttttatgaaaggaaacagatgaacaggacagtgaccacttaagtataattttattttaaaaagaaatttttaccaacaatttttgatagttaattttaaaacagaagcaaatatttttctttttaaatcctcaatggctttaattagaacattgggtactatttcataataactatgaatattattaagaatagtaaatcaagacagtactgttttctttgtaagtttatgtttatgttcactgtggtgtaaacgagggttctcaaacagtgaatttgggggtgacaagcacttagcgtttccagttttatgattctcatagatcctgaaatgctagaaccttctgtgactctgtgtgaacttaagtggctcctaaaaaagaactatgctatatgcttcaaagattgttaaatttaggaataggaatggatttgttgaaaatagagttgatatacctaagatttgtgttttagatgaagtagaagatgctcagtagttcttaatactgtttttcacctccatttttaaaaaaagaaaataagcacattaaa

SEQ ID NO: 37574 - DNA, 1142 bp, Homo sapiens
aacaatgaaaactaattacacactttgacatcaccatagtcaactatactcttgggaagacaacatgacagaggtggtgtgtgttgagggggtgggtatatgtatacacgatattccataagaatatgtacacctaaggtcagacatacctattggtttaccttcatcctctgttctctgaaggaaaaaaaatgtagaaaggactattaatttagttaattaaaatgaaaaaatgcagttctttgttaggaagggtctccctattttagcgttcttcctttgtaatatgaactgagagaaccagcaatatctgtgagtctgaatatctcgttattttgaatattattttggcatggtcttgttatcaatacatatattaacatatctgactattatcattacgtcttttgcaaattattttttttttacttagctctagatttttcattgacatctggttatttgagagctaatcacttcatttattatgtaaatctctctattgctatttttctcttttgatggcttttagccattttattgtctctgggcctgtagacctatggaagatttgagaaagaaaaggaaactaaaaaaaaaaaaaaaaaaaggaaaacccaaaaaactcaaacttttagcagcttggatagaagatttggtaagggaagaccttaaagctattgaataacatgaagttttggaatcaattttggatttcagtcatccacgccatccctgttctctggtaccacatagaatcagaacttggtcctatataatgttttccattactattttcattcctagggtgagcactcttagctgtatctaaaaccaaagccaaatagatgaattcagcaattacatgttgacttgaacttatttttccaaagttttcacactgaagaaattctatattcctatattgaatatctaaaagttatcattgataaactattgagtgatatttgcagaacactgggagacatacagtggattcagggataagataacatttgcacctgtaaggaacttaagaccattgtgcagatataataattttatacatataattatattacagagtataaaatagtaccataaatgtgcacatgtagatttatttgacagatatttatgtc

SEQ ID NO: 37575 - DNA, 1047 bp, Homo sapiens
gttcctatgatttttacttttaaaaagtcaagtacagttgatttgattgtaataggatattgctgcaagttttatgattggattcttaggagatataagatataaatattctttctattatagcttatcaagtgacctgattttcatgactgatgatcacgattctggtgtgaactaaaagtgggagttttggcatatgctctggacagtcatatatgttagcaaatatgtatatgccttggacaatcatgttgttagtacacattgattagacctgttttaaaaatcgctttgctattaatgatttaaaataaccacgcagtataatatatggattaccatgttggaaacacatgaatacctacttagagattagaaaaaatatgattaagtgcttatttcctgatttagaaaagcttgttttttggctttcagttaaatcagcgtgttttttttcccccctagaagcagccatcttgttttaagaccgattttatttctttcgtgaaattggttcggaaatgaatatggacgatagaaaaggactaaaccactttatgatcattttggcagggctctctacatttaaagcgctatcttatttgcgaacttactaaaatgctatcttcttatatttagttgacagaaaaggatgttttaacttagtaataatatgcttaaacccaggcatattatatattaatgttaaatgttgggctgtaccatgtttccatacatatttttttctcgaagcttatactttatggctaacttcaaagtgatatattaatagcccctattgtcacctccaccctcaaatcctgatttcatttttctgactatgctaagtagttctttttatttgttggttgccttttttttttttttttaattactcaagtctacccggaatctttctcccgcaaaaggtactgataagagtataggtacctctaaatatgaagcagttggggttaagatgcgttatattaagtcagagcctttttgtctctgaaatataggctcttcctatcacattagaacaaa

SEQ ID NO: 37576 - DNA, 1087 bp, Homo sapiens
gccaaataagtattttaaaaataaaaactaacagttttccacaaacaatagtaagaaaatatttcagaaaatttccacgggtttagtaaattttataaattcactgttgtgcaattccttttcctgtatgttatttcataaagtaagctagccatgctttgtgtctttatatagaacctatctgttaaaattttgctaaactagtaagacttcaatcttttgaaaaaagaatagaggactttaattgcaacttaaataattttttttatttttccctcagaatataatatgttcagtgggcacgttaaactgatgataatgtacactgtgtctaaacgaagtaaatctactttagcttatactaacagattcaatttgaaattatgtttaggtaaaatcagaattaaatgtatcttgatcacagggattaagtacagtatcttactgtgtaacttgtgtcacttgtgtatctggtaggagtttatcttctacatggagtttcattactgcctctccattgataaatgagcatctatagatgtagtttcacgggaaaaaatattaaatttatttgctgtcagaatagttttactgttacaatctatgtacccaggtattcacttctgagaagtggatactgagttttcaaatgctgataacttttagttggtagtatttattggataggggaccaaactgatttttttatgtgttgaattggcacaaatttgtgaaatagccactcagaactatcagtttgaatagaaatatatgataacatttgcctaaatagatcttctatatttccaaaatttgaaaacttgtataagttttacctaaaagtgtaaataatcaaatcatccttttaatattattctgaattctaaactggaatgtcaccaagtaactttgagtaatgaaaatccacatcaagaagaatataactatttgtccttaatttctttaagaatgtaaaaagcttttaaataaagttaaaaagacttccagtaataaaagtttatttacattctcctttagtagctatgcttataaagagagtcataatactaagaacatgcctcttcat

SEQ ID NO: 37577 - DNA, 1059 bp, Homo sapiens
cgggcggagccccatccccccgcccacgtccacgttcacgcgtgcggcctcgcgctctgctgaggctgctgccactgggtcgccgccgctgtcggctttccacgcaagtcattaacgagggggcgtgcccgaggagattttttttcccataaagcattttttctctcgctctctttttttccccctcttttgcaaaactgacttttacaaaaccctttccacttcttgccagtcgtttcaattcctcctgggctgctcgtgctgctgctgctgcactcaagtttatttattttcccgcctgggtaggggttttaggattcggtttgtggttttcacctctgttgctgctgtgcctaaggagggaaagaggagcagctgcgggaggatcgggaaggttttctgatgtagtcatcggggaggtgccactcgctcgtgcgctttttttttttcctcttttcccatttcaaactgattgatgcatctctacaagttgctaggcttggacccgctggagtcgcagggacacttctgagagctcaccccgggctcttggcaccgcgtgtgggggctcagtctccctctcggaaggcgatcggagactgacatcggcccatccaggagttggagggatccatttgaaagtgattgtttcccctcccgctctccagccgaacagttgggttggcgtcgtcttgcaggtttaggaatcccagctctgccaggccggctggtcttaacctctgctcttcattcactgtggtgcacccacacccagccaaggaaagcacgcgcgagaaatccccgaggctcggccagcccccggggtgccctcttccgctaccgccgcgttccgactctgctgggggacctgccggaagacgcgaagagccaaacttttctttgaggttttcgaggcaagaccgcttcgaaagccggcgcagctgccgcttaaccagttccaggacaccgacaaggctgggttgcggctccggatccccacccttctcggcgcaccgcccggtaccgcagcacttacgactcctctgagatttctggggg

SEQ ID NO: 37578 - DNA, 1025 bp, Homo sapiens
tgtcctttttggagtggtcatcacagaaccatttgcctttgtatatacagatgggggaagagatggaacaggtgatgctcctacaggctttctgtctttgattcctcccacagagatctaacacattatggggtcctctggatacatcagcagatatttcttggaatcattgtttcataggtatctgactccaactccaatttttgccttttacaccaaattaatattgtcaataaatcagcattttagatttagagtaaacctgaagcttttagaaactctcaataccagaataaattacatatattatgtgtgtgcttaagtatttttattttactattgcacacacatatatcctatcctggctaaacactgtttttataataatttactatgtgttcccactaagtagtagtaaaggtaattttagagcatttaggttaatttatcagatttaataatgccaaacaaatatggctcttttaagtaatgagaccagagtaggaaagaagcatcaggacaaatctgaaaccacagaataattagatttaggctttcaaaagcacttggctccatatcctccatcccacccacaaggaaataaaaggacaaggcatttaaaaatgaattattctctgaagactttccctactgtgtctgtttagtcttcacagttttcaatattgacagtgagtttcttttcaccaccaatatggcaagttcctttgagataaagagagatttcacctttcattgccttgtgttatttcccctctactgaactatgtaaagaaaggtaaatggtaaaatggcagtgcaagaaatggagagctttggactattcactcctgcacaagaagattgttttcttttttatggtgtcagttgatatttggaaaaaaaaaatctgctttagcaaagaattctttttccagagaggtgatgaggaaatatgtataacttctgttttaagggcatgttttctacaaatggctgcttacacttagagacactgataattgtgt

SEQ ID NO: 37579 - DNA, 1022 bp, Homo sapiens
gcccttagccatttgagagtgaacagtcagaatctccacaggccaagtgccagtagttcagtaatagaactttcagccacgacggtcacggaaggaagcctacgaattctgtcaccttcttttctaacagctgaaataatttagctatattctgccacatgagctctattggaggaagggggatgcataagatgctgaattaggttcgaattgaattatttagtcctcttgatgctgaaaggtccttcttatcttttgaaatgtgagtgctaacttgaagacagtgaagagtttctctttctatatctctaacgtgggatcaggattatatccgtccttagtcaccaagtcttgtgttaatggaactaaaactctctggggaagcatcctaaacctatttaacgttcccaagcactaaagtttgcattagaacttttacatgagctaaggtgtctataaaaatacatgcttgcagccaggtccctagtggcttcacatccgaggaaactgtggagcatccgtcattctacccgagggttggaataactcactgttgcagatacttccattatgtaactcagccgagggtattctgcacttgtcacagcagaggtcagccatgattctgtagagtagtgcaatgattcaagtgacttttaactattgttgcccaagatgcaatgatagagaatcatggagtttttaagatgagtggttgatttcctttttactccattaaatgccatggcttttcaatgttgcatcatcatctagttctgtatcttaacccttcagcaccctggtacacaccttgctaacaaacctgtaactctgaaatgtaatcgcagaaaaaagtgtgtggggttttttttttttcacttgatttaaccataattttgtttgagacattgtttagaatcatatcttaggtgaaatatcctgaattactagttaagttttgctgtttgtatggcagatgtttaataaagcactttcttcccccataaattagatattagaag

SEQ ID NO: 37580 - DNA, 1077 bp, Homo sapiens
gttgcttctgcctgaacatatagctgtagctttaagaaaagaaaaagaatagatctgttgaggtgtattgtcttttatagactcagctactgcactgtgtttcatcaactacagattctgattttttgggctgcttcattgtctcatttttccatgactgtatttttccatttttcaaatttactgtcctcaactttcaccttcttttagaataacagctttgtgctttttattaggtttcacagaactaatttaaatgcttattgatttaatactacttatttaatttatttaatgttatttatttttatttcataacatcattaaatgaggccagattacttgaatttctaagcataaatctcatgtaattttccaaaataagtattttaaatatactgaataatttataaaagccttcagaaatttgagttgatttggctttggttatattgatacacatacacacacacacaaactcttataaaacatttttttttcttaaaagtaagggaaagtttgtcctctctcaaataagtcctactagaattaatgaagactgtatcctggctttttggttcttttggttcacctgatagagtttaaatatcctgtaggaaagagttcatttagccatgcttgcctctcttaatgggagctaagtcatatgcaagattattccaaatttttcaaacagcatgtgttttaaataaatcaggttaaataggaaatagttgacttgtaaaacattgaatcatttctgtattttatatgtatttataaatgtgaaaatatttttctaatatgtaaaaattaagaaatagcagaatggtgtaggagatacagtgttaaaatgctctaatacctttttagttctttttctgctttaaaaatctttttattgatgtaaatatagagaaaattgcacacctatcataagtacgcagttcagtgaatcttcacaaactgaatacactctgtaaccagaattcagatcaagaaacatttctattattgccacgatgcccccatgaccctttccagtcattaccctaccccgagggtaaccagtatcat

SEQ ID NO: 37581 - DNA, 1050 bp, Homo sapiens
aatgtattggatgttttctgtgggcattattcatttaattttattaatattccactttagataggtacttttttttttttttttttttttttgagacggagtttcgctcttgttacccagactggaatgcaatggtgcgatcttggctgacgcaacctccgcctcccaggttcaagcgattctcctgcttcagcctccctagtagctgggattacaggcatgtgccaccacgcccggctaattttgtatttttagtagagacagggtttctccatgttggtcaggctggtcttgaactctcaacatcaggtgatccgcctgccttggcctcccaaagtgctgggattacaggcatgagccaccacacccagccagctaggtactattattattcaagttgtagacatggaaactgagacctggatagcttcaggtttacataatttgtgcgtaacactatagtatgcattcagtattaagtcagtgtcttgcataatcactcagaggtcagagaagtgttgtatttattattagcaacacttttttttccagtaggatttttccagatgtcagagccttaaaaatataactaaatccagacagccatatttgttaatctgcatatgaaaaaacaatgtcataaagcgctaccccatgagatctaattatattcttctagaacttaataggtttaatttacttattcactataactttgccatgctgataccaaatgtaagttgcatgccatgattaagtgttctgtagctgaaagggggagattgttattgatattcagtatgtattaatatattcaacaaatattttcttaaaatgatttcaaaagtgtatatatttcttcatgagttaaattttttctgaatcctcttttaaaattattataactaacttatgaaagaagtagtattacctattttcaatagatgaggaagctgaggcctgacaggttttagttaatttgcaaaacaaaaactaaaatttccccattgcagatgacttctcaaatttctctgcttttcatataagaat

SEQ ID NO: 37582 - DNA, 1026 bp, Homo sapiens
ctgtgtcactcaggcctgtggaggaagtggtatttctcttgggccgcacagcacttcatatggtgtactgaacgggatggatgaataaagcgcttatctccattagtgtctccacagtgaatattaccattgtgaaccttgtgtcagggggcagttgtaaaatgacccaggtttctttctgagttgtcacattcttttttcactttagcactcctgtgggccctagaaatacactctagagatatttttttgtttccattttaaagtagtaaaataatctttaattaaagaggactggaaacactcaaatactgacactgttgtttgggggcatacaggttgctgacaacccacaggctcactcagtaccactccacatccttctgtgtggtttccacagacccgtggactgctctcctgaggctgtctttggctgccctgtattcttgatcgcagtactgatctgggactttttaacataaccatgtggcttgacaaaacttttgaattgctctgggcaaaaggtcttccaagtcaaggaggtcactttgtccatgattatgattggagatgtcattttagttgggctgccatatgtcagacatgataaaaaaatttcattctgtcaaacataatattctgtcaaaaaatattgagtcagcacccaccgtgtgctgggccatgtactacatacagatgtttagtttctgcattcctaaagggataatgctggtaggatccagaggacaggctagcctgcttattaaaaaaaatgcatcttgttttccagacaagaatagcagggagtggcctggtgacattattcatcgttttggtgtaacccacacctcaccccagccttgttgaccttctgatactattggaagattaaaaggttataccttccctacctctccttgggataccaacccttttaagctgttagttaacccaaattaggatctgggatacatcatcaaagtaaatacactcatgaaacaaaagaaaccccaacaagcattctgg

SEQ ID NO: 37583 - DNA, 1111 bp, Homo sapiens
cagaaagaatcagcaaatgacatctgctctgcctccttttccttaaaggacaccctctgttggcaaagatgcaaacccgtagtacttaagttttaataacatttcagtttgtaggccacctcttgtgatgtgtctcattaaaacataaataacaaaacactgcttttctaattttgtagccttccattacttctcagtgtgacaaaatgggcatcggtttgctattgtttaagtagcaagagcttaaattaatctcagccacactaatcagatattggctttctagagaataacatttggtagtgagaacttaatgagtgtccggagataattgttgttaactggtggagttggtgatattttgcatgtcactcctagtctttgcccctgtggtatattaagaacgtgctttgagcaaatgctctcgcatgttaattgcaagtcaacctttaaaaaagaatttttcttgcggtaaacatctcttctatgagcacatctttagaagtttacatgaaaaattgacttaggtgtatatttggtattgtgttgtcaataggattgaatagaagagcatttacaaaaaaagtatactgtaaaatacaaagtggatttaacatatcaccttgataccatctgtcatgttccagaaataatcttatatttgtcatttatgtatagctgtttaacttgaagattaaaaaaaaactatttcatgccatttctgcaaggttaagatgtcctattacttagaaaaagtaactataaatataagactcataaatgaaattgtattcaaatgtattaaggggaagcatactattaatagatacttgattacttcttggccttttgactgagatcaagtgtattaatagattctcgaattgactcatcttgtaaaagtttacttgtaaatttacctcttttgtgcatagaaatcttttatattgtgcattttctgaaagcagagtaaacctataaattatacccattcgtttactgcactgggattggattattcttcagtaaaacctgatttggagctttagaaaaatcaatcagatatcattattctttctgtaagataccaaattgtgttttggtgacctct

SEQ ID NO: 37584 - DNA, 1103 bp, Homo sapiens
atcgaatacagctaaatataagtaaacagctaaaataaatttgggctccttagtaattgtgcaatatatggagtattatttcttttctttttccccattacagtgttctctccacaaacttaaattactaactcaactaatgcttccctgagtatatatccacattcgctaacttgcttatactgttaccttttataatttgtcacctttttcagagtgcgatatgtcattgaattgctcttacttttcccagagccccaaatgttgccaaatggcctaatagtattgtgaatctaatgaccctgtctgtgcttacctttcaataaaagatctccaaaaaatgaatttatgctctaactttatttttttctataaaattctgtcattaccaggatggaattcatgatgccctcacgacctatagaagcacaaaactgaccaactgattccaggcacatttacctgccatctctttcaaacacctgccattgctccccttccttattccactaatgacttttgaaaataataaactatttctcctgaactctcaatctttctttcacagaatgccagaatgttatgcctttatttagttgggtacttgaaaggagtgctgtttgtgtagagcagaagtttttaatacagttactctcttttgctaaatggtttgttgattatgcagacagaacagtaactgtattaattaatagtagatcatttcaaaatacgccaaagagatgcactgttcattttggtttatcctttaaaataacgcaaatctgagtactggattgggaatgttggttgtttctgctggctgtcagacatgatgttgcctgcagaggtacccactgtctgaaacaaatagtgaaatgtgccttctcctttctccgtgtttacttactgtcttgcttttgcaactttctgcaaggagaaaatgggtaatacttcctccctgtggtctctatcagtcttccacactggtttcattagctttccaccactctccctatgaacagagatgtgtttctcttcagagggaatagactggtgactaatccatgcagagcaacctggacttttgtgattatggtatttca

SEQ ID NO: 37585 - DNA, 1028 bp, Homo sapiens
taactaaatggtcaagggagcttaatttgtacaaaacaatgactgaaaagagcacacactactatgagctatagattgcgttttgtgcctgtgttccagtaaagtaaccatttaaagtttaagagctcgagactttttaactgtgcagcactcagagagcacactatgtggaggtgcagattttgatttttaatccatagactttatgctattattttagaacatcaagtgatcaagaaactacaaaagtgaatacagacgtctaaaattaaggcttataatagtacatgcagatgtgttcaagctccaacatcctgaatctgtggttttctaagtatttaatgactttgatttttaaaaatcacactgtttctttgtacattatcatacatttacattacatcttgaaataaatttaagcattagaataaaacatagacaccccgctgagttaaagattttaaatcttattctattgtacttacccttagacctacccacttaattctgaggtctgcgtataatctttgccgatataaatgcaataaaatgactaaatcagaagatgttaaaaactgtcagtgtagaattgtgaacttgaataggtagaaaaggaaattcttctaaggcagtaaacactgtatgataaaatactttttcattggtgacccttagggaatatctagtagtgtaaattaccttttcagcttttcaagagcagtttcttattagaaattcaaaggaaatcttctttagtagtaatcgttttaatgctccacatcagtgaagtcaactatggttcctcataaagttttgtttttcattggtaatttactgacaaaatgcagtgaggggtggtgcaggactgagttttcttatagaactcaagggggcagtagttccaggggaacataaccgtctgcaacaaactactctttttttttttttaagtagattaaaatttttagtgggaacattataataacagtaggttatggcacataaaatacagaaaatggcatttttta

SEQ ID NO: 37586 - DNA, 1049 bp, Homo sapiens
aacttctgggccacagctgagtctagtccacaaagctgttttgtttggcatatacagtatttaaaaattttgaattagttgccagcactttaaaaattggtatagttcacataaatattctgaattcaggcttttggaaaagttgtggacccaagaatactaggcccgcattttcttacgtcaacattctttccaggatgatgaatggactgttctctttggccccctttccatttatccactcttcccaccaaactgaattatccttccttaaaattgagatgcagagaattttagatatttcatatttaaatcatatggttctttttaaattgagtctggtaaaatatattaaaaaataatagttcattagtctacctaaattagttatttactatttcaggcactggcatgttagtcaacaggtggaagttatagacggagacagaatgcagcttaaaataagttaaaaccttgattttcattgtctgccttccaaaatagagaatgcactctttgttagtgttcaaacagagtgctgtaaaggagtttcctgaattataaggagggttggactagtttattaaagtccctcaaactccacacctataatttgaagttgcttattttaaaatgaattcattggcaatgtttagtgtttggttcatgattcctttgttttcaatattaagaaaaaatcttaatactattctctctgtctctttttttatttttgtatagaaaaagccctcttttgtttttttaggtatattgaggtgaaagttgtagagtgacagattactccaccacccctttcagtgagactgacagcaccttggctcatgtaaaactcaacgtggctttatataaagatttttctaactcccctgatcttctctggatgtttattctgtttcttctttcaaatttccgttgattcaataaaaaacggtgatatttagaaataaagttcagagaggatttgagcaggtgttggtgatataaaatatttgctgagtgcccattgtgttttatttccaagaattgtt

SEQ ID NO: 37587 - DNA, 1026 bp, Homo sapiens
gtgtgagaagttataagtgacccaaagtatgcaatattaaggtaaatgataagttgatatttaaagtcctaccttagatgtatactagatattgttatttttaattttatttcaattggctgaagcttttgaattcataggtggttaaaattggttgagagagcagttttacagttggacatttctttgtttcagaaagtagtgctttattatataaatcaaagttataaatttttgcacctcatttcaaaaatacttttatcatctttaataatttcatattccatattatttaatatcaaggaaaactttagagagatctttctgattaccatttcttactgataactgatatactccctgtagcatagtcattaacctagaattttagctcattcacttccagcttataacattgagtataattacagaagtcaggaagtaaaacttactaatttcaaattgaaatacttggtggaccaaatgctgttgcctcttggaactgtttatagaacaatgtaaaactaagtaaaacaaatgtgatctgattcagtgtttggggagttcttgacctggatttcaaatatgaatccttacttgccctttaaaatgtttgactcttctaagatttttctcacctggaaagtgttcattccttcactatccatgacaggtgactgggagcactttggtaataaccatgaaaaatgaaatcaagtacaatgctgaagattgtggaagaaatactatttttttcaaatctgcatagttatttattttaggaccagagtctgtgactcctgtttcactagtatggatgacccaactgatttatttttagattattaatattagacttgtggctttctttgcagactttggagcatgggttgggggagaattatgtatacattttggaattttttatcataaaaacgacttaaaattagaaggagagaaagctgctgctgaatgcctaggttatttagtttcttcctaggtgacttagagtgttctaggtctatg

SEQ ID NO: 37588 - DNA, 1163 bp, Homo sapiens
tttttaaagaaaagcgcattggtcatctttggaacttaataaggcagcagtttattactctaaaaatgagtaaacaaaatgagaatcacatatttatcctttttttcttataggaattacaaaaaagtaaacacataattcataagggaaagttcttctgaataggattctagtgacaaatgaaaagaggaatgatagaattagaaaattataattttgcagttatcttgaaataatggaccgaggcaatgatcatcatcaatgaaagcaaaagcgattatatgtggattgatattcccatgtaggaatatcataatggagggaagaagttgatagcatttaactcactgatcaatcttagcatgaagaaaagtgagacagcagaccttaagtactcttgaggtgatgcagtagagagtacacagcatcatttatatagtattcttgctactaaatatacaaaaattagccaggcagggtggggagtgactgtaatcccatctactcggaaggctgaggcacaagaattgcttgaaacccgggaccgggaggcagaagttgcagtgagctgagatcatgccactcactgcactttagcctgggtgacagagcgagactctgtctaaaaaacaaaacaaaacaaaaagcctgaatctaatctgcctctgtatttacctatttacaggaaatagtaggattaaagcatcatgttaaataataccacaaaaagacaatcagctaaatctagatttgtctaacgcaaatgacccagtttctctaaggaaaaaacattgtagaaaagaaagagagacatttttatagaaaacactcaagacaaaacaactaaatgtgatgtggagattttgcttgaatcctgacagtaacaaaacaacattaaaatatatatccttgagattattgagaaaacttgaatgtgaagtggtcattgaatgataacaaagtattattgttagttttgtcaagaatgatagtggtatgcttgttaaatttttatcagtaagagacacatactttatttactggtaaaatgacacagtattagggatttggtttaaaatattacaaagggactaaaaacaagaaaaagataaaagtgcataggccaataaaggaaacaaaaatcgtgaaaatattgggccagc

SEQ ID NO: 37589 - DNA, 1056 bp, Homo sapiens
gtggttttccgggtcataggacttttcagtgctaagactgaaactgtccgaggcaaatcagaatggttggttattctaggggagagggagggaagagttattttgagaggggaagagtgacaaactaatatgtgagtaagtgtgtaatgtgatcagtagtgataagtgttatgaagaaaatcaaagtgtggtgagacacagagagggactaggagagttattaaggagccatgcaattagttttgatcacctaaggaatgaagtaagacggaaaagagaaatgagctgaggactgagatgaggtagactcaaccaagtgaccaagagccaaaagtaaggaaggaggaaagccatgatagttgatacaagaagcaaatgaattgtttccagaagaatcatcagttgtgtcagatactgctgaaatgctgggataattgagattgaccatttaattgataggatagtgacaatgaatgagagggacaaaaccttgattactatgagatcaagagagagtggaaaatgtgtgtattagcttgctagggctgttagaaccaagtaccacaaactgagtggcttaaacaatagaaatttatggtgtcacagttctagagcctggaagtccaagatcaaagtgttggcagggccatgtttcttctaaagtgctaggaaaggatctgttccaggcctcttgcctaacttctggcactctttttggcaatctggtgtgccttggcttgtgcagcataactccagtcttcacatggcattctccctgtgtgtgcatctctgctccgccagttatattgaattgggagcccacttcactccagtacaacttcatcctaaattaactatttacttcactattggaaatagctgccccatttccaaataagatcacattctgaggtagtgagggttaagatttcaaaatatgaatcttaaggagacataattcaacccataaaaatgtagtatatccatacaatggaatatttttcagccttgaaaagtaaggaaattccaacacatattacaacatggatgaacctt

SEQ ID NO: 37590 - DNA, 1067 bp, Homo sapiens
agctctttagtttaattaagccccacctatttatctttgtttttgttgcatttgcttttgggttcttggtcatgaggtctttgcctaagccagtgtctacaagggtttttccgatgttatcttctagaatttttatagtttcaggtcttagatttaagtccttgatccatcttgattcgatttttgtataaggtgagagatgaggatccagtttcattctcctacaagtggcttgccaattatcccagcaccatttgttgaacagggtgtccttttctcactttatgtttttgttggctttgtctaagatcagttggctgtaagtatttgagtttatttctgggttctctattctgttccattggcctatatgcgtatttttataccagtaccatgctgttttggtgactgtggccttacagtatagtttgaacttgtaatgtgatgcccccagatttgttttttgtttttgttttttgcttagtcttgctttggctatgcgtgctctttttttggttgcatatgaattttaggattgttttttctagttttgtgaagaatgatggtggtattttaatgggaattaaatggaagcacatcccatgctcatagatgagtagaattaattttgtgaaaatgaccatactgctaaaagcaatctacagattttgcatttttaacaagctccaaagtgacgtcagtgctgctggaatgagaactacactttgaatggaaggcattagaatttgttcattagaatctcctgcggagcttttaaaataaaattgctgcagagctgtacccaacaaattaaattagaaatcttctttggtgattcttgtgtgcaactcggttaagagccttaacaaaatggcattctttctaccatagggagtcagtaacaaactttcacctatgtctcccttacagccatcccatagtttagattataactgaaaacccccaaattatgatcaggatctcttgtgataaccaggagaagaaactataatgctttaaatacactctttttgaatattctcttatgcatttcaaccctttagtcc

SEQ ID NO: 37591 - DNA, 1075 bp, Homo sapiens
tctctttttccttaggtattccaataattcataagttcagttgcttcacattgtcccaaatgtcttgaaggcttagattattcttttttaatttttttctttgtttttatttgactggattatttcaaaagagttgtcttcaagttctaaaattctttcttctgtttggactagtctttttttaaaattttttgaatatattttgtatttccttcattgaattccttagtccagaatttgcttttttcccccaaagatatttatctcgttggtaaatttttcattaatattcttaattatttttctgtgttctttgtatttgttttcagattcctcttgcatcttgttgaggttctttaaaataaatacttaacattctttatctgggttttgagaatttctttttggttaagatctattggtagagaattattgtgcttctttaggggtgtcatattactttttttttttttcctgaagatgtgactatgatgttggttgagtagggccctttggttttgtttctgggtgcatgcagcactgaagtctgtgtgtgattgtgaatattattattttagctaaatagcattactggtatccgtggtttcctcagtttgttagggtgctgttgttttttggaggctgtgatgaagttgtgctggggtctgggatgctgggtggcctggtcttcaagttttagtggtgatggtggtggactaagcatgccttttgttcccagggctttgaacactggcaactgtgttagtgattccaggcatgctgattcttgggcctctaggtgtctttcttgaatgttggttgtaatagcagtttactggccaggtgaagcagctcacgagtctctgagttggctgacatggcattgttgatggcagtaacagtgttgagatgcttttctgggttccaaatgctgtgtgcttgtgttggcagtggttgaaatgtgcaggctggcttccaggccagcaggtggtgcttacaggtaagagccagaagcagcagggtgtttatgtccaaccttagtctctcaagaggagtgcttcaatgtaccaggtgg

SEQ ID NO: 37592 - DNA, 1060 bp, Homo sapiens
atacctgatacattcaacccacttgatcatggtatattttttggatgttcagttggatttggtttgctagtatgttgaggatttttgtgtctgtgttaaacaaagatattagtcagtagttttcttgttatgttgtgtctttcatttttggtatcaggatgatactggattcatatagtgagtttgggagaattccatcctcctcaattttttgaaacagttttaggaggattgtagttagttctttgtacctttgggataatttggctgtgaatccatctggtcctgagtctttcttttttggggagttttttattattaatattactgactcagtctttttattactgactcattattagtttgttcaggttttctattttttcctgatgcaaccttgggaggctatatgtttccaagcatttatccatttcctctgggttttctagtttgtgagcatataagtgtatgatgatcttttgtatttctatggttataagttgtaatttctcctttttcatttctgatgttgtgtcttctttcttctttgaatagtctgtgtagctatttatcaattttgtttgtctttttgaaaaaccaactttttgttttgttgatcctttgtattttttaaagtctctgttacatttagttctgctctgatcgttgttattttgtttcttctgctaatttggggtttattttattcttgcttttatggtttctggagatgtattgttatactggcaatttgtaatctttcttcttttttgatctaggcatttaatgcaataaacctccctctcagtactacttttcctgtatcccacaggttttgttatattgtatttctgttttcatttatttcaaaaaattttaatttccatcttaatttcttcattgacccagtgttcattcaggagtatgttgtgtaatttccatgtatttgtaaaatttccagagtccctcttggtattgatttgacctttggtattgattttctagttttattctactgtggcctgagaagatacttgatattattttgatttttaaaaat

SEQ ID NO: 37593 - DNA, 1030 bp, Homo sapiens
ttgttgaagattagattgttgtaggtgtgtgtcattatttctgggctctctatgctgttccatttgtctgtgtgtcttttttctaccagtataatgctgttttggttaccatagccttgtagtataaagtcagggaacatggtgcctccagacgtgttctttttgcttaggattgctgtggctattcaggctcttttttggttccacaccaattttaaaatagtttttttctaattctgtgaataatgtcgttggtagtttgataggaatagcattgaatctctaaattgcttttggcagtatggccattttaacaatattggttcttcctaactatgagcatggaatgtttttctgtgtcatctctgatttctttgagcagtgttttgtaattcttactgtagagatccttcacctctctggttagctgtattccttggtattttattcttttttgtggctactgtgaattggattgcattcttgatttggctctcagcttggatgttgtttgtatataggaatgatactgatttttgtacattgattttgtgtcctgaaactttgctcaagttgtttgtcagttcaaggagcttttgggcagatgctacagggttttctagatatagaattatatagtctgcaacagggatagttttgacttcatctttttctatttggttgtctttcattcctttttcttgcctaattgcttgtctatgacttccagtactatgttgaatatgagtagtgagagaggacatcctgttcttgttctggttttccaggagaatgcttccagcttttgcccattcagtatgatgttggctgtgggtttgtcatagatgggtcttattattttgaagtatgtttcttcaatgtctagtttgttgagggtttttaacatgaagggatgttgaattatattgaaagccttttctgcatgtattgagataatcatgtgttttttgttttcagttgcatttataagaggaatcacatttattgacatgcatgtcgagccactttt

SEQ ID NO: 37594 - DNA, 1070 bp, Homo sapiens
gaggctgagctattcctttaacaccaaatattagaacaaagaatggatgtaacttcctaattcaaggaacgtcttaacattttagaaaaacatttttgaattaaatttacatattcatcatagaaaagttgaaaagtggagaaaaagaaaattaataataacacattatcaagcatgtactatgaaccaggtacttcgtgtgtgttatatcatttaatttacaaaacaacataatcatacaggtattgttatctgtattttgcacgagaaagctgtcgctaagagctttcatttacccatgatgtcattactagtaagtagaggtgttccagtttgcttaacttcagagtccacacttccctctttttgttggttttctgtatttgaacttggtataaatggcatcaatagtgaacattctgcagttttcattttcttcccaacattttttgagatgtcatcagcattgcttcatgtagttttacttcattcaagtaattaaaagtgtttttaaaagtagtaagtgtacatagtttaaaaagtcaaagttatgtttaaagtgaagagtagatacctctctctccatttttagtcttctccacagagacagctgttttcaacttttttgttattgtattttctctttcatttacctttgtattacccccacacaaatttctcactgccatttcctgacttttaaattttaattacataatgcctttctactatgaaagaaaataatttagtatttttcctcccttccatcattttctgtttttttctcttcccatccttccaatatatttatataacactatcattactgtgtgaacatttgcaatagagctacataatgtactatgttcggttttccctcctttttgtaacttgtggttgtttacaagcatacctcattttattgtgctttgctttattatgcttctgagatattgtatgttttacaaattgaagatttgtggcaaccttacatcgggccagtctgttggtcccatttttttcaatagcatgtgctaatttcatgtctctgtgtcatattttggtaactc

SEQ ID NO: 37595 - DNA, 1032 bp, Homo sapiens
aacaaagtcactgattttttatatgaaaatgaagacttgtagtgtcagctgtattacattgtttcaaatcatgaatcatatcctgattccccttgactcctcttgctttttccttatccacttaatgtcatcacttcttcctagtgttctaatccagaaacttgagattcagccttgattcttccctatctcttgtctttctcctaaaaatttagtgtctaagctttggaaataactttattctttcttttctcctcacaactctcttatttcagtcttcctcatctattccagagagcttattgtgtaatgttgactaattgaattactaatgttattgtctccaatctcttccctgttccaccctattcttactagcactgaaaggtttttttttttttttttggttttgtttaattttcctactagaacacttggctggtcattttaaagattctttaatggctatctactgtgtgctacacagtcgaatctaaattccttagaatgtcactcgctagaactttatagtcttgttccagttgaccttaagccttacttttttcctttctctttccctttcctaccttttgagacctgaggcacaggccaaatttgtgaagtgttactttaagaattaatcatgctggtttgagctctattagcaattggattgtattactggaagatctcttattactagaaggtttgttgattgtgtgtgtgtgttgatagttgtgaactctttgaaaacagtaactgatttgtttgtttgatctgtcaatttcaagtcttaaggatagtgcttggcaggcaggagtctgtataataatatagtaaaaagtatggactctggagcagaccgtctgggttcaattcttagctcctctactttgtctccttgaacaatttacttaattccctagcccttcagtaaaatggggattataacagtatttatgttataagaatactatgaggattaagtgtgttaatatacatgtaatgtgcttagaatatatgagaattaaa

SEQ ID NO: 37596 - DNA, 1093 bp, Homo sapiens
atatatctagtctttgtaaatataatttaaagactttttgattatgccatttcaatattggccaacaatgtgaagaccatgattgtttttaagagcgtatttcagttgctagatgcctttttttcttttatcacagttcaagagaaaatatattcagaagaatgtgaaaatatgttagcatttaaggctccatgattgcttattaaatattggtagtattaaaatgttttaaatatgatctttcttgcagatttgagtttaaattttgtttaattttgaagtaatagaaaatagaaatgttgcaaaaatagcacaaagaactcctatttaccttttacccagatttaataatgtttaacattttgccaccaaatataatatctcccatcatcttcaatttttatcatgaaagtctacatttttctgtatggtaactaaagattcatattagtaagaattttatttttagatttgttttatcaggttctttctttttgccatgtaaaccttatatagtaaaataaatagaatactgtattaattgttcaaaaatgttttttagatatgctttgggactagaactgatgtgcattaaatgactacaacgtacagatattttccttctttcatatatgtggtactccttgtcactcaggctgttgaatgaaacagtaatccatatcttaataatgggttgaagaataatagacaatagaatatcataatatataaatgtaaataattgaaagaaaaatctttaaacctggtaccagcctgtgataattcttcttttgccactatccaactcttactgaaatgttaatgagaatagtttaatatagctactaagggcatattttacagttgttggcttgctgtaaatgaatgacagaactaggtctgtctgttttaattcttccctcaccaacacagtggtggacttcttacatggcagaaggtagagatgaaattaaatggccttaagtgtctgctttttgaagacagcttgggctgttgttttaaaattgaagtctgctcctagaggatgtttatccaatccaggtgtccaaggttggatgtaactataagtggt

SEQ ID NO: 37597 - DNA, 1091 bp, Homo sapiens
ttatttaacttcggatatttggcataaagtttggttcgcagataggcattaaacgtgctttttctttaaacaaatttgcgtgatttttccaattaaaatcagcattatctataaattgttacaaagcgaatttgttttaagaaaaccctgttcgaagataacctacttaaatatgataatatgctgaaaatgaagtttttagaggcttacagaattactttggttattttcttaattgtaaaaatgagggtttttgttcttaacaaatctagcaattacgtatttagtaactgatatctaattggagcaaacattgtgggaagtagaaaacagagttgagccttccctcagatttaaatgtttaaataaaatgtaaaattctcaaaacatttaaagtcctaacttgtaaaaatttcatttaaaacattttcatgttaaatagacttgtaaaagggattgaattattatagtccaatttttttagttctcttttctagacagaagagaccaaaaaaaaatttttttttggatgctttccaagagctgtatgtatttgcttgagaagttacaatcacttgattcaagtctgagttttattggacaggcttgtctggtgggttaaaatcccctcatgctctcccagatgattactggcttgtttttcttcccttaaaaatagtaagaatttatttttttatagctataccagacctagtgacataggccactttgggtctgtatgctgctggcttaaagaaagaatgaaatatgaaaagacaaaaacaaagaagggcgtaaaagaaaaggtaaggaaaggaacaaagctaaaggtaaaagaaaaggaaaacatgataattttagagtggtgaaataatttctagctagcaaggagagagaagtttgtaatgctaaatgttctaaaggaggacctcatcatcttagaaaatgttttttgaggtaagagaatagatttgtttaaaatttcaaaattgagtaatttttcatgatgtgtaagtaatattcgaggcaagtagtcatttcgggaccctagtaaacagtttcacctcatattttgataagtttatttttca

SEQ ID NO: 37598 - DNA, 1022 bp, Homo sapiens
gtttacctctaatatctggcaaagtcaatatttattattatttgtagaaagcgttgtggttcaaaaatgtaattattttcaaaaatacaaaccaggaagtcttgctcccatcaatcaccatcttctccactgctctctatgtataattagtgtttatgaaaatatgaaaaaaattcttatattattcttttcttatacaaagagtagctagtatttacacaaagaacaggatgatatttacataaaagttagattagtatgtacatcacacttttttcccccgcacttaacaggtctttcataattggttcataagattgttccctttttttctcctctgaaagtgttgtctagaattgggaggtagcttaattctttcaatcagtagccagttgattgctagacacttaggatatgccactgttttgcaattaaataaattatgtcatttataaatatactgtacaaatttaggtgtatttgtaggagacagtctcaggatgggattgctgagtcagagtgtacaggcccctgtgattttcgtagatattgccagattgccttccttagagattatgccattttgcattcctatatgcagtggattgagagtgcttgtttcccacactcttgccagtggtgtgttgttaagctattcaattttttgccattttgacagtcaagaagtggtatctgagttggttttaatttgcgtttctcttattatgaatctgtttgggaatggtatgtttaaaaaccgtttgggtttctttttctgtaactgtgtccttggctcatttttctactgagttgctaatctttttcttctaccttcctaggcactttttataaattaaagatattagttcttcatatgtgattggagttataattttttttcttgtttgtcatttagttttaggctttgcctacatagcatttttgacatgcagaagttttttcttgtttttttttttaaatttatttacatttaccacttttttgttttttggcttctgagt

SEQ ID NO: 37599 - DNA, 1030 bp, Homo sapiens
cttcttacatgttataagagttctatatttttgatataagttcttgtgtcagatgtatgcattgtgattactttttctacgtgtgtatcttttcgttttaatagagtcttttgaagagagcaaggtttttactttgatgaagctcaatttattaatggtaagggcttttgggtcttgtctaaaatcttctgatagtatcagttgtttttctctgttattgtttgtttatcatgttccacccttaaagtgtaaactcagtggaaatggggagattatcttccttgttcctttctatgtcctctgtctagaagagtgttgggcacatggtagttgctcaaaagtaatttttgaatgagtagagtcttttggttttgtaggctagaaaatgttagctattgcttatgtcttgttcacttctatcccctgtatttcacctgtcattattactgtcttgtttccttaggttgattccttgcttttctgtttctacttctgactctaatcctaacgcttttatgtttttctgaactgcaatagcatctccttaggcttgtcagatgccacgacttctaggtgtacctatgatccaattccagacaaatagggtatttactgtttttcaataacattgctttcctgcttaagaactgatttaagctctattatagatggtgaggtgggacctgctatgttaatatttctttttccctttcttcttatttttcacagtttctacctttgtttatactttttcctgaaaaagtatccctttttctcttgctaaaataaatcccacttatttttcaagttttccatttattcttaagatcaaatttttgcccaacttacctagctgaatatttcacagatactatatttttgtgcccttagaattgtttcctccttgagataagaattcatgcattctacttacttggtaaagttttgaatacaaagataatacttcttggttgatcactcttttcttccttgactgaatttgatggcggtacgtggcaagtttgtgcct

SEQ ID NO: 37600 - DNA, 1028 bp, Homo sapiens
cattgtatatattcctctgaattcactcataaactaagatgtttctaaaggttgacttttgttggtcatatctacagtccaggagtgctctttccaaaatactatttttatcatttaagaaatatgtagtggctcatttcaaagatttcttcagttactagtctctgtcttattacttttttttttttttactttttgtacttgtccttttatcactcttcttctttcttccagaatgtgttcattactaccttcaagctcagctgaatattatttttcgcaaatactctttgagaattacctcacattttttactttcctgtattctgtcagcttcctgtatttagttagttcttactaatccattgataatttgttgtaggtttgagagttttagttcggtaatgtctcccagtgtaactccttggaataagaatgagatcgtttgcatacacgttaaagaaacctgtatattcttcagtgttttgattaaatggatagttgttagaacttcttaaaaataaaatttttttcagtgtatgaattgtaaattttctgaaaggaactgccagtgaagatgaaccattgatatacttaagtccttttgctttagttctgggaaaattcttttttttttttttttgagatggagtctcactctgtcacccaggctggagtgcagtggcacgatcttggctcatggcaacctttgcctcccaggttcaagcaattgtcctgcctcagcctcccaagtagctgggactacaggcgtgcaccaccacgcccagctaatttttgtatttttagtagagacagggtttcaccatgttggccaggatggtctcgatctcttgaccttgtgatccacctgcctcggcctcccagagttctgggaggcgtgagccaccttgcctggccaaaaattctctttgagataaggaagaaagagtttcttttaaaatcacattttaaatgagacaagtcagtaactttaaacataaccatttatactttaatatgtacataaa

SEQ ID NO: 37601 - DNA, 1979 bp, Homo sapiens
tacccagcagatttacctgcttaattatattagtttagcaatattaaaattagttcactaactctggggattcatcagctgatgataggagatggccaaatgcaaacgggatctcaggaggaagctagcttagtattaaaaactccgataaggatatcccagtgtggataatgcagaatttgttatggttaaaaataggaaattccaaatagtatttaagtattctttaaaaatatatttttttctggatcaaattttagaatgcttcttttggatttaaaatttatggttagtagattatttttagtgtaattccttggctagtgcttttttccccacatacatagtctgtagtttaagtccttttttttttttaataaaaatctaatttttatttgctttcttttttgactacctgttaaaatcagatatttgaagcaaaacaaattatctctaagatacaagtgtggaagtgcagtcttgggctttgtgctcaagtgttggcaacgggagatagtgggttgagataaagacttgagtcattaggcttagcaaatagaaattttataaggttagatggcagtggcatgctagtagtacattaagcctgtcatctatgaggatattttcctgaactacctttctagccagtcaacaagtgaaatgtattatttggatctaggaagaagttttggcttatgtttttatccacagtaatgaggttctagggttttaggatatccaagacttattcccagttatttcagtgactaaacttaaaggaaggagaattggagaattagctttttttctttctttcttttttaaataaagatttgcctttctaaatatagtttacaaactgtagttgaatctggcttctgggtaataggatgcactttttccatcattttattgtagtcattatcacaaagatacattattgtaaatgtcctatggcacttgggcctttgtcaggtaaccctgtcttcaggcaaagatatacaggtgatgttcctatctaaacctgtgtgctgagtactgttcctattagtgctgcagattttgcttactcatattaggtaggttgtcttcttttgctgtctttctttaaattatttacaaaggtttgaacataaagttacctgacaggcagtagaaggatgtattcatcatgtgagttttggggtggattctttttgttgttgttgttgttgactatatcatccagattttaatagccaagaaatttaaaagccagataagtccatactgtttcgatacttttttttcccaacccttcttctcttgcatcttagttgtagccacatctaggttgcagactatatcagtatagtatttttctttagtggctgccatatttcattatttttggtttctaaagtatgatggtagaagtactcaagttacttcaggagagtttggggataaaaaatttgtagtgtctgttaccagatctttattggctatttttgattggagcataaaatctagatggttatcattcactttaataaaacatataaataaatatattgagactctgtaatacaaagaaaagtggttgtaaatccgagtccttcttactgaactatagttgggtgattttcttttattttcatttttactgtatatctttgagaatataaagaagaaggcatatatttatattcattactgtttaaatgtccaagtgaacgccgagaggttataaaattatttgcatcatgttctagcttttcattgtaactcctctgagaacatgataaaacttctatatctttttagtaggttaatatttattctaagtatttgaagataattttgtagcttgctatttcatacattttaaattgttgcaggacactaatatatacacatatactcattctattaatatactgataaatctctgtttatcatatataattgtaggcagtttcatcagatctagtata

SEQ ID NO: 37602 - DNA, 1050 bp, Homo sapiens
acaggtgggtgtcaaagtcaaaattctaacccagatctgttaagattcccaaacttctcttctctagccctttggattgcatggatacattacctgtaatgctaatccacacacgtttgaaccaagtagcaacttccaaaagacattatctcccttgaaaacacttatggaccagtgctgtgagacatcaaaggaagaagttaattattagcatgagtagaaaatcattttttaggatgataattgatttcaggagaagctgcaagtaccagcagaagtgtatttaaaaatttttctaggaaaattcctgaaattatcaaagaggaaagctagtatttagtgttaatcttaatcctatttgaatatgaatataattaataatagaattgcagtattttatacaaaatttctctgtattacagacatagtgttttacatttttgtgatattttgattcagaagctagtaccatttgatttttgtccagaagatttaatggcaattttaatgaattcatgaactgataactctgtactctgttccttaacacttgtttcagatgttcattcagttccattaacatttgaacagttactatgtgccaggcactgtgagaggtgtcgaagaattaaacaagagttatactgccaaagagagaagatcctggtctcatgatagtgctatagaaacaccaattgcaaaaatagttattcttatgtgagggataagaaaggaatctgaaaatcctataaatagtaagtgacatttgaactaagttttgaattacatgtagtgatgtgatgaatatgcaagcagacatattttagggtaaggtaattgcactaatggaaaagagcgttaacaaagataaaacatcagaaaaatatggggaatgcttaataagtggtgagtgttacagtgccactaggttgataggctaggtagtagggaagtattcatatttggtctggaaaagaaagaaaggaccaggttgttaaatttttttcagtgtcatgctgtgaaatttgaaagtctctaggtaataagaac

SEQ ID NO: 37603 - DNA, 1034 bp, Homo sapiens
ctgcctcagcctcctgagtagctaggattacaggtgcaagccaccatgcccagctaatttttttttgtatttttagtagagatggcgtttcaccatgttggtcaggctggtctcgaactcctgacctcatgatccgcccacctcggcctcccaaagtgctgggattacaggtgtgagccaccgtgcccggccttagatgtagaattttcccaaaagagaattctttgagttctgtttcagttatttttgagtgagacaggtgtcatgtacctacataggtatagtttgcatttgctgtaaaactcttgtgtcgactatacacatagatttgaggagtatagctgtagtgagggtctagcatattgtatgtgtctgtttcttctagtgataggttttatatcacttttgtatagtgcatgccacaaagctatttttaagtcatatttagtttgagcatatagtcattatctagaaacctcagttaagtatatttcctgtgcttctttaatttccctgtaccagattctgcttctctactttttggacagagaacctctttgggtggctttttattccattgtaaaacgatgaggtcggatagattacctgccatttgttatataggccagtgttttaaactactggaattttatgagttattctaaaaatagcttctgtgctatgccctatgtcagagtatttttgatgtagatctgtatgcgttatgtgtgtgtttggcctattttttacattttctactctgaataattaggctgtaaactattatagattactcaattctcaagaaaatagtaatactatgaatagatttcagaaagttatagggaaatgattatagggaaatggaaagttgatttcctgaaagttaattgtgactgtttacttttcagtctcttagttgatattttactagttttataattctgtgacttctcttagagtcctttgactgctgctgtaacaatcttgttttaaatttcatcctttggaggcttacatgaatgatgtaggat

SEQ ID NO: 37604 - DNA, 1057 bp, Homo sapiens
gtatctttaagttgtctagtacgaagtctgacttacaggagatatgtaaaacatagtagtttttatggcatcacaactgtatttgttacctaacttttggttttcactttacatccaaggtaaattaaaggatggtgatctcaatttagaagttttctgtttctcaagcagtaggatatttgttgacttttatttttcttgttgagtaaacataaagaaatagttttattggcaatcaaacaatttttagccaatggtttcccaaagaaagcaactgtttatgtttttaaggtttttgttatgttcacattagtttttttctagtattttggtacattaaaaatatgttatatacgtaaatgctaagggcatcagttttgtatttttttttatttaacattttcatttcattggaaatttgaggtaattttgctaagtcttaaaggctaattcactacagttcttcccatttaagtttattacaaaaggaaatttagaataatttgaactctttattggataattgagatattgataactaacctcctataggaagtttgtatttttaaaatttatgaaataaagagaaatatttaaatacttgcgaagccatagctttaagtaattaggatgtttttactttgacacctattcttagtaatgtaacaacaaatattttaagttagcaactaatacaggtacgtacagagaacactgtcagaaagaatgccaaaagaatttcaactatgctttgacaaatactgataatcagtcaaattattttgctaattctcttaataaactgaatattctcaaaaagagtattatagcttaattgcagagtctaaaaataatcatagcatagttttcatataaactttgctgacttaaaatatcaagctattttggtagtatttgagtatacatacatcttttcatattatatcttggcctttagatggcagcattgtctttgtatatttctgtgacatagcttttatgtccttgatgtaactataaggatgtaatgcctctataagtttctgctgatggtttc

SEQ ID NO: 37605 - DNA, 2080 bp, Homo sapiens
aaatcataatagcttctcctgtgaggcactgttccccacatctgactttacctcacatgctggtaatttctgcatatgccatccacatggttctcatctttgtgtggttatccacgtggcctgtatgaaaagtcatttctttatagataaagccaccaaagctacttttcaatgtcaaaacaccatgtagtcagtttaaattattttcccagcctgcggcgctgtgatttacgtgtcttaacctgaggttctaccaacttgtccatgcacattgatgtctaagacttcaccaaaaaccacacttattccttctgttgatatgtagattctcttcttttatttctccgtttttctagcttgtgtactaactgttgaggtctcatggggcctcctattcactgctcaggatgttatcaaattgataagtatgacgaagaaatagtgatgaaggagcaagatgtcagctttagcactcagaaaatctaaggtggagaaggttgcttacaaacaatgctaaatgggattgttaacctgactctggagtttggctaactgactagtcattgactaggctgaccagcagagtggccccaaatagagaaataaagattgcttgctccctgtatgcagtttattcacaaggggaagaagtatacatatgagctgaaaatatccagtttattaaatacagaataatcagtggagagaccgggaatcagactagttgggcttcctacagaatgagaaaacattttcccctggcatgtttgtttgtattttttaaaaaacttacccacttttgactgtttattgctgattccttgtatcaaagataaggatttagctcacttatacttccttccctgtgtcttatcctctcatccttccaacataattctattataatttttgttaaataagtattcagtatttacattctataattatgtacctatcttttttctctaaagcattttgttttcattggaattaataaatgtctttttatttctttacctagtttttatactcttaacactaatgaagaccaaagctttcctccagttgcattagtatgtctatatgtgaatacttaattacatttactgccctacagcagatttgcctgggatagtctagtctggacttctcatatacaagtgtgatggcattagtggtcaccttagtatcttacgaccgttatccttaagattttctttctcttgctgttgggttagatcttctgttacccagatgtcatgttttctttcccttggtgtattctcgtgttttatagagcacagattccagtaccttcctgataaagtgtatatgggaggtaaatcttttgataacttgtatgtctgaaaacatctctaattctgctttcacacttaattcataatctgaatcccgagtacagaattctgggttagaaataatttatcttcagaatttgatggcattggactgttgctttcttttagttttgttaagaagtttgatgcattttcatcctaatcctttctatgaagtttatctaagtctgtagaatctctttaaactcctgtttctgaaactttttgatgatttgcattgccatgtgtctatttttgtcatttatgctggacaagtggataagccttttcagtctggaagttgatatcctttcattctggaaaatgggatagaaatgtttctttgaattcctccgttttcactgtataaacgttcacaaatccccatattttcagcattgtgctttggttctcagctatctgtggtataccccagtccaaaaaccctacgttttgctctccccagagaaatacatttttttgccattgtaggaaaaagggcaaggtcaggctgtgcagtaatggggaggtgatctgaggatttaactaatttttaaacagactttcaagaattctagtatttttagccccaacctcagcctcactgccagacatatatgtgagcctgttgagagttcttcaatagacttctttgcttttcccactgttggctttggatttagtttcctcaacatttgttatagaaatatatatgcctcttt

SEQ ID NO: 37606 - DNA, 1497 bp, Homo sapiens
aatattttaaagttttctggctgggtgcggtggcttatgtctgaaattccagcactttgggaggctgaggcaggtggcttacctgaggtcaggagttcgagaccagcctggccaacatggcaaaaccccgtctctactaaaaatacaaaaattagccaggtgtggtggcgcacggctgtaattccagctattcaggaggcacaagaattgcttgaacctgggaggcggaggttgcagtgagccaagatcatgccactgcgctccagactaggggcagtgtgagattgtctcaaaaataaataaataaataaataaataaataaataaataaataaataaagtttttcatcccttatattattgatactatttacttcacatatataagcatatatatgtgtgtgtatatgatgaaatacatcattattattttgaagaaattgttatctgctagcttaattaagaataaggaaaataaatgtttttattttaccttcattattctttctctgatgcattctttctttgtattgatccaagtttttgacctgtgtcattttccttgtttctgaaaaacttcttttatcgtttcttgcaaggcaggtctagtggcaacaaattccctcattttttgttagacaaagtctttatttctccttcacttttgaaagataatttcacaggctatagaatactaggttgttggttttttttcactcgaaactttaaatatttcactctactttcttcttgattgcgtggtttctaaggaaaagttagatataatttttatttttgcccctctgtaggtaaggtgtttttatcctgtggcttctttctagatttcttacttttttttttctttttttttttaacctttgattttttgcagtttgaaaatgatatgcctaggtgtagttttttctttgtttgtttgtttgcagttttccttcatggtattctctgaacttcttgggtctgtagtttggtatctgatcttaatttgggtaaattattagtcaggagtgcttcaaatgtttctctgttcctgtctctctctcttttcttggtattcacttttcacttatgttataccttttgtagttgttctgtggttcttagatattctgttcattttttttcagtcttttttctcctgattttcagttttggaactttctattatattctcaaactcagactttttccttaaccatgtcccatctactaatgtatctttttatagtgcctattggtgcttgcgtgttgcctacttttcccattaaagctcttaacatattaattgtagttttaaaaaatttccggcctggtaattccaacattcctgctgtatctgactgtggttctgatgcttttttcagtctcctgaaattgtcttttccttgttggtatgccttttaatttttcattgaaaggtggacacgatgcacaggttgaatgtccctaattcaaagttccaaaatccagtatgttcca

SEQ ID NO: 37607 - DNA, 1020 bp, Homo sapiens
gtatcaaagtaaatctgcaaattccttctaaatttcatgtgcaaataattatatataaatatatttaaaaatgctatatatagtatatgccatagtttagaaagaatattaacctttctaaactaaatttaggtttgcagaaagtattaaacatttttaagctgaatgttgagacagtgcatccattttctttagttgaatatgtttgtattaattgtaaagccaagcttatcagttgactctctccagaataaataatcatctgtgtggcatacgttattggctttgtctgtaatactgccactaagtgattataattaagctgtcctgtttgcatcaaatgtaaagactgtgttcacaaccgtagtaaaatttggtttcattggaaatgaaacaaattctaaagtatgctttttcactagtccctttgattttgctatatcataacctcttggttcatatgctgagaaatttttcagaaagtccatttttgtttaaaattagaacttttcagaatgccaaatgaaggctaaaattttggccagaacattacaaaagttttaaatcgtagacgtaactccccctgaaataaagttaggtagtaaaatccttaatgaaaccagtggatgtgcttaacgtaaggttagtaaagcatacaaagaatctagtgtgctcagggcttggtacaatgagctgaattagatggccttatgaaactctttctaacctcttacccaacctgtttctccttggttaaaattatacttgaaggcccagaacactcatggcacatttgtttaatattgcttatagttagtttaaggtaattttgcttctacagtattttggaaggtctgaaaacttgcacagggtcatctttgtaattatataaccccaaactaagatgcacaatgtctccttcaggtgatcacacacagtggacgagtatgtgcaaacatggacataatagttcacttacaaatgtgatttgatgttaacactagagaatgatgactgtag

SEQ ID NO: 37608 - DNA, 1037 bp, Homo sapiens
atatttaccatccagttcactaggaattcccaagtcactttcccaaattatctacttaggaatacaactccctttcttccctataaaccagtgctttttttctccttcccttttcccattcctttccttccttccgtctttccttttcctttctttgctgttcctctatttctatttgccactttgttcttctcaaaattccacttaaaatctctgaaatccagtttagaaatgttcactgttcttttataaaatatctctgtatgagataacccatagtgcctgtcaggtagtaagtgcccagtaaatattttacaaatcatatcagatgaaagctattattagaaattagaggtgtttttattttattaacaacaaaatcacaaataaaaacttatggtgcaagttacaaagaccagctagcagtcttcagtaaacagcacgtgctaatgtgtattatttgaggagtattgtctgcatagagataatgtgtgtctcaagtctcatgagacttcctggtattctggattgaggtataatgctggattctgaattagttttaaaatactgctttccttgctctctcccttctcccagaacaaaatttgggaaataatattttaggtgatttttcttaatctgtttatctggcattttgttaatacagcctagatggctgtgctgtacaatataccaacctctagtgtttttataagagttgaagtaggtaatccatgatgaatttaatatagtgtttggcacatagtaaacatataggaaaagtaatggtaaacttattactaatgaaagttagaattcagtagaaaatgactttttcagtgtctgtacatgatggtggtagtagtggaagtaggtgttattaaaattattggggaagcagaaaatgcagagccaccaactcttaaaattttcgagcatggctgagtctgtgaggtccattccctcatttcatttctactcccatacattagaccttcaacccttgttgtcttaactactattgtagtgacctactt

SEQ ID NO: 37609 - DNA, 1051 bp, Homo sapiens
ctcattgtttaagtgaggtggggggtgcatatacacatgtacttcaaaaaagtatagctaaagtttatttaagggatttaacctccctccctgcgggcgaatacccagttgtcccagtacattttgttgatgagtccttttttgtttttgttttttgagacacagtctcgctttgttgcccaggctggagtgcagtggtgtgatctcagctcactgcaacctctgcctcctgagttcaagcgattctcatgcctcagcttcctgagtagatggaattaggcatgcacccagctaattttttgtagttttagtagagacagcgtttcactatgttgtccaggctggtctcaaactcctggcctcaagtgatctgcctgactcggactcccaaagtgctgggattataggggtgagccactgcacctagcctaatgagtccttttttttcttcctgttttgaaatgcttcctttatctcctccttattttcttgatctgtaccattgatttgtgtgtctctgttcctgtttagttagtttctagtaggagtagactgacagtaaacaaataagaaaatgttaaacaaaaataaattttatagtttaaataagcagagttatgtggtagtcagtaactggagagctatttaaactgaatgttcaagacaggcctccctgagatggtgacttatgaatctgacatgaacatcaagaagaaagtagcaaagtaaaaattcagtgcaagaacattttaggtagaggaagtggccccaaggtagaaatgatctccatgtgtttcaaaagtaggaagaacagtaggagcatagtagctggggaagagtgatgagagatgctgttggagaagtgggctgagcagaaagcatgtgttatgtagggatttgaaggccaggttgaggaattcagatttaaactgtgaagggaaagtactcaagagcattgtttcaaaattcaagtagtcagggttggatttttcttacgtttctcctacagaaggagaaaacagcatagataatttgtaaatcaaataaatat

SEQ ID NO: 37610 - DNA, 1023 bp, Homo sapiens
ttccattgatacatttgtctgcctattccctaacaagcctcttattatcataagtttttaaggtttgtcttctgaaagagttacctctttgtaccttgttctttttagtgataactttggttattcttggccatttacactcctatttacattttagaatcaccttgtcaattttcccccaaaaaaatgcctgctgggattttattaggattacatttaacccatagattatttaaggagaattgaaattcataaaactgaatcttccaagccaatgagtatgggatttttcttcacgtagttatgtcttctaaaatttctgtgagtaatattctgcatctttcattgggtttctttctagggatttgatgtttatagttgctcttgtaaacgatatcctttcaaggtaatattagtaataaatttagttttcttgctatgtgttggaatgtgataatacatttttatattgactttgtatctgtcaaccatctaaaagttatcactatagaactttacttgtaggtactttcttccttttttttcatatataatcatgttatctgtgaataatgagatttttctttcctttccaattcttaaactttttattttctctcatttttaattcactgacaagcacactcacttggtaggtgtttgagtatatgtattcagctcagatgacatggacttcttaatggaaactgtggaagccaggaaacaataggggtacatctttatagtgctccaaaaaagaaaaaaaaaaggtgtctaatgtagaatactattctcatttgaatatccttcaaaaacaaagacaattttagacagacagaagcagagagggaagttgtcaccagcagactcataacaaacattaaaatatgttatttaggctaaaggaacatcagacagatggaggcatggaaatggaataagtagacattttcagaaagggatattgaagattattgggtgtttgaaacagtcttgataatgtttggtggggcttacatgtag

SEQ ID NO: 37611 - DNA, 1035 bp, Homo sapiens
agaaaataaatttatttttcacaattctagagcctggatgttccaaatcaaggtgccagtgggtttagtgtttggtgagggctgctgtctgcttccaatatggcacctgttgcttgtctttacacagcagaaaatgaaagagcgaaaagggctaagtagtttcccccagccttttataaggtactagtccattcatgagggcagagccctatgacttcatcacttttcaaaagaccccaccttttaataccaccgcaatgtggattaagaattttggaagatggcacaaacattcaaaccatagcactgacaatatcactaaattttcttatatgtctcaattttttcttttatatttcttttcactttctttagtagacttttagttttactttttacagattcctagtttcattggtatcggttattttcctctttctcccccacccccacccccacccctgccttttttttttttttctttttttggtcttgcgatggttagaactttacatgttaggccgggtgcggtgctcatccccgtaatcctagcactttgggaggtcgaggcaggtggatcacgaggtcaggagttcaagactagcctgaccaacatggtgaaaccccgtctctactaaaaatacaaaatttagcgggacgtggtggcgcatgcctgtaatcccagctattcaggaggctgaggcaggagaattgcttgaacctggaaggcagaggttgcagtgagccgagatcacgccactgcactctagcctgggccacagagtgagactctgtctcaaaaaaaaaaaaaaaaaaaaaagaactttacatgttaagtagaagtaatgattggtattttaagaagaaaatgatgctgacatttcaccattcagtataattttgccgtaccttttggactgattagttttataaggcttagtaaattattttccatttttggtttcttgagagttcttttaaactttaatgaatgttgaatttcattgaatgctttttctccatccactgaagtgt

SEQ ID NO: 37612 - DNA, 1035 bp, Homo sapiens
tccagacagctttgcagattggcaatttgtgaacctgtctcaagatctataaaacatattgcagcagaacttcaaagcacactttgccacatgggtgggagacctttgtttccttttttttttttctgctttttaagtctgtaaaccataataagggcacatcaaaaccctgttgctttctaatgtaacacaacaatgacatattaagtagtatgaaaagcattagctttctttttggataccattttttaaataaacattttttttcttagacttgccattctctccgctgagagaatagtcttccaaagttgcaaattcttgttcaaaagccagaaggaaaagaagccattctgaacatactttagctgaagaacatttctgcccctgtgaggacagcgttctgactacctagatcacaggatttttgcctttagcagaatactttttgttgataaacctttataatctaaattgattgtttccatgtctgtaagattcccttagctatatctaaaaaggactaggaagaaacccgaggaactggttcctactgcaggaacagactgtggtcattgtcctgtcacttcatttccctggattccattatcttccactgtgctaacatcacagaactggtaagagaatcaggtaaaataaaattacttttaaatcacagatgctatcatacaggtgtaggaatcttctaaacttggacctacctcttgtttggggtgataccatacttatatttctttttatcgcaatgagatggcaatagcagaataccaatagataaagcatttcatattcccttaattctctgtgtggtgcaaatgataaacaatagctaaattgcctccagttctctgcctaaaggtaggactcttcatccatctgtcctgagctccggtaccaaggtctctcagttggcagttggggaatagatgacaaaagcttttttccaaagttttacatccaagtcaatgtggggaacccccacattaaaaagggtaaattctgattctttttatc

SEQ ID NO: 37613 - DNA, 1029 bp, Homo sapiens
gtaagatgaaatagacaataatacggaataatatcttaaatggaaatctttgttagtctctagagccttcattgcttgataaataggacatctaaactttagatataaatcagttgtcaatgagataaaattattgccagcaaatattttccttcaaagataagtaacttttgatatggcagttggtgaaatgaaagaatataatctgccttcttgttaaatggttgactattctgtagcttgtaggtagtacgtattagaaacttgtgtatgtgggaaatatttggcataatactgttttcagtatatagtagctattttttaaggaaattagtttcatacaagaaaaagattattataaaagtgatacttttgcatgaaatattagtttgtgttgataactcttagttaacccttaaagtttaaaacagtactcaaaaaaaaataatgagaatctagtattctgtagttaactaatctataagataaattgctaaagtactagggagcttgtaaatcttaaaaatctttttatttcagtgttcattcaggttggatatatttgaaattgtagatttctatctgtacaacatctcctagttaatagaatttttttccttcccctcccttctctctcctcctccttttctaaccaaagggcattttatcaacaatcatgctgaattcaattaatatctcaagctaaaaaactatgtaattgaggttgtatctggagaagatgggaaaacattgtataatttaagcccttaattgtctgttgagcttttagggctgagtaattgcctttcatacaaataaaagctttaactcttttctcaagagtgtaccaccgtccttagaatcaggtgttttaaatccagtttcttttaattaaatgggactgtagtgatccctaccctgtagagaaatcaacagaactagagaagctaagggcttgatcaggtttcccctagaacctgtgttgcctgcctgctgtatcttccatgtctttcttattcaacttctaga

SEQ ID NO: 37614 - DNA, 1061 bp, Homo sapiens
gttgaatctaagattttctaatttgactagattaatttgttttacctccttctaccccaagttaaagaatacaagatgagagagcagatttatggtgggggagataatataagtttggcttgagttataaaatgattaaatagcttcacatgcttttttaaaaaaaaggtactgatagagctgaagctagtttcttatttcatctcctttctttcatctccagaagtaactgctgtcctgaagttatgtgtgttgttcctgtttcatactttgaccatatatttatatatccataaacaatgaaaagcattatttggtgtgttttttatattcatgtgtatgtctttgtatgtacatattttatttagtaatttgcctttttttattaaatattatgttctcaggatttagccatgttgtcatatgtaaatccattattttccctctatgtgaatataccacaatgtttttatctatgtttgtagattcacctattgatagatttttaggctgttgtcaatttttctctataaagtacaatgcgatagtaaacctcttggtatatatctctttgtgcacacgtgtaattttctttgggtcttagggatgtatatcttccaaccttactagacattaccaacttgctctctaaagtagcagtttcaggattctcatccccctccattcactacttacgagtttttaatctctgtcagtctgagaggtattaatcagattgttcttgttagtatttacttgattactagtgaagttgaaatcttttgtatatttcttgacatttcaggtcagtcttaccatgtcctttgcacatcttttctttggattttctttttctcattggtttataggagttattcatatatcctgtataataattctctgtttatatgtgttatactaccttctcccagtgtgtggctagttttaaaaaatgacttattttttcttgtgtggtatgcatgtttttaattttaattgatcttttgtattatttgtgtttttctgtgttttacatattcaagaaatccccctgtactctg

SEQ ID NO: 37615 - DNA, 1124 bp, Homo sapiens
cttccatctgtgagaagcctgccctgaccactcatattagaagagttcactttctcctctcaattttcctagcaccttttccccagtactttttttacaatatgggtcagatagggcttttgtttagatgcccttatcacttcttatgtattgtaacactcttgagggcaggagatgctttattgaaattaggatccttgtatatggtgtagcagggaatatgaactcgggggttatgctgtcctcccacttactgtgtgaccttaggtcaatcactttgcttctctgagcctccgtccttttgtctatgaaaggagacaggagtttcaccagtctgtggggatcttgtgatgactgagatactgcatggaaacagttcaaacagagcctgaacatcttaagtgttcaataaatgttagcaattattagtagcattactgataaaacagtgcttaacacggtggttgatatatggtagatacccagcaaacgtttgacataggggatgtggtaccggattttatagtagattgtgttagaccagactgaattgtggcaaagctgactataacagatgggtttgggctttgtaatgatcaaattatggaatttcagagaaacttatatgtagctagatatctcattaattacagaggaaaagctgataaaatttcatttatatatggttgaagagccccagtacacatgcattatcagtattaatgatgaaatattgcatcttacaaaaccttcacgtgacaggctcaaaaggtaaacactgaggggtaatgattaatgtccacaatgcatattgtttctatacagacaggtagctgttgttgtttgggttctcaatggcactgtgaaataactacagacaggttgtatttgttgtcttatgagcaaggtatatgaacagactgtaaaagggaagtctctaatgaaaagatgcttttgctcttgagagatcagaaattgtttttagacatggccttgagaaagttgaaagacatgtaattgaccccaaatacctctaggacatttgtcaattctgaaagctatcacctactcattatttctgcagctaaaaatcttctctttctagctttctgaccttgtatctc

SEQ ID NO: 37616 - DNA, 1060 bp, Homo sapiens
aagcccaggagtttgagaccaggttggacaacacggtgagacccccgtctctacaaaataaaagtaattagccagcatggtggtgtgagcctgtagtcctagctactctgtaggctgaggtgggagcatcacttgaatccaggagttagaggttgcagtaagctccactgcactccaggctgggtgacagagtgagaccctgtctctaaagaaagaaaggcaagcttagatttgacatgtgattagtaaattatatgtcaaaaaggagacttacagttcttctgttaatttcagtgatgaagacattaagttaattatgatttagcctttgtaagactctgacttgccttttttttttttttttgctgaggattatgaggaccttgataaatcattatttcctaaaaatctttgttcaacgaaccaagaagagcttgatcctagactgcctttcatccattacatgcattgggaaagcaggttttgacagtgtcatagaaacagacacagattcccagagaacagctataaaggaaaccagcctccaggttgacagtggatcaatccccttatggcacagattttctttgtgaatgggggtgaaaaaactagaggctcctcatatgtttttgggttaaaaatctttgttttttttttccaacttaaaaatgctgagggttttgtgtgtgtgtgtgtgagctagagggagaaaaataagtgacatgacatttaaataccatattaatatttgggtcagttgtgtttaagagtaaacatacgactaaccgctttctaggaaggcttaatcttccttttaaatattgttctcaaaagatgagcaatatttatgtattgaaacaacattttcttgaagtatgaaaattgaggtactgaaaacaggtatgtattcaagaagatgtgccttgctttaccaaaaaaatgtgcttttgaaaagttttgctgtgaactgattcatgttttgaaatgcttcccatctggtgtcatagaaaagttgaaaaggaggcaaggattttttttctccccaggggaggggtggtga

SEQ ID NO: 37617 - DNA, 1040 bp, Homo sapiens
aagagctttgatatatttttctttccctcctaacaaacaaacagcgaagaaagctaccgtgaatttactgggtgaagaaaagaagagcacctaaaccagactggatggaaacttcctgccctctctgtaccttcctactggagcttgatgttatattagggactgtggtataattattttaataatgttgccttggaaacatttttgagatattaaagattggaatgtgttgtaagtttctttgcttacttttactgtctatatatatagggagcactttaaacttaatgcagtgggcagtgtccacgtttttggaaaatgtattttgcctctgggtaggaaaagatgtatgttgctatcctgcaggaaatataaacttaaaataaaattatataccccacaggctgtgtactttactgggctctccctgcacgcattttctctgtagttacatttaggataatctttatggttctacttcctgtaatgtacaattttatataattctgaaatgtttttaatgtatttgtgcacatgtacatatggaaatgttactgtctgactacaacatgcatcatgctcatggggagggagcaggggaaggttgtatgtgtcatttataacttctgtacagtaagaccacctgccaaaagctggaggaaccattgtgctggtgtggtctactaaataatactttaggaaatacgtgattaatatgcaagtgaacaaagtgagaaatgaaatcgaatggagattggcctggttgtttccgtagtatatggcatatgaataccaggatagctttataaagcagttagttagttagttactcactctagtgataaatcgggaaatttacacacacacacacacacacacacacacacacacacacacagagtaacctgtaactctcaattccctgaaaaactagtaatactgtcttatctgctataaactttacatatttgtctattgtcaagatgctacaatggaaaccatttctggttttatcttcaaagcggagaaacatgttgatt

SEQ ID NO: 37618 - DNA, 1058 bp, Homo sapiens
taggactgtacactctgtgacgttttgaatgaagcgcaggcaggcttctctgctatcctccaggcagtgtaatagtcaaggaaaagagcaacagtattggatcactccttagacactaaccagctggtgaaagagttcattggccagtctcctccttagaatggtttgcaccaagtggagaggccatgtcgctgaaggggaaaggggagccctcatacccacagtcactgtaaacatccagtagacaggaagatggcttcgggcagtggctggatggaagtagattggagatacccaggtctggaatgaagtcatcttccacaaagtcttccttcactgagaccacgaattctgggtgatcattctctaaaaggctgagaggtgcttccttgattttcactaccgcattagcttggctctctgtctcagactacgggcttggcatatatgtagtcaaaattaattagttcattaatagcttcaagcttggctgataatgtccccactgacagagaaagggaggctggttaggaattgggtccttctgagtagacctctgggagctgctccaggctggcagaccctggggaaggacatttgaagaacactagtgggtctaagttgtccagaatgcccaacaggatatcatactgggaaggtagttgatgtttacttccaaccccaccacaactaacttctaccctcatctgcctagttagggatgtcaagcatcaaatagatggaattatcttggctttcgcctcctcttcagtaaccagagcatccatccccaagtgctgtcttcactcatggttctcaactacgagtccatgcattttctcttgtaaaaactgattttctagcaaaagtttttggttctgttctaaatctaccacttgctgtttcaggtcactcatttgagcttgctttctgtctctggcagtttgagctgctaatcctgtttttcctcctcagtgccttctccttggggctccccacccccacagcactcaccatctcctggctggctcctctctgggctggcaccatgagcagca

SEQ ID NO: 37619 - DNA, 1153 bp, Homo sapiens
ggagtgcttggacctttaacagaaggtcttagtctaccattgtgtgtgtgcagaaggctgatttgagtttttgcatgattgcacattcatgcacgtagcattactatccatgtgtagcgagactactagatgctagtctgagtctttacctttccatcatctactgtcatgctttcccaagtctgaagatcctgttttccaagatctgtgctcagtaaacaagctttggagtctttaaatgtaaggaataggaaaggtgaagagaggcctggcttaaaatcataacatggagattatggcagtgaatcccattggattgaatggtctgatatggaaagcaggctgtgtagttccactagtccaaaaattctattttttgagacacagtctcgctctgtcacccaggctggagtgaagtggcatgatgtcgactcactgcaacctccgccttccagattcaagcgattctcctgcctcagcttcccaagtagcttggattacagacgcctgccaccacacctggctaatttttgtatttttagtagaaatggggttttgccatgttggccaggctggcctcaaactcctgacctcaagtgatccacccacctcagcctcctaaagtgctgggattacaggtgtgagccactatacctggcctggtccattctttttttttttttttttttttttaagaacaaaactagtttatttggattggggactctgaacagttctgtctctattacccgacttcctcctcccacgacttcggcacctagaggaactttggctccggctgcggtggctcctgcggctctggctccggcggccctggtcccagctgcggtgcctatttcttcctctgcttggtgaattgtgcctctcccgactctttgatgtgcgtttgtgagatttcttccccctatgactactcttttttctctcggattccccatttcttttgtaggtgtggtctggactagggtttctccttccccgctgcctgctgtagtagtggtcgtggtggcccatcttctccctcctctcggagttcttgccaaaggaggagccagtctgatctgaagacaagtagatgtctctattagcttcccagaattcattgttgggatttctgaacacatgaagaaag

SEQ ID NO: 37620 - DNA, 1072 bp, Homo sapiens
ttgtcatgcgattatacataatgctgcaattaatatctttgtatcctctgtttaccttcatttaaatcattttctagatttactttactttttttgagacggagtcttgctctgtcgcccaggctggagtgcagtggcgtgacctctgctcactgtaacctctttcccaggttcaagtgattctcctgtctcagcctcccgagtagctgggactacaggtgcacaaccacgcccggctaatttttgtatttttagtagagacggggtttcaccatgttggccaggctggtctcaactcctgaccttgtgatccacccacctcagcctcccgaagtgctgcaattacaggcgtgagccaccaggcctggctagatttatttttagaacaaggttgagtaaactctggcaagattaggtcctgacctgaattgtcacctgtgctatttcacccattgacagagaatataacatttttcttttcttttttcttttttttgagatggagtttcgctatttcactcaggctggagtggagtgaagtggcgtgatctctgctcactgcaacctgtacttcccgcattcaagcaattctcctgcctcagcctcccaagtagctgggattacaggtgcccaccaccacgctaggcaaattttgtatttttagtagagatggggtttcaccatgttggccaggctggtctcaaactcctgacctcaggtgatcctcttggacacctcagcctcccagagtgctaggattacaggcgtaagccactgtgcctcgcaacatttttcttcttaatgttcgtaggaggctaaaaagacagggaaatctttcctttaacacgttcttttaagcttttatttgtgcatgctgagcaatgtagcctgtaactattctgtggctacactgcaaaagctttcttctgacattaactctcagttccgtaactgcatgttaagcatacccctacctgggaaatatctcttctgggggaaaatcacatggtgacagcattagaagcacagacggaatagaatggcctgttgtaattcgtaatttaaggagtca

SEQ ID NO: 37621 - DNA, 1033 bp, Homo sapiens
gggtataattaaaattgatgggtaactctaatctccttttagccttattagccatataaaccctctgacagctacttaaacaaagaaactagagtcttcttatctctctcttttcttcttaatcttttatctccctataataataagttattactgtactataattaatacctgttaagggagtatttactgagactttcttagtgctttacatatattaactactttaatcttcacaacaacacaatgaggcttatccatactagataggtgaacaaactaaggctcagagagattggataacttgcccagggtcatatatctagtaagtagtagagctagaatacagagctacaaactaagggtggtgaaatgctgcaaagccagaaaagcactgagaagaaatgaagggaaagccctggccattccatagttcagtgtaatcagtaacttatgatagtttgtattatttaagtagaaagttaaaatgagtcaatttcatgtgatgggctgtgtggctctcttttctccttgtgtgtctctttgtgggtgtgtgtgttgaaggccttttaatgctctaaaacaaaacagattatatctgaccattgttagagaaatttgtaaaaaaaaaaaaaaaatcattagctgggctgggcatggtggctcacgcctgtaatcccagcactttgggaggccgaggtgggcggatcacgaggtcaggagatcgagacaatcctggctaacaaggtgaaaccccgtctctactaaaaaatacaaaaaattagctggcgtggtcgtgggcgctgtcgtggtcgtgggcgctgtcgtgggcacctgtagtcccagctacttgggaggttgaggcaggagaatggcatgaacccgggaggcagagcttgcagtaagccgagatcgcgccactgcactccagcctgggcaacagaatgtgactctgtcttaaaaaaaaaaattattagctgttttctcaaagagaaattaaatgaatatagctgatgttcactttagtgtttat

SEQ ID NO: 37622 - DNA, 1028 bp, Homo sapiens
cacattagaaataaaatataaagcagatggaccagaagatgattcctttctgttctttaccaataggacatcttaaagctttttatccatatatatggataaaattaaaatatatatgggtataaatggatatatagatatattttaatgaactgcttttttttccacactgtcagtctctggtaaatagttgatattggtacaactggtttgaataataaagccaatgctgtgaagacatactattacttaattttatgtcatttggctagtttgaattgtagcaactgagttacttatgaaccatgcacagaacacatagtatgtacctatgtgtcttaggtgtgagtagccaaaagcatgtgtatatggagctgattattacctcttgagcaaacagcttaacttttataaaattcagttttctcatatgtaaaaggtggggatagggttggggggagttgggataatatatgtcaaacgtttaggacaaatcaggcattctgtaagtgctcaattaaggggagttagtttcattaacatataaagaggaaaattgacttaatcatagtcatagttctttaactttgtgtcattaagcttttcattgatttaaggaaaaaccttcctaagagtattttctttcatttattttttcactttcattttttgttccttgtcttattatttttttcctgtacttaaatcagcttaagacatcattattcaaagaataaaacacagtaaagttttgttcttccaagttaaaaatatgtgatatggctagtggttttcttctgtactggtacaatggtgtatatgttcctaagcattgagtataagttggactaacaattttttaatattaaatcttatgcataagaaatgtgaacttggtcctaaaagcaagaactcaaaacagaaatataaaaaggttgtacagttcacatataaaaaagcatttgatctattttgcatggtaagaacaaaatagatctgaattaagaacttgtaaaagtggatgtttt

SEQ ID NO: 37623 - DNA, 1044 bp, Homo sapiens
caagcctgcacttatatgtttgttctggaagcgaccatcacattagctcagtatgcagtgttgccagaaccttcagaatcctgcttccaatggcaaaagatccgaaggctctgggcgtggcacacctttcattctggcttttatgtctgatatttagggtaaagaaggttggcatgttctgagtagtttactgagcatattgactaatgtccctttcgaggggtgtcctctacccatttccccacatttgagagtgaaaacatctaccccctagtccaacttacccaggagagtgcaccaggcctgtggtttattacctcagaagggtgacttcgggggttgtgagaatctgaactaacctcaggtgagtccatctcacggtgggctgggaaggctggacctggtggccatgggctggtggagttactctccagcagaagtgcggggacaagagtcatgcgtgggctcaccttgaaagggagggaggcagtatagctctgaaccagacagcttggctgcaatctgtggctccacagcttacccagtagccataagcagggggatttccttctgtgtgcctcagtttcccatctgtcaatggagatagttgcaatacctaacccaggttgggaagatgaaatgagccacgtcatgtgaacacttagcacagtgccacgtgctcagtaaaggctactggctgtcattgttactggctcctggtcccaggatggcactgtcctattttggattcacttcgtattctccactcatcgctctcatttgagttcttaggatacttttagaagttgtctgatgagcagtcacctgtgaaggatgctgtttctattgatttcatttgggccctgagaagtaggcaagagctggaggttgatgctgctgcaggcattcgccgcatgcctggcccagctacagggcaacagaggtgccgtgggtgtgattaaacatgtggttggtgccatggaaaccaaaatgggaattggaaggggcttggccagaagaggccttccatggataggtgacttt

SEQ ID NO: 37624 - DNA, 1065 bp, Homo sapiens
ccatttcatagatattcatatgtatgtatataaaaatattgaaaatagaccagaaaaatataaaccaacatcataatggtaatatgttgtattggcctcaaagggaccttaaacttctctataatgttctaatttatgtttttaatgaatgtattcatatcattgtataatttttaatatgcagaagtatatacatagaaatagaacactgatatgctaaaatattaacaggttaaatctgggcagtggaagtatgcgattgctttttttcttctttgtcctctttaattttcaaattaagcaaaaacaaaaaagtatggattatggagaatgatctgtatctcacagcttttaatggtttgatattcacatataagctgagtcttcttttttgtcctttatggaactttgttcatttcttatttgttccatttcttcatgggaatttcttttcaggataaggaagaggatgccaatattagctgagtttaaattcataaaagttctgtaaaaccaagtcctgtctcaacaccgctcctctcagctctccccagctgtcatctagctgcatgggagggagctgagaggagccaggtctggcttcagtgtgctccttccacatgggaggctcaggtggctcttcttttgtatggctggtatattagtcagtatgaggctagatttttctgcaataacaggttcactccccaaatctcagtggcatggcacgttgtttcttgcctgcaccatatattcagtgcaggttaggggacaggtgcacgtctctgatccatacattcactcagaaactcagactgttggccatccaccacctaagagcccactcaaaggctcccaccacagcatttaaatgcttctgcgccctgcctgttgaccagaactaggcagatggctttacctaaccataaaggggcttaggaacatgtggatattcaacagtacaagtttctgatgcagctgatttacatgctttgactatgataccagccgggcttggccgtgaatcagagttgcagagaaacaggcagtttcactcatccatct

SEQ ID NO: 37625 - DNA, 1028 bp, Homo sapiens
tgtttcatgaaatttgtttcttgcatccttgtaggcagtaagttgccaaatgaatgttctaactgggttgcagtcaaaatgttacaaaactactggtcttgcctacctggatatttggaaagagatcgaggttgagggaagaggctttgaagttatctgagctaaggtgatccctgtggttgaagggtgtggagtcaaaagagggaggagcagcatatcttaggacagacatgtttacatgtatgggagagatggaagaagaaccaggagaaagaagagttgcatatagtcagttttcttgagttttataatgagtttttcttggaagttaaaattttgttggggagagggattttaatcaaatattacatatttgggtttaattaaaatcctataagtgctacaacattatggaacacagtactatgagagtgtatccaaagaaatttgattcagtctagggttacaagaaggcttcctctaggaaggcgtttgacctcagagctggaggatcagtaggaattaagcaggtcaaggaagagaatagcatccagtgagggagaggaatgcatttaaggaggtgactgaagatcctcatggatggaggacacagaggtgtgagagggggactggagaggtaggcaggaactaggccatgcagagtcttacaggccatgacagagaccatgtttggcctttacccaaagatccacaagaagctactgaaagattttttaatagtgggggaagagaatgagataatcagatttgcattttgaatcaatcactgtagtgtggagaaagaatccatagatgaagaatgagttggggaggctagcttggaaactattgcagaactctagatgggcaaaattgttgctcagattagggtggtggcagctgagatttaataaagatgtaaaattggcaagatttgctgaaggattggaaaccgattgaaggtggggggtgtgtatgccccataagagtttgtttgtacaacagatggataacagggccattcgcca

SEQ ID NO: 37626 - DNA, 1033 bp, Homo sapiens
taaccacataattttcgtttcccttgaaaataaatattactacaagttaggattttttagtggaaaataataacttatttttaatagctactattgtcttacaatatttgtataggaaatttttacaaaatatataaaatattcttctgtttagatttttaatttttaaagatcacatcagttgaaggtaataacctttccttttctgtagtctttaagcagcaaagttaggtgtttgtaagggcttgttttacctatactacaattttgtcctctttaactttcccacatagaatgtaggaatagctggagattaatttttcacggattccttcctgggtctgataccagctgaatggtcttctatttctcaaaatgtttaaagttttaaagaatgaatacctgtctatcccccatgctaattgtgctaattctgctttcttctcttaacagaataaccctctgagatctttcttctcaacagtttcgtgggtatttgcaaggatctcagaagtgctatgatattctgttgcaaagcaggggacttggtagttatgaacaagaccctggggttagacagacctgggctttcattctggctctgttacttactagcttgacaagttacttaacctctaagtctcaattcctacctctttaaattggagataacagcactacccatctcataaagctatgtgaagaatagttgagaaaaatgcatgttatatgctgagtatagcaatctagcacatagcaagcagttgtgttagccagtaaaaattacgatgggacatattttcaggggagcatatgtttacagatgggatgggattgtgggtcatctttaaagctgattgtcagtctcagacacctctcccccttgggagccatttcctaaccatttatttgaagaaggggaggtgtggctttaagtgggtcctagggaccagtatgacagctttcacagtgagtacctgggcctgctttgtgatctggcactgttccctatatcagccatccttgggtaggg

SEQ ID NO: 37627 - DNA, 1049 bp, Homo sapiens
acttctcctgttactaacagccagtgtacttgcccctaacagcatttgagaagacaaatgttccctgtgctaggctgcaaatggattaaagcagtgttgatcctcatctgtcagaaccattaacatgagtaaaacacttgccctacttaaagcagatggagggggctgggggagggtgttctgtggtactgttcataagattaatggtgctatatggacagcagagagcactggctttatattctgaacattacatggatttacagggatgtcagttattcctgaaagcacagcctgtgttcttaaagggtctctgtaaggtattgaatgagacatggaagagtgtggtatgggggatggtacatgagatagtagcattttaacagtaaattatgacttctggatcatttttgctcttcttttgtttaagctctgctgaatttaagtcttaacagttacctggcttcttagagtatgtgtaaatattataagattttttttgataagataaatgagagagatagaaatgggactgtaatcacaagagaccacagctctgtgtttgcaggaagactttagatcccctttgccttctggtagaaggcaggagggtaggataggaggaaaagaaaatagaacatgttaattaagagtgggtatttttgaggattttattattctttgacagtggaagtggaatggtaaaattgttgaggttaacgcaacagtgatagaagacagtagtgtgagaaataatatttacatgagtgctgaattaaatttaattatagaaaggaatccggttgttggcagaagtttagctatctctgcaagggccagacttgggggtgaggaggaaatgtggttgagtggccacttgtcataggcagagtgggttgggattctattatttctctggctaacccttcccaatatatccctcataaataaatcttctgccctggcaatcccccatctacccttgtttgctctttctcttgttttctagtacctcaactactggaaacaggccagaatcctttgctgca

SEQ ID NO: 37628 - DNA, 1031 bp, Homo sapiens
gctattgggtgtttataccttcccgccatctggattgtcagttcctcattggatgcgcatgcattgagtgcccctgtgtgccaggccttgtgcgaggcaccggaagtagataaatatagaagttcaccaacaggtatgaagactggcatgtaaatgcaaaactcactgtgacatatgttgtatgtgaaaggaagtatcaagtgcattaatatttccctgtgagtatcttcatgtagcttttgaaggcttgctcttttttttttctttgagatagaggatggctctgttgtcaggctagagtgcagtggtacgatattggctcagtgcaacctccgcctcccaggttcaagctattctcctacctcagcctcctgaaagtcttgccttttgaagttaggagaatatcttaatcttttactcccatacctaacagaatgcctggtgcatagtagatacccaatatgtgtgttttgagtgagtcacttaccatcttgttagtgtggtctgaggaaaaagggtatgtgcccacttaaccacattagaacactgggtctggcttgactgtagtgatggaagaacagataccaagctgcagaggccatccggtaaatactaactgaatgaagagaatctgtataatgtgtgtaaatgcagttcagtcccttctctactataaaaacccccttaaaagcatttcattggtgggggtgaaatcacccttaaatagaaacaaaattgacaggtaaggaacaactctggtgaagaagagagttgtggctttaccttacacacaggatgcttccagctaaacccaccgagctgacagagggagcatgacacctctcctccatgttagcacatcagggcctggctcagctgtgggaaggaacaagtgatgctgatgagcagataatgcacctgatagggaatggggtccttggagagcaacatatctgcgtggcaactgttaaaacccccctgggcctcagaatttacagtgagctgcagtcacaggtaaggagactcactca

SEQ ID NO: 37629 - DNA, 1035 bp, Homo sapiens
ggtgggtgggtgccatggtgaaggaaggggcatgtggcactagccccagcacactggaatgagatctaagctcaaaaagtgacataaacatcatcttctagttctgtagtggggggaaaacaaaaaatggtcatatttgacaaatgactgaatctgtcttgcatacgtcataaagaaatctaggcatccagcaggtaggtgtgcatggtggtaacctaacttatccagggcttgtacagtacttagcacatgcagacattcttgagaattttctgttgaatcagttaaagtccaacattgtcccatagaagagagaaaaacaacaacttgacactacacctaaatcaaggtgttaaagcctttggccttcatggggagtggtggcccactgggggctgctctttctcatcgctgttctataatcaattgcgtcattttaactgtcctagaaaaaagaaactgttgcatcctgctgtcttaaaaatcaagtcgcccatcctcagccccatgacctggcttccttctgttctctgatgtacggagatgtggcgaggaaacctctgcctgcatcactgtgaggtcagagagccccatgattatcatcttcagttcccttgcactcctgtttctcccctttgctcagctgagggcttccacctgtctaaaggaacatggcccagcaggaaggcttctaggtgcctgccctctggattcggtagggccatgcctaggatgggcctccagggccagtttccccacaatgaccaacgatgttcctggttaggctgtggccagaaggagagatgttaaaaagtgaggggacctcctcttattcctatgaagagatagaagaagagaatgacagaaggaaagcccaggctcacaaacccaagaagaagaagaagggtcagaaaaatgtggagtactggtgcggaggcagatgggggagaccagcctttcccacttctaacattggatgggaagagaccaggagcaaaggcaggtaagcagcctcctaccttctgctcggtgatg

SEQ ID NO: 37630 - DNA, 1033 bp, Homo sapiens
gttgtgagacagagtaatctggtctgggccgtgctgaaagctcttattgataagggattagtctcggtggagacaacgtgctgtcacatgggcatcagtgcgattgagaggaatgagatccgaggccggtgggggagggacagcgctgagtcactgagttcattaaaaggctactgaacaggcgtgcggcaggcgagaccaaccccggactgtgcctccaccacacccatccccacacctcttgggcaaggaggaccagagcacatgtcaaggtaggagcacaagcggggcaactggcccagctcacagtgcctgtctacctcttgcaggttcaggcccctgggtagtttcccggtggggcaagagggagccctggctgaaatgcaggaacccttgtattccccaagtccagcccctggtcctgagtattggcttctctctacaaatgggaaggggagtggtcaccaaaagatttcctggcttggtggctcagaagttctgaaagggaaaattgtatgcgctttactggtagccagcagtgaaatattattttgccggattgggtgcaatttaaagtcacatctaaacttggcagtgagcaggcattgttgatgaaaaacagggttgagaatatgtcaagtcactcttctaacacggacgccataaagttcaaaagtctgaagcttctatacccctagaaaaagtttttttttttttttttaaataaagggcaaactttcatctgcattggggctgaggggaaagtagaaggtatatgggggagctggggaatgggaacagaagtcataaagtctgataaactgtctcatctctgcaagcagaggctaattatgtgttgtttgacttaagttttttcccagtcttaaacatctaacataccatgtgtgtataagcgtgtgtgtttttgtgtcccctgcaaatacactgtcggcgtatctgaatgactgctaataaatgaacatgtccaaaagaatgacagtgatgatcctgtaggctaactatgtacgtattg

SEQ ID NO: 37631 - DNA, 1048 bp, Homo sapiens
agagttcataatttaacaaggaacctgccactgcttttagtagcttgtgttctatttgtcatctgcatatctggggcctgtgaagaagtatagtattatgcacaaggctgggtggagcactgagtttccttgaggaaatgggcaggaagaagagtcctgttttaactctagttgttttctatatataatatctgcactcaacagatattctctgtttttctgtatttttaaagggaaattggaaactatgggtagagatagagacctcttttgagggatttgggtttagtaaaaagcccgtctaggggggcttccctggcatgctgaagcataggaagatgctgcagtgtgctcctctactgtgatctgatgcagagttgccacttctagtcacactccacaaaggaagaatgtggtaaggctgattgcattttcttattgaagtgttgctctcagagctttccttggcttgctaggatcatgacccttgattttattaaaatttatatatttttatataagatttaagacttatagtaatgtgaagaatccatctcatatatgctaaatattgaaagtgaccatggagcatttaaaggtaattttcagtatcatgatggtgtattatataataaataggtttcttgatatattttaatgtcttttatcatcaaagtaatgattaggccatttcattttcacaaactatcagttcatgaaaataagcaccaccaaatttagttagtcaacaaatattgagcacctgtgattcttttatttgctagtcagaatagagctttaagtttaaactctgtgttaatgacaagtggctcagaacattcccttccactgtttgcggtagagagtggtaggacttactcttttgcatatacactgtatctccctgttctttttcctccattgtctccccatcctatgagttcttttccatttaagagcagagaatgatcagatgaacagagttgcttctgacagagtcatcctagaccatctgttagactgacaaaatttcatagttgttaggatt

SEQ ID NO: 37632 - DNA, 2079 bp, Homo sapiens
tttgtcagttgccccttgatgaaacccccacttctggattcctgtaggattttttgctaatcatattatcacttatgttttcaagtatacgccctaccttcctccatatgtgtaaactactccagggcaggggtcatgtcttaagacgttacctttccagtgtccagcaccttcctttgtcataaaccatttgaggacaaaggtgaaagagcagactctgaaatggaccgaacagtggactgagtgaagaaagcctctggaagtcgcagagagccttgccaagactccggatctctcctagcttcagtttttgcctcctgcttaaatataaagggggctggtctgtgacctcagaatctatttctcaggtcctaaacctaatgttatgtgaatgactccagtgattggatttggaaacactgcattgcaagcctctccccttccctgttgtgatgattaaacaaggagagtagagtgctttacagaagtaacacataacttcaggaagacaataaaaagttcacaagataaagtaggattttttcctaaccacaatcacagaaagtgatgagacagttttcaagaaaaaagctgacagctggagacaaaagacagtatctccgcctgggattcatttacttggctctcagcctctgtatccaaaataggattcgctgctgctttccattcctccagcattcaccaaagtagtcacttggctttcctgttttcctaaaaattaagccattccttctctcctacacaacccctcgccctagagccgtggctgaaattcctcccttaagtttcacaatgtaacgtcacttcccctctttctgtggggtaggcttttcccctttacttccctcttcctctaaatcaagatgagacttcacgagaaattgctttaaaaaagatgaacttttcagcttatcaatttaaaaagtaaatatttcagtgggtagggatctcattgtattgaacctctgattagagattattccacaagcaagtggaaacatgttttaactgcctccagaaccctaaaatgtctagaatgtgacttgttttggagtcctgaaattctggctacaggctcttgtccttccatggtttatcaaattctctgctagtaagccatcttttataactaaatctaaatgtctctcttttctaccaagagtttattcttttttgttccccatcttcccctcgggaaatatttttggcagggaccttatctcaaaagcctttataacaagatctttttctgaaacctctgaagtaatactgttctccttggcctcagtgtcatgagaagcccagacttccatacactttctgatcccattagatgttgattacattgttggcccctactcctggtgacttttttcctttcaaagtggcagttgctgtgattgaatgggttttaaattgtcacagtatgagttctttatggctaggattcctttggattttccatcatttgtggggaagggatgaaaaacggagaaaataaaagtatgaggctttgtcagacatttattactgaaactgagaagctgaaactgagaagccttatattctctaggaaggttacagggtggtagcacagtttcaaaattaatcaccaggagttttgtttctcacagtggattccaaacctgctattatcctggtggcatacctcttcttggccttatgtccttggttgcttcaaggacataaggcttggttgtggcaaggactaaattctactttgcttacctttttccctgaccagttaggttgtttatggcttgtggagatatttaaaatatttcattgggttaaaaaaaaacagatgacttggagaacacaagagagaggacataagatatttctttggtttgtccctcaaggttgggttgaaccttagtgggaaaaaagtattacttttttttttttttttttgagatggagtttctctcgttgcctaggctggaatgcagtggtgcgatcttggcttactgcaacttctgcctccctggttcaagccgttctcctgcctcggcctcctggtgaatagctgggatt

SEQ ID NO: 37633 - DNA, 1055 bp, Homo sapiens
acagtcttcctcactgtggtaatggggtaagtatgagaagctttgaagggttgtaccttctccacgaggccacagcccctatccctcagtccagatctatatgtgaacttactgctgccctcctgaatcatttagttacctgccaggccccttagtcccgtgtttgtcaccctggctatagagatcacactgcaagagatttccaactatcagaaaagctgtctgtatcttaaagtttatcatagtacacattatggtggtattccttttccaagcacaaatgaatgggagaaatggaaacatgaattctaacagttgaaatcaaatgtaggcaataccaacttaaaaaaacgcagacagtgctaattaaagttatggaagaaaataccttttggcttggccagattgatgtaaatatttcttacaatacagttagtacatatggcatttgcaaaggtggtggtgtgagaagtagaatttgcctgaggtttgtaagccagaagactgggtgactttattttcctgtgaacagttacgatgtgtggaaaagtgaggccaaatagaacacttttgattgtattgttaaaataggaccttaagaaacccctctggataaattctctacctcttaagtcagtaaggaaaaggtataaatcctttgtgtgacctgttacagagaaccttgtcaggcaagacagtttattggaatgatgtaccctaaatttacctgttgcaggggctgtgtttttctaaggctatcctagggagttccctttgtgtaggtcgaccttggactgaccccaagatttccagtcatcagaatgtaggaagtagagggagtggaattacacatgcttggaactcagccccttagaaaaagccacatgcgttttccagcattggccgtctttgtcttcagttttgagtccctgaatatttgatctgaattccccacaccacttacacaaacagttccatgcactcctcaggaagcgtgtgacataattttgtgattgatgttaggattccaataacaagaacacaggatcacagaa

SEQ ID NO: 37634 - DNA, 1027 bp, Homo sapiens
cattctttcctggagataaggttttatcagtgatgcacactttgtgaattactgtaaagattttatcagtgatgcacactttgtgaattactgtagaagttttatcagtgatgcacactttgtgaattactgtacgagttgcaattggttaactggaagaaggttacagaagcactggtgagagcattgctttgaagcagcaatgatggctggaggtttgagaggatttggaatatcccccatagcaacgaaggccacgtgtttcatttatagctaccttttttatttgcaagaagttttttaaagcctctgatactttattgaggttttggctaatggtcaaaaggaggaagtggtagaatattcctgccagtgttttgaagttgttaagcagtttggtcatttgctgaccagcatataccatgagggcaatgggaagggaactgaagaagccctaaacctaagccctaggctcttccacctcccacttggttgtggagctttggaccccttggacttccatggctgggtcatctccatggactctcttatggtggtggtttccattcccatggctttgactgccacctctaagctgttgcctccaacctaggttggtctgaatatccaacaggtaaaaggagaatcacaggtcttgtgcaatacaaaatcttcttgtagtcagtattcttcctcctcctccctcctgccctctcaaaacaaagctcatactgccccttcttcctgtgatgacgtttctccatctggtgacaccaactcatcttctagactcaacatgtcaccttctctggaaggcctttctcaactcctggtgagtgccaagtaccccatgaagtctggcaacactcctcacccctctgacttacgacttagaattctataatacagtgtgttcacctatgtctctgtctcagcacctttgctggtgagagtggctggtggctggagaaatgctttcgtatcagaacataccctacattgttgcagtgtgcttgacagaatacat

SEQ ID NO: 37635 - DNA, 1378 bp, Homo sapiens
ttcaggagtggcaaggcagcaatgactgggagcagagtgagcagggggagagtggaaggagatgaggtccaagaaaacagttctggccagatcacctagggcttcataagccctggaagagtatctggatctccctggagagtttccaacgcaggcctgaatttgttttactttcttattcttttcatattttgtgggggtggggggcggggtaggcagggggagatgtagggaagaggaggaattagcaaagaaaaggcctggaaagttgtgttctgaaagccagttaaagaaggtattttcagaagagggcagagtgatccatcgtcagatgcctctcctttggcttcccgcctttgaagcctgtgtatattcccaaactttcaaactgtatcattttctgtagtcaaaagtaattattatgtaccataaaaatacactgtaattatttttttgacatcttcagtgtatgtgaattcattttcccctaaaaaggaatggtttaaaaaaatgagtggcatggacactggccaagaatgatttgaaaattgctttcccttgattgatggttcagtattgatggatgctgatgttgtataatataggtgggttttgaattagaaaaattgaaaactgccttccactgtcacatggacccatttccttcaactatttagaatcagactttatttttatgaactttaatatcaatttattgatttataacaaatataactgcaaggagactggaatgctgacacttatttcctattgaaaaactacttggcagtcagattatgaccagaaaattgcctggcaaacatggaatcagacaaaggaagtgcttctattgggtggtgctattaagcatatatttgacttaagcgatatcttgtcctaaccatttgcatgactgataaagaaactgaggcctgaagaaggcttgctagtggcaaaaggggaaatgtagtactgagattttatttttctaattcccagggatatttttttctcttctgcctcaacttcctctatttctatattacaggatatttacattaaggtatgtgttttggaatattctgtaattattttaaaaggagaaagtttaattcttcagtaaatcatatctagatacaacattattacagatcacactatcaaaatacagttgacccttaaaccatgctggcatagaaacaccaacctgccacccctgcagtagaattccattttgcaggctggagtacagtaatgcagtctgcagcctctacccactgggctcaagtgatcgtcccacctcagcctcccaagtagctgggactagaggcacatgccaagacatccggctactttttgtattttctgtagagatggg

SEQ ID NO: 37636 - DNA, 1018 bp, Homo sapiens
tcttggttccatcactgagccatttatgggggcaaaagtagcataagtagtccgtgtttcttgagtatggctgaagagaggaaagaggaagaaaaggaaaacagtgtaaaagcagccggaaggcagataatggtgatgtcagactaccaatggtgaagggaaaaatgcagggatggagcccctgcgggggtgtgtgtgtgtgagggaacacctggtgatgggaaagaggggggattaaatggggttgggggaaacctaggaggtctgccgtcgggctggtgaatgctattgggccctgcctggtgctcttaagtgtcatgctgctgctgtgctgttcctgctccggtttgaaatagcattttgaggtgctggctgaatgaagtagagcatttgctaatccttaacggctgttgcccctgtgatgtagaagactcaagaaatgctgagagtgagaacttaaaaatgggaggtgagggaggaggcatgaggatttaagtgacttttgccaattttataattaacggtctcaaatctgaactagaacccagggccctgctccatcactaaccctgtttcaggagaagcctttggtgatcttctaaggtcattgaaaaccccaaaactgaaggcatttcttttgcagagactctttgccaggcccttcacgatgtttctatgcagcagagtgctgtccagtaacctttgtttaaatgaatcgcagacttaggagaagggggggctagaaccctgagtgaaggaagagatgtgaattgactttagtcctattggcacgtccttgagcacattgggtgagcagagaatgtgacactcaggtgccacataaaattacccattttttttgcctagttgtatccactccctaagtaatccctataaagcttgtaggcaaatgaaagagttgagagtgctttgtagtccctgcattggctggaaaactatttgagcagtatatgacataatattgttcctaaggaaataagttccttcctcagctata

SEQ ID NO: 37637 - DNA, 1026 bp, Homo sapiens
tatgttggctgtatgcagcagaacttagtattaagttgaactatttaaaattgtcaacgtcttctctttttgttctattaaaagcaatttcatatgatttaatctaatacctataacttattgagcacccactagatacataactatatttagtacgtaaagaatattcaatttctaataataaaacaggcagtacctttgggaactgctgttgaagaagagctatggatactgttaggaatttgggggttccctagcaggcatgaagggatgaaaagaattgaggaccagagataaatttgggatttatatttaacatcttctcatctttaccttaaaagcacctcagccaatagtaaggatcacaaactttatttgccaagaacgtgaatactgaatagagtttataatgtatttcatcataaaacagtttcttatttactgatggagagcaaagctcttggcagattaactctacaaatcaagagaatatgagaatcaaaggccagaatccaggataatgagcaaaactcttggaagagcactaagaccagtcctgctggacttttgaactgacttcccaaagtgaaggttatgacccaatggaggctgggtgtggtggctcacaccagtaatcccagcactttgggaggtcgaggcaggtgggtcaactgaggtcaggagttcgagaccagcctggccaacatggtgaaaccctgtctctactaaaaatacaaaaattagctgggcatggtggtgcatgcctgtagtcccagctactcgggaagctgaggcaggagaatcgcttgaacccaggaggcagaggttgcagtaggccgagatcacgccattgcactccagcctgggtgacagaacaagactccatctcagaaaaataaaaataaaaatgaccaagtggggtcaaaggtggagagttcagggttcccctgaaactccttcttggaccatgtcaccatgagcactcagcaatactcagaatatccggctctatactgtgtggagttg

SEQ ID NO: 37638 - DNA, 1013 bp, Homo sapiens
aatgaaaatatttctgtattaggtatatttgaacttcagttctttgtatttaatttttttttagtgcaaactttattattttttagaatattttagaaacatattttatatgtgtgtcttttcagagtatgtcacatgcagaattgtgttgtggacaccttcattcattgaaacaactctcttctcaatcagacacccaagttgcactcttagaaacatcttttatttattttattttatttttttttgagagggagtctcgctctgtcccccaggctggagtgcagtggcgcgatctcggctcactgcaagctccgcctctcgggttcacgccattctcctgcctcagcctcccgagtagctgagactacaggtgctcgccaccatgcccggctaatttttttgtatttttagtaaagacggggtttcatggtgttagccaggatggtctcgatctcctgaccacgtgaaccgcccgcctcggcctcccaaagtgctgggattacaggcttgagccaccacgcccggacagaaacatcttttatacatgtgtctttaaacagtgttttaggctgggctcagtggctcatgcttataatcccatcactttgggaggccagggtaggtgactgcttgagcccggggagttaaaggccacagtgagctgtgattgcaccactgcgctccagcctgggtgacaaagcgagacccagtctctgaaaaagattaacagtgttttacatgcagaacaatatagtgatcacattcatacattcattcttagtgtaaacttgaaattctgtacttatgatgttatattctatttgtggtacattggacattatctcttaattctgtattcactgcagacagaaggaaaaactaaagagcaatacaaagaaaaaatacaatatatatattttttaaacttctaagaaaacatgtacaaggtcactggattcacaaatatttctgaggtattaaatattttagatttcttttgtagatcagta

SEQ ID NO: 37639 - DNA, 1193 bp, Homo sapiens
tacttttaagttttagggtacatgtgcacaacgtgcaggtttgttacatatgtatacatgtgccatgttggtgtgctgcacccattaactcgtcatttagcattaggtatatctcctaatgctatccctcccccctccccccaccccacaacagtccccggtgtgtgatgttccccttgttgtgtccatgtgttctcattgttcaattcccacctatgagtgagaacatgcggtgtttggttttttgtccctgagatagtttgctgagaatgatggtttccagtttcatccatgtccctacaaaggacatgaactcatcattttttatggctgcatagtattccatggtgtatatgtgccacattttcttaatccagtctatcattgttggacatttgggttggttccaagtctttgctattgtatttcaccatttttaaagtacacaattcagtggtttttaatatatttactgtgttatgcagtcaccaccattatcaaatttcagactgttcctatcacaacggggtatggtggcttacacccgtaatcccagcactttgggagcttgaggtgggaggattgcttgagtccaggagtttgagaccagcctgggcacataacgagacccatctctaccaagaaaaaaaaaagaaaaaaagaagaagaataagtaaaaaattagctaggtgttgtggcatgcacctatggtcccagctacttgggaggccaaggtgggaggatcccttgagcccaggagttgaaggctgaagtgagctatgatagcgccgctgcactccacactccagcctgagtggcagagcaagactgtgtcaaaaaaaaaaaaaagaaagaaaaaaaagaatattcctatcaccttcaaaagaaacctcatacctattagcagatacgtgttcttggatatatgtatacctaggagtgtcattgctgggtcacatggtaattctgtgtttaacgttcttaggaattgccaaactttttcccaatgaattcatttctgttagttgcatacccttaattgttcagttctcctgcaagtacgcatccctctttggttggttgtgccttttgtgatgttctgggagagacacgaagaggagctctgtgatgcggtgctgcttgatgcagcatggaaactcattgctttttgattggttttgtctgcaacttgt

SEQ ID NO: 37640 - DNA, 1035 bp, Homo sapiens
atgtctgccatgttggttgatacagaaaaagctttattaaaatagctaaaatgacccaaattaacaaaactttcaataagaaaatgtagaactatttatgaaaatttacaactctttattattttttatctttaataaagataaaagaacaaattcaatagtgtgaaatacctgtgatagatttgctatctgtattccaaagagctgtttttataaattttcacatatatttaaaatatttacatctgctttatgagatttctgaagatttttaggtagacaatatactggataagatatattgctaagttgggttttggtttgtcatagttgtccggggtagtgtgacacctccttcccgcttcctgtctctcttcagtaatttctgtaagaaaacctatcagatttaacaaactagagcaatgataatttttagcctgatattaattttaagctccatttagttttcagcttcctctttgatgaaaaatgtggctataataatgaacacctcctgctgaacttgaagagagaccgtgtagagagtagagctggatttaatcttctgcttgctgcagaacgcatccaagtgggttattacacaagcttagactacatcattggagatactggcattacaaaaggaaaacacttctgggccttccgtgtggaaccatattcatacctggtaaaagtgggagttgcttctagcgataaactacaagaatggctccgttctccccgggatgcagttagtccaaggtaggtttttgtattgatctagaacttgataattttttaaaagtaagcctgaaaatagatttggctttgttacatttggagtatacatttcttatttcttagattctagtattttggctgtggcttgattgagaaaaggagccgggtattcttgtaatcacacattgaataaggagagttagcagttactttttaatatcatgaggaaatccattttggatatctcttaattgtgatatagcttcacagttttaaattttgaaagtctttaac

SEQ ID NO: 37641 - DNA, 1058 bp, Homo sapiens
agaaatcattaaatactgtttatatgtcattttattgaggaaaaacactggttttcaaatgtcaatattttaatgttgttttctatttcataattctttcaggcatagacgtgccagagatcaatgaggaacagagcaaagtttataacaatgccttgataaattggcaccatccagaaaaggataaagctgatagctatgttcttgaatatcggaaaatcaatagagatgatgaaatgtcatggaatgagatagaagtgtgtggaacaagtaaaataattcaagacttggaaaacagtagtacctatgctttcagagtaagagcttacaagggttcaatctgtagtccttgcagcagagaattgattcttcatactcctccagctccaggtatggtgaatatcaggaataaaaaaagcatagagttagttgcaagagaccttgataaaataaactagtcagtatctccatgtagacctgcactgaaaccagctcttgtttttaaaagactccagaaaagtagcttctatcccagctgggctttagaaatgaactgagtacttgaatttttaccttgtaggctgagaacaggattgggttttaactgatgtcagatagagaaaaacatggaaggaagaaatttgggtgagcagagctagtaagttgggatttaaatagcataaatgctattttaaaagttttaaatatataattctgtatttttggtttatggaaatctctaaaacataatttttaaaatttattggtctaatatcctaaaatataattttgatttaacctaattctgatttgtctggatttttttatctaactaggcacttctcagataatagggatggaagccatatattagaaccacatgaatagcttttcctcccacgctaaaagctccttatgcccagtcatcgccccctcccttcccaagttaaaaaccactgatactacatatagagcgcctaaagatttttatagaatgtgaatgactttaaaggttcgttgatgttcactatgatgtctccatgaacaagggatattta

SEQ ID NO: 37642 - DNA, 1051 bp, Homo sapiens
taaggacaccagtcatattggagtagggcccattctaatgacctgattttaatttaatttcctctttaaagaccctattttaaaatacagtcacattctgaggtacgtactgggggttaggacttcaacatgtgaatttccagtggcgaggggtggggtctgggggactggggaaggatgcaattcagtccataacacttgcttacgtttgtattttgctactccctagcagggaggtcttccttgcctttttttcttcttctcacctcattcctctccctaagatttctcttctagtgatggtgaacactacaaagatatatttatagtataattactttataggtgcagatttgtagatttgtacattaatacaaggaaatttgtcttgttaaaagtttaaaactctgaaggattactgtgacctccttttcaaatctatacctgaatctgatacttacttactatgaccgtcttattttttcaaatagatatttgtcatcacttaaaatgctgattgtatttcatacactatactgtgtttccaaaatgtatgcttgaatagtatatatacaaatagatatttgcttacttgtgagtcctaggtcctccctccctgtggatcccaaaatggttgctggaaaggtaaggttgagggtgggttatcctgggttataccactgtatagcaaggaaccaataaaacaggtggatgagaatgggatagtagtcacctagcttctggctgatggatcttcccctcattttttgctacatgcatttttttttttttagtaagctatgtttcaaaaaaagaaagaaaaagagtatggggtaggcgacatactatttgttaatctgtaactttttttttaaattttaaaatgtattttgaataactttccagatctcattatggctgcataacattcagttgtataaatgcagcatacacagaaatgcttatacattggggaataaggagaggaaagagacttctgcttcttattcatgtccttctctgtgatttgtcataaatgtgtgtgtgtagc

SEQ ID NO: 37643 - DNA, 1050 bp, Homo sapiens
gaaagtggaatttgtaaagttcatcctgctctgaatgtaagcacacggacttctgaacgccttctagatctccatcaaagctggaaaaccaaggactctaaacaatgctcagagaatgtacatatctccacatgactgattttagattgggagggtggggggatttgtagcataactgtagctcaagtttaaaagccatgtataaccaagtgtgctctttttttaaaaggtagagtcttacaatcaaatctcctgctgatttcactttgggatatggtcttgagccagtaatctttatactgggtttcaagaaaatctttgttgaagtttgaaccacaactttgtcgtggttcttaaatgtttatactgtatttctaagaagttgtttgaggcaaattaactgtatgtgtgtaggttatctttttaaaaactcttcagtgcaaattgtatcttattataaaatggacacaaattttcaagtttacacttcatatagcattgataatcttcaggtgaacacttagtgatcatttaaaaagctcactgctgatcgtagaaaatttgctttaattaattaagtatctgggattattctttgaaaacagatgaccataattttttttaaagaagagtgacttattttgtcttattcttaagtaaagtgtgccaattaaacctgtgtggcctatataaatgaagttaataacttcatagtaagaataaataggtttaactaatgtgatagttttctaaaaggagattgtttgaagacaactattatgtaactgagggaaaagcaacttaactgtatgtgattgtgaatgagaaagttttgtgctatgtgggtcatttatctagacattgctgtggtgaataccagttatgtttgattttattctcaaatcattagttgcctttttttttttttttttttttttgctttctaggaagaaaacaatcttttttatctagaaggaaagatactttgtgttttcatttttagccatttgaagtttttaatttattgcccccagtgtgttagctgctcta

SEQ ID NO: 37644 - DNA, 1048 bp, Homo sapiens
tctgttttgattttggagtgtatgtggggagattcaaataatggtacccaataatggctaccattattctcagtgaccccagactgcctcagaatagacttgtttcatgtttataatgttctatcagtatgaaatccttacattttcctccagctcacgtatacttgcaatggtaaaggagtaaggtttggagcttttattgagtagggattgaatatgtagataactttgaataatctattctcagaatgtgcctagtgtatgcatttagtgatttggcttggtgaataagaagagaaaatcaggtatttgaaaatgcctaattctacttctccatggggaaaaacgcatattttggaagatgtaaaggagaaataaaatttaaagagacctaaaaaacttagttcattggcaacttatttattcatttattattattattatttccctattaaactgaacaatgtttttctttttcagtcctatgacaatggactggcacagggagctggacttgaatctcatggtaagacatcttaaataagtgaacatgtagtttcttttgttcccttagacaacatcttggtgtcttcagtatggagaacctcagaagtttttctcaacccttggtgcagcataattttcttctttgtcactttcctgattctcttttgacaccattttgtctatttgaagcctctttggtcagtaatcattcaggtgttattcaggctgggatgttcatatgatgttttctagtaatctattcaagtgttatctgcatgaaaatatcttgggattgtttcttacactatcattagaaaacaacaggttttctttggcataactctaaaaggctagaccaaatatagaatattaaatatgaatgcacaagttcatgaagaaatgaacatttttattttccttaacaaaattattattagtcatagttgtaaaacattttgctgcttagcttatattcagtgcaaacattaatacagtcttttctttcatgtttttttccactttggcagaactagaataatga

SEQ ID NO: 37645 - DNA, 1055 bp, Homo sapiens
tacttcaaagccaagtggattactggactcagaacgaaggtctagctaatgtggaaatacaaagtacatattttctcttcagctttaaacctttagtttgctcccatgtaaagaagcaatgagttaaagtaaaaacacactaaatgagttaaagtaaaaagacagtagaccctattgtgttattaaccgttaccttgaacaatcacttaacctctgggcttctgttttctgttctgtagaaagggggattgaacatgttgatcacataaaaattgatctgacaggagaagtatgaaaggactgtataggcagtgaggtgggctattaaaaaaaggtacatgatagaaataattatgttttttgtgactcatatggaaattaaatgaggaaattcccataagcacctagaatggacctggcacatggtaagcattcagcattagccagtatgaaaatggagactaaaatagtctgtttctgaaagattgtgtaattaaactgctttagaatctgtgcaaaaataaagtgtactttaaataagcacatgcttttattttctaggatcaaatctaaatcgctgtggtttccgaggctcttcatacctgggtattccgttcaatccatcaaaggttggttctatttggttcagaaggaagtagaagggatgtagggatattttaataaaagagaaaactaagaagttacacagaaaaaaacaggcttccagatttcaatgtggctaaatgttgtctaataatatatatatattataaactgaaatcctttaaaggaaacctatacctactttacttcctcaaagaagtgcactttcttccgggaagaatacatgcagtacataaacacacacaaatttctattaattgttacaaaaaattgtctcagtatcatacatctgtgtgtaaaagttattggtgatttcctgagtaaaggaaaacagagcactgaagtgttttgatacctgctgtgtaagaagccagtaaactttgttgtgtttatagaaagactctacatttagctcacatttcttaggaata

SEQ ID NO: 37646 - DNA, 1034 bp, Homo sapiens
ctcagaaatgtgagcaatccagatccactgagacttttgaaaaaagtcatcttacgagcaaaggccacattgttttgaatagaaaaatcaagaggcagtagaaaaaatgctttgactagtaaacatttctttgagatttttaaacttcaaccatattgcttattttaaagactcaaaatgttagctaccccagaaaaaaaaataacgcctgattgtggcagatacctaaaaaggtccatttttacaaaaatattactctggctttgcattagatcaggatttcttaaccttgatactattgacatttggagctagataattctttgttgtgggggcctgttctgtgcattataggatggcatccctggtttccagcgggtagatgcttataatgtctccttaattatgattatcaaaaatgcctctagccagttgtccactggaggggaaaaatagcccctagttgagaaccacagtaagtcagagtcttttttttcttttgtagagttcagtgatgacgaagtttgacttacctggtttaacaaaaaggttgtgtttattccatagatggtatacccaaggaatattaaagaaataattgagtccatgtttagtctaaagttttagagggaatagctgcatttttgttgttcttgtcattctcctccctccccccagcaataaattgaatgtagggaaattgacttctcgggttttaagaaaaatgtttgaaacataagtcatttgggcttttttccccagaatgctgaaaacatgggattctcaaagtggtccctagaccagcaaaatcagcatcacctgggaccttattagaacttagcgggctccaactccagacctaattagcactgtgagggtaaggcccaacaatctgtgctttaccaagtcctctagtttattctgctaatgaaaaccacctctttaggaaaaagaaacagacacactgcttcttgtgataaaagtaaaccattcagattctagcttattttccttgttcccatctgctctatttc

SEQ ID NO: 37647 - DNA, 1095 bp, Homo sapiens
tttattatgtgtatatgaaagtgttttataatgttttataaatgacgaacatcatatatttaaattgctcttcttcctgttttacaaatgaggatgttgaggatcatagaggataaacatctttccataggttacatggttaataaatggtgtttgagggactcttaggctggctccagccactctgaaagccattgttcttcttactaaccagtgatgttcaccaccaagcctatttgaatatgtgggtgtgatctcactaaggaagacagtgaatcaatttaatgaaaagtctgtgctcttacttttttttttttgagtggctttttaattgatctcaattccttggtttctgctcctttcagatccattttgcccattatgaccaagctatttgagaagcttccatttattttaaattttcaatatatatgaactttttctttaaacaaccattgatatttattgaatgttcaatgttgtcagcagtaccagcatataaatatgaagaatgttaaaaagaattagaactcaaggcaccccactctaccctacagttgagagctttatcaaaacgttgctttgaacctacatagtatcaatttgccaaaggacatgagaaaaggagcctattataaggaatggtctctgggtcagaattggtggcaggtctatatttagaaattctaccaatgaaaaagtgtactgttagaattttgaaaagctataccatatcgtagcttttggagactaaattctccttgcatttacataatacttttgtcttttcccccacttttattgaggtataactgacaaataaaaattatatatatttaatgtctacagtgtgatgtatggatgtacacaaacattgcagaatgattaccacaatcaagctaattaacatatccatcacttcacatagttaccttgtgtgtgcgtgaagggttgagaatatttaagatcaactttcttagaaaagtgagctgagattttcattatgttaagtgaaataagccatacacagaaagacagacaatgcatgatctcatttatatgtggaatcttaaaaaagtcaaactcagaaacaga

SEQ ID NO: 37648 - DNA, 1045 bp, Homo sapiens
tagaaattctggagttaaaaaatgcaagaactcaaatgaaaacatcactagagagactcaacaccagatctgagctggcagaagaaagtatcaacaaacctgaagataggtcaattcacattatccagactgaagaacagaggcaagaaaagaatgaagaaaaatgaacagagtctgagatctgtgagataccgttaggcatactaccatgtgcataatgagagtcccagaaagaaaggaaaggagaaaaaaggaggaaaaccgatatttgaagaataatagaagacgtcccaaatttgatgaaaaacattaacctacatatggatggagctcaatgaactctaagtagaataaactcacagaaattcatatctagacacatcgtaataaacctgccaataaatatggacaaaaagtcttgaaagcaccaagaaagaaacagttcattacatataaggaattcctcaataagattaacagctgttttcacatcagaaaccatggacaccaaaaggcagagggatgacataaaatagaaaaagactgccagccagttgttctttgtacagcaaaattattctgtaagattgaagaagaatttaagacatactgaggcaaacaaaagccaaaataacttagcataattgccctacattaaaaggagtccttcaagctaaaatagaaggacactagacagtaacttgaatccacatgaagaataatgtgaatagagtactgcaaatatataggtaaatatgaaagtcagcataaatgtatttttgtttttaacaaatgtttttcagaaaatagaggaggaaggaacatttttaatgaacatttctcattctgtaaggccattattaccctgataccaaaatcaaacaaaaaacatcacaagaaagaaaaatacagaatagtatctgttataaatacagatgtaaaaatactcaacaaaatactagcaaacatatctaaaaacatgaaaaggattatacaccatgatcaattgcagtttattccagacatgcagtgttggtttaatata

SEQ ID NO: 37649 - DNA, 1029 bp, Homo sapiens
gtgaattttatacaattgaaagtctttttttcttgcttctttcttctcttctcaagtttcccccctgtttctactttattgtttgtcctaaccatttctactacagttttttccttatggacccatactaggttgtacaaaccttaaggactcgttaccatttgcagttaccataagtgctttatcttctctatgcacaggcttaaacttgactgttgtatgttagcatattttctatgcagcagttggtcaacttcaactcaaaacactgttttcttatgtttgttacaaacttaattttttgaaagtactctgtagcatgacaatttttagagctgcaggttagctattatagctcaagcttttttgtttgtttttttcttcactttcttcacatctgaggtttctttctctaatccactgaaattattgtgtgctaaatttgggaaacagatctattctaactcattaacccagttgaaatttaggtctgtcatcttaatatatcatgcagtaaaaggaagaatctttttaaagtgacccacctttcatgctgctccagcattgtcctgcttgtgctgatggtgtgattaggtgtagagaatttgcttaaatttaacttcaaagttcatcacacagcttaatgagtcacattgaaatactcagtaattgaactgcaaatcacttttagttacaaaaagagctaaagcatgtcagtggcatgatgcttgccaagccagatctaggcatctaggataattaaggtattttagtatgcaatttactgccataatatcaaaggtcagtaacagtgttctttctttcttcaagcttatgtatacctttaaagataacttgcatgaattactttgattactttggtctcaattatttgtcaccccagttaaacatgaaaggttgcagtgcttcctgttcccttactggaagttagctttttcttttctctttcttcctttctttctctcactctttctttctctttctctttctctctctctctctctctca

SEQ ID NO: 37650 - DNA, 1065 bp, Homo sapiens
gtttttcaaagcagttgtaccagtttacattcctgtcagcaatgtaagaagagttccagtttctccacaccctctccaacacttgttcttcttcttcttcttttttaatatagccattttaggaagtgtgtagtgatatctcattgtgattttgatttatatttctccaatcgctaatgacgttgagcattttttcatgtacttaattcgtgtggttattggctctctctgtctctattttctttggaggagtttcttcattaacctttgcatgttttataactgggttatctttgtattactgaactgtaagagttgtttatatattcttatgtatgtcttttatcagatatatcatttgcaaatattttctctcattctgtgtttgttttttttttttttaacttttttgatggtggtgtttataccaatttggatttttattttacaaacggatttttaaggaaatttatgtgtcacttatataatgtcttacttaaacaagaaaattgttaggaatagactgcagaatttactgatactatgccatttactatgcaggaacttttccatggatgaaactttgtaatctaattgtaaaacacaaccccttcctgctttggcatatggttaaacttagagtaaagaggaatgatacaattttatttctatatggtgtaaaacagggctgtgacctagccctccttttaaatttatgttcatatgacttgatattgctattagatatattagctatgtggcaagtatctatatagcaaacaagaaaataagaatccttctctattttcttgctactcaaggaccagcagcgtaggtatcacttggatccagcctagatgatctgaatcaaaatctgcattttattatgattctctggtgattttatacatgaaagtttgagaagcacagctttatttgacttatgctaaacacacacacaaagcttgaaatacatgaggaatttacaaacggcagaatctactgtgtttgttaaatattttgcagtccttaggaggacatttttgtttttttataaagagcagt

SEQ ID NO: 37651 - DNA, 1072 bp, Homo sapiens
tatgctactagaactattttttgttgcctacacacattcaatatgcagcatgggttggcgggcaggacacatatgcatttttacatacccacaatcctatccttggaaacctcgcaacttgtagggaatagattttaaacaaagacaaaggaagatgccaggccttgttcccatgtgcagtacagcccccagtcaggcactgaaaagcagaggagcccccttgatcagcaagagatgtgtgagctgttaatgatgagtatgagtgcggaggaagctggtggcatgaaggatgcaagagcatggtgccatgattctaacaagtagaaagttgagccataaactagaaaagcaggaaaatggagtctaggagtgccagctttgaagtcagttaggaggaagaatggctcagacctggatgccttcagtggagttttgttgctccttacacttaaaaatggtggatcaactttgtgttcatttgattatggagggcagagggtgtaatccgtttaatttagctcttttctggggcttagcaactcccagataattttgcctcatttgggaataggctgtatgagtttagttatactattccccttgggttgggtggagaagggagtaagagtatcactagtctactctgctcctttctttcctgactaacttaagttctgccttgaattcaacaagctgtttgctggggttaacgctttccagcacaagtcagggatgttttccgcttcagtccctcatccttcaattttgcagatcctaatgcattggttgtcaaaaccacttcactgcatagaaggtaacaccactagtaacagaaataacttcccttggccctctcatttgcaacagctcattcctaaggcccaatcccagttcctgatggtggatgttgttccagcctggaaagctgaatcacttcctctccagtaacgaataaatagactagatttcactgagtcatctgtctgcccagcaaaggaccctgcaaaaaagagatcaaagtggttttcacagtcttgttgcaaaggaaatctgagttggggcccaagtattc

SEQ ID NO: 37652 - DNA, 1072 bp, Homo sapiens; identical to SEQ ID NO: 37651

SEQ ID NO: 37653 - DNA, 1072 bp, Homo sapiens; identical to SEQ ID NO: 37651

SEQ ID NO: 37654 - DNA, 2363 bp, Homo sapiens
gccttaacagttgtcccagtgaaaatgagcaggggggtttcattgcaaagacaactggcataaatgtatgaatgaatgccagattagtagcatgttagtcaaaagaggaattgagatcaaattgaaagaaaagctgaatatgatagatgaagtctacagaaagtatcacacatactgactgaaaatatttctctgcagatggaatctgcctgtgtttcaattcacgaagctctgaagtctgtcatcgattatcagactcatttccgtttaagagaagctcaaggccgaagccgagcagaggatctaaatacaagagtggcctattggtcagtaggagaagccctcattcttctggtggttagcatagggcaggtatttcttttgaaaagctttttctcagataaaagaaccaccacaactcgtgttggatcataactacgttttgagaattgatgcaccattgccactgtaatattgctgtcctctaattaattttaggtactgaagaacttaatattggcaacatttttaaatccttactcatacacttgttgggagggatgtacaatgcatattcccaaactgtggaaaggacacctttttttatttgtaaaggtggaaaaactttggaactcattttgggctattcatgttaaatattcaacaccaatgatctactctgttcgcagttgtttatatctactcttcgcacactaaactttggtattttgattccttttaaccatttaagactacttttcttataggtagttgatattttaaaaactttagatttaatgtctacatgtgttagggaggaagaaaattgccttttaattgttaataagaaaaccaaatgtgatgaactgtagcccaagccctattctgcactgttcagttttatggaggaaaaataaatctaccataggaatgttagttaatattgatatatcatggtaaaattgatttctcactagcttagaaaatgtcagacttttgtttttggggtttataatttaaaccagctatgctattttttcataaaggcatttgtagtacacagaaaacagtagtttcagtagtgtaaaagagtttatacaggccttaaatatcagactttgtaacaggtagaaatattacagaataatttaagacactacaatgggggcaaatgaaataggaaaatttttagtgagttacacgtactcattacattttcagtgcttttacaaggaaaaaaggtgatatgtttaattttaaaattttaattggctagctcttgcccttatatgactttaatgtctgtgagtcattcccagcttaaattaacaattgttagtattagtctcacacataagtgccatacattttatcctcatggatgtgatgcactgaaaagttagttgctctccttttttcttttttttgtcgtgcatattttatttctgtagtttctggttagctaccctaaagtgatttaaaaatttagaatgctttgtgtttcctatttggtaatcttcattgacttttctttagttaatgagtattaaatagtgcatattctgtagactatagggtttacattgtgttgcatcttataacttgtatagattgagctgattgaaataagattttgttccaagtattatctgatagaatacaagatgattcaaaattatatagatatttaaagcttttctgctgttttttttttttttaattgcaactgcttttctgccgtgcctctcttccctacccaaaagtgatgagttctgaacaagacaagactgtcatattgtagagactttggtatgtgataccatagaatactgattggatagccatcctagtcacttaccaatactgactagaagttaactcttaattctaagctatcttaaaatgcatatatatacttcttgcatggaagagcaaaacaaattcaagttgtcatgcctgataatttcagatgccaccgtatagcaaagggtgaacatgttttcaaccctttaactttttacggtgtttgaagaccagctactccttaatatttatcaatggattaagaagtttaagattttgcagatttatcaatttgggtttttgtactgaagttgtcttgcggctttgcaagtgtccctttatatttaaatttgaaagttgtaagcactgatgttaatgtgattgatcagcatgggcatatgtaaaatgtccttttctggttgcctctctatgctattgtgttcagatacttacaccataattaaacagtaagttatagacttgctgagtttggcatagatagtgcactcatttaatctgtgcctctcaaaacttcagaatattagcatattaccacaaat

SEQ ID NO: 37655 - DNA, 1048 bp, Homo sapiens
ggaccccatactgaggagaaatttcaggaagtgaaatgaaaattgaaaagggtagggacatgagaaaggaaggaaagagaaagaccagatcaaaatggtggggaacagagcctggaaagctcaaagcaggcctccatcgttttgaatagtatacaaaaaacaacaaggggagctctgtgaagttagaaaaactaccctaattcacctcattctaaaagttgaggaaaactaatttcacataaaaacaataacaggaataacaaggtcaaatcccgtacagtgttacaagaaaaacgagatgcggaaaagaacagcatccctagagacgatgaaatcaagccagaaatatacacctataagacaagtcgaaaattgtaaccttgtatttcaaaatgagctaaaaacaataagatggtataagacatgaaagaaaaacgatcagcattagtaaaactaagaaatgaagctcaggaaaagaattagaaataaaagaaaattatttcagaaatggagactaaagtaggaggaacataaacaacggataatatgttaagaaaaatagaagatgaaaaaaatttaaaaagtgagtcaacctttggacaagagtctgtgaagaaaaccagagcaagggaacagaaaaaatactgtaaaaatgtcatttaaggtaagagatttgaaactacatattgaaaaaacatctgaagtacctgagagtatcaacccagaataatgaacatcaggatgcattctgttaaaattactggacttgaaatcatttggaaatgtaggggacgggaaagagggcatgacttagaaagttaggctgtcgtcaaactttgacagcaaagatgcttaaggaaaaagtgtgaaataaggctttcatatcctgcataactgacttaatcggggcacagactattagcagaaaatgctattccagtgaaccatgaggaatccactagacagagagctttataaccagaataactagagacatcaatttaaagactgctgatttaaaagcagaaagaaaaaaaagctgatttaa

SEQ ID NO: 37656 - DNA, 1031 bp, Homo sapiens
cgctctcgagtgtctccaagcaagatggcggaggagccgcagtctgtgttgcagcttcctacttcaattgctgctggaggggaaggacttacggatgtctccccagaaacaaccaccccggagcccccgtcttccgctgcagtttccccgggaacagaggaacctgctggcgacaccaagaaaaaaagtaactgaatttatttccgggcagagaggcgggaggttcagattgcatccgagtaggggtggcggccagtaaagaagcaaaatttagaggagcgcctgtcctagacctgcattttgaccagtcatcagaagaaaagaagtgtactttttgatttttaaggcctttaagttgagtgttaaaataccatctctgtctatcggtgtagggcctgatacttggctgccacacttatttttatactgtatttttttgagttggccagactgcgagctctttgaaggagggagggagctgagtggggcggggggaggggggtctcggtaattccaggtacttaacacaggagctaattatttgagtaatgttttatggtggtaggggtggtcattggcaaagcctggattagaattcatgccttccaacttaactcgcttttgcttttttccccctcccagttggttgtgaattcactccttaaaccaaaaaccaaattcttatgcagaatgaagactgctaagggaaagctaaaggcatagatgttacctttttaagaaacacattttggaacctttgtgagttatttcattgcttgagtcagctatcctcaaccctttattgcttgagaatgtttccctttgtaaaagagattgctaaaattacgtgttctaaagcactctgtttagagttagagttgcctatgggaaaagcagcatataagcatcctcgattcagagaggctgatttcgtccttagacgttttccccgttctgtcttaagatgacagtggtctctggccgggcgcggtggctcactcctgtaatcccagcactttggtaggctgagg

SEQ ID NO: 37657 - DNA, 1007 bp, Homo sapiens
ctagggcttgcaagccttgcagttattttgacagttgtgctctgaaagactgaaaaccgcttctcgtataattcagtgttggattaaaagaggcaacttctgagagtgtctccctggaccttgttatgtgcacatccagctggtatttaatccaggatttgcctcttgctcagtcttgctggcaaaaaaaataaataaataaaaatacagtacagaggctgatgtcactttcatatttcaacaagaaagcaaagggacgcaaactcttcattaagactattcacaaatgtggaggtaaatgaggccattcatgactttgcttaaaatttctgctccataatttggctttggctttgcagattactaaataaataaaatgacatcatgattgctgtgtgccgtgtgttattttggcaatggaaacatgtagagctttacttcaggtttaacctttccttttttacacttgacactcattgctaaggagctagagaccattttactgtattttgcaacaaaaggctcatacattttggactgtaggtctactgctttgtcaactcgtgaatagtatatgaacatttttcaattatttaataatttcaatattttgctatttttttttaggtttgtgactttagagttgattagagaatgttctccagtggtgtatatattgtgtgacttggtcaagaaaggatttggggagtaaattgctgtaagagggtgatacacatacacacattctggcgatttatgtgcttcacgtgtgatgcagaacacagcttgcttctggttggcaaatttggccttgtgcaacggatagtggtacacttcatgtttcagtttccatttctcaagtggactttcaaggactcctaccagtctaagccaagcaatttaattcctttgtagattaaaacataaaataatctcacactggaagcaaacagtgttgaattcaagacatgcaaagcataagtgaaaatctaggctgatttagaaga

SEQ ID NO: 37658 - DNA, 1033 bp, Homo sapiens
ttacatttttaagtagttaaaaaaaatcaaaagaataatttttagtaacatgtcaaaataatataaaatctaaatttcagtgtccgtaactacattgttattggtacatagtaacattcattcatttacatatgatccatggctgctttcacactgcaacagtgaagatgagtaattgcgatagaaactgtatgactgttgaagcctaaaatattaactatctaatactttacagagaaagtttgccaatccctgtcctacagcatggaacttaggaagagcacctgacattctttcttaagatttggacatcaaagtcataaaatcacctgtggcgattgtaaaaatgaagattgctgggttccaatgttatagtctctattgaatagaaatctttggagccttgcagagtatggagtctgcatttttaactaatgccccaggtggtttttctgcacatcatgaaatgagaatctctgttttgtgcagggaaaggacactggactgctggattcctagagctcagtctaggcagactacgtggttcaatatgaaaggtctttcatgcattatttgagatttctggagtattctctctgtattctctttctatgaccccttctcagttacagagctcctacaaagtcttgctgttgaaataggttcttatttgtcatattgtttaaaatggtggtctccaaagtagagtatacacacagtttagttcacaatcctctgggttctaaaagaaaatattagaattattatttttttctgtaacattttggtgtataaattaaatacatataaagagtgtaaaaataaaaaaagtttataacagaagtatagtgttgtccatttacacccattaccacccctattccttttccccaaaggtagtttcttttgccatttacctctatatttctttttttttttttggtagggggtggggaaggagtacatgtaatagtttaatgcattcatatgagttgtagagatcaaatcagtgaaattgggatatccatcacct

SEQ ID NO: 37659 - DNA, 1030 bp, Homo sapiens
cctgattctcaggttttaaaattctgatagaaattctggaacagattctgtgggagcatcttaaacataatgtcaatagtggatcttcccactccttttaagtaggaaatgaatgataaaatctatatcataatatcaagtatggtgctctcaacttgtctgacttgatcaaaagtcaggaatagcaaagagaaacaatggcttttgctatgtgctgaattttaagatgtgtatgctgccttttgaggaaaaggccacatttattgcttaagggctttaaacttaaagccttactgttcattccccaattattcccccttgacaatgtattatggctatctccagctgagtgttgaagatgaagcagctaatgatttgtcgtggtgttagagttcagggagttaacccaagccaaggagaactattaggaaaactcttgtgattagcagaagagaaaccctgaggggcacttgacagttacattagcagttaaaccacacagaggaaacatggatcctggagcaggcagctaacactgatccccactgtgcagaaagggggatcatgtgtatgctgcccagaatccttacatcctgtgaatgatatcaggattgcctttctagatggggagatttcctcattgcatctctagagctcataatgaaaaatgaatgcgttttctcaaaagggccaaacatatatgacaaaccaagaaaaaagtgtttactagtctacggagaccctcgtaaacaggaggtagcaggagagaagagaggcataaaggtagttcagacaaggaagagttctagccttataaagtgctgcacctgtagccatcggtctcgagaatatccatcccctccttgagccatacagattcctttatgaagtactcatggtagaaaatcttaaataaaattattaaagtgatttcttaaaaatatacctggttatatacatccaaaggagcagtgtcctcatcagaataataagattggaaggttgtacacgtattctgcaatattttagt

SEQ ID NO: 37660 - DNA, 1058 bp, Homo sapiens
ttgctctttggcagttatttacgtggctcacaaatatcatcacacttagttatctactgctttataacaaaccacctcaaacttaatgctttaaagcaaccaccatttatttgctcatcattttgatagctgtattgcactcagttggactagtctcaagtatgctgttcctctgctagtcttatgggattgctcttacagctgtagtcatctggagacttgactagagctaggtgatccaagatggcttcatttacatgtcttttacctcagctggaatggctgaaacaggctctctttgcctttttccatgtgacctattgaacgggatggccagactacttgacatggtgcctcaggccctcaagggaatgaaagcagaagcttccagccctcttgtagctgaagtcttggaattcacacgatgtaattcctaccatattctagcagttgatacaagttatgaggggatttgagtttcatacaaggttataaactcgatctcttgacaaaaagattggcatacacacatgggaatggtaggaattcttggcagctatttttgcagacaacctacttcagtttgccttttggggcaacaattcacatctttccatattcaagactcgctaattcctttccatgatcccaaaagactcatattatggcatcagctcaaaatccatgatatctgcatctgtatgaaacctagaagtggataaggttcatcaggtgtggcttctcttgattttgacaccagttctcttttgaaagttataaatcttctcccactgtgactatattttgagaatagtatatattctagagtaaatttaattgttaatgttatcaactgtatcaatgtaagttgtgcttttggtcttaagaagttattctctatcacattattcaccttatcaacaaatgtaaattacctcataatatctagcttatctttcttccataacaacagtactctacaaagtctaccacactaaaaaattatattgtctagcatcttttgcagctgggtatggatgatacataaaagaaagttg

SEQ ID NO: 37661 - DNA, 1047 bp, Homo sapiens
ttgttttggccaatttctcccatttgggatgggaacatttacccaatgcctgtactcccattgtatcttggaagtaactaacttgtttttgattgtactggctcataggcggaaggtacttgtctcagatgaggctttgaacttggacttttgggttaatgtggaaatgagttaagactttgggggactgttatgaaggcgagattggctttgaaatgtgcaaattacatgagatttgcaagggggcagggacggaatgatatagtttgactctgtgtccccacccaaatcttatgtcaaattttaattcccagtgttggaggacggacctgttgggaagtgatcgaataatggggctggtttttctcttgccattctcatgatggtgagggatttcttacgagatctgatggttttaaaagtggcagttttctattgtgctctctctctctcctgctgttgtgtaagaggcgcctgcttccccttcactttctaccgtaattgtaagtttcctgaaggctccccagccatgtggaactctgagtcaattaaacctttttcttttataagttacctagtctcaggtagtatctttatagcagtatgtaaacagactaatacatcctctaagaccagtagtatttgtttttcatttctttattaaaagaaatattgaggttctagaaatatatcagtttcaaataatgctgatagctattagaaagaaataatactttcaaattattaatactcatataagccatgttatttcttaggcgtatgaacttttcaaatactcaaattatatttttttgaaattagcaatgaaggttttaaaaaattatatcttagattatggtatttagaggcatattaacttatgataaaacagaaagcaaaggtatcagttgaatcaaattcttgtgaaattcatgtgacttaacagatattttaaaaatggtacctacacctttagtactgtatttgctttttctgtatgaatttaaacatagtatgagaaacacaaggtagctagcatgttaagta

SEQ ID NO: 37662 - DNA, 1058 bp, Homo sapiens
cccagctgggttgatcttccttatggtctgtttcttccctgcagggagacctggtccctttcttttctttcatcttacttcacttagctagacattattagatcttcccatactttcaagcagaagcttcttttcttaagctcatgtattataatgtaacagcttagagttggacatatctgagttcaagttaatctctgccacttactatatgaccttgaaatagtaacttaatttctctgtgcctcagtcacttcatttgtaaagtgaatataataataacctccttcctagggttgctgtaaagcttaagataacgcggccgggcacggtggctcacacgtgtaatcccagcactttgggaggctgaggcaggcggatcacctgaggtcaggagttcgagaccagcctggccaacatggtgaaaccccgtatctactaaaaatacaaaaattagccaggcgtggtagtgggcacctgtggtcccagctacttgggagactaaggcaggagaatcgcttgagcccaggaggcagaggttgcagtgagcagagatcgcgccactgcactctagcctgggtaacagagcgagactctgtctcaaaaaacaaacaaacaaaaaaacccaaaacaataaaaccttttccaatttagagagcaatcagaattataacgtcttgagtattttccttttgattttttcccctaagaaaagcacacatcatttttgaatgtttgtggggaaaatatgatgtgtcacccagttctgggcctcttcccatctgtaccctgagcccacatgttcatgtactccacagtcaacacacatccgcccccatccgcctcagcctaacaaaatgaagaaatttactcaacgacagggctggcagcaaatcattcccaatgggggtctgggaacagacatttccaggaaacaacatctcatctcctggaaaggagttggagcctcatttcccctttccacaaatgcagtccttttcttacagaggaggaagaggccatgggagcccgagcccctatcctgtggtatatacttc

SEQ ID NO: 37663 - DNA, 1106 bp, Homo sapiens
ttagcgaagttgcttatatgttggattaaactacaattctcaacacattccagaagattgtaatttagaatatgttctctgaccacagtgatatttagctagaaataaaaagataataagaaatgtccccaaatgagtgaatattaagtagtatacttctcgtaacccatggtaaactggagaccacagtaaaattagaaaatactttgaactgaaaaatagtgcacataaaacacatcaaagtgtgggatttagtgaaagctgtgcttagagggaaatgtataaccacagttgtgtttagaaaataagacaataaatctgctctctaaatattcctttcaaaaactcagtagaacaagaagaaagtaaaatgggagcaaggaaataagatgaatagaattaatgaaatgggggaaaatgtacaagaaaaatcaatgaagccaaaagtcatgtctttgaaaggaccccaaccccgccttagcaagtattcaaggacaagaatagacagtaactacccatatcaggaattgaaaaaagagacaagactatagatctcaaagacatttacagagataagaggatagtatgaacaatttcatgtgaatttgaaagaagaacttccaaaactgatacaccaagaaacagaaaatagaaatagtcttatagctattagagaaattgaatctaataaaaaacctgcccacaaagaaggctccagacccatatgtcttcacatttgaattttagtaaacattttaggaagaaataacactaatcttacacaaagattttagaaaatgggaagtgaaaaatgcttactttttttttaatgagactagcataaccttgatcctaaaagcttacaaggacaaaattaattggccagtcttttaaaacattaaagatacaagtttaagatattaaacttgtaagcatcacaacgaagtttatttactaaacaaatgcaagcttggttatttaccacattcaaagattaaaggagaaaaaaatcatatcaatagctgcagaaaaagtcatattcattaacaaactaagactagacaggaaatttgttaatctaataaagagtttttacataaagccta

SEQ ID NO: 37664 - DNA, 1049 bp, Homo sapiens
agtgcatgtagtataatagagaggagtccctgtggaattggggccaaggaaatatgaagagaatggctgttaaaggtaacaagatataaactccatcagaagcagcataaatagtagaaaggtaacaagatataaactccatcagaagcagcataaatagtagttaagaacatggccctggagtcaagagagctaggttgaattttggttctacctctctgactttgggaatttctctgattagtttcttcatttgaacaatgagaaattttcttccacaggttattctgagaattaaatgagtggttttaaagtgtttaatacagtgtttgatacatagtatgtgctcagtaaatggtaagtaacttgctaaaaagagatgagccataaagctgttctgtggtggtggtgcgttcagtcagtggggacctaattggacagtagctttcgatattgatgaacagaacaaatactagagggctttgtgactgacagaattcttaagtgtgcataattgggggatattgttatgcagtgatagacgttctgtagaaaactgtacagaagcaaaaagtatgtaagggctaaatgtacagatgtgcaagagtgtcagtaggtaaacttcccaagtttgagtataaaggaatgtgagtacattgagatgaagaaacatctgtagttacttcattctttcattcattcagcaagtgcttattgagagcctgctatgcaccttgcacaatgggctgctatggatatagcagttgttcacctaggaggactgatacttagaatatagcagggtggtaagaaatgtaaatgaagtcagcaagtattagaaaaacaaagggaccactgggggctatcaccacatttgtcactcaaagctaagggagaaatatctcaaagagaaaatgattcaaataacactactggataggaaatcatttcaagtttttaactggagagtagatggggaagaagtggaaaatagtgcttccattgaagaagctgagcagtgaacagtcattacacattacccaaatcag

SEQ ID NO: 37665 - DNA, 1049 bp, Homo sapiens
tagtttcacagtaaaattgagcagagagaaatgagagttctcctatatactccctgtccccacatacttgcagcctctcttgctgtcaacatgccacaccagagtggtgatactacaatgcatgaacatatcatatcattcatatcagtgtcacccaaggtctatagtttacattaggtttctctcttggtgttggacattctatgggttttgacaaatgtaaatgacttgtagtatccactattgtagtatcatacagaatagtttcaccaccctaaaaatcatctgtgctccacctattcattcctccctcctcccatccccttggcagctattgatcttttttactgtctccatagttttgccttttcctgaatgtcatatagttggaataatatagtatgtagccttttccagattggtttctttcccttagtcataagtgcatgtaagttacttcatgtctttgcatggcttgatagctcatttcttttgagtgcttatagtcaattgtctggatgtatcacagtttattttttcactcagctcctaagggacatcttggttgcttctaacttttggcaattataaataaaggtactgtaaactgctgtaaacatctgtgtgcaggttcttatgtggacagaagttttcagttcatttgggtaaatatccaggattgcagtcattggatcatgtggtaagagtatgtttagttctgtaagaaatatccacactgccttccaaagtggccgtgctatttggcattcccactagcaatgaatgagaatttctgttgctccatattcttaccagaatttggtggtgttagtgttttggattttggccattctactaggtatatcatagtatctcattgttgttttaatttgcaattcctcaatgacataggatgttgagcatgtttgcatatgcttacctaccatgtgtgtatcttctttgaggtgtctgctcaggtcttgggcccatttttaaattgggttgttcattttcttgttgaattttaagagttctttgtatattttgga

SEQ ID NO: 37666 - DNA, 1039 bp, Homo sapiens
gaggtcctgagatgggcctctgttaatgctaattgggagagctgtgcgatgtgtgttaatactcctaatacagagtttcaatgagagcctcaggctttaactcacaaggttagcagtcaaggtctttttaacagcttaattcctacacttcccccacaagtagcttgtaccagggtgagtagcagcagggatttcttcattaatcaatggataaaattcccctcaataagatccaccttaacagatttataaacaagagaactagttgactcagtgcaagattcttagtgcttcttcgttgatgttctttagcttcctattttcagttttttttggtttgtttctcttaactagatcctcagtttttttagagcaagtactctgttttactcattttgtaccccaccatctgataaaatacctgactctgaatatgtcttcagtaaacattgatgaaatggggtttggcagtacaaatgaaaagtgatgtgtagatagaatatttgaatatttcctgatagtgtacagtgttgtccttgagaatagaatgaaggaatccatgtggctatttttctttagctaatttggaaagtattctgtttttttttttttgtttttgtttttgtttttttttgagatggagtcttgctctgttgcccaggctggagtgcagtgctcactgccacctctgcctcccgggttcaagctgttctgcctcagcctcccgagtagctgggactacaggcgcatgccaccacacccggctaattttttgcatttttagtagagacggggtttcaccaggaaagtattcttaactgagttaacagaaaaattaagctgcaggcaaatttgtttttactaatttatttcccagctcttcagatgactgttctctattaagtagtgcaatagtagtacctaaaattcgtgtaatcacattaagtgtttaattccagatgttgttgagatcattcctactcaaagtgtggaccaaggacagcagcattcacatcaccttggatcttgttagaaatgc

SEQ ID NO: 37667 - DNA, 1050 bp, Homo sapiens
aactgattttgggaatccgtgttttcagggtagttaattggagaaagaaatgattctctctctctctttttttccttttttttttttcttgagacggagtttcactcttgttgcccaggctggagtgcagtggcatgatctttgcccactgcaacctccacctcccgggttcaagcaattctcctgcctcagcctcctgagtagctgggattacaggcatgcgccaccacacctcgataatttttgtatttttagtagagacggggtttctccatgttggtcaggctggtctcgaactcctgacctcaggtgatccacccgccttggcctcccaaagtgctgggattacaggcgtgagccaccccgcccggccgaaatgattctcttttaaatcaccagagatgttctaaaattcttctgcttctcctatatctccaaagtcataaagatgatagtatttaaatgtgcaatgtaggaggaggttcaagctaattctttttttttttgagacagggtctcagttcatcgctcaggctggagtgcagttgttgtgatcatggctcactatagccttgatctcctgggctcaggtggtcctcccacctcagcctcccaaatagctgggaccacaggtgcataccaccacaccagctcatttttttttgtattttttgtagacacgaggttttgccatgttgcccatgctagtctcgaacccctgggctcaagcaatccacctgccttggcctcccaaagtgctgggattatagtgaggtatctcactcagcctcaagctaattatttaaaaggcaaatgatcctatgtaatggaaaatgaatctgtggtattgttattctcattctgcagtattacttgccaatcttactactgaaaatagaacttttcttttgaaattctgattaatttgaggtgagattaaacattaatccaggcttactttgtattttcagtaacagcatggagttggtacagtactttacagagtgaaatattatttattgaggtatatcatagtgactttatcaattc

SEQ ID NO: 37668 - DNA, 1063 bp, Homo sapiens
gttgtagaggcttatatttactttctgaattgagccaaggttcttgcacatagtgaggatcattgtcatgatgtggctgtggccagctggtgctcagaagtaatgaggccagggccaaagacttaagccctagtaagccggtcacttctcttctatggccagagacgtaaaaccttttctgttccttaactcggcaagccatttggcaaatgcaatccattagccacaagagaaacaaggttcaaaggaaatggatcaggattaatctatcattgctattggaatataaatcagagcatatgccatgctgatagtggatccaaatcatggttgaccatgtctcatagcacatgaccaccaggtatgaagtgtttcatatggccagtgtcactaacaagccaaccaataattgaaaactaactaccaagaagatctgtagtgctccattggggagtgagtagagtagaagagataaggaagaagcatgctccagggtgcttcagagtggaccagagaacaaagaaaaatgaaggggtgggggaacttttttttctctgtaagttagatcggtcaaagataagggagatgacagttgttgatatcatggtcatttgccagaggagtaagggcaggatgagggtaacaagaagggtctgagactcacaattattcatcagattcctctgaatcaagggagaaaaactgagggccgaaactcaaagggagaaggtgaaatgtattcaaaagtggctgagtggatggggaatattgagggtaattgctgggcaagaagtagttgagaaaaaatagttaaggatagtgacaaactgggaaatgaaagaagaagataaaaataaatgaaaatcagatgacaagtgttgagtataattcttaaaagatagaaaacagctcaagctgtttcaaggtagaaaacaaaggttgttagagaactctgaattctacatattacattaaatatactcttgtgcgatatgtttcgtagttaaataaaaatatttgtagatagcactggtaagtataaataaagacaatacacaagaaa

SEQ ID NO: 37669 - DNA, 1052 bp, Homo sapiens
aaatcactgttacctccaaataaaatcttactatgtagttggttctaaagaaccttaaatattcaattataaattcatccccaggtattttgaagtgtttcatttaatttgaaaactgtcatctggttttcagagactacagcagtatgtttttaatgtgttggtttagccatgtgacaaattaagcaagccctatgaacatgtgttactgagattggtattggcaaggacaataataactaacatttgttgagcacttatatgatagagatactacgacgggctttatgtaggatctcttgtttgatatgtctattacattaaatacaattaggtaatactataatctccactttataggtgaggaaattgaggcttagaaaggttaagtaaattttcaagattatactagtaagtaaatgatctgagattgaagcacagagaccacactcctatttattacactatattacccagttcaaaagcattagtgagacatgtgatgtgtgacattgacctgtcatcctctgtgagaagtagcttctgggactgatggtcttagttgtgcatccatgactagacttctggatgaaagaactccaagtttctaggagggcttgtttcatttctagtcctcaacagaatgtgtttgagaacttgattttttcatgtaattcattcacttatggggcaattaagataaaatatcctggttttcaaactgaaaatgttaccaaaaacacattgcaattacataggatggttgtttcttcttttgggaatagagacgtatcatagattgacaatgttgttttttttaaaaaagtttacttctttgtcagctccgtgaagggagggatcttgtctgtcttggttgtcattagcacccagcacaatggctggtataataaaaagatgttcaataaatatttaatgttttatgttatgactgcttaagttagaactggaatgtggctcctcatatctcttttggtttatgactcctaggtttttttaagagagttaggtagtagtaggtacatttattatta

SEQ ID NO: 37670 - DNA, 1031 bp, Homo sapiens
tccttgcagttttatacataaagaatcatgtcatctacaaatacagatagttttaattccttctttttgatttgaatgcccttttgtctattttttctaatgtgattgctctttctgggacttccagtagtatgttgaacacaagtggcaagagtagacatccttgccttgtaccaggtcttcgtggaaaagcttttagtttttccccattgattataatgttagttgtagagttttcataaatggcctttattatgttgaagaaatttctttgtttacctaaactgttaacagtttttattggctgggtgtggtggttcactcctttaatcctagcactttgggaggccaaggcgggcagatcacgaggtcaggagattgagaccatcctggctaacatggtgaaaccccatctctactaaaaatacaaaaaattggccaggcatggcagcgtgtccccgtagtcccagctactcgggaggctgaggcaggagaatgtcgtggacccaggaggtggagcttgtagtgagccgagattgcgccgctgcactcagcctggctacagagtgagactccgtctccaaaaaagaagaagaaaaaaaaaatttttatcaagaaaggattttggactttgccaaatgctttttcagtgtcaattgagaaagttatgtgggtttttttgtatcttttgttctgtaaatgtgatgtatcacgttgatttccatatgttaaaccagccttacatgtcagggataaatcccactttgtcatgatgtatattcttttttaatttttatttttatttaaatagttttgggggaaaaggtggtgtttagttggatggaaaatttcttcagtgggtaatttctgagattttggtgcacccatcactcaagcaacatactctgtatctagtgtatagtcttttatccctcatccccttcccatccctcccccaccccaagttcccaaagtttgtttatcattcttatgcctttgtgtcctcatagcttagctctcacttacaagtg

SEQ ID NO: 37671 - DNA, 1029 bp, Homo sapiens
ctgttctcaatcctcagtgtgtgtggcagcatgtggtcatagagagctgggcaaagttcactttctctttgctgacagtctcaccttttctcactgggaagctgcacaggagcctttgggctggttcagcccagaggcccctgttctcctgccttcctggcattctctgctccccttctgcatggcacccctctactcctgccaggttagaatggagcagaggcctttgaacaagatgacatttgtagacaacctgatccatcaggatgtggagagatctggacaaatggcaaataatttggggttgaattatggcccagagaagtaagcaaatgaaaaactaaacaattataaatgtatctgggaagcaaaggtattcataatatgtcccatggccagctgcgagcagtatttaactagacatgctgttgtcaatattgaacatgaatcaagccaaatactgatatagctattgagagaaggttggcaggaagaaatcatgggtgagggtatgtgggagtgataatcttagctatagattttaggtaaaactgattctgaaagctttctttgaaacaaatttataatttttcttctacatgtttctagcacaaggactcaattttttttggttataatgttcattaaaacatatgccttcaatttgttcctctttgttcttttttgctgatttagcagatataaatcacttgttagtatttttaactatccaagttaaaatgtacatttgtaagtgttattactggtcttatatttgaaggtgcaaggggtcttgtgctgctcattactggttatcttgagcatttcataactgctgcctcctcctaaatcctgtgttccaaccgctactgctggcaatgcccagcctccattgtggatgcggggaattgtgttcagcatgcttgcttctgccacggcactaaagcctaacttgcttaggatcttgctgtacttggagagagcatccattcgctgagcctagcagccaggctcttgtgactccctggg

SEQ ID NO: 37672 - DNA, 1029 bp, Homo sapiens
aaaaaaaaaaaaaattaataaaaataaaaaaaggctgcatgatatttcactgtattgttataccacatttactaattcatcagatgatgcacatttgggttgctgccaccttttggctattgtgaattatgctactatgaatattggtgtacaaatatctatagagtccctgccttactatgtttggttatatactcagaagtggaattgctcggtcatgtggtaattctcttatttatttatttacttacttgagacagtctcattctgttggccaggctggagtgcagtggtgtgatcatggctcactgttgtctcaaattcctgggcttcacgagtagctgggaccacaggcagacactatcatgcccagctagtttgttttaatttttgtagagacagggtcttgccatgttgcccaggctctgttatttaattttttggggcaattgccatactgttttctacagtggctatcccattttactttatttttcttgagtaatgtcagataagactgggcacgctcagggtggtttggtttggctgtagactttcctgttaatttcaaaccaaaattatatgaccaacataaggaattcctgtaaaccctttaatcagagtcactaattgcttacattttgccccatttgatttctcattttctctctctccagcaacatctgtgcgcgcgtgcacgcacacgtacacacacacacacacacacacacacacactctgtgggtgcatattattgttgaactgtttggagtaagtcaaagatgtgtcccctttattactaaatattttggtgtgtttcctaagaatgtggacattttcttgtataaccacagtagttactaaaatcaggacatttgatattgatacaatagtaatgctactttataaattagaaaataagttgaaaaataattgggatagggtgtaatcaggataggctatatgattgggataggctatataaaaaataattggacaggctatataatttaataattgggattaggc

SEQ ID NO: 37673 - DNA, 1053 bp, Homo sapiens
actatgtaggcattgcttttaaaaaggaatttattaaaaaacagctaatgaaaaaggtcagcaaggttgcaggactcaagattgagatacaaaaatcaattatatttctatgcattaacaatgaacaatccaaaaatgaaatccagaaaacaattcaatttgtagtagcgtcaaaaagaataaaatacttaggaatacatttaacaaaagaagtgtaagtctgttgcacggagcactacaaatcatcatcaaaataaattaaagatgacctaaataaatgagtagatatccccttttcattttttggaagatttaatattgttaaggtttcaatatggtccacatgattacagattcaatgcaattcctgtaaaaatcccagttttctgttttgtgacaactgacaagttaattctaaaattcacatgacaatgcaaaggaccctaaaaggccaaaacaatcttgaaaaagaagataattgaaggactctcacttctcagtcaaaaaatttacggcaaaactatgataatcaagactatgtggcaccagcataaggatagacataaaaatcaatggaatagaattggaagtccagagataaacccttgtatttatggtcagttgtgtcaagggtgacaagacatttcaatggggaaaggatggtctttttaacaaatggtactgacacaagtagctatctatacacatgagtgtgaagtcaggcccctactacatctcctatgcaaagacaaactccaaatgtatcaaagacctataaaactcttagaagaaaacataggaataagttttcatgaccttggattaggcgatggtttcttagaaatgacaactaaagcacaagcaacaacaattaaaagacaaattagtttttatcaaaattaaagcattttgtgcttcaaaggacatcaggaaaaagtgaaaagaacaacctaccgaatggcagaaaatgtttgtaagtcatttgataaggaacttgtatgtagaatatataaagaactcttaaaatgtaagaatataaaagacaacccaatt

SEQ ID NO: 37674 - DNA, 1834 bp, Homo sapiens
ggtggggcggccgggcagtggcgctcctcacatcccagatggggcggtggctgggcagggcgctcctcacttcccagacggagtggcaggcctggctaatttttgtattgttagtagagacagggtttcaccatactggccaggttggtctcgaactcctgaactcgtgatccacccaccttggcctcccaaagtgtttggattacaggcgttagccacttcacctggccttcctatacatatatacttaaaaaaaacaaaaacaaaaaaatagaccaggcacgatggctcacgcctgtaatcccagcactttgggaggccaagtgggcggatcacctgaggttgggagttcgagaccagcctgaccaacatggagaaaccccgtttctactaaaaatacaaaattagccaggcatggtggtgcgcgcctgtaaccccagctacttgggaggctgaggcaggagaatcacttgaacctgggaggccgaccttgcagtgagcggagattgagccattgcaccccagcctgggcaacaagagcaaaactctgtctcaaaggaaaaaagaaattaatagacttttattttttacagcagttttaaatttacagaaaaacgagtagaaagtacagaattcccattactccctcattcctcttcccaagtttccttttcttcttttttttttttaagacagagtcgcccaggctagtgtacagtggcatgctcacagctcacggctcactgcagctttgacctcctgggctcaagcaatcctcccacctcagcctccttggtaactaggactacaggcatgttcctccacacctggctaatttttgtattttttgtagagatgaggttttgctctgttgcctaggctggtctcagactcctgggctcacgcaatttacccacctcaacctcccaaagtgctgggattacaggcatgagccaccatgcctgtaataggccatttcccctgttattaacattttgcattagtatgtcatattttgttacaactgatgagccaatgttcatgtgttattataaactaaagtacacaatttacatgagggttcactctttgcatatcctgttttgaatgctagtgcaacttaacatgttgtcttttgactagaaacgtctattgtatgtgtctatttatctagggtaaatacaaacatttgaaaaaaaaagaatttatgtgaattcagggtcttgtcttttcctgaactggtttttattctgagactgagtcttgctcttgcctaggctggagtgcactggcatgatcttggctcactgcaacctctgcctcctagactcaagtgattctcctgcctcatcttcctgagtagccgggactacaggcatgagccaccatgcccggctaatgttttttttttgtattttttagtagagaacagggtttcaccatgttggccaggttggtcttgaactcctgacctcaagtgatctgcccacctctgcctcccaaagtacaggcatgagccaccacacctggaatgaactggtttttaaatctatctttgccctagggagtgccagctgacattatgatctttcttaaatattgggctgtactttttttgttgctattttcacattcaggatctcatttggcagtcaactcttacccaccatgccagcctctgcacctaacatcctttctcatacttctggtgctttttagacctcccaacaaatagaatgggggtgctacgtgggaacaggttgctttcctgggtaatagtagagtcagctggggatcctacttgtttgattttgagttaagcaattgagttcaa

SEQ ID NO: 37675 - DNA, 1063 bp, Homo sapiens
tcgtctcataaaaaaaaaaaaaaaaaaagaaagaaagaaagaaaagaaaatgggaatggtttttaccttgcacaggatttgtaaagatttaataaaacaatatatgcagtgtgttagacatacaacatgtgaaggctaaatagtaacgcttactaatagtaatcatgtgtttccattgaaaatcaaggaaaaagaatggaaaatcttgaagccttagaattaggtaattgtggccgggcatagtggctcacccttgtaatcccagcactttgggaggacaaggtgggtggatcacttgaggccaggagtttgagaccaacctggccaacacagtgaaactccatctctactaaaaatacaaaaaattagccaggcatggtggtgggcacctgtaatcgcagctactcgggaggctgaggcaggagaatcgtttgatcctgggaggcagaggttgcagtgggccgagatagtgccattgtattccagcctgggcaacaagagtgaaactccgtagcaaaaaaaaaaacaaaaacaaaacacacacacacaagaattagacaattgtgcacatttttggtcagctactttacaaaatatacactttccttattctctaggtgtttcccatacctaatgctaaacctggattatggccttctgttctctcatactaagttagtcaagctccctttattcaagtaattcctgaaatcttatccctccaaagttttccccaatgaattagaagtaacaaatttgtaaatttggtgacaacacttctgcatttactaggatagtggtgatttcaaatatcctgcctttgtttttactatacacctccatttacttgtcagggcacatgtcctgattattggttagaccatatatatccccaccaagtctcaaaatgccatgccatcattttcccttgtccatactcctcctacaactacctcactacatgtaaagaacttaattgacatttgtcctactttatgtatgtcatttggatctgggacagaaaaatatatgatacataagacatctggggagaaggggccat

SEQ ID NO: 37676 - DNA, 1064 bp, Homo sapiens
gtggagtcagctcagcaataggttactgaatatagaataactccgtcccagataaatgctgtgctgagcggccctggcaagagccgtaattcagaagctgacagcacttggaaactgccctgcggcagaaacccattgtaaacaagctgtcaagcttaaggagaatatgctgtgaaaatgtcttagataaacaaacacggtgtcagtccaagcctggctcctcagaggagccgttcctggaagggcctccctggtactgtgaagaaggacaagcgctcacgctgcacgcctcagagtgccttggagtttctcgcaggcacacgtggccatgcaggtccagccttgacacaccctcatggagtcccaccttctggaacctgctgtgttccagaagcacacctgggccccaggaggccagggccttggtcagctccaccctaagagctcagggagaggtgtcctagaaacatcactgtccatgtcacaagtgatttgaaacccgtagacagacacaaagagagctggctgagaactgagtccacattaaacatgaagaaattgtcggtaatggacttggtatcagccccagtttggagtttggaggagaattgaggcaccatgtacaggaagtctttccactcactgcatcactgatgcaaccagtgtccagcacagaagggaatgaatgagcgacccggttcctcaaagtgtgactcccagtcccaaggtttgattgtttaaattcttcttataaagggggaactgccaatggaacgctgtcccaacaaggctcactgtggggctgctttagacacatcccccacacggcctacaagcatcctgagggtattcagcggtatttccccatgaccaattcactcctatactccttttccccagtgcagtcagagatagataggtgagctgggcacattgctgaggaggccgtttgccaaggcctagtcccatcgatatccctaagtcacaccacttccagagagaaagggcaaaatcaaaatatgtaatcagatatcccaaagccttctgtgacttttttttttttt

SEQ ID NO: 37677 - DNA, 1045 bp, Homo sapiens
ggcagaaataaagatgttctttgaaaccaacgacaacaaagacacaacataccagcatctctgggacgcattcaaagcagtgtgtagagggaaatttatagcactaaatgcccacaagagaaagcaggaaagatccaaaattgacaccctaacatcacaattaaaagaactagaaatgcaagagcaaacacattcaaaagctagcagaaggcaagaaataactaaaatcagagcagaactgaaggaaatagagacacaaaaaacctttcaaaaaattaacgaatccaggagctggttttttgaaaggatcaacaagattgatagaccactagcaagactaataaagaaaaaaagagagaagaatcaaatagacacaataaaaaatgataaaggggatatcaccactgatcccacagaaatacaaactaccatgagagaatactacaaacacctctacgcaaataaactagaaaatctagaagaaattgataaattcctggacacatacactctcccaagactgaaccaggaagaagttgaatctctgcatagacaaatgacaggagctgaaattgtggcaataatcaatagcttaccaacgaaaaagagtccaggaccagatggattcacagccgaattctaccagaggtacaaggaggaactgggtaccattccttctgaaactattccaatcaatagacaaagagggaatcctccctaactcattttatgaggtcagcatcatcctgataccaaagcctgacagagacacaaccaaaaaagagaattttagaccaatatccttgatgaacattgatgcaaaaatcctcaataaaatactggcaaaccgaatccagcagcacatcaaaaagcttatccaccatgatcaagtgggcttcatccctgggatgcaaggctggttcaatatatgcaaatcaataaatgtaatccagcatataaacagaaccaaagacaaaaaccacatgattatctcaatagatgcagaaaaggcctttgacaaaattcaacaacccttcatgctaaa

SEQ ID NO: 37678 - DNA, 1034 bp, Homo sapiens
attgattcaggcaactgtcatcagtggatgcaatcattagacccttagaattgtgtacctggggacttccctgagcccactaaaagtgggaccgccatacattacttgccatctgatgtgatgcaccaagagtagacagtaccatctatgagctagtattgcctgagagttgaacctgaaatgaatcaagccaatcctggggttccagaaaatacaggaaagagaggaacaagtgaaatggtaacacaagaagacagacaaatttaaaaaatggagattaggacagggctctagaggacctctacgtgaatttcttcaacagacaatggcttgggaagaaagggagaggccgatgtgactgagagggacatacgatgaataacatccaaatatgatgtgtacaacttgtttgggccatttaaacaaaccaaccaaaagattttttgagacaattggggaaatttaaatatagtctgggtagtagatgatatcaagggaatattaagtttgttagataaaataatggctgtgtggttatatgagaaatgttcatatttttagaaattcatactgaagtatataggggtgaaatgactgatttctgggatttactttaaaatcataataaaaaggaaggaagaaaggataggtgaaacaaatgtgataaaatcttgattaatttttagattggcatatatacattctcctgtaatagtgtaaataatttttatgaacaaagggaaggaaatgcaaaaagtaaaataaaaatattggcataaaaaattttagattgggataagatatatgtggatttactatcatgttctatttgacacttttcataataaaaatattaagaaaaaaataacaaatctctctcagagataatagtggggggtccatggcctagaagcaagataggacctctgactagaaaaaggtcattatctgagaattgaacattttaaaaaaaatttttttgacaatctcctttacttaaatttaaaaaaacctatttcttttggatttttggt

SEQ ID NO: 37679 - DNA, 1047 bp, Homo sapiens
ctgttgcccaggctggagtacagtggcgcaatcttggctcactgcaacttccacctcccaggttcaagtgattcccctgcctcagcctcccaagtagctgggattacaggtgcccgccaccacacctggctaattttgtttttttgtatttttagtagagacagagtttcactgtattttcaggctggtctcgaactcctgggctcaagctatttgcattccttggcctcccaaagtgctgagattacaggcgtgagccaccatgcctggacctagttcaagctttctaattgtcttgctgtgtaaacctgaatgggaaatataagatctctgcatctttgtttcttcatttataaacaaagaggcttggtttaaaaatatcttcagggtaactgaagacaaaagaaatcgttaggttgcggtacagatggacaatttgaggactagaagaaaactgtttaaaaacaggttctgacaaaaatctgagacctattcattttaacagtgtagaaactccgaaaacaatctccaaaatgtatgtgggaatttggcatagagtagacaaggcattaaaaataagtgggaaaagaaaggattatttaataagtgatttagttctcttcatgaaaaagaaaggtagattaatgtctcatcccatacaaatggataattttaaatgtattaagggcctgagtgaaaaataaaactttaaaattattagaaagaaatgcaggcaaatatctttatgactgtggggaagagattatttctcagtcggtacacaaaaaaggacaattcataaaggaaagattacactaagaagtaaaactattttatgcaaaagcctctatgagtaaagctaaaagacaaactctgaactggaaaaatattttttcaacacataaagcagaaaaaaacgtttcagactatatagtcagagaatccttacaaatcagtataaaaaagacggacaacttactacagaaatgggttgcaaaggataccctcaggcaatacacagaggagcggatttaaagaaccaataaa

SEQ ID NO: 37680 - DNA, 1046 bp, Homo sapiens
gttgcagcttcccagtgggcctggggttttgttggcatgttgctggacagctcactcccaccctctgactttcctgaagttttctccaatatattctagactctttcattcttgctttgtatcaggtagggttctccatagtgggggttgggggatggggaagtggcagaggggtgaaagaaagacagagaaatatttgttttaaggaattggctcacgcagtcgtgggggctgggaagtccaaaacccatggggcaggcagacatgccagaaattcagttaagagttgatgttgcagtcttgagtcccaaattcatagcacaggccagcagactggaaactcaggcaggaattctatgttacagtcttttttattttctttctttttttctgtggtaagaacaaaacttgagatttaccctcgtatcaaatgtttaagtacaccctgtattattcttgataatgtcaagacaagaatgacagtggatttctagggcatattcatcttgtttgactgaaactttatacccactaatgaataactcctcattttctatgttacaatcttgaggcagaattccttcttctccaagaaagctcagtttttgcccttatggccttcagctgattagatgaggcctacccatatgatggagggtaatctgattgacttaaattcagatgattgtaactgttcatcacatccacaaataccctcacagcaacatatagactagtgtttgaccaaacaactggccaccatagcctagccaagttgacacataaaactgtcatacattctattctatttgccatcttcttcctggcctccagaaatttgttgaaattttcttttcatgatgttcatctcccaattgcatcactctcatgtctttttccttttagtattattctcttagagtccagagaatcaaagtttatttgttaaagagaacccagtttttcatacaggtgcctctcccaaacactggcatgtcaacgaaggtcagcagtcttcttaaggttaaaaaagagaaaaggcatat

SEQ ID NO: 37681 - DNA, 1046 bp, Homo sapiens
agtcaataggcttaatatagtcattctccaaaacaaccggctatgtttctttgctatattaatactatagcacaaatggttaattccccaatagtggtagcaggcaagcctaggttgaccaggtgtaccaaatgggcaatgagaattattatttatctaatgtaattttaaggggggaagagatttgcagaaaagcatagccttatcaaaaaaattaagtatgcagtcattttgagtaaactggaatttagaaaaataactgaatagatgattctactgtttctattagaaacaagatgtgaatctacaggacagactggcctgaggacccagtcctttcgaccttggggtatcagtgatagggagagatcgaaagcctatggattagagaggaagttctacctggtaagggggtccagcctccctcaggcagcattctgccatcccttttgagacaagtcctcaccaaattgacttcccttccatgtccgttgaaaagcccaccatgttttttcttgtcttctcattctgttgctctttctgtgtttcttctgcttcacccatccaaaccctaatccccacctccaccaagaagtcttctctgactacctggctttcccatgcattcacatcatatctgttacctttctctttgtattaacttgtccgtgtactctattgacagctgcttaaggattggacagtaacctactcagtaaccacttactaaattaaatgatttaatagttgttaaatttaacatctggtatctattggtccttttataacagtagttgcttgtcctcatactaaatttcaggtcagccctgggaagtactgtaagtattctttaatacttactcattgtcatcatatgagttgcttttaactatttgttaagggtataaattcaaaagtaaaatttttgctttctcttatcctcatttttcactccccagatataacaaatgttaacagtttgtatgcaccctcctagaagtttgtatatatatgcgaacataaatgggagcctattacatatactc

SEQ ID NO: 37682 - DNA, 1108 bp, Homo sapiens
cttataagtgggagctaaacattgagtacacatgcacacaaagaggggaatgatagacaccagggcctaattgagggtggagggtgagaatcgaaaaactacctatcaggtgtatgcttactacctgggtgatgaaatcatttgtacaccaaaccccagtggcatgcaatttacccatgtgacaaagctgcacatgtacccccgaacctaaaataaaagttgaaaaaaaaatttttttaataaagataccttatttagtatatattgttgattcattaacactaaactcacagccaatagcacttgtgtataactcatgcctaaatgaagcttatcgaacacatgtattttctccataaggcacatcacagtcttcttgtgcttaggaacactagccagcacttcagcactgtgtctgggggcttatttaaacagtgaaatcaccaataaaaagcacaaaaatgcaaaaatcctggcactatgcacaccatgaaaaggacactagcttacatttacagtatgagagctaaaacaagaaggcagagcatcaccttgtttgacctcagcttagaatgaatgctttgggtaactgaaatctctcaccagtctatgcatgtgcatgtctgtgaatacctgcaaaagcgcttcaagtattgacttgggggttgcaaggaagttttagcaattaggcaaattcataaatatggaatccataaataatgaggactgattatagttgttttcttatccctaacactagttttaagccataaagctagttttaaaatatttaacagctttatctccctgaaattataatacagacattactgatttctttttttgctaattaacatcactttgtgtgatttaacaaaaaagaaataaagtgcaggttaatagaagtaactttggtgaataatactgcaattcaaacaaaaaagatctcttttcaataggtttttgagatttcaggcattttagcaatttggatatatatgacagttatttaataacaaagtttaatgagttttaaaaatgaatttattgatgaaaatatttaatctaaactactttttatatctgtaagtatatattgcactgttgg

SEQ ID NO: 37683 - DNA, 1049 bp, Homo sapiens
tctcactttctaagtctcttggctctaggacttttctccaaggatgaactaagatctgggactcccagagcagatttcacttgtgtccttccctccctggggtggtcgcttagtcctggacctctctgccttcccgcttggatgtagaccatttaaagggtgagcgccatgcagttagcttcaagcctggggacaccggggtttcaacaccagggttttaatatcggagcttaattttgacgcatacttttccctgccttccagctccacccctttccctgatcaatggggctaggaaggggaaaaagtgaacagcaaaaaccagtcctgagaagaaaatgggatggaatggctgctgatgagagagctctcatcccctgaaatcccaccaatacgcttttttgctgccgatggccatagtacttcacacttggggaacgacatggacaaactacaagggatattacagtctcatctgctgcctaaaactaaattaccaaaaactaaaattttagatgccataaaaattcactgatgaactctttcgtttttcttattgatgcctctctttttcatttatctcaattgcccatttttgctttcaggaataaagccaaaaaaacagaattctccaagtgtcaagcaaaaacacatactttgcacacgtttctcgaggtccagcccgaaagcctgcgccctgggcgtccctgcttcggcccccagaggggggtgcgctgctcgctcccctcgctccacctcccgcgtagcctgcgggcccctggcggcccagggcatggggcagagacgccatgccggctgatacacacgcccggaggaggtgagggaggaagccacttgaaaataaacaggtgccgtaaagggcataggtagcttgcccgggtttcctgcttcctggtcgctcgcgctcgcctccccgccgcctcgcctcccctcgagcagcctccgcaccccgttctttcactcctcggcgcgtgagctcctggcagcctcacccttttgcacatgacgcgcctccccgggtctcccgc

SEQ ID NO: 37684 - DNA, 1035 bp, Homo sapiens
tgaaaatgtaaaaactgaaatgaaaatgttgaaggcaggaaacaggtttttgtcaataaattcacatgggatgaatgaattaattaaaatttatccagtttaggccttctagcctttcacaaatagtcacaggttaacctggctcccagactgattttcctaggatacccttaaatcaagtgtcttagcttaagagtaaaccaaattcacccaacctttaggtacatataaacaagtctgaaaaatttgcagaggaggtaaggagtatgttgtattcatgagtcttctgagcaaaaagaaggagtttgaccaatactatagaaaaggggtgacactgtgtcttccccctcaaattaatccttaatactcagactaatccctggtatatacatgtaacaggttcagtaactttgccagaaagtggactagaagcttcagtagatgatggccttggctgcaagtattgcactctcagctagacacgggtggtggctgctgcctttgatgtcctcagtaggaggaaatattaccctataaaaaggacaggagaagagaagcactagcagggggtcaccaagaacattagtttgtggaacacagaggaagaagttcttgagaagcctcatacttcttagcagaaacagaagctgagtcaggaaatattgttttgtgatcattgttttgactatatatttattctctggctgtggtgacctaggaaacatggattttccaccagcttagagtttgtgctagaataaagatgactgaagtgggtgaaaaaaatatctgagacattgaaacatgattatatatgcattttagacaatatttatagttcagatttaagtgaattggttgtatattactgatctgcatggtttagttcaatgttgggcgggaaatgtgacattagaatgtttatcaactgataaaatgtgatttattaaaaatatatggtgtgaagaacattgttaaatgccatggaaggttgacattagagggaagcaagacatgtgtggcaaattcctacct

SEQ ID NO: 37685 - DNA, 1050 bp, Homo sapiens
aattgtaaaccaaagctaatacaaacctttaaaagtttctgtgggaatcagagaacttatatatggaccttgttcccagacactccatgatagaaagaagaatatatgtaaattagttaatttttgtgagccttggtttattcatttataaagtgaaattattaacacttatcttgaaaggttgttttgaggatcctagataatgcacataaattaattagcacagttcttggaatatagacagcattaatcaatatatcagcactacttgtgggaaaggctcttagggctcaccagatattctggtgctcttctatactttccagactacctagcagttaggttagtgtcatgtgagtagctctagccaatgaaatatgaagagaaattggcatttctgggccaggacagttaaatgccagtgtattttctgcatctgtttccacctctgcagcaggaaccttggctatggtgtagctacaatatgcaaggaaattgcatccctgagtcattatcaaatgggaacttctcaggagagctcctagactgtattggactttgtatgaacatgaattaaaatttgattatgttatgccactatgacttggggattttttttttttttttttttttttggtcactgcagtttgcctagcattatccagtcattattgttgttgttgttactattgaattgaatagaactactcaaactttggcaattttactgatacatggagctaaagtgttggtgcctaccctcaggtaatggagacagtaaaatattcctgttgcaaatcaaacctttatttctttcacaaacatagattccaagaaaattaagggaaaataacataggagggagaaaaaagtatattaaattttccatttggctccccagctaatcctctttattaggctaccttatttccttgaaacactctaagagtcaatgcatattttcatgacttataatgtctctttatcaaagttttagaaattatgttttctctcttctaaatttcattggttcaaaaatcctcctccaag

SEQ ID NO: 37686 - DNA, 1034 bp, Homo sapiens
aacaatgcattcctgaagcagatgctaaaattgtcacagaaaaaaaaaatatacagtagtgatagagagtttcagccagctgatcatctgcatggatgtctcaattggctgaagttaaccaagttcttatctggctttattcacaattatatgcaccaaaaaagtcagttacataagccagtgtattatctgtcattatctgtcatccagtgtaaataatttcatgatgttagtccatttgaatagtatgttggtctcctttccacctggagaaccataagactaacaagaacttgcaactctcccaaaatccaaataaaacatatgtctgatagtcagttgactgaaacaataaaataatctaaaatgttattttcctaatttagtaaattcttttctatttgtcattcagatagctctggagtcttcactcccctttttgccttgtaatggaggaggtttatgattttccattcatattacatgaaatgtagagaagagagtaaggagcaatgaaggaaggaaaaatggtgtacaaaacatgattcttcagaatagtatttcagtaagtaatgagaatgtgaagaatcaagtttggctgtagttggctatagtgcttaagacgggaagtaatgggaagtaattttggatagatagttggcagtcagactgtggaagccttgagcgccaagctaaattgtttgaattttatatttggggtataggaagtcttaaaatatttgagcaggaagtgtcaaaatgagaatgatttttaggagtgctaatttgggtgccatagctaggaaaaatttgtgggccaaagcgattaggagatactaaaaacaggggaaaccagacaggagaatattacactagagcaagcacaaggtgagaaaaggctgaactagattgatgatagtgccaatgggaaagagagattatgcaaaaaaagaattgttagggcttggtaaaggacaaagagagaagtgagattatgctgaagttttgagcccaggtgaccagaataatgaaag

SEQ ID NO: 37687 - DNA, 1099 bp, Homo sapiens
aactcttagcagagattgattaattgggagataattgattaattgggagttgattgattaattgggatttattaatttgggagtaggtaggaagataggaagttgtataaaataagggagagataacttagtacctggaaaaaaagaaatggaaataggtagaagctaagagttcaattaaaaaaaaggaataaaagatattggaagggaacgatgaatgtagcatggaagatccaagatgatgggagttcaggggctaattacagctatggggaaaaagtaatgtataagctggaagccagagataagagccatgtaaatgaagaagttgggccccaataggaaagaattataaggactagaaggagcaggagccatgtggaaaaatatcatgtagtacttttaagcttgatctgtcatctgtagcaaaaccagcatgcttgagtactgaattgacctgactgaactatgttgaaatgtactgtggttttatatccatatgcacttggtctgtggagttgtgggaaaagcatcagtgagtaggaagcccaaggatttgggtcaagtattaaatatgctatttactgtctagctatgtgaccttatataagtcacttgtggtctctgagccttcatgtattcatccataagatgagttgttgtttatattaaatgggatgtggtatgttaaagagctgaatgcatagtgatacagaattactttctgtaatactattttttaaatattttaaatgaaaaattaatgaacttataaattaaaagattcaaaagggataaaaaggtatacaatgaaaagcaattctccttcccaccagtaactctgtcctactccttaggacattcaccataaacagatatcctgaattcttctagaaatattatatataaaatcttatatttcttatgtttcttttttactattttaaaggggataaactaaactttgctttttttcatataataatatattctggagatcattttctaaaagcacatgtaaacatacctcattattataaaggtttgaaaatatcaatttatttgacctgtcccctctcgatagataattagattgtat

SEQ ID NO: 37688 - DNA, 1063 bp, Homo sapiens
atcaaatgtttgctttttacactttctggaggtataatttgcatgccatagttttttcccattgaaagtgcacaattcaataatttttagtaaatttagtaattattctacttgggtgcagcaattcaacagtactctcagtgaccattgctctttgtatctttcccttctgccaccctcagtggtttgattttctttctaaggtttgtctaaggcaagtttgcagtacaactatgatagctccaggaactgcatcttcaaagttatgcattcacaaccagaagaagatatagtccttctcactgtttcttttttttattaaggatcaaaattccttccagaaatccccatagaaatttcccttatatttgtttgattgatactaggtcacatgcttattcctgatttggtaacccaatgggttacaatgctcacttagaccaattatactgtatacccagccttcatcacctagcgctgggtgagaaatagaaggtatattattttgaatctcactattatgattcctttgacaatctttagaattcatgttgggactttcagtttatctttctaatcctcagtttcctgcttggtaaaacaaggggactggagttagactagggtcaggaaaatctctgaagattccttccagtgcaaaagacttgttggtcccttagagtttttcacagtttcccttatccattccaatggggcttgtagggagcctagctccattctgatttgattccaggaactacaatcaaagtgtagaggtgaggaagaaatgtttcttttcgtttatctttaaccaaatctacttttttctccatctgactttgcttggagccataggcttgtattatcttggattataatatacttctatttagatagcattgaaaaaattgaaatcagggtgttcagtgttaaaaccccctggtttaaaatatgtctttgtggtttggcttatctgctattttattttaattaatttatttttctttttcttgcagccacagcaattgtctgctattttaaaagcactgtgatgcttaaatat

SEQ ID NO: 37689 - DNA, 1033 bp, Homo sapiens
aatagtgctgcagtgaacattcgtgtacatgtgtctttatggtagaatgatttatattcctctgggtatatacccagtgatgagattgttgggccaaatggtagttctgcttttagctctttgaggaatcaccatactgctttccacaatggttgagctaatgtacattcccaccaacagtgtataagtgttcccttttctccataatcttgccagcatcttttttgttttgttttgttttgatttgacattttagtaatagccattttgactggtgtgagatggtatctcattgtggttttgatttgcatttctctaatgatcagtgatgttgagcttttttttatatgcttgttggccacatgtatgtcttcttttgagaagtgtctcttcatatcctttgcctacttttcaatgtggttatttgttttcctcttataaatttgtttaagttccttatagatgctagatattagacctttgtcaagtgcatagtttgcaaatgttttctcgcattctgtagattgactgtttactctgttgatagcttcttttgctgcacagaaactcaagtttaattagatcctgcttgtcaatttttccttttgttgtgattgcttttggtatctttgtcatgaaatctttgctcgttcctatgtccaggatggtattgcctaggttgtcttccagggtttttatagttttgggttttacatttaagtttttaattcatcttgagttaatttttgtatatggtctaaggaaagggtcagctccaatcttctgcatatggctagccagttttcccagaaccatttgttgaatagggcatcttttccccattgcttatttttgtcagctttgtgaagatcagatggtcatagatgtgctgccttagttctgggctctctattctgttccattggtttgtgtgcctgtttttgtaccagtaccatgctgttttggtcactgtagccttgcagtatagtttgaagtcgggtaacatgatgactccagctttgttctttttgtt

SEQ ID NO: 37690 - DNA, 1050 bp, Homo sapiens
caaattccaagaaatttttgatcaaaaaaacattttttgtttattgttatctctaatctatacctttactaactaacatcagtcttttaggaaataggaaaagtaacctacatataaagtgtaattttctgttcattttattaacagtttggctaggattgtttataaaactgtattaaagatttaattggcttttaaatctgaaaaaaataattttatttatatttttataaaatctactcagtccaagtgtttgaacagtctttcagatgtagaaaatatgagatatcagattgaataagtaccaagctcataaaatatagtctagagtttgctttccagaaactaatcctggcactcatttgtttaaaggaaaataatttaatttgattttcctttcacttgtattctacagaaatggtaggtcactatcatttagttggcaatggattggaggaaaaaatctatctatttctaaagtatagtatcactttttgtcaaatttaatagactgtagtctgtagtgaaagaatatgctatgaacttaactgccagcaaaacttaaataattaagacattaagctgtcttaattattcctaaggaggaaattcttgactgccctgcttaatttgaaagccaggataatgaaatgtcagttccgcatccttaactctttctactttgccatttcagacaatcgacagggtctctgctttgcagaggtactgcagacaatatgtcaaatggcatccagtagtcgcaatctcgtcactaagtcagaatgctgctgtgatggtgggcgaggctggggccaccagtgcgagctttgcccacttcctggaactgcccagtacaaaaagatatgtcctcatggcccaggatatacaactgatggaagaggtaaggagttgaggaaatttattcatataatcaacacattaaattttatgaattcagataaatgtgaaggaaaagtgaaaaattgatacaatcaaaagagtagctaaaatgtttataccttgatatttatatttgatgtgtgttttcat

SEQ ID NO: 37691 - DNA, 1752 bp, Homo sapiens
gagaaataggggtgacatggggatcacaatttggattactgagagagagttatcagggagaaggggaccagttcatagaacatttggccacatggagcctgcaatgcccatgagacatggagttgttcatgtcaggtaggcaggtagacatacatacacccctaaagatcaaagacaggaaggtggacatggacttgggactctctggcacatggttggttgaaattacaacttttgacttctgaagcaataatagtttatttttatgaataagttaaacatacaacgtaatatctcttgtctgaaatatcagctggctagtggacagtgatagtatggacaattgtttattttcaagtgttgaatggctaataaatactccccctgttctgcagatataaatgaatgtgatgaagatcccaacatttgtctttttggttcctgtactaatactccagggggcttccagtgcctctgcccccctggctttgtactatctgataatggacggagatgctttggtaagatttggcatgacttcactgtcacagttcacgcttagaaactttaaagctgaattgtaaaccatcatgctggtattagtcctaacaaaatacatgtctatgctaaaatacatctgcaagttaaaaatttaggtctcaaacataagcaatgaacaatttttaaggtactttgaattattgccactgtttctacatttttataaatttttttactaaaagaaaaattcttattctgatttatcagaatgactatgttaattttgttgttgtcatagcttttttgtttgttggtgtatgtgatgcttttgatgtgatgtaacttactgaaagttaccttgattgtttttcttagactatcatgcaacagtgaaaaaagagactctgtgtggaaatcactttgatactgagcatgatttctcgaattttcttagcacattataaaaatattttaagcatattaaataattaaataattttatagccaggtcagtctaaattggcaaatgaaatcagcaatcgaagatttccagacctgccttaactgctgatctagtctgcatcccgtgttctacaatgagaaatgttctgtccaaacagtgttacaaaataattccatctgtaatgtttgcttttttgattagatactcgccagagcttctgcttcacaaattttgaaaatggaaagtgttctgtacccaaagctttcaacaccacaaaagcaaaatgctgctgtagtaagatgccaggagagggctggggggacccctgtgagctgtgccccaaagacgatgaaggtaagagcaatgacatcatcagacagcactttgtgtaccagtttttgaatgtttgccagagtgggtttaaccatgtaatttaagaatattttgagagtgaaatcatctccttgcatataagttttgatggttcattgaacaacctagcctgagaaacttctttcagcttttgaataagacatgtctaagcacaggtggagttacccttttatttcattccccacctccaaggttagtattacttgctttcaaaagtacgaatttgagaggtccaaggcaggagaaagaagggaatggaaattatattccaggttgctccaggagtcccatgtgggcattgtatcacaggctgtggctctcagaatgttacattaaattctgagaagctgagtcagcacaatggccctttacaggaaaagatcaatagcctcagg

SEQ ID NO: 37692 - DNA, 1042 bp, Homo sapiens
aattccaccaaaatgggggaatataaaacctggaggagcccctgcaggaacatgagagaggactccattaaatggaacagacctacatacagaccattttctataatttctgaggagagagcaaaggctaagttcatcaacatagagcccagaggagctctccccattctcaatcttctctccctccaccttacgaaactttgggcgactgaatacagctttaatgaaaccgaaaccagctatcttccacataaagctctgataaagaaggaaagatatcaagagatgttatttaaactgtactaaagtagatagaagctcttgaaagagcagacaaagtagtgtctatacaagctgaaaaacagtagcaactatgcaggcattctgtgaaaacgaaaggaagaaaaacacaaaatcagctaaagaaccaacccacgatggaagaaaacaactcaagaaataaaacaaattttccataggtactttatgccatatatgatcttaataaaatcataaatgtagttgaagaagtttgtagagattataagagctatagagtaaaagggagattgtagaatcaagggaagtaagaaatggggaccaatacagcaaaataagaggactattaaataaaaacagcaaaaaacagaggacatacagatgaaaatgtaattgctagcatagagaaagggcctgagataataacagtggaaagaggaaagagaaattaacactattagagaaaagacaaaaactataaacatcagtataattggtgttgctgaagagagcccaaaaaatcaactagaaaaaaggtactaaacaaccaaacattttcctgcaataaaacaaagaactgaatatacaaagcctaaattgtaagacaaagacttagatttgctacatttgtcaactttaatcatagaggaggattgaagacttcagatagaaaaggcaacgcatctcacgtgcaaagacacacataggcttaaaataaagggatggaggaatatttaccaagcaaatggaaagcaaaataaaa

SEQ ID NO: 37693 - DNA, 1125 bp, Homo sapiens
ttccagggttactatcataacttttcaaccataccctcattcccattttcgtagccccatgtgcctactctttttctctttttggcctcccatttttatgcttcttgtccatctgtcattttggccaactattgcaaaacagcctgcctctgatacaagacattcagctgtgtccagcctcctgtgctccaggatgtcacccaaattcatcctctcctttacatcttctttcccctactctagtcccaaccagagagagtttctgtctctctcacatgccctcgctcttcgtgtctgctgaatgctaaaagaatcccctctggtatgttggcttgttccctctctggccctcctgcaatccattctccacgtagcagcaggaggaagcttttaaaccatggattcgatctcttcatagtcttcactataacccattgaattcgggataaaattcagcttccctcccttggctgcgggtttccactgtctctctagcttcattgtccatcaccctctgtctggtgcattctgctttgccactctaacctcctttcattttttcagtcacactgagctcttttcctccttggtgtcttaccatgcactcgtccctctgcaaggaatatccttccccacctctgttcagcaagttaattgtttctcatcctcaggtctgaccttaactaaaaactacttcctcaatgggggcatctttgttcctgcagcccaaatcagatgccttttttattctctcatggcaccttgtaacttttcttcatggcacatatagcaagatttagtttttttctgtgtttaacatctgtcttttctgctcaactaagggattccatgaggtcaagaatcatatctctgtttcctcatctattaaataaacttaaaaactctttgttaattttcctgctctgaaattcagtatcaccttcagaattgattcttctactgataaggaaaccactaataaaattcaccctcagtagaagtcagaatgagatctaacactaatttgctttaagctgttaaaaaattcacgttgactagatatctcacaaattgcttgaattcataattttggcccacatttatagcctggacattggacattgg

SEQ ID NO: 37694 - DNA, 1022 bp, Homo sapiens
gggctttggagtcagactgcatgggcttgaatcttgatgctgacactgtactagctgggtgaccttgggtaaattggttgacctctgtgtgcctaaattttctcatctgcaaattgtacataattcacagggttgttttaatgagtaaataaattaatacatagaaagccttccagttcctgtcactatcttgataaatcttagcaataactgttgtttatcttacttaaaatgatgacaaggtgataaatcagaactagtccaggtcattaaaagatcatttaaatacacagtagctttacacaaacatctctgtttcctctgtgctatggaatttacagatgtaaatctataacaagcctgcagtttgagacctgacacaaatgcttctctacagttttatccaaactgaacattccagccagagtgaaaaagcaaagtgactgtccagctctttttcacacctttgccctgtaactttttattcagtacaggagagaattgttttgtttcaacctctgtcttggtgtttgggttgttggtaacttcttgtgtttcctagggaatcagaaattactatttctgccatcataggcccatggtttaattgtaattccctttctgtgtttgggggcaggggggtatttttgttgttgaatttagaagtaaaaacttttttttttttttggaagacagggtctcactgtgtcacccaggctagaatacagtgacacgatctcactgcagcctctgcctacggggctcaggcaatcctcccacctcagcttcctgagtagctgggactacaggcatgtgccatcactcccagctaatttttgtgttttttgtagagacggggtttcaccatgttgtccaggctggtcttgaactcctgggctccagcgatccgactgcctcagcctcccaaagtgctgggattatagtcatgagccactgtgtctggccagaagtaaattttatctgtacatattattaaaatgaattttcaaataaatactata

SEQ ID NO: 37695 - DNA, 1024 bp, Homo sapiens
taatatttttaaagtttagacattatttcatgtacttttttattaaaaagagaatctagttgaaaaagaaaataacaaatagtaaaatatacacaggacaagtcatgaatgtataataggactgtcagtggctctcatcagtggttagcctgcaactttctcttccacaggtccaggtcattacattttgaaatttcatgatgtgattactaatttaaaattacattagattatatatgaattagttggatactatgaatatttaaagatttagaatctatttttcaagctttctaaatataaattaatcttcaactattctgcaaactgcttaaaaagactatggtgttctggttgaatatggttaaatgtaatagaacaatgcatttgattaatatttcctgcattatactgctgtggtttgatggttctatataatccagaccagtttccctcatctttggcttgggtctgcgctctgtcttcaacttgcatggatatatggctgtgaccactctgctgtcaaatccaatggtctattctcattcctcaccttagattattagcagtatttgtcacagttcattaatcattctttctcaagaaattttgcatttttggctttccaggcacaactatcttcttcttctttcacttttatggcacattttctctttcctttactgagtcctccctatcctcctaacctttaacctgaagtgttccaccagtccgtctttggacctctgtttctctttctacactcatcctcgagagcctctgtgttgactctcacatttgtcactctagttgataatgaaattctaggcctcaaccttgccaccaattccagatttgtgtttccaactgtctgtacagtgtctccacttggatggctcatcgatatctcaaattcccatgtctaaaaccaaattcctgtgtactggcttgaacctgagtctcccaggaacatttccatctcagcaaatggcaaattcattcttctagctgccaccccttaaaa

SEQ ID NO: 37696 - DNA, 1049 bp, Homo sapiens
tgataactttaataggtttttagtccaagagaattgtcctttccatttgataatttaaaagttgtcatttgagtttatagaccataactagtgtttaaaagcttctttgttttcttctaatcacatatttttgcagtggaagttacttaaatgagttaaatggttagagaagtcctcattttcagtgagatactggctgagcagtgagtacactgaattatgtttttgtatcttgatcaaagtactgtatatttcagaataatctgtggtatgaatactagtcattgttcctgtttaaatctcactgtgtgggcctacagaagggtcccataacattctcaaatccaattactactttgtaatagaaacttttaagaaaagatttcatctttgatgactgtggaatagccctttttttttatctgttaaagtatttggtttttttttttgtgatgccacagccaagaaaactgcagtagtaatagtatgcaaaaagatgtaacattctctcttcatcttactgtttaacttcaaagcattcttgtgaacagaaaccagttaggactatagaacaagatgccaaaacatgaatgactctgctgaagtcaatgaaatgcaattacaaagtgcagtgctaactttgaattgaatcagaggggccactaaaaaacagtaattagcctaaagaaaaaaaaaagaaaacttcagcataaaatcccctttttctaaacttacttctggtgacagtttcccctattgtccaacatcttttcaggaactcctcaaagaggagtgctcattccattcccactgaaagtacttgaagatttatcttttcagtaggtgagaaggggacacacttaagagtttgaaatatctttcaataggttatgagagtcctctttttaagccagctctggcttctcaaatgtattcaactacagagtctctattttctagatcctgctcccatctctaacaccaattcttcagaaatgctctgagaaatgtactttatgaaaaagtatcctagccatatttcctccatg

SEQ ID NO: 37697 - DNA, 1358 bp, Homo sapiens
tctctattgaattgcctttgcaccttgttgaaaatcatttgctcgtatatattgggtctgtttctggactctcagctctgactcacctacttaggggcttgctgcatcctgccagtgttccccctgtctgcatcgtggtctgaaaaccctcttaaagcaataagctgaaatagttatgatattcactgtgtttgttttccttctcttagggatctatattctttgttgcctgatgtcaagtttcttgaaaaccatgatttcttatactttgtccatttgtttgtgttttgaggaaggagggtaaatctgtcttggctgggaacagaagtgtcccctattttcttagtgcaaagattgtggaatgaaaaaaatgggaacaaaaacgccagctagtaaatttttatataagtctaggcaagaaattatgacaatagtgatgtaggactgcagaaaaacttaatgattcaacaagtgcttgggaggttaatcgatagaatctgatgacagattagttgtggggagtcaaagagtagaaaactacaatgatacacaagtttctggctgagcaaaactggacatatagtggtggtgttaacatgtataagaaggtgcagattgggaggaaatagttgttgagtctttcttggacatgctgagttttaggtgtctagggtatttaattatagagctctaatgctaagaggaatgtccggggtagagttacagatttaggagtcaacaacacacaggtggctcttagaaccatgaggatgaatactgtgtcccaagctgaacaacaggacaagtgaaaagataacaggaatactacagctggaatcttatggaacagacacatcgaaggcccttagtctagctcaactcagacgcacctcgttctagctcatagtgttagagagatagcaaaataatatggagaattatgttcctgaagttagggaagggcacactttcaagagaaaagtagtgttaggtgttaaatgcagtagaaaaatcaaaggcagtgaggaaaaacatctgttggatttggtaattggggggttttattaactttgaagagtggttttaggatggtaattgagtcattttgaggttattttatttattcataatattaacacacatgtgtttcattaactagcttaaccctaaataacagatttgagttcaggtcttccattaaacagtatagatgagaggccaggtatagagagagttagcatcataattttgccaaaaatgtcttaggtccactatgattataaaagaaaatgtgggccaaatatgatgttttggaaaaaacaatcattctaaactaggtacagggctacaagatcaga

SEQ ID NO: 37698 - DNA, 1059 bp, Homo sapiens
taaacctgcacttgtactccctgaatgtaaaataaaagttggaaagaaaaatatatgtgtatatgtaaaacatatctttctccatgtctgagttctgagccaattgagggatagccaaagaacccatttcatatggagttctaaaaattttgagaattaaagttgtttgtactgtctaggctccctatttgtgcttgcttagttcaaagtcttaaagaagttggtcatgatcctaagatgtactccatgtttgcacatactagtcaaagctgggattaatactcccagctttgggcccatgtctgaaaaaatccaactataatttcatctagagccttggttttcccaagtagatttttggtccccaggtgccacttgaatattttctccagttttcccagcccatgtaccctgtgttgaagaatagaggcattctaagcacttatttctaaaagacaaggaggaaaatgaagctcttaaagatatgctgtaaaacagccacagagttcacaacaccttatatcataggtgttcatgactcctaaaagtctgtaagcccaagaagacaagaccatatctttttcttagttaatcatgatggaagtattgtgcagatttttaaactagctttattgtggtttaattgacatacaataagttgtatatatttgaagtatatagcttgataagttttgatatgtgtataccaataaactcatgacgacaatcagataatgaacatatccatcaccctcataaggcttacttttgtcccttgtaatctctccatcttgctcctcctttcatccatccccagcccccatcctgtccccaggcaatccctgattagtcactgtacattactttgcatcgtgtagaattttatataaatgaaatcatactgttacatatatgacttttgtctgatttcttttactcagcataattattctgtgattcttctgtgttgtggtgggaaaaatcatttatttctttttgttgtggaataatattttattgtatggatatagcacagtttatttatatattcccaagttg

SEQ ID NO: 37699 - DNA, 1034 bp, Homo sapiens
taatcaaccatgaatgctctcatactcttaaaaaaaaaatctcttttaaaagctatttaatgaaggcctttctcaatcatcttctccttcttcccttgattagacattgatgagtgcagcatcattcctgggatatgtgaaactggtgaatgttccaacaccgtgggaagctatttttgtgtttgtccacgtggatatgtaacctcaacagatggctctcgatgcatcggtaagcctcgcattttgaaggctcaatacactgggtctttataatgacaaaacagcccaaacaggtatgaagatggcaacgattataaaatattgaagaaatggctgaatgagttgtttaatgtaaacggtaccagtattgagggattgatagaccaggtactctttgcaaagacttcagtttcagaatccaactgggtttgttttatgttgtcaaagtcattttgggaataaagaaagacacaaaggcacgagaaaaattttttaaaatctgctttgggagacagaatgtagtaattaaagcttcttttgtgctatgaatcatgaatgttattaacatcttatttacttagaacttgtttattctattgaaaatagttactatacaaaaaagacacctttaattttgtgtttaaatatattcaaattaaaaccattgtatgctctcccttgtttatttagaaagatgcaatagtgctacagtcatggtgaaggtaatctgttattgagcaaggcttagacatctgtcttattgcgagcatagagattatgaagtgtcttttgatgcataatcacagcacagtgagctaccctcacatttcccttcctgagcttttaacctagtctattccaattttaagctgacaataggtaaaaagagaggaaaaaagaggcactgttatctttactggcactaaagattcatgtagtgcaggaattaggaaaattaatccaatacttaaagaatggtgttgtttggtccactagagggtggccgtttgggcagtgtctctctctccccaaac

SEQ ID NO: 37700 - DNA, 1034 bp, Homo sapiens
caggagaatcacttgaacctgggaagcggaggttttggtgagccgagatcatgccattgcactccagcccgggcaacaagagcaaaactcttgtctcaaaacaaaaaaaattatacatcagtatcagttgagatttatctcaggaatgccagattggttcatcatctgaaaattaattgatgtaatatattatttaaataaaagacaaaagccgtgatcacctcaatatatgcaaaaaaccaaaagcatttgaaaaaaagccaatacccttgtattctaaaaataatcagaaaattaagaatagaaagaaaaaaataagaatagaaaggaacgtactcaactttatagagggcatctatgaaaaactacaactaacatcatacttaatggtgaaagaattaatgctttccctaagattgggcacaagactgatgtctactctcaccatttctcttcaacattgtactacaggttctagccaaggcaattatgcaattaggtaaataaaagttacccggactggaaaaaaagaagtaaaactatctctatttgtagatgacacgtgtttagtggacaaggtaacaactgaagtgaataaggaatacactaaagtggctatggtgtactctaaaaactattagaaccaatgaatgatttaagcaaagttgcaattgtacaagatcaatgtacaaaaatgaattttatttttatacaaagaataaatggcttaggaataaatttagcagagtaggtgatagatttgtacactgaaaactgtaaagccttgttaaattaagaatgatctaaataaacaaatatacaccatgcttacagattgaaaaacttaatattgttaagatggcagtactctccaagtcgatctgtaaatgcaacacaatccctgtcaaaaatgaagcttgcttttttgcagaaattgaagaactaatcttaaagttcatatggatgcaaaatacacatttttcgtagcagcacatagaatattctccaggatagagaccatatgttaggtcaca

SEQ ID NO: 37701 - DNA, 1076 bp, Homo sapiens
atccattgagggtcatggaacatatttcccagagaaggagagactgctgtattagaaagcgattttaattcttaaagtaagtgttgtcaaacaggaactcaggatcttattatttttgccagaaagttccaaagggaaaggaatggcccactaagataacaataaatttggctctactgtttttctttgtagatctaccttacttattcccaactatcacctcctattttttctactcttcgttatattacttctctttctaatcttctctactattgtctagactgctattaaaacctgggcattcctgaaattagaagacatgaaattctctcaacattatccaaatcatttcagttgttctatgtttatgagtttgtctacctgtacactacatgggatatgagtcagtgtggcacttgaaaagaagttcatgctattgcaatcagtattttgtgttatttatttatttatttatttatttatttatttatttatttatttttgagacagggtttcactctgtcgcccagactggagtgcagtggtgctggtgtgatctcggctcactgcagcctccgcctcccaggctcaagggattctcctgcctcagcctcccgagtagctgggattataggcctgtgccaccacacctggctgatttttgtatttttagtagagacagggtttcaccatgttggtcaggctggtcttgaactcctgacctcaaatgatccactcgcctcagcctcccaaagtactgagattacaagcgtaagccacctcactggcctgtattttattttttcaatatgattttgcaagagaaaacatataagcaactactgctataggcttagacataaataggttctgttttagacacgaatgtgaacaagaaagaaagtgctttaaacataatgctatgtttgaaatatgaatgtaaaacataaggaagtaagccaaatataacaaaaaagtaaagacttaaattttaaatagaacaataaatgtacaataatacaacataagagaattcttttatgttcaaaatccagaaattataaaagaaaata

SEQ ID NO: 37702 - DNA, 1069 bp, Homo sapiens
tatgtttcagattccaaatagaaatagacctattatttagttgctgcccttaaagttagacatttgttttcataggaataaaatattatgtgtgaatatctacagagtatagaaataagaatttctgtttactaatggaaataataagcactggggactccaaaagtagggaggctgagaggagggatgaggactgaaaaattacctattgagtacctactgagttttcactatttggataatgggttaactagaagcccaaaccttaccattatgcaatatattcacataacaaacccgcacctgtatccccgaaaccataaaaattgaaaagaaaaagcaagttcaatgtaaaaaaattaaaattagaaatggatctaatttggtaacaagaaaagttaaaaaacacgctatgaaatatagtagtaatttctatgtcccctggttgctacacatataaattaaatgaaccatttttatatgcctataatactgcacatattttccatatttggacatgaactaaaaataatatatcatctaataataatttatgtaataaaataagtttaattttttagaacaagtttacacggagaatttggagaataaatgaggttataaactagaattattgttgctttgttacattatttttaaccttaatagacatggactgacgttattgcataaggtataaatttcaaaatatataattgtgttctataaaattgttacatgtgatttggaataattcaaaatttaaagaaatagtaagtttttgcctgaattgaaggaatgagcaaagataacatctgtacagtctggtcattggagaattaatcaatcattagtagttgcttgtgataggactttgcagatgtagaaattcttgcatagtttgaaggcttgaggcatgcttttttatatttataaagagcacatcttggtccaaagtggttattttttggttatttctatataatttcttttaaattttcttttttattttaactgctaacttgatctaactaaaagaaattaattctacataactgcagagcctagg

SEQ ID NO: 37703 - DNA, 1045 bp, Homo sapiens
aaaaaacagtttactaggctgggtatcacactcactcatgacctcccttagctgcggggagggggtttcccatccccgtgtggctctcaagtgggccgtggcaccacactactcatccttctctctgtggatcacgccagccttctagtcaactttgatgaaagaacctggatacattggttgccagtgaaggattcacactctttgtttttttttgatgggagcctctgagagacgctgcttctagtcggccatcttggccccacattttactttaaactgttgccatgctaacattctggacttaagtagtgtcagaaaggtgtgccctcctagcgtggtatgaaatcagtcatatcaattcttgatggctttaatattgagagccatttgagttttagccgttgtgcttaatccacatttaatctactttcttccattttattatacattaaaggaccaaagttaactcatataggacttaaaatttaagctatcataaaacaagtgaattaaaaatgttaatagtgtcattaagcccttttccaataatatttgtgaactttaaatatataacaaattgccatgtgcatatgatgtataattttcttacaaagtttcttctttttttgtctttagtctcatgaacctactctaattaggagtgacattttgtttaagattagtacttggctttggatcttttaggttttcaaatgaacagggtgctcctaaaatttttttaaatatattaaaattaaactggcataattattaatttttgtaccatgtgatatttagggattaggcttttaaactacttcaaatgcttcaaaactgaaggtatagcagaagaaaattgtttgtgaaatttcatctcttgcttcatcattgatgataataacattgatgccaagcctctgctcctttccaggtaatgtgaaatgcacaggaattcacatatttgacacaggccctagctaggacacaggataaggtcatgaataaagaaatagcaatacagaccctaaattggtttctgcaa

SEQ ID NO: 37704 - DNA, 1059 bp, Homo sapiens
gaaagattaaaaatgttaagtagagatgtggaatccaaattgaacttctacagatgaaaactacaatgtctgaggtgaacatttttctggatgggattaatgggagatgagacattataggcgaaaagacgagtgagcctgaaaacatagcaacagaaattatttgaaataaagcacaaagaaaaaaaggcttaagaatgtaggagagcataagtgagctctgtgacaactttcagcaaactaaatacatatatttagagttagcaaaataatagatggcagaaaaaatatatttgaagaaataatggtcaaaatttttccaaatttgataaatgctataaactgacagacccaagatcaatgaatccccaagcaaaagaaacttgaagaaaattatattaagatacatcataatcaatttctcaaaaccagggatacagggaaatcttaaagtagccagagaaaagagatacattttgtatagaggaaaagaagataaaaataacaacaaattatttgtccaaaacagtacaagtaaaaaggaaagtggaacagcacatttagagcactaaagttgaaaaagacaattctctgtctaggcttttatatttaataaaatgtctttcaaaatcagaagtaaaataaataaagctttttcccaatatataaaagggaagaattcattttccagtcacctgcacagtaagaaatattaaggcagttctttaggctgaagaaaaatattgccaaatatttttgaatattctttgaaaaatattgaaaggaatgaaaagtatcaaaaaacgtaactatgtgggtaaatatataatacttttccttagtattttaaatctttttaggaaacaattgactgaacaaaaattaattacaatgtcctatggggtgtagagtagatgtggtggtaaaataataaaacaatacacagaggctgggatgtgcctatactatatgtcaagaattatgttacttgaagatagacattgataagttaaagatgtgtggtgtaaaccttagagtaagcactaaaaatacagagta

SEQ ID NO: 37705 - DNA, 1067 bp, Homo sapiens
gtaagctatctaaaataatgtcctgatggtaaacagtttcatgacatatcaagaagttaaacttcgtaaaatgtgataaataactagcatcgagccataacagtaaaaacaaacttgagctaaaattaatattacataatcattcattgttatttacatcctcagtgcatttttccagagcttgttgtggcatcaagttatacagcactttctttattgtgaaactagaatatatgaaattatgtcaatgaaatattacagataagtaggggtcaaggtttatatacatatagaggctttgagtcgtgaaaaagccttatattttaaaaattatactcattaccctgacaaaacttcatcttgcttttcaagtttaacctggagaagaaactgagaaattacaattatatggtgaagtttgaaaagtaaaatctttttcacatacatttggatgtatatatacatcaagatatttttattatttttaatgtaattgagatttcttgggactgaagtacattccacaaatgataagagtttaatgttacacttaggatgaatttaaatgtctttaccagatgcttttatttgggaaagaaaaattaattatgaaacgttagcataaaaagataaattattcagaatggaataacacacatttcttagataacgctaagtttatttgaacatcatagaatgtagaataaatttaaaatttcaaacataatcataattggtagagatgatcttcatttttctgggagtcaggtaaactttgtagctctttcatcctgaagcagatttcaaagtcaatttgtaattggcaaagaaattgggtgagtagtttcaactcagaggcttccaggaattacgtcattattcttcaacagttattcattcattagatttgttagtccttactaaatttctgagaattcaataaagatttacatatattttacatgtacagtagcatgttttccaaaaaaaattgtaagattaattagttaatggattacccttgggatattttttaaatgttggtttgtttcttaaaagtcttatta

SEQ ID NO: 37706 - DNA, 1045 bp, Homo sapiens
ttttccctttattgccatatcattttcattttttcttattacatttttctcctcctactccttccctgtgctaccgggatcggcctcttttttccttcatttcccatattttattcattccttaccagtgaaaatatagattatagggttagtagtacagaaattgagggttgagtagttacattctaaatgagcatgagagccagcgaatatgattctgattaaaaaaaaaacaaaaaaccttttaccaaacacttgcttaacagtgtgatttacatgaagtatgtaagtttttgtctgaatatacttaaatatatttacttaaatttaagatgtgaactttaacctgtgtaatttatacaagttgcagtttaattaacataatgtactataatttaacataagatcctttattggcagcatcactgcactactatattgtgcttggagactggctatataatgagcttcttgctatttttgtatgcagctgtctgtgaaaatggatgtcagaatggtggacgttgcatcggacccaaccgctgtgcttgtgtttatgggttcactggtccacagtgtgaaagaggtaagaagagaaatgagactttactttctgaagaagtctattttattgtaaaaatgtataattttttgctattcaatgaagattctgctaatgaaattatatttttactcttctttgattatgtctctaagttgaatggtaagattttgagacatagctaatagtggcagaagtgtctcaactttttccaccagtgaactcagtttgggcggccaactctggggctatggctctagggtaattttgagtgagtgactgatggcaaattctaataatgtgcttaattcaaattaggaggcattgttgaaagtactgcttctgttaaaaatgaaatagtgtcaagttatctttggctgcaaaccccacaaaatctgacataaattgtcctaagcaataaggaaatgtataacatttcacaacaaaaagtctcgagctagtgggcctcaggtaggatgtgat

SEQ ID NO: 37707 - DNA, 1049 bp, Homo sapiens
gtccctcttccagcccggccttcctctcgggttcgccccccttctccccaatctccgtcctcttccctcccttcgccctcccccccttccttcctcttcccctcacccaaccctggttcccctcgttcctcagtcccgatctctcccttactctgtccccgcccactctgcgccggcctctcagtccgggttgagccccacgtgtggacggccgcgcccccactgacagccgccgcccgccggcccgccccgcgccccgccgggcctctaaaacccccgcgccgcgccctccaccgccgcatcttctccagcgcccagcctcccgccctctctcttgctggccgcacgccccggccccgcgcacctccgcccggctccgcagccgctacccgcgcttcgttgccctgtgggactccgagcgagcccggagggaaccctcctcttcttctgggggcgacttttgtttgcttgcctgtttctttctggtgacttttgcagctttccaatatccgtcttcggagcgcacgggaatccgccgagctctgcgtgcaggcccttttttcttttgaggttcacattttttgaaattttacgccagggcttttgtaatttcctcccccgcccgctgacggtcctggagtcgctcggggctttaggccggttatgcaacgtgtaccgctcggggctgccggctgcacctccgccgcgcctcgccgctcactgcgctagacccggcgccccgcgtctcgcttcgcgggcagtcagggggccggcgctctgtcgaggtctccagctagagcagggagcccgagcccgagggagtccccggagccgacgaagggcttattagaccctgactcttttctgaggcgcgcagattttgtctttgatcactccctctccgcgggtctacggccgcgcgctttcggcgccggcgatggggagaagacggaggctgtgtctccagctctacttcctgtggctgggctgtgtggtgctctgggcgcagggcacggccggccagcctcagcctcctccgcccaagccgc

SEQ ID NO: 37708 - DNA, 1031 bp, Homo sapiens
atatacagatacatgtatatgtatatctagatacatacatatacagatacatgtatatgtatatctagatacatacatatacagatacatgtatatgtatatctagatatacatatacatgtatatgtatatctagatacatatacagatacatgtatatgtatatctagatacatacatatacagatacatgtatatgtatatatagatacatatatacatatacggatacatgtatatgtatatatagatacatatatacatatacggatacatgtatatgtatatatagatacatatatacatatacggatacatgtatatgtatatatagatatatgtatgtgtgtgtgtgttggtaaatgttccttgcatattagaaatgtatatttaattttttggagtgcagttccatatatgctcattacatttagctcttaaaagctctgatatacaattgttaagtagaataatcaatactggattgatttttacattgtactgacaaaagactgttaaaattccattgtgcttataattttttgatgtttccctgtgattctaatttttgatttgtttatctcaaagtttattgtttattaagtactcggtctctaagtttgtttattttgaactattatttttattattgtgtaaaatctatatgtttactttgctaaggtggattgtgtctgatactaacaaatattaatatacagtactgcactaatatttgcttgtcctatctctttcattttgttttcaacatccattttctctgagtctcttataaagaacacatagtgaaatttttaaaagctagttatataatatcttttaaatgcatttaatccttttctattattgatatgtttggatttctattatttatgatttctatttaccaagttatatttctttttttattttatttatttatttatttattttattattattatactttaagttttagggtacatgtgcacaatgtgcaggtttgttacatatgtatacatgtgccatgttgc

SEQ ID NO: 37709 - DNA, 1063 bp, Homo sapiens
ggagggactggccttggaaaggaggaattaaaattctgccatatagcagaaagcagatgaagtatcctacgttaggctaacgtgtcttgatagcagaaaataaggaggtaatctggtggctgctatatttccccccaccaccactagtagtggaataatctgccctattgtttggctgtttccattagtgcttgtatgtaggtgctactgtgagaaaagggtttcatcagatgggggcactgaaatggacaggcaatggagtttaggttattgagaagagtgtaactggaatgatggaaagcaaagttcaaattgactaaggggagaaaagagagactagtggcatcataaccaatgaaatcagatgatctgtcaccacttttggtggctgcaactcagcccacacccacagcccactcaccatgggcaagtattatcatttttcttttctttgagacagggtctcactctgtcacccaggctagagtaaagtggcaccatcttggctcactgtaacctctgcctcctgggcttgcctcagcctcctgagtagctgggactacaggcacatgccacaacacccagctaatttttttttctgtatttttggtagagacagggttttgccatcttgcccaggctggttacaaactcttgagctcaagcaatctgtttgccttggcctcccaaaatggtgagattacaggtgtgagccaccttgcttggcatatcattcttaactaataaggcagcatacaattttcttaaaattcttattttgaaataattaaatatttggaataacttgcagaaatagtacagagagttcccacctacctttcattcagtttctccccatggttatacctgagcaactatagaactacagcaaacccaggaaactggcatttgtacctgtgtgtgtatagctgtacgccattttatcacatttgtagatttgtgcaaccactgccgcaatcaaggtctgaaactattcattagcacaaagatcttcctcattctacccctttatagtaatacccatccctctccccaccaccat

SEQ ID NO: 37710 - DNA, 1050 bp, Homo sapiens
aataaccattatgcattcatctctattgaattgcaatatctgaaaatgaagggtaacttttatttactaactctttgtgctttggaaatttaacaaagactagacattatattaagtgagccgccttttccagtttcacagataagctgacactttttactataaaatatatgctctgtatttaacccataaaatggatatttcaaaataaaactaaattctattgaggtacctcacattactagaacttgcattgtaaatgctgaaacatattcttggttgtgggttcagtgtttcaatatgcataactgaaattttctatacattatttaacattctaaaattttaaattaaattatagaactctgtaagacagagactatgtgtgtgggtatgcctgtgtgtgtttgtaaatttctttataatttttataattttcttttaaaatttctacttattaattttcttttggattaacaatggccagtaagcatgagaaccaaaagtaaatatactttaatgaggatgaaggacttttctctgagcgcttcctagatctttgtaaaatgctgattattttttacacctacatttatttaacttaaacgactttcaaaatcatgtcatgccatttactttttatcctttttttacattaaaaaatattattccctaaggatattgtctgagtgttaaaatgactagttcatttttttattttaatgaaaataatttactttgctttgttcacaacacctaatatataactaatctgatcttgccatttatatgcatgcaaatattttaatgagatcacatagctgtcaagttaaatttaactgttagcataacactcaaggaccttcatgaattggctttcatcctacttttctgatcaaatcacttcccacccaccaatcctcatactttacactatagtaataacattttcacttccaagaaagccttccacctggcacgtgggtgcctttgcaccgaggtatatccttggaaggctttctatatcttcctttatcactgagtaaggtg

SEQ ID NO: 37711 - DNA, 1061 bp, Homo sapiens
gcttagtgctgagaaatccggggttgaagtagtaagccttagtctaaattgggtaaggaaggaaaataaaccagagcgaatctatcagaattatacaggtgagggtgtcctgaagacccagctaaaatgcaaagaacattagttaattgtgtccgtgaaggcattgctgagctagagagacaatgccattcatagccaggatagttgccaagatgtgagagcctgaaccaatctgacttaaggagccaaggcatgttgtgaattatagcaacaggaatcaaaagcaaggagtgaggataaaacacaaggaaggtggggcagttcaggaagctacgtttctgcaattttgactgcattctctatgggcccagcaccttaagtatgatgtatcacattgaacactgagaaaattgaagcagctcaagtggtaggaactattccacaaaattatttttaatgagtaaggtttaatgattttctttagtaatctgaatgatgtagaaatactgcatgactgcaattcaggatgtgttgtgaccatttttttctgaagcttccaaccagatgactcaaagaaaaggttttgagttgttcagtttgtaaaaggttttgagttgttccagtttgtccaaattaccccaagaaaagagtatcatgaattgtgaatcaagttatgcattgcattaaggccaaggccatgagatgagggacagctgaagctctcttcttgctctgcttaccaagttgtataccctcagggttgttgtcactctgagagtggattttctaatcccatgctcaaagtgggggaatttttctaatttctgaaaatatatcacagtggcaaactgtagcccaacactagagaattgttttcaaggttgaacagcatgatggtgtttcagtagccaatgttatctagttttcctttaggaaaaaaaaaaaaagccccagagcaaagttaccatcacagaacaatataattattgtgttaaaaaacaaaaacacatgaggagttggtggtagaagtagagcattagctgcaatctgtaattgcttgt

SEQ ID NO: 37712 - DNA, 1031 bp, Homo sapiens
tttacaaggcatatacgtcacttgaggatttcaaatgatctccaagcaaggaatggatattatagcaacaggaggggacacttctgctgctggcttagaaggttcagggtaaatcttggagtgtaggcctcaaggtcagccatccgtatatcctcatctcagatctcaggatctctctcctcctttattgtggccccaacattagcctagaagacttgccaaggctgttaatttagccatcttgtaaatctgcttctctcaaaatcaggtcctgggactgaactttaaaacagtgctgtcctctgacatgagaagatgagggttgctttaaatgctactacagagtccttctaggcctttcacacattgaactgacttgacataactgtcaactcatctgaaactgaataaacagcacagaacaactactaaccagcttcacaatccttataattatcattctgtctatcttgctgaaatgctggaaacactgtataacccagtacattcctcccatctataactcaaaacaatttcaccagcagtaagagtcttattctagcatttctgaagatgtcaccagtccatcacaccccactaacctacttaggtaattattgccatctgtccagtatacaatccaattgcataatcccatcccaaaagtctgcatcctagaatcatttttcgtacatattatcttcatttggattcctccagaagccaactatgaggcagggattcaattgtaagtaatttatttgggaggagatccaggaaatactcttgggaagtgatccaggaaatactcttgggaagtggggaagtgagaaatgaaagtaaaagcagccaatgaaaagtgcattgtcaagcaagttaccactgtagataagtggggcttaaacctcctgggagccagtggggaacacatgacctcagagtaatctcatctaaggggagaaggagctgggttttttaaacacctagtcccataagtacttggtttaaggctcttccaggaagtcttaatt

SEQ ID NO: 37713 - DNA, 1065 bp, Homo sapiens
tgctcccagcctcttttgctctttgcagagctggaagtagagtcctcctgaggacaacagctgtttctatctattgaaaaaagtattagctcatggatgagagcattttggctatcccagcaggtaaggggagagtggagaaaggagtgagacctttgaagccaggcagtgatgacatttctagtttctaaaaggggaccaagatctgtgcgtcccataatgtttggtgacttgagtccctctagtagcagcctccagggatttggtaccctagacacagtggtcccacctcaacaaaaacccaggacacccaatagaaagagcagagagagtcactagaccagaaggtaccatgcataaaggagtgatggatatattagcagaaaccactgaggacccatatcctttgaagcatctcagatacttgatcctgtgcaaaaccctaagactttaaatagccctgatgggaagatgtatcctagaaatgtctgagatttgatttcatactgtcccctcaaaatagaggactgaagatgaacttaagaagacttaaaaaaataaatgttgcatggcatatatattgaatatgtagaccaagacttatggcatccacaatcttctctccctcaggcaataatgacctagaaattttttaaaaataagctctctttcccaatgacacttcctttttacataaaatgttaattaagtgcttgccgttgcttcaagttcttgtaacttctgaacgtatttcattaaacatgattcttagaaatcacatttattcagctaaagaatatgaataaatctgacattcatcctatagaaatttttcactctgatttgatactctgaggaagttacaagagttaggatgcataagatattagattattttaaaaatattatcaccatatgctaaaatactaaatcagactaatgtctaatttcatccatttaaatatatttaatccttaaaatttgatacttagatgtgatgtcattacattttagcctagacatgtgaattttgtacattattcctgtaatagcagtgcagttgga

SEQ ID NO: 37714 - DNA, 1047 bp, Homo sapiens
ctccttgtatcttcttgatgatttggtgtcattaaacccacctgagattcttcctggctacataggactttcacttgcttattttggggtatggctgcagctgataggtaactgtatctttttcctccttcagtatatttactaccatgtaccattcaaacttttccatataccttcccaagacattttcaaatatgtgtttcatttacttggggattattctaaattacgtagagcccaatgagaaggtctgctagagcatgactgagtttgatcctgggtctgaaagcgtcagttagctgaaacctccctggagttccaagacacactatattattgcttatctgcttcttctttaatctttctagaatttgatacttttggattcaataatcttattccaactcaggagagagttgaattggatgaagttagagaaggagtaactgtgagtattagttcttgctataggtaaagcaatagaacagcaaacagcaagatggatagaacttagtcaacttaaaatgtattttttgagatatatgctattgaaatataattcacacaacataaaatttacccttttaaagtatacaacccagtgggttttttgtgtgtttttttttttttaggattttcacaaggttgtgccattcttaccactatgtaattttagaacattttcataatcctagacttatttttgacctgaaaaagtacttttgccttgtaatggcttaagagggagaaagatgatgtggtaggaagaataatggcccctcaaatatgtctacatgctaatttccggaacctgtgaccatgttaaattacatggaaaaggatattatagttgtagatgaaattacagttgctaataatggggagattattctggatatctgggtgggcccaatgtaatcacaagggtccttgaaaatagaagagagagttcaaggagtctgtcagagtcagagaaggagatgtgatgatgaaagcagtggtcaaagtgttgtgatcatttattcaaagatgcagaaaaggctgcaa

SEQ ID NO: 37715 - DNA, 1061 bp, Homo sapiens
taacaaaatgaagtcagaaggccataaaggaggggctctcacacacacattcctatgatgaaaactattagaaagactctctgaaaatcacaaccttgcacaaaggccactgcaactttatacaacgactacttctggaagtgcatctgcccaacaactgtctagtcagccttgaactgatgccacccttgttattgatccctgtagccaaagataattatttcaaaataatgtacctaaccttcctcattttgcctttgaaaaccgttgccgtcctttgcctccttagaggtctgtgctccctccatggttcaccatggcatgtgtattcctggattgcaatttgtcatttattcctgaataagctaattttagagccactctctctgttgttttattaggttgataacatatatatacatgtatatcatgaatgaaaaggatacagatattttacaaaagcaccaaactaaccaaaagaaaactctaaactgtaacacatgatgtgtctaatagaccctttactgaaaaactgtctcccaagaaaatttgaatattaatcaactgaggggaactgtacagcttacaaagtaaggcaaccagtgttggcccaagaaacagtatggggtgagatttgcaagaggtgcccaaggttctgaaaggcatcacagggagaaaggcttgttaattgtcctgatagaaaaggtgggcttacatgagaaaaggaaagaattactgaacaatttgtaggcaaagcaatttttttttttttgagatggagtcttgcattgtcgctcatgctggagcgcggtggcgcattctcagctcactgcaacctctgcctcccgggttcaagcaattctcctgcctcagcctcctgagcagctgggattacaggcacccgccaccatgcctggctaattttttgtatttttagtagagacggggtttcactatgttggccaggctggtctggaatgcctgaccttgtgatccacaggccttggcctcccaaagtgctgggattatgggcgggagctactgtgcccggccgagcaaag

SEQ ID NO: 37716 - DNA, 1035 bp, Homo sapiens
ggccagttgtatttttgggattggatctcagataaagctgggcagattggctgatttagatagaacaaattttgtaaacagttttgttaaatttaggaaatataaaatctaagaaaaacatttattctactaatgtcggttagattcaaaacgttatcaaaaatttaattaggttcctctaggtaaattaaaaaaaaaaatactttgtctctactcaggggaaattctttggttttagaaaaaatatttctttttaaagttcgcagttgcctttgagaaatggttcttgaaaaatttacatttgaaccaccgaagtccaactgtagaacggcaggaagcattctaaatgaatcagcattttgtagggagtacccagtagaattactcctgagacaaataagtgtggatgggttttattaaaacagctttcacttcagcagtgagcaagagattcgaaaatattcatgtcatatgtgtatttacagacactgttttaaataattagtctaaatgctaaagaatatcatatatatactcttcagctttacacaaaaggataggtatatttcttaaatagttgagtaaagtgagaatagatattaatcaagtatcagacaaatatgtagttacaaaactgattgctatcataaagaaaaaaaaaaaaccaggaaattgcacaactaggactctgacctgggagtaatgggacggggagggcaatcagaggtttttttctgttttttcttttttctcccagaaatcatgtatgtgctgggaatggaatggcggaatgactagcagtttaaattagacggaagttggggtttggagggggagaggatcattgaaaaagctctgagggcagagagctcagaaggccagttccatgtgaagacctgcaggagatctggagaggcaggcaaggattagcatggccaatttttatgcattcattggctcccagtttaaatgtcactgcctcagagttgttcttaaacacttaatctaaatcaggcttttcctgtaatgatcatt

SEQ ID NO: 37717 - DNA, 1026 bp, Homo sapiens
caggttttctgtatcttagaaaagttttattctgttagttccttgataattgctccatgtgttcattttgctatttctggagttcctgcctatgtggacatttgaacatgtgtgtgtctataatcttccaagtttcttatattttcatcctttatttctctttataatttcactgcattgaaaagtaactctgctttatcctcttcagaggtccaagctagatagtaaatattataaccttgcaggccaaatacaatctccactgtagctttgactcaactctgctattgtagcatgaaagcagctgcagagcacatgaaattaaatgagtatagctgtgttatggtaaaaatttatttacaaaaacaggtgacaggctagatttagcctgtaaaagtagtagtctgctgaccccagctctagattttttcagtagtagccacataatttcattttttccattatggttatttttcagaggctgttatgacatgtcattgcaacattttttaatctctgaaaaagttgtattattatagtttttcactcttttccctaaaaacacttaactatataaattataagtctataacactagggaacaaagaactctcatttctttatttgaacaactttagttttacttcaagcctttttttgaaagttggtaagaaactgtctgtcttttggggccctgttccacagaatcataaaacttgcaggttaaaatggtatcataaagtcaaaagaggcttttgtctatgtgttttaatttttctatttcctagcacaatgcactggtttcctgctatctttttctcgcatactgctccctctgatgatcttagaggtgcctcatacaaagactccctgcccctaatggcagacttgacacccacaaccatcctttgatctggagtgctgcatgccagcaatgcactggtcttttcctctgttccccatctttttcacagactcagtttgtctatttccaaccaccccattcaacatacttctcttcatact

SEQ ID NO: 37718 - DNA, 1060 bp, Homo sapiens
tgtctatctgatcatactagtttcctataggaatatcagattgaaaagagggaagaagggacaaaggactgcttgtttctgtttctggttttaggagtaacagatccttctatgctattggcttagatggtctgtggccttaattccattgtgcacagattggatgtggctgcatttagagagggacagtcgagtcccttattaggtacacttacgctgtacctatccagagaaaatcaggtgagcaaaacctacatacacttgtgaaaaatgataataggacacaatggacattatggacattggaaagagattgaacttaaaattaccccatttggaatctgggtggttttgccaaaagacagaagcagagtggtttttacttcctttgcagtatttctgaaaagtaaaaacagttttttgcagaaacccagaaacagcagctgaaatgttttacatactccctaaggaagcagcgcccagcagatgaagccctgcgggagagcacagcagcagcggaggctctgggggaaggcgtggtgtctaaggcaaaggactctgccagcttacatatttatttgaaagacacagacataaaaaggatgaatatgtttatataacttaaagcaatggttaagaaataggtaactaggtgaggctctgaagattttgaaagaagtgtgttacttgcttgctgctcctttaagggagaaaaacaaaacaaaaaacattcccataagcctaggaattctttctgggcccccaaggcaggttctcagctgcatttaactgtctaaagctactgaactcatgagttctagtgagttgtaaaagctctaatgaactccatagcttggatttacaaaatagaaaatctgggggttagaatgaagcaccggctttacttttctgcaaagattaccttctaatgagatgaaaatcagctttcttcaataccaagatcaccattctttgagaacttccttataaggtcccagatcaaacacttgatcttactcagggagtaactgttttctttagtaaatgcaaagattttttt

SEQ ID NO: 37719 - DNA, 1057 bp, Homo sapiens
aacacattattaaacatgtatccactcagctgtttaatattctgcaaggttggtgaagaaaaaggaaactaagtatgacactaagtttaaacctaaaacaatttaaaaaactgaaacaggctgggcatggtggctcatacctgtaatcccagcaatttggtaggctgaggcgggaggatcgcttgaggccaggagttgaagaccagcctcggcaacataatgagacctcatttctgcaaaaagtttaaaaataactgggtgtggtggtgcagaccgtagtcccagctacttggggctgaggcaagaggaccacttgagcccaggagttcgaagctgcagtgagctatgatcgtgccattgcactatagcctggcaacagagcaggaccctgtgtctaaaaaataaaaataatctaaaacagtgactctcaactcaagacaagacttcttaggtgggatatgcagaatatatggggtaagtatatatagtttgataaagcaaaaatgtagttctttcccttgagtcctggactcccacccctacccttacttcaagatggtatttgggattcagatcaggtcaagaaatattcatattaatcaaaggaaggagcgttgggttaaaaagaagttgagaaaccctaaagacatgtacttattaatatttgtaatcttcttattttattaaatgattatagctgtgggagagcctgagaaagatatacctttaaactagttttctgagtaacactggactttgactgtctttttcttgaatgtgtagttgtattggtgtggtgtggatagtaggcaaatggttatgtaggggaatgtgtggagaaaattggcaccattatatctacatagatggaaactaaaattgcttctactttgtcttctgttatttttgtggggtttttttttttcatcctttcccctactacccccaccatatgttccctttttttgtagtttgatcagtgctcttttcttgttcaggttacacacttattccatcagctaaatctgacaacttgtctgactccagccatagtgag

SEQ ID NO: 37720 - DNA, 1040 bp, Homo sapiens
agatattatcaagatgttagaatttttaaatagtgaaatattatgtaaacaaggctaattgtgattgaccatgtcagggtttttgcatctctccctccagttggcagtatcatatctgatcacagcagcaagatcagtggccagagctgccccggaataggtggggcttacttgcaaaagaaaatccttcagattaccaggagcacagccaaaagaacagacagtactgagaaggccactgaggagaatagagacaggacaagttgtgagaacacaaccagaaaaagaatgacatccccgtttagaagacttagggaaagaatgctttcaagggagagactagtcaacagccaaaaagaggacacagatcacaatcaagctacagaaagctgtgagaaagtgaaggatgttggaagcaacatcaaagatgagaaagggagtgccatcttcaattcaaatagccaaggcaacagtaacactttaaactgcttctatacgcgattcaagtctaaaaggaggaagacactctgatgaagttccttatttaattttagtgttaagtttgttttcagttattaatgtatacatggcttaaattaaaccatttgtcaaagcttaggcagacaacttagtaaaatactatttataaacacttgaaaatgcctcatttgtacataagttattttactgatgtattgagttagtaaattttatactcttgttttctgtagttgactttatttcctactgttagctggatctgtgagtgaaatatgtagaggaggcttttttatcttctactttttacgtatctttgattgggggagaagggactagtctaacatagcaatatcagaatcatctgggaaacttgttaaaaaatgcaattactgtgtcccaccccagacttcataaacttgaattgccagaaatgggatctggaatgtttattttaattggcttgccaggtggttcttagtattattatatttgagaaatactgatcaaatagacataagaatgaaattattttttaaaca

SEQ ID NO: 37721 - DNA, 1048 bp, Homo sapiens
caagattctttttaaatgtctgttttgcctttaaaattgtactgtatttttgtctgcattttagatttgtgcctaaaatttgaaatgattggatcattttttcccttttgattcaactttattcgaacatattgaccattcatctaagcgattaacatttgagtgtctgctgcatgccaaatattgtgcttggcatgtatgtggttttcctactaacaagaaacatgtttgtaaagaatagtatgtaatatatacgtaataattctaaaatagaggtttacactgtcattaatattaacgcagagaaagattttcctctgatggctctccattgcttttccaagttgacatttgttaccttggcagattcatcagagtttggattaagggataccctttagataatcccatttatgaatctgttctaaaggcacccatgtgtgatacctgaatcaatcttatgtgatcatataacaatttgtccttcacatggacaaatcactttaacaacgtatgactttgtaacactatgcagcaagatatacaattgtgtgctccttcccagaagatgttacagtatattggcagcaagggaagagaacatgaaatgtgtacaaattcccaccctgtctttgtgaataaatttctctgaagaaagtaataaaaggtatcagaacatctccccattccctcaaggtcagtcagtaccactggctaaggctcagcccccaaagatctagtaaaatgattcaattctggagcccaggacagctaggacctacttttatgaagagggtagcaacagtacaggtaataacagtatattgttggttccttttttatggacttaaaaagatagtggaaacccatttgttcagtatatttctcttggcaaattgaaatttccatttgtttgcaataatcttctagcacagggtagagaggtatattagtccgttttcatgctgctgataaagacatacccaagactggacaatttacaaaggaaagaggtttaatgcactcgcagttccacgtggctggggaa

SEQ ID NO: 37722 - DNA, 1065 bp, Homo sapiens
ttttgatacggagtcttgctctgtcacccaggctgctctctgcaacctctgcctcctgggttcaagcgattctcctgcctcagcctccagagtaggtgggattacaggcacgagccacccgacttctggctaattttagtatttttagtagagacggggtttcgccatgttggccaggctggtcttaaactcctgactcaggtgattcacccacctctgccacccaaagtgctgggattgcaggggtgagccaatgtgccccgccctattctcattttaatttttgtaaaagtaagtccattcttaagaattaaagtcctgttttcctttacaccacaacattcgcctatattacctgatttttcagtattcctgggggagatagtgttgctcacatttacagatgagaaaaccaaagtttataaagagaacgaaatttgcctgaagtcaagcagctagtagctcaggtctgtctgacatcaaagcttgcccttgaaacactaatctttgctttcttccatgtctctttgcttttctctgactcttcagctctgtcatatcctggccttctctttcatgtctgactattaacagtcctttagcagtttatttaacagtctaactctccatcttgcatagttttctaatctacgtaaaatcctatattttacatctagtgtaatttaaatgtatttcatattattcatttataatactatactttaatctttttcatgataataggtaagtattctgtgatacttctgttggtatgtatagcaagtactaggcagaatgctgcatttgataaaatatagacaagaattaatagtaacagagcattggttttaatgtaagtacaacccttagaagtagtttttggttattgatgttgatggaaatttttttcactgctatcttatgtttttataggactgttttgcttaaaagtaagctaaaatttgggggtatctaaaacctaagtgacagtgtttgtttctttgtttttattttttctctaggtggatttagaagttgcctatgtcacatttctaaaatatttta

SEQ ID NO: 37723 - DNA, 1622 bp, Homo sapiens
aataacataaaatagaacctaagtatctgtttctataaaattagttgattagcagttatgttacttattacctaaataggaacctctgttttttttcaaacttgcctgcagcctgcccacttcctttccctttccccccactgactttccttttattagtgttgggcaacatcagaagtataatcaggtataaaaactaaagaaagaagaagatatagctgctaaaggacgggtaaatacttgacagtgtttagttgaatgagactgagaaagttcaaataatggaaagtcactgtgtttatccttaaaatttgttgttggtataaaaattttctgaagagaagaaataaaatgacgcatttgttttatttccacagtgttcaaagagttactttttaggactgaacaagagaaatctggtgttcctcatattcccaaaattgctgaaaaaaaaagtaatcgccattctatccagcatgtgccaggagatattgaacagacatcacaggagaaaggaagtaagaaagttaaagcaaatactgtttcaggtggaagaaacaaaatcaggaagattttggataaaacacgatttagtatcttgcctccaaagctatttaggtaggtaatgccgatcttagctatgcaggaattttcatcttcactgtaaagtttttatttggggtggggggaggcttgggtaagttttgctttgttatataactaatgtatcataaagtcttcaaacagtactcaaataagaatacatttgaacttctccctatcactttcatgaagttactactttcagattatataatagcattattttgaattttgggaaagactgtccattttattttatgaaatccatttttaaatatttttggtccacttttagtctcctgatctctacaaattgtacaccttaaatcttgggacttattcaccagttttttttttttaatcatttttcctttgcagcaccatttattccttcttgaattctaaagttgaactttttaatcagacctatttctatttccaaaatgggatatcaccaaaacttagtaatacttgaagattttaaatgtaaattaaggtctgtaaaatactgatggaattagtccactaaagtgtcatgattggcgatgactctagtatatattacattagcagcttcctgaagcaattacaaaagttctaatcaagagcagtacaatacttagcacatagtaggcactcagtttatatttattgaataagttaagacagtgaataatcagtgaatgaaataaagcaagttcaaaaaatacattaaaagaaaatacttacttgcctcctgaaagttcctggtaattgtgccagattatagttataggaacaaaaagggatggtccttacctctgagaaattcacatcaggaacccttactctgtacacatttattatatactaagccagagacaggaagataaatagatcaaggttcttatcctccaagagttgataatctaagcaaattgcaaagttctcatgttacaggttgataagtggaggcaggaacaaacttgttaggtttgaatagattgtgtttctgtatatgtaactagagccagagcaag

SEQ ID NO: 37724 - DNA, 1050 bp, Homo sapiens
gtacttcaaagggtggtttcccaaatctgcctgatcatcagaatcatttaggaaacttgctttctccccatttaaaattttgttctttcattttagaatgtggctttattttaacggagccatgttatcattttttaaaaattatgagctcattcatattatgaaaggttctacactctagaacagtggttctcaactagtggcaatgtctgcagatattttttattattatgacttggggattattactggcatgttggtggacagaggccgaggatgctgctaaacagcctacaattcccaggacagcttccacaatagagttttctgggcctgaccccagactactcattaggaatgtctaatagctagaatcctgtaatcagtatatttattgttcagttatttgtatcacagacacatttaataatctaattcacacacacacacacacgtgaaatcattcttgagaatgaaatttatcatgcttttacttcttccttcaatcttcccaactactgttgaaatgatctgagattttagatctacattattgttactttttaacattatgtatcttctgtttcaagaaggcttttgatgtttgagttaagtttcataagcttttaaacaagcatttagacatttacacctgcttaactgatttcattgatcacttttatttcatttgcactgtatatccccattatttcaactcatttcacagttgtctttggtacttcttttagtacttttttaaggaacagatgggtgatacagtattatatgttcttgccttcctgaagatacttgtgttcaatagagcgtaacatttttttcccacagtgacttttccctcagaatactaaagtcacagaaagttatcacatcaacttaatgttgcccaagagaagtccaaactctttgcgcttcttttgtaggtacctttgggttatcttcccacaatgatgtttatagattctttattctttcttcttggaacaaagaaatttcattgggatatgtttttaaaaatagatctctttttat

SEQ ID NO: 37725 - DNA, 1051 bp, Homo sapiens
ttttaaaaagggggaaaaaagaaaaagtaacaaacattgccaacggtatggagacattgaaccctcctccccacccccaccctacacacattgatggtgggaatgtaaaatggtattacctctgtggaaaaaacagtttgagcagttcttcaaaaagttaaacatagggttaccatatagcccagcaattctaatcctaggtaaatacccagagaattaaaaacaggtgtgcaaacgaaaacttgacgtaaatattcgtagcagcactattgacaatagccaaaaggaagaaatgacccaaatgcccatcatggataaacaaaatgtggtatagccgtacaataaaatattattcagccataagaagaaaagaagtactaatacttactacaccatgatgaaccttgaaaacattaagctaagtaaaagaagccaatcacaaaaggctaggtattgtatgattctatttatgtggaatagccagaacagacaaatagacagaaaagcagactagtggccgccaggggctggagagagggcagaatgggaagtgaaagcttaatgagtttgaggtttacttttggagtgatgaaaatgttccagaactcagaactagacagtggtgatggttacacagtattgttaaggtactaaattatgaactttaaaatcattaaaatgatgaattttatgtggattctaccacgatttaaaaaaaatgactcatttcttacattgttaggcatgttattcaaatcagcttacattcgttaatttttaacttttctgaagcaaagtaaacgattctgcagtttgaaaatttacagtgtttataatgaaagaagtttcagatttgtaagggtttttgttttgttttttaatttttatagagacagggttttgctatgcccaggctggtctcaaactcctggactcaagggatcctccttgcttcagccacctgagttgctggcattgcaggtgtgagccactgcaccagactcagatttgtttttgttaccgttttggttaaacatgttcttgaccatgg

SEQ ID NO: 37726 - DNA, 1080 bp, Homo sapiens
tgcttcacttatgtagtaagtttttattgtatgctgaacattgtggatattacgttgaaaaaaattcttacctaattattatagaattaaactttctgcccaggaactgcatcttcagaagtatcatgcagtgacttcttgtcctgtggtcataatcatatctacctttctcttaaggacctgactttcctttgtttaatcaaggagttggtctttacatttttaaaaattcattttaagtttaaaaaaatccctttaaatttcttagcatgtttttgaacagtcttattttttattcttaattcctgttttatcaccttatgctcatgtatactcttaatattttaatagtttaatgtattttcttaactaattttattctttttatactactatgtaaaaagtagaggtataagaaaggtagttgtggtttttggggggttttggttttggtttttgagacacgttctcacactgtcacccaggctggagtgcagcagcaagatctcggctcactgcagcctctgcctccaaggcttaagcaatcctcccacctcagcctcctgagtagctgggagtgcaggcatgtgccaccacacccggctaatgccaccacacccggctaatttttgtatttttttgtagagacagggtttctccgtgttgcccaggctggcctcaaactcctaggctcaagcgatctgcatgcctcagcctcccaaagtgctgagattacaggcaggagccattgtgcctggcttagaaagacaaattgtaagggtagattatattctttcctttgcagttggtattaaaaggttcctaaaaaagttcttttagtagccttctctcagtcccaacccatgacttccattcttcctaaagagctatctccttaattgtctttgcttctcatgcagatgataattagccttctctactgtccatataactaaattccatcttgcctttttatgttgtgagccatctatctttttatccaacataatctaaaatatgggaatgagaccagattgaaataatctgggtcaggggatgaaaaccttagattaagatgaa

SEQ ID NO: 37727 - DNA, 1092 bp, Homo sapiens
atatccacatctctaagccaggatagtgcacagattaagattcaaggtcacttggaaagaccaatgctttattgtgaactagaagatggactgtacacagttggtccctacatctttgcaaagatactacaggagctcctataggagcattgcacttatattagcacctgcagattactccccttttagctggacaacctgaggatgagactggagtacacctgctggtgttggttggaggtgttctattgcaggaccatggcatagcctatatcaatatgtagaatatttccatcacctcagaaagtatccatatgaccctttgcagtcaagtaccttctcctgacccctatcctatgccctggcaaccaccaatctcttttctgaccttatagttttgccttttccagaaggtcatataaatggaatcatatagtttaaaaaaatatgatgcaatgaaacttataaattaaccaataaaagtgggaatgaatttagagagcatgaaaagataaaaggaataaagataaaataaataagataaaactctagaaccaaaataggaatgaagaaatttaaagaagaaacttataataatgttaacatcaaatatataaaacctaagataaaattttttaagagtagtcaaagaagataaaaattttcaaactctgctgctgggcacagtggctcaagcctgcagtcccagcactttgggaggcagaggtgggcggatcacctgaggtcgggagttcaagaccagcctgatcaacatggagaaaccctctctctactaaaaataaaaaattagctggggtgatggagcatgcctgtaatcccagctactcaggaggctgaggcaggagaatcacttgaacccaggaggcggaggttgcggtgacccaagatcacgccattgcactccagcctgggcaacaagagtgaaactccgtctccaaaaaaaaaaaaaatttcaaactctgacataacagttaactttaggaccatagccaaaagatagaaacagcataaacgccaaaataaaaagaagccaataaagataaacacaaaaggaaaaaaatcaaaatcata

SEQ ID NO: 37728 - DNA, 1050 bp, Homo sapiens
ctgaggccgcatgtatatgtctgtatattctgagccagaattgtaaacatcttcatttactgtgatttgcttgttaaagtgaacgttttaatttagaacaatactgaaagctcctgatttcagttttaaaaggggtttggagaggctgcctttatataaacactgcagtggtgtatgatttgtaaaaagaaacttaacagaattttatcaccgtactcatcactgtagctctggtttgaaaaggaaactaccctttccagcctaggaaatggcttttcttgttcgctgttatgccaattgtcttcagccatgggcctccaaagtaagtaattgttattttcttagcaattgatttaatccagttattaaattttattttgaactgtaaatgagctttattgcgctcttttctaaactttaaaaataagaactacaaagtagtctttctcattgccatttttttttaatttaaatatctaaaacattctaacgtgacctctaagagatttgaaaggtgcgttttaaatctgtagacttaaaatgcagtgcatttgagatgtactctcttcagactgaattattttttgattatggctattgctgtacttatcagtgatcatactctaacttgcttcattttcttaaatggttgatatatttaggtatgttagtctaattgccagattatatgacatttttcattaatatgatgctgtcataaattatgattgaattgtgctattttacaattgaattgtgctattttacaaagattagttgataattcttgagcagtgaaataatatgaagaaaatactcatgaaaatcaattatatgaaaatatttaaataatgattctaagtattttcaagatagtaaaccattagcagctggagactatttaaggtcatctatcatacttgtcatttttaaataaacataataactcacaaaaaagcaaagtgctatacaaccttccaggctaggttgtaggaaaatatatactctaattcagtgagttttattatacacagtggctatttatatagt

SEQ ID NO: 37729 - DNA, 1049 bp, Homo sapiens
ctaactacttaatatatatgcatgctggcctattttaaactcctaacaaatgttaattttccattttattttcttacttagaagatgccagccttacttgtggctgttgtcatgcattaagttgaaaattaaagaatattgcataaagttttcttgttttactttttaacaattaactaaaaccataaccaggattgtttgctaagtaaaatatgtgtataatcaggcagtttgtaattagaggaactcaagttgtaattattgaatgtgtaggtgtagttaacagccttcatttctggtaagtgactttacttagaggatgtatgtttatgtgcacaagagagactgtttcctggacggaaactgtggtctccagatctttataataacatcacctctaatctttaactcatgagcgttgtgctatacagactgttttcttgaggcagtttcttgtaagaagtaaatgaagcttccttatgagtctgttaagactccatagattgtcaataatatggaaaaatttgatatttcatcaggaatatgaacatgtgtttcaggtagagaatgccaaagataatgaagatagtattctacaaagagaaattcctgccagacaatcccgaagaagatttcggaaaattaactataaaggagagcgccaaaccattactgatgatgtggaggttaacagctatctttctgtgagtatatttaggaacacttcatgaatcttccttaattttcatatctagtatctttaatttacatgtatctttggtaatatcaacatgctgggctctgtatgtgaaaatttggggcaggtaaatatataatctttttaaatgcttctgtttggttgaattggttaggaatgctcttaccagtgggagttctggttttgcttttttgttgttgtttaaatagtgaaaaaagttattaggctgggtgcagtgggtcatgcctgtaatatcagcactttgggagacctaggcgggcggatcacaaggtcaggagttcaagaccagcctggccaatatggtgaaacc

SEQ ID NO: 37730 - DNA, 1570 bp, Homo sapiens
ggttatgactgatcacatgtatgacaatggttccataaaattataatactgtatttttactgtaccttttctgtgtttcgatacacagatacttaacattgtgttataattgcctatggtgttcagtacagtaacatgctttacaggttggtagcttacgaccaataggccatactatatagcctagataagtagtaggctatactgtctatgtgtaagtgcactctatgatgttcacacaatgacgaaattgcctaacaactagtttctcagaacgtatccttatcgttaagtgcacatggctgtatatgtgtgtatatagacgcacgttatatgtaactaattataattaatttaacataacacatatacataaatctatacatatataaatattagtatccaagatgatgtaaccaggatgttagtggtaatgttgattttgttaatttaaagcaattatatatgtataggtaatatttatgtgtatattatgaaaaattctgtatgatacatttaattggaaataattgaaatttataattatagttaatataactaatagatgcataaataaatgtcattagtaatcaagatttttattttagcataagagttgtgtaaaattaaagatgttaagaaaaactccagtctaaaatgtcagtaggaaatgtcagcattgacacgactatttttttcttaaaagtatttaccaaattatttcaccttaagaaaaaaaatgtgtttcctagggttgttcattgcaaaagtttagaagcagcgatatccaagtagttaaagcattcctagtggttatagagctcagattttgatgataatgagtaggtaccatttcccctctaaaaggataacaaaccttcgttaagttaatgatttatagcagatgtggataccaagaaatttattagattgggatttccttcactaggaagcagagaaatatttaaaattattgggcttctctcaaaaatatcaggattctgtgaaccttaatacttggggtctgtttcttctttttctatatttgacatgagattcttttttacctggaaagacttttctatttgtattcattgtgattgctgataggtttgaatttactttcaccacattatgtgctttttatttgttcttgttttttcccctcttttttttattttccctcctttattttaagttcttttttccttcctctcctccccaccatattcttgtagaaatggtgtttggtctcttcttttagtgctaattctgactatttttaaattcctacttaggccaggcacagtggctccctcctgtaatcccagcacttcgggaggccaaggcgggtggatcacctgagatcaggagtgcgagaccagcctggccaacatggtgaaaccccgtctctactgaaaatacaaaaattagccaggtgtggtaggcgcctctaatcccagctacttgggaggctgaggctggagaatcacttgaacccgggaggtggaggttgcagcgagccaagattgtgccactgcactccagcctgggcaacagggtgagatta

SEQ ID NO: 37731 - DNA, 1045 bp, Homo sapiens
agggcttttttttattcttcattaaaaaaaattcaggttatcttttaaaatggaaacctatctttttctctgtggttgctttctttttgatatgctgagaaatctttctgagaccaagaatataaaaatactgtcttttagtactggtccagctttagttttttccaaagagctgtgactccaacactttcttttaagaagtcatctttatatctaactacatttctttatatatagttggcacttcatatccgtgggtttcacatccattaattcaagcaactgctgatcctggaaaaaaaaatggatggttgcatctctactaagcatatatagacttgttttacttgtcattattccctaagcaataaagcataacaactatttatgtagcatttcccgtgtattaggtattattaaaaatctcaagttgatttaaagcatatggaaggatgcacataggttatatgcaaatgctacatcattttatgttaggcgcttgagcactggtagatttttgtatccttggggattctggaaccaatcccagttggataccaagagactactcaagtgtgaatattttttaagtttttttatttttagtatctgttgtcttaacactgctcccaaaagattataataatttacttttattaaattgcctaatcaggttatcacttttattagatttttactaagtgtatttttttctttgtgcaacgtatattgacagatgttagaaatttgagattagacagttatcttttataattaattttagggactagttaaaggcagaagtttaaaaagaattttcatatagtattgagatcagttatatctggacaattaagagaaaggtttttttttttctttcttttttagaaaatcttaacataaatattgtgacaggatcagaatttcttggataatatctcagggcttttttgttgtttgtttgttttcttttcctatattgatatattttattaataacctttgctaaagaaattgtttttctgtttttatagttttggtaagc

SEQ ID NO: 37732 - DNA, 1080 bp, Homo sapiens
tgttctctctatcctgttttattgatctataagttgatcaaataccacattgtcttgagtattctagctttaatagtgtgccagaatctgatattataaatatttcaactttgttcttattttccaaagttgttttagctattttaggctctttacaattccatgtaaattttagggtcattatgtcagtcctccaaggtgactttctgggatttttattgtgattgtattgaatctgtagaacacttcggagagaattgccattttaatccataaacaagatatatctctttttaatcaggtcttcaatttttctcagcaatgtttcatagtttttaaatttgtaactttgtagaagtcttgtgtgtattttgataaatgtatcatttttattctatttttaatggagtcaaaagattttattttctgattgttgctaatatacaataaaacaattgatttttgggtattgcgcttttattattcaatcttgctaaattaatatatttctgaagcttttttgtaggattcactttatatacagtgaattcactttatataaacagtagttctaggaactcaaatagttgagagtttatattagtgcccccagctaataaattcagaaaggatgatcaaaatataaaatacgtattttaatagccctaataatgctttcagtctacgtactgataaaaaaaatgctaaaactaatagatggaaaattgagaggaaactttataaatggtgggtcaagttgacactgtctgaagctactcaccaattttaacattactgataaatggaacaaacagaccttatgtgtctgcatatgtgatttgatagaacattgcattaggtcttttttatatctctctgttgtgttcgtatttatcgttactttctttaacatacaaaacacacatagcaatagctattataatattgttgtctgttgatttctatacttctgatagttctgggtctgtttttattggttgtttttttctcttggttatggattatattttcctgtttctttgcatgcctggtttgttgttgcttgtttctttattgatg

SEQ ID NO: 37733 - DNA, 1029 bp, Homo sapiens
ctcacccatgttttagcacatatcaattctagcatgtccattttttaaattgttgatactgcattttgtctatccattcagaagattttaaaaattgaaaattttagttttaatttggggctgtcacaaaaatgcttctatcaaaatttacataaaagtctttatatggccatgtgttttcacttctttattatagatatgcaggagtagaattgctgtgttatgtaagtacatgtttaacttcttgggaaaagaccaaattgtttataaaatgactgtaccattttacattctgaccaccacttggtattgacagtcttttatattatttgccattctggtgtatatttaacagtgtcttactgtgatgttaatttgtagttcagtagtgatgagtgatgtagggggtctttttatgtgcttactagacattcctgtatcttctttggtgaaatgtctattcagacattttctccatttttaaattgtactgtcttatcaaattgtaagaatgtatctattttggatccaagttctatgtcatatatgtagttttcatataatttctctcagtctctggcttttttttttttttttttttttttttttgagacagagtcttgctctgctccgcaggttggagtacagtggtgtgatctcagctcactgcaacctctgcctcccggggtcaagcaattctcctgcctcagcctcccaagtagctgggattgcaaatgcccactactacgcctggctaatttttctatttttagtagagatgggggttgcaccacgttggccaggctggcctcaaactcctgacctcaagtgatctgcccacctcagcctcccaaagtgctgggattacaggcgtgtgccaccgtgcccagccagtctgtgacttcttaatagtgtcttttgaagcataaaactttaatattgatgatatctactttaaggtttatttttgagaatagagcttttggtgtcatagctaagaaatcttcaacctcacgattatttcatctt

SEQ ID NO: 37734 - DNA, 1038 bp, Homo sapiens
tgagcagaggggtgactttgaatagaatgggaggcagctttgccctaagcagtttccagcttgacttttccctttagcttagtgatttgggaggctcaagatactttgctttcacaaggccatggagatatatatgtatgtatgtatgtatgtatgtatgtatgtatgtatgtatgtatagttttttttttttcttattttctagaacttttcttgttttcctttcacagttaaatctgtagtctacctggaattgagttttgggtatggtataatgttgcgtcgttttccatagggatacctagatgtccttttctcactcatttagtgccaccttttatgtaaatcaaatatccacatatgtgtgtgccagttttaattttcatgtttttgatgaataatgatgttgaacacttttccttatgcccttatgcttattggccattgctttctgttttttctttaataaagtatcccttaaattttgtgtgcctgttgttaaactcctgttattactgtaactgtccagtggattcttcctgcccacctgtacagacaaaaccaattcactgagaccatggcattgtaataaagagtttaattgacacaaggctggccacgccctgtgggagatggagttattactcaaattcatctctcccaaaatttggaggttaggattttttaaggatagtttggtgggccagggaatctggattctgggtgaagccacaggactggttagcaggaggtctgtgggtcctggtggccactgatgaatcatcagaaatgctaaaaacctgaaaagacatctcaataggccaatctcaaattctacaatagcactgttacttgcaggagtaattgagggagttgcaaatcttgtgacttttggaataatgactggtaatcatttatgtctacagcttagcagaattcagctcctcatccttgtaatctggtggtctttctttcattagctttacaaaagcagtttagttatcatttaaactataaatgtttcctaaagttagggtg

SEQ ID NO: 37735 - DNA, 1023 bp, Homo sapiens
ccagtaactgttcttcacactgaggattcagtagtgaatcagacaaatgtatattttttgtaatgaaaacattatttggtgtgaactgacagattttgacagattttgtaatgtacataaagagtattaaggttgatgccactgaatattacctatattattgcattatgtatatatataaaatacacatatatttctaaactctctgtagtttagtgacaacatactggtagatttggtcattttctaacaatcaattagattataataattagttgaggtcaaattataacaattttaaaaacaaaatgtaagataaaatcttcaatttttttttttaatagattaatgtctgcaagagcacgctatgagagatacagtggcaatcaggttctcttttggtaagtatttccataattcacataaactaatgacttttatgtttaaattttaactcttagcattgaaattcatttgattctgggacaatttatgtagagcacactgaaaaatattcatagaccatgaagtatataacatacatagaatccaccaaaagtgtacaaagcaatgaattttaataaatatatactaaatgtgtaatgactactcagatgaaaatagagataccagttttccagaaggctctaatcaactttgaaaggtaatgacaattctgacttgtatcactgtaggttagttttgccacttattgaacttggtatagagagaatcttttggtgatgcttttttacttaataaatatccaaatttttctgtttttgtatgtgttctttttcactgctgtacaatatataattgtgtgcaaataatgatttgtttgtcccttccactgttaatagttgggttatttctagttttctttttgtttgtttgtttgtttgtttttgagatggagtttcgcacttgtcgcccaggctggagtgcaatggcataatcttggctcactgcaacttccgcctcccaggttcaagtgattctggtgcctcaacctcccaagta

SEQ ID NO: 37736 - DNA, 1059 bp, Homo sapiens
ggcagttctggtaacataaactttataaacatttataggaataagaaaaaaatgagaaacctatgaaggagacttagatggagcagatggacccaaaataacaaaaagtaaaaactgaaaaaaagcagccgccgcagaaagctaataatggaaataaaatactgaagacttgcatactgtatggtggttattggatgcctgttgctgttatgaaaactttatatacatttaatccttcaagaaaccctgtgaaagaaggtattattatccacattttacatacggggaaattgaatcacagagagattaattagtctaatgtcacacagctagacccagtgtagtcaggattcaaacctaggcagtctgatttcatagtctgtgcttataatcgttgcttaatgtttctcattaagacgagaatccagaaagaaccatattacagaagggataggagagagaatgacatgtcagcagtcaaatgctgtagagaattcgaagagagataaggattgaaaagtacatgtggaatttagaattaacaagtattaggtgacttcataatgcatggtaggatcagaaaagtgaagtgaaaggctacactttgaacttataaacaattggatgctcaatcttttgatacgttgtaatttcagtggttaattattgaagtcctaaagtttaagcatatcattgagactttcattcttaaaaattaaaattttagggtgtaattttttaaaattatactttaagttctcagatacatgtgcagaacgtgcaggtttgttacataggtatacacatgccatggtggtttgccgtacccatcaacctgtcatctacattaggtattatttatcctaatgctatgcccccccgccctccagccccgccgcaacaggccctggtgtgtgatgttcccctccatgtgtccatgtatcctcattgttcagctgccgcttaagagtgagaacatgcagtgtttggttttctgttcctgtgttagtttgctgagaatgattagtaaatgcgtgagccaccatacctggccatctc

SEQ ID NO: 37737 - DNA, 1033 bp, Homo sapiens
tgatgaataaatattttacaagccaaaatttggaaatacattttgtaaagtcatcatatgttaaaaaggtagcacttcgtattcattggaactgctaactttttgtttcttggacagtcttactcagcagcttggtttcagttagttgttataggctaatgcctcctaggattatgttttccaacttatcccctaaattttatgtgcttcagcttcatatatcaaccatcttgtcctccaggttcttcaaccacttgtcctaaattgagccatcattattcctcttccttcataatctgttggcagctggccgagttgctgtctctaggaatttgtattatttctcttcattcctcatagatgcaacttgccactaaactttgtcccctgaatctttttatttgcccttttcttacaagttttactactctaattcagtctgttttattgtttctacccccaaattattgcttgagtcattgagtcttgctgctagagtgatcttcctctcagatctgattatgttctactcttgctcagaattttatttcctatatttcctaggtatagattaacaatatgttgttcaaatcatttttgtgaattaaaagagaagctgttaatatttatttcagagtaacaggttaaagagggactgtcccgcttaaactgagatatggttacctcacccagatgataacattaatttgtacattcatttaagaaataatatatctgatatattaaaaaccaaggttgtagagaggagttagacatggtccctattcatcaatgacttgggagacataagaaaacataaatgtaataaatgttttagttattagtgacaaaggtatgagtagggctttgggattgcaagatggggaagggaacaagcttcatgggggagcattgaattcccagtgttaaatgtcatgaattgatttctggatgatcaagagaggtcattccaagcagagaggcaggagcaaaagtactgatgatggcaagccatgtatacttgtagaataag

SEQ ID NO: 37738 - DNA, 1018 bp, Homo sapiens
agaatagactgtaggtgtttaagggcaaaagcaggaggttaacggctgttattgcataaaatcaggttagagatgatggtcactctgactaaagtgatagtgatagtaatggaagtggtgagaagtggttaagttttagaaatattttgtagggttagccaacaggatttgctaatagatcagatgtggaccttgaggaaaagagaagaatcaagcatgacttcaaggtttttggcctaaataactggagtgttggagttattgtcagagaggtttgagctgccatcagcgagatgggaaaagctgcaggaggagtaggttttaggggcaagatcagaaattcagttttgaacatgtcaagtttgaaatgtctgttagaaatgagtaagaggttgcatatacaaatttgtattactaagaagcctgagctggagataacaattttatagtcatcagtttatagatattgaaagtcatgagactgggtaaaattaccaagtagtgagtgtacgtagagaatagaagaggaccaaggacagtgagtaccatgggacatgagatcagtataaggtcggggagaagagtagaaatcagcaaaggagaatgagtggaagcaaacagtgcagtaggagaaaaaccgagagagtggtggtgccctagaagccaaattaataagctgtaaaatagaaggggataaaattatttgtttggcttatttttccttgaatacctactgggtgcaaagcgttgtgaaaaatatacaaagggatgagaattagtatgttgaaatcatttgtttgcatcgtgtaattgatgagtaaataatgagtaaagaactccttgtgtttctgggacaaaatgaatggttcctttattttgaaccatctgtcgtccttaggtgaaactatcaactcaggcataatcctagtgagccagacatcaagtacagacacatgttgtaaagtgtgccatttagatatctttctaacacagtgtgtgtgtgagagatttctcctac

SEQ ID NO: 37739 - DNA, 1033 bp, Homo sapiens
caccgcaccatagtcacaaaggaaaattacttttgtgtgtttcattgaaccataggcaaaaacctctcaactttgtaagatgtcacccaataggctgtgtgggggagcgagggagaggggcgagagaccatcaaattaacattctttatctcagcttggtgaagcacacataacaaaacagacactagtcactttgctcagcacctaatactgacttatcaaggctcaatctttttctagtgtgcccctgtcatctttgatcccctcaaggtagggagggatgacctctgactgggaattcactgggtgatgtctggacaacatgaagagcagacagtcaccccaggtcaaacctgttgaacttcctttactgctcagcaaatgtgaccaaataaggttctccgagttaggtctgctggacttccatcaccaattcctttagagatcccctctagatgtacaaacacacacacacacacacacacacacacacacaaaacaaagacaagacggacagaaggtctcccaaagcaagatccctgagcaagaattctaagagtatgcttctattctctgagaaacctccctgaaatcttcctgattgaggagaagtctccccaaccaagactcttcctactgattagggagagccaattgaaaccgccaaaggggccaaacttagatcccttaagaagccaaaccagtcaggagaaggaaggaggcattggcaccacctagaatacccaccagaccagtttagagatgtctttacaggaacaatttctctactgcaattgaatccatgcaccatgggtcagcagtgtgttgctggtagagatagtgccagcgtcagcccccagtccaagagaactacgcagccacttgggctggcctctggatctattgccggtgggggactaccacaccgtgggcaggtagccacaagggtgatcccagatgagcccccaaatttgtaactgcccaggggttcttcctgcccactgcataaagactatggtattgtagtagagaa

SEQ ID NO: 37740 - DNA, 1008 bp, Homo sapiens
tcagctattgtttggttgaattttctatttctcccttcaattgtacatatcactttaatactttgctttaataacaaaatctggccacctctcaatttaaaaagttaataaagaaatagagaggcccggaatggtggctcacgcctataatcccagcactttgggaggccgaggtgggtggattacttgaggtcagtagtttgtgaccaccctggccaacatggtgaaaccctgcctctacaaaaatacaaagattagctgggtgtggtggcatgtgcctgtaatcccagctgcttgggaggctgaggcaggagaatcacttgaatccaggaggtagaggttgcagtgagccgagatcacgccactgcactccagcctgggcaacagagcaagacaaccatttcaaaacaaacaaacaaacaaacaaacaaacaaaaaaacagaagtgaagaaagccaagtgggaaattatggatgagaaaatgtggcttagtgagcaacagtcaattgttagccaataaggtttaaaccttctgtgtctgtagaaagttacctaagttgtaaagtttggtgttttattgtatagtagagaaattatggcaaatatagataaaaacaatttgtgagaaaaacttatcagaacttgtgatcttcatatttaaaggctagtttgcccagcttttgaataccaatcaaataaatatttattgacctactgtgttctgaatatagtgccagtactccaagggatatatgtatgaaaaagaaaaagtttctgacttcaagtttttaacttagcaacagagaaaataaggccaagtgtatgaataaatgtagtataaaacataacaaaagtagtgcctgaggaagatacttgaatgtattattgcttcaaaggacagattttttattagttggtggtatggatgcccttcagggtaaaggaaccgtttctagttttttcaatgcttccctcccaatacctgatgaagtgcctattatttgttga

SEQ ID NO: 37741 - DNA, 1038 bp, Homo sapiens
caacattgccaacttcgggaggtccttgctgggtggctactgctcatcttatgtgcctgactttgttcttcaaggaattgggagtgatgagaggttccgtcagtgtctgatgtcagatttatctcatgctgtgcaggtgagtgaccttcactgtttttgagtttatttagaagaaactctgttaagcagcagaacccaaaattgccttatatttttggtcatactttttacaacacaatcattgttctctgaatccatcattttatattcagtgcccgtatctttgtatctgtcactgtgaaagcaaataaagttccagaaatctatccacatggatatctgaaatacagaaagtactttatgtattcatggatgtccatcaactaggttatttatagtatcaaaaatttgcaagtgcttaagtttgaatggaattattttcttaatttccttttcagattactcattgcttacatatagaagtggggttggcttttgtgtattgatcttatatcctttggtctttctgaaactcttattagtctattcatttttctgtataggttccctaaggttttctacacacaggctcatgttatcagtgaacagatagttttaaatctttcttaacaatctggatgccttttgtccccgctgcccccaacttttttttttttttttgactcattgtactggctagaattttcaatacaatgttgcatggaagtggtgaccatggacatcgttgccttattcctgatcttaggggaaagacattgcatctttcatgattaagtatgttgttagttgtaaggtttttgtgatgccctttattagatggaagaagttccctttttatttttattttgtttaaccgaatacttcttttagagacaggcagttctcttttattcctagttttgagacggtttggttttttttgtccatcccttaatcatgaatgagtgtgggattttgtcatatgctttttctcaatgtctattgagattgtattgtcgtgtcatttttcatctttaa

SEQ ID NO: 37742 - DNA, 1045 bp, Homo sapiens
gaggtagcaggatcacctgagcctaggaggctgaggctgcagtgaaccatgattgtaccactgcactccagccaggattacagtgtgagaccctgtctcaaaaaaaaaaaaaacaaaaaaacgagtaaaacctaaactattactcatacagtaaaagaagtaggtttctgatcattaaaaatagcttacttagctgtgtcagtaaaggacatgtccaataactgattttttccattacaggagacttgtatggcgctattggctctcccgtacggttagcaaggactgtggtagttggcaaacgacaagacatggtccagaggctactttattttcttacttattttataagatgctctgaacttcaagaaacgcatcttttagaaaatggagaagatgaagccatcgttatgccaggcacagtaattactaccactttagagaaaggtgaaatagaagaatcagagtatgtccttgtcacaatgcatagaaacaaaagcagtttgctctttaaagagtcagaagaaattagaactcccaattgtaactgtaaatattgcagtcatccactccttgggcaaaatgtagagaacatttcacaacaagagagagaagatattcaaaacagctctaaggagctgctaggaatttcagatgagtgccagatgatttctccttctgactgccaagaagaaaatgctgttgatgttaaacagtacagagataaattaagaacttgctttgacgccaagttagagacagttgtttgcacaggatctgttccagtagacaaatgtgcattgtcagagtcaggcttagagtcaacagaggaaacatggcagagtgagaagttgctggattcagacagtcacacaggcaaagcaatgagatccacaggaatggttgtggaaaaaaaacctccagataagattgtgcctgcttcattttcttgtgaggctgcccagacaaaggttactttcctgattggggattctatgtcacctgattcagatactgagcttcgaagtcaggcagtggtggatca

SEQ ID NO: 37743 - DNA, 1044 bp, Homo sapiens
ttaggaattctgtgcataatcaggcttttgactggagaccttcacttcagggcagtgtttttcaacctttttttattatcattacctgaagaagcatatttagatatttttcccctaatctctgctccttcaataccaccgccccccacaatcccatgaagatttaacactacaagatatactctatatctgattatatactctgaaagatacaaatgccaggaagagtttggaaaaggtcattcctcggggccattcaactgctatatctgctctctcctatctgtagtcattttctggggaagtggagaggaggtagggagctgccaaccatttatggactttgaattagtctcccaattttcagtactgtatcgtaactcctgtcatgactttcccaaaaatttgtgagtcttgagcctcatcttgctttagtggggcaaattagctctcctttgtccatgtctccctctgtgatactatgaccttataactttctctactctgctacttcaatcacaattccaccatatgtttgtattccagaatttcatgaaatctctaattttaattttcagtaatagttccttggcaatttttttaaaattaagtaatttattttttaaataatagagacagggtctcactgtgttccccaggctggttttgaactctgggcttaagcagtcctcctgccccagtctcccaaagagctgggattacaggtgtgagccaccacacccagctggttcttctctaattctatttgttgcactagtttatctgttttcaaatctttaggtggtgttcatttggggcctcagaaactgaagagaggataaacatttgtcttcaattttccatcgtatctggacacctgtaataagctttaaaaacaaacattttcatatatgcctagtttgtattctagtcatatttgctctataaaataactttttgtttattttaaaattcttagcaatgattatatgttctacagagagctcattaaagtgacctgttcttattgtttctatccattgt

SEQ ID NO: 37744 - DNA, 1088 bp, Homo sapiens
tcagccaacctcggatcaaaatatttgaaaaagaaaaaccaataaaaattaactgcaattaaaaaaatacacattaaaaaaccaatgcggtataacaattattaacatagtatttacactgcatttggtattataagtactctagagatggttttttttttttttttttttgagacggagtcttgctctgtcacccaggctggagtgcagtggcgcagtttcggctcactgcaagctctgcctcccgggttcacaccattctcctgcctcagccttccgagtagctgggactacaggtgcccaccaccacgcctggctaatttttttttttgtatttttagtagcgacagggtttctccgtgttagccaggatggtctcaatctcctgacctcgtgatctgcctgcctcggcctcccaaagtgaggtggttttaagtatacaggaggatgtgcatgggttacatgcaaatagtatgccatttcataagggatttgagcatccacagattttggtaaccatgggaattctggaaccaatcccctgaagacaccaagagataaatgtacttcttaaattaagggattatttaaaattaacaatgacataatctttaaatgattatttgagatcaagtgattagtaaattttgggcagttgagaagaggaaggaaattatttacatgtgtacagaaaccatgaaagctagagaagcaggaagcatgtttagttaacattgctgcctaacaaagacgaagtctttagatttttatatagaccctaggcatatcaaagaaaactaaatcatgcctacagtttcctcccaaccaaaagagtctttcattgtccgggcactgggaaaaataaggggacagactgggaaaaataaggggacagattactgaaagtatttgcttttcttaccattgaatgatagggcacaattattagtggagaagaaagaaatgatttctagaataaaccattacttctagatttttttttttttgagacggagtcttgctctaccgcccaggctgaaatgaagtggtgcaatctcagctcactgtgacctctgcctcccaggttc

SEQ ID NO: 37745 - DNA, 1018 bp, Homo sapiens
gaaaccgcctccgtgattcaaatacctccacatggtcttgatcccttgacatgtggggattatggggattatgggcttacaattcaagatgagatttgggtagggacacaaagcctaaccttatcggttattccagctttcttttggttagtgttaatgtagtatatctttttctataccttaacttttattttattttatcttattttattttattttatttttgagatggagtattgctctgtcacccaggctggagtgcagtggcgtgatcttggctcactgcaagctccgcctcccgggttcacaccattctcctgcctcagcctcctgagtagctgggactccaggcacccgccaccatgcccggctaatttttttttgtatttttagtagagatggggtttcaccgtgttagccaggatggcctcgatctcctgacctcgcgatccaccctcctcggcctcccaaagtgctaggattacaggcgtgagccactgcacccggcttctataccttaacttttaatctatctctgactttatatttaaaatgggtttcttgtagacaacataaagttggttctctgccttttaactggtgtattaagaccactcacatttgaagtgataattgatatagttggattaatatctatcatatttgtaatagttttctatttatttcactttatgtttttatcctcctctttttatgtcttctctggttttaagcagttaaacgcttccatttttctctcctcttttagcatgtcatttatatttcttaaaaacttcactttttagtgtttgtcctatagttggcaatacacatttacaactttcaaataaccatgtactgcttcacagggagtgcacatacttcataacaaaatattccaatttctccctcacatcacatcccttataacattgctgtcattcaatttaattttccattagctatgatcattcaatatattgtcatttttattaccctaaacaattatttttctatt

SEQ ID NO: 37746 - DNA, 2051 bp, Homo sapiens
tttaatgaattctttttttcacattttcctctctttgaaagccacatgaacaaattaaagagtgcaatagaacaggtaagcatagttatttatttatgtattttccttttaaaatcttattctcccaattaagcattatatttattaatttggcagaaaaattaacagacgttgtgcatgtgtcctataaagtgctctggtggatgcaaatagattgaaccctttttaaggtgcttactgtctagtaaaagatataagatcattcatccatttgttctgtaaataaatatttgagggactaaaatgtggtagacaccgttctaccaactaaagagaagtgataaaagcaacacttctgacctcatgggacaaataaacatatgaatatagatgtatgtaataagtcctgtgaagaaaaataaaacggagaacggtatataagggatcctgcaaggaaggattactaatttttataggctagtcaggaatgccccttattaaaggacatgtgaatgtggtccagaaatacggagcaggtgagctacaaccatctggaacgagatattccaggcaggggcaaaggccttattgcaggagtaagcctgatacttaagcagcattacgaggccaaggtgcctaggttgaagtgagactagatcatgtaggaccttataagataccattgtaagaacattagcatttattcttacaaaagtatgaaagatgggaaaccattggagggttttcagtggaggaagaaggacattatttatgaggatcactcttactgctggtggataatagatttctaggagcaaaagtagatgttgtgagaccaattagcatactgttacagtaatccagatgatgaatacgcaaaccactttagtgattgaattggtaagaaagagttggattctagatatattttgaaaacagccagtttgattagctggtagactaatcattaaggttgactctaagatttttttagccaagcagttaaaaggatgaagttgccagcattgaagtgagaaagactgcaagcgaaacagatttgataaaggaagatgggtattttatatttgcatatggacatccttgtgtttttatgagtctggagtttaccagagaagtcatcagtgtatagatggtatttaaagccatgaaactgatggagattggcaagagaggacaggcaatggtaagcctgagttgtggtgcattttaacattaagagtttgacaagatgagaaggaaccagcagaggcgaaggaaaaggattggctattcaattaggagaaaaaacaagagtgtattcttttggggaaagccaagtacagaaagtatttcaaggaaggagtgatcacttttgtcagttgctactgagatagtatatacgatacaaatatgtatagtaaattgtgaaatattagaatctaagctaaaaaggaaggacaaaggttttttagaaatttgggggaaagtgaaatgacttcctattgggaagaagtttcatttggactgcattttgaaggatgtatgggatgttttggaacataaagctctgaaaattggatatagcagaatagcaagaaaatcgacattcttgccacccaaagggaacacagtaactcattgctgaaaaatcttatttaggccttttttatgcatattgtgcttttacttggtagggattgtgctgtgtctacatttttcaaattatatgcccatttaaaaaaactcagattgagcaacatggcaagacccggtctctacaaaaaaaaatttaaaaattagccaggcatgggggagcacactagtagtctcagctactagggaggccgaggtgggaggggtgcttgagctcagaaggtcgaggctgtagtgagttgtgattgtgcctctgcactgtagcaacagagtgagtccctatctcaaatagtaaaataaaaaacatcattgtcacatacacatttctcaagttattgtaaatggttcttacatatattttagtaggtctcctcaatttaagtaacagtttccctgtt

SEQ ID NO: 37747 - DNA, 1026 bp, Homo sapiens
aattaaagcccagagtctgcccttacggaacacagatgtatggagtctactgggagaaaaattaggaaaatcatctgtcataggtcattgtgtgatgcatttagtgataggcctgcgcaaaaagcttcagcgaaagagcaccacacttagcctgggcaaggggcagggatgccaacaatgctttacagaaggatgatgattgagttgtattttgagaaataaatagcagttatccaggcaaaagctcagaaaagcattttagctaaaaggaaaagtgtttgttggggcccagagagcagcataagtaaaaggaggagtaattttaggcttgaattactgttagatatgagaaacttaattcagtgtgatagcatgtgttgttacattatatggctctgctatcgaaattgttttgtaattcagttttgagtataaatgaaaaatctaaacttgctgtatattgcaatccctaggtatgtattagaataacaaagagaagttttataaaaaattcaagtgcctgaactctactttcaaagactctcgtgtaacctagagaaggtatctctaggcatctgtatttgtgaaacaaaacaaaatgcaaaacctaacacttgattctaatggatagctagggttgccgaccactactctaataagagtagcttgtgtttttcaagtaatctcatctttcttttctaattgagtttcttatttttgttttaaagaatctagagtttatttcttttaataaactttgcttcgatgtaatctagatatttagtcttccctggcaggaatttaattctcattattttatttaagatttaagtataatttatttatacttacattctttgtaagttgaagcatctggctagactgatctgttaggctgcttcaagttattggattcatatatgccatttaagttaatgtgtgttttcttttttttctaatagggttatttttaatattagaatgcagtgaaatgtattttttccaaacttaggacagcattttatt

SEQ ID NO: 37748 - DNA, 1029 bp, Homo sapiens
acatgggaaaaaagtttacagtgtaatataatcagcatcaattactgctataaggtaatataaaataatatggactaaattaagcaacaggaaggcttttggtggcctagatgagcagtttcagtggggagaatagacatcagaatgggacgactcagggtttggacttttgtccaagatgcaagcagtcgttctcaaactttttggttttaggaaccctttacacacttagaaattattgaggactgcagagaacttttgtttatgtggattacaactactgataaatactttattagaaattacaaccaaaaaattgaagaatatttagtaaatccttgaaaaattacactaataccccctttcatgttattacaggcctccaaaaaattagtaagaagagtggcattgttttatatttttacaaatctccttaatttgtggatgaggatacagctaaattctcatatctgcgtctgtattcagtcttttgtgatattttcgttgaagtgtatcaagaaaatcctgtctcacacagatatgtagttggaaaatggaggacttcgcagaccccctgaaagtctcggggacccaacgggtccttggatgacattttgagaactgctgaactgctgtaggattagatatatggagggtggtagaagagaattgattgtgtttaagtgttgacagaataaggaagttataaggagcatgaaattaaagactagaagtagtaattgatagaaggaggtttttgaagaagaatgggggattggggtcctagctgacttagagttaactttggaagggaggaaggaacttaggattttttaataagtcactagcacattgtaaggcttgaataacatgacagcttaggcaggaaggaggcaaggatggatgagagagtaagttttgaagcagggtgataggaaaaaaaagggttccaatctggttaattctactgtgtgtatgtgcatatatgcatgtgcatactctaggaaacaaaagttttatgctgagaag

SEQ ID NO: 37749 - DNA, 1042 bp, Homo sapiens
aagacaggactgacctaggtcagccatactgatattgcacatatacactatataatgatagccaccagggtattacaagctattaatgcaaagattagaatagtgaagctgaaacaaaggcaggcctggtgtcaggatcatgggccatgtgccagaacctagtaaattactggggctaaagttaggcagtggaagaccccagagagagattttgcaggtgccatatcagagcaagactcattggctagtcagagcccctgggggtaacccaaggtcaaaggcagcaaggaagctactccagactacagaaattctgtagagcccccattaattgttaatgccttaaaaagacctgtttggaagagttttattagctaagtttctaatacctgtaactctttggaaggaaagtgggaggtagtctttttttttttttttcgagatggagcctcactgtgtcaccacggtggagtgcagtggcgtgatctcagctcactgcaacctctgtcctgggttcaagcgattctcctgactcagcctccagagtaggtgggactacaggcgcaggccaccacgcccggctgacttttttttttttttgtatttttagtagagacagggtttcactatgttggccaggctggtgtcaaactcctgacctcaagtgatctgcctgcctcggcctcccaaagtgctgggattacaggcatgagccaccatgcccggccatggggggtatcctttaaaatattatggatgccttaaaaaatattgaagccaaaaatactgatttttaaaagtagaaattagagatctactaaagtagaaattaaagattccatgttggaatcactgatgttagccataatcaccagagttttttcaccttttctaagttctgataattcctaaaatctctagaaaggatattttgcactaaaagcataaagtacttttatttttcttatcctgaaagagacactaaaagaagtgatataggttatttgtaatatattacagtaaagatagtttttggatattt

SEQ ID NO: 37750 - DNA, 1077 bp, Homo sapiens
tctttgacaaacctgacaaaaacaagcaatggggaaaggattccctgtttaacaaatggtgctgggaaaactggctagccatatgtagaaagctgaaactggatcccttccttacaccttatacaaaaattaattcaagatggattaaagacttaaatgttagacctaaaaccataaaaaccctagaagaaaacctaggcaataccattcaggacataggcatgggcaaggacctcatgttgaactcatatctagttctaaagcttttattctttttactttaaatttttggttagagataactggagactagtacatgtaatttttaacaatgcctttggtgatgttggtaactagaaaacattcagtcttcagtaaatgtgactttagtcagattatttgttctaaaaacctacctgaggtttgttaaatgaaagaatggacatactggtaactgtgataaagcactggaatacttttaggaatatcacagatgttggtggattgtaactttggtagttgtgagcagtgaaagatgtagagaagctgttggggaggaaaaagagaaagaggaattaaaaagaaatacatttttcttctacactagactgcacaaccatctggtcctaagttcattctctcattaaaattttatttattacattagtatattctcatttcgaaagaataaacatatgtatagttaaatctgaaagtctcatttgcatttctcctttcatccctgcatttctccccagaaaaataggttattttttataacagtgttacttacattaacttgggtttattgttgtatttaaatgaatgaataagtattttttacatggtctcagttttgatttctaatatgggaaaatattgataaatataacccatgtacacaaaagactcttgggatcctcgataacttgtaagaacattaagggttgttttgtttgtttgggtttttttttgtttttttttttgaaacagagtctcactctgtcacccaggctggagtgcagtggtgcagtctcagctcacttcccaggttcaaaagattcttgtgcctcatcc

SEQ ID NO: 37751 - DNA, 1028 bp, Homo sapiens
tccctggcctcttcgtccctctcagtcatctttcttggtgtctgttggtgtctctcattttccctttgtctctctatcactcaggctctctagagtgtctcttctcagtctctctgttggtctctccttggtcttctctgtctctcggtgtctcagtagtaatacattgactctcttctcaaactatccagttattactcaactttctgaaatttgcctataaacctactcttctttttattataaaacttttctagaaactcatcagtgtctagaaatcaaacattgttgactacttccagtctcatttattttattatgcctttatcctatatactatctcccttaattgaaaatttatcctccttcagagtttatcacaactttatgaatcctttctgattttctctaggtagatttattttctcctccatcagaattctcataattctttactcatattcatagccttctatatcatagctgtattcgtatgtgtatttgttactagactgggaaaaaaaccttaaagtaaaaaattgtcctgttactcacctttatttcctacactgcacattgccttacatgtggtaagtactcaggacacattttgatcgattgtaattactgttaggaagtttattttcaaaatcctgtaaatactctcctgaagattttatgtcttccttttgaacactactgtacatattgaaatactcattgtttgtcctgggttctatatatggaaagaaggacattgtgctgtaaatttttttaaactttctacattataatttgggttcatacataataaagacattatgtttaagcattagcagtttgctgtatgaaagtaaattattcagctttgctgtatttgtacaatattctattttgctgtggtaaatgttgaagtaacttctcatgttcttctttcttagttttaaaacacttttcttagtttaaaacaatttacaagagagaataaggactataaatattattttgaccatttaatataccaaagc

SEQ ID NO: 37752 - DNA, 1030 bp, Homo sapiens
aaaaaaaaatctgttttaatgagatgtccataatgtaatgtaacttgatgaatatagtattactttttttagtagtctttctcttttaaaaattgagctataatttgcatataataaaatgtataatttattttgaaaaatatatgcatctacttaaccacaatggcaataaagataaaggacattttgatcactctggaaagttccttagtatacatttctcctccatttccctcactccctatccctgatcactgctttgatttctatcattgtccattagttttacctcttctacacataaatagaattatcagtaggtgccccattgtgtctggattctttcatgcaacagtattttttgagttcatctttgttaccgtgggatcagtaattcattccttggtatttctgagtagtatttcaatgtaggaatatatcgtagtttgtttatccattctctgtggcatttgggtttaaataaaactgcagtgaacatttctgtgagagtatttgtgaacatttattttcatttttattggataaatttcctgtgagaggaattgctgaatcatagctgtcaagcaatattccaaaaatggttgtacacttttacactcctactaacaatgtatgggagttccaagggcttcatattattaccaaccactggtgttattagtcgtgtcagttttagccattttaatgcttgtggccattttttttgtttgtttgtatgtttttgttttgttttgaaacgatgtttcactcttgttgcccaggctggagtgcagtgatgcaatcgtggctcactgcaacctccacctcccgagttcaagcaattctcctgcctcagcctcccaagtagctgggattacaggcatgcaccaccacacctggctaattttatatttttttttagtagagttgggatttctcccatgtaggtcagactggtcttgaactcttgacctcaggtgacccacctgccttggcctcccaaagtgctgggattacaggcgtgagccac

SEQ ID NO: 37753 - DNA, 1062 bp, Homo sapiens
tgcaacctttgcctcccaggttcaagcgattctccttcttcagcctcccaagtagctaggactacagacatgtgccactatgcccaactaatttttatatttttagtagagacgagggttcactatgttggccagggtggtctcgaactcctgacctcaggtgatccaccagcctcggcctcccaaagtgctgggattacagacatgagccaccgtgcctggcccatcttccttaacttttgtaacagtgctttaccatgagttttcttttcctctctagtagtctgtctttactgatcttccctggcttctctgcttttcttctctctgttcttaaaatattgatgtatcctaaaattctagtttattagttcttcacattcttttctattttcaattaatatgttctgcctgaagatttcactaccaattgtgtgtcagtaactcctgtgtctggaactctgttcccagccattctcctcagaccatttttctttttctttttcttcttcttcgttttttttttttttaagattgagtcttgctctgtcacctggtctggagtgcagtggcgtgatcttggctcactgtgacctctgcctcccaggttcaagtggttctcctgtcccagcctcccaagcagccagaattacaggcgcccaccatcatgcccggctaatttttgtatttttagtagagatggggttttgccatgttggccaggctgatctcaaactcctcatctcaggagatccacccaccttggcctcccaaagtgctgggattacaggcgtgagccactgtgcccggccaccagaccatttttcatcaatcggttgcacatcttttcttcagctgtctcgcagcccccttgaactcaatctggcaacacccttatcccaaacttactccccctcctgagatattctttatcttggttaatggtatctcctttcatgaaatctgaaagctgagagtcagccattctcatcctttattccccatatagtcttcaggtcctatctctgccttctaaataagatctagctctatccctttcta

SEQ ID NO: 37754 - DNA, 1016 bp, Homo sapiens
ttagggattttgaaaagtggaactgcttaagagaaataggatgccactaatgtagagcttaacttaatgtgatattcaagtgtgttaacatcaaaataatccaaatctagttattaatttggtgatatatttgctttaaaatatctgaaaattttaaatgccaagattttagatacttattttattgaaagttaaattatgataataaccttaattattagaatgacttcttgaaaatgttttaagcaagtattaattattgttttaaaatatgtaattcataaatactgtacagtatgttagtccttggtttatgtttattttatgattctctttctgccatttgttgctcttctttcttggtatgtttacatgggaaccttcactgcagatttttggaaagcagtgtgcttttctgtttgtatcccatatatatatttataagtaaaatgtaaattaaaagcttgacattgtattagtgtattgatcataatccagttatttttatagttaacggtattctctaattttactgacatggacctgaatttatttagaattatttttgatgctttgtgaacaccttaaatgtgtgtccccacttagtcatttgagttaaataatttgaattagtaatggccttatactaatttaggtacattgtttttattttattttattttattattagtttttgagacgaagtcttgctctctcgcccacgctggagtgcagtggcacaattttggctcactgcaacctcagcctcccgggttcaagcaattctcctgcctcaggctcccgagtagctgggattacattacccctggctaatttttgtatctgtagtagagatggggcttcaccatggtggccaggctggtcttgaactcctgacctcaggtggtccaaccgcatcagcctcccaaagtgctgggattacaggcatgagccaccatgctggcctgtttttttattttaaataagtcacattatacaagttcccccctttttaa

SEQ ID NO: 37755 - DNA, 1070 bp, Homo sapiens
tttttatccctacagtttggccttttccagaatgtcttataaatgatatcatacattgtgtagccttttgtatcaggttctttcacttagtataaatgcctttgacattcctctatgcatgttattcctccatgtatcagtagtgtatttttgttgcaaagtagtattcctttgtatgtgtgaaggttttaagaaacacacctacctgggctacaaaccctaatatatctgaattcagaaggatagccaggaaatggtaatttcttggactcccgtctcatggtatgagataatggtactagggagtagagtgcaaggaggtcatagtgtcaaatgtgcgtaggtggaatggaacataagaggctgtgcttaggactgtttttcatgtttggtttagaagggaaggtaaatgtgacagtaacgtaaaactttttaaagataaataggtgaaagaaacaaatcagaggtataaggaatagggaagatttaacaggagactagaagggatggatcaactctgtagacgtggagagggagaggaacgcttttttctttaaggtaaaaggagaactagtatgattgggtgctgttataagtgaattgagaggacttacagatttttgatctgagtgtctggatgagtagacttagtaggttgactttagagaagtaaacttctaattaattcaaatactggttttcctgttttggaacatgttcctttttcatccattgtttcttagttttgtggcactttgctggttttcaagctagtgggcatcaagcttttctctggccagttctttcctatcctgaaacccttcagtggaaaaacaaatcatgttctgccttaagagtatgatggttattaagctattttgtattccttggaggaaaggatatacaatcctggggattcaaagaagtgcttcttgaaatgaatgtgaagttttagtatcagactagaggtacagacaatcataatgtagaaagcatagatgtttccctttctccaattttcttttccttggggttacatcttttaatagttaattctgagtttactagtt

SEQ ID NO: 37756 - DNA, 1062 bp, Homo sapiens
ggccggagaatcacttgagcccaggagttcaaagttgctgtgagctatgatcacgtcactgcactccagcttgttaacagaatgagactctgtctcaaaatgcaaaggaattaaacaattgacttcaaacataattgtttcatttgtttggtaagcacatgttgggcacatcctccccctgctccctctttttaatgccagccactgtactgggccttcatagaagaatgagatcctgtagagaatgagattaagaatgactaatgattcttaatcatttttcctgccacatacccctctagcaacctggtaaaacctatacacaaacctcttcttataaaaatgtttagaaacacttaaaatgaaattcatagaggattataaagtaaacttatgttgagatagttgtcagaatattaaatttctaatatagtagcacatactatattattaactcatgaaataacaagacctagcagtggatctaataagtattgtaattttgaataatgatgtgcataaacacatttttctaggtatctacatcagctgtacaatgatgaaactatctatgattcctattggtgatcaaagttataggaaccttatacctctgaagtttgttgcctgcattttaatagaaggaaacgctaaatggtagttagagattggtggaaatctctaactacaattcattccccatccaagttgacaggcacaccaaaccacagatctgtgtgggtcagcagattgcatgttaagaatccctgatctaggagctttagtttaggctgtgagactgacacttcagtgggtagttatataataattgaaacctgagcaggggttttgtctcatttatctttacatttttataatctcacagtgtccagtaaacattaaacagttagttattaatagagctagataaataatttgggggtatatatgggagattacttctgttagaagaggtagcattgagctgtattctaaatttagtatacattggaattttcaggttggatgaagtaaggaagaggtactcagaattgaggcatg

SEQ ID NO: 37757 - DNA, 1073 bp, Homo sapiens
acgatgcctggctaatttttttggttttacataaggtcttgctatgttgtggaggctgggcttgaactcctggcctcaagcagtcttcccaccttggccttccaaagtgttgggatttacagtcatgagccaccacacctggccctaaaatgtatttcttttttttttctttttcctaaaatgtatttcttaattagtaagacttgaaagtcagaattactccttgatccgtaggctgcagaatggatgttgtgttagcaggcatgataacattaatctccttgtacatcaccattggagctctttggtgacaagatgcattgttaatgagtagtaatattttgaaaggaatgtttttttctgagcggtaggtctcaacagtgggcttaaaatactcagttaaaccatgctgtcagcagatgtgctgtcatccagactttgttgttcatctatagagaataggcaaagtaaatttagcatcattcttaagggctgtaggattttcggaatggcaaatgagctttggcttcaacttaaagtcactagctgcattagcccctaacaggagagtcagcctgtcctttaaagcttggaagccaggcattgatttctcctgtctggctatggaagtcctagatggcatcttcttctgataataaataggctgttttgtctacactgataatctgttatttagtgtagccagtgtcatcagttatcttcgctagatcttctgggtaatttgcctttttaccttgtaattttatgttaatggagatggcttctttccttaaacctcatgaactaacctatactactttcaaacttctcacctctctcagacttcatagagttgagagagttagggccttgccctggattaggctttggcttaagggactattgtgactggtttgatcttccatccagaccattcatattttgtccctatcagcaataaggctgtttcactttcttaccatttttttattcactggggtagcacttctgatttcctctaagaaattttcctttgcattcacaacatggctaactggtgcaagaggcctgtc

SEQ ID NO: 37758 - DNA, 1035 bp, Homo sapiens
tcatggccatctccctccaaaaataattgtccaaagcttcagataaaagcttgggttctgcttctgacttagagagatgagcaattgaggcccaaagcctcatgatgtggtgtgacccattttgcagaagattaaactgagactgtgagaatgggatttgtctgaagtcatagcaagtaaatgagcatgatagatacctacttgggcctcagaacccaatcttgtaccagtgtcctgctttggacctatactccctaaggcaggacaaaatgagcttattaaatatgatgccctacacttcttcaaggaatgtgataccaggagacaattacccaggactaggagtagaaggcctccatcacagcctttagcctcagactgagccaagaagaactcaagattggtagaggcattaacatgccaaccatcatcattccatctgcagttgagcagaaaagctctttcaaatataatgtgctctcctttgtagtctgtcaaatatttttctgtctggactttgccttagggcaggatagataggatttagagatagaaaggaatggaaggctgttagatgtggagccaggcattgcatgagcaaagggtaggactgggaactggctacttaatttgcaaggtccagggcaaactgaaaatgcagaactccttggtcaaaaattattaagaatttcaatacagcaatggcaaagcattgaaaccaagtgtggcgctctgtgtgactgcacagttgcatgcccatgaagctggccctggcaggggatcaaacctggcctccaggaaatgaagcagatgcaggagttctgaatggggacactgggaaggggggtgaggtgagggccatctcccatcattctccttcctgtaggctctgcatcgatggctttcggtcccattccctccctgaagaggggcccaagaagccctgtcagcatcatgcagcacaggaagagccatgcacacgcagtggccgtttgccccaagcccatgaggggtgccatctgcctttggagaccc

SEQ ID NO: 37759 - DNA, 2035 bp, Homo sapiens
gaaaagacattagtgagggccaatatagaaatatgagttttcccaaaagacttttatgtatatatatgacatggcaggaaaattgggtcactagtggtttttacttcttcgttcatttggcaaacatatgaatagactgatgtgtgccaaacactgttccgagttctgggaactgaggaaagaaacaagctatctgttttcatggagctcgtattttacttggaggatggagaggctgacaataaacttgtacaaataaatacaaacttcaagtagtggtaattgccaaggtgaaagaaaagagagtaatggtatagaatgacagtcattgggtagctgctttagatgaatggtaagtgaacatgtttctgagaaagtgatatctgagctgagaggcaaaggacgagaaggaatctgtcatgtgaagatctgggaagcaggtgtactaagcagaagagcagcaagtacaaagactgtgaggtaagggatgtgctcggggtgactaagtaacggagagaagaccagcgtgactagaacatagtgatcaaagtgagtaatgttggaacataagtcagagacattggcaggaggccagtttttatggaagccaaattgtctagtgccttgtagatagtggcaaggagtttggattttattctagatggaacactatcagaatattttttcttttttgagacagggtctcactgtcacccaggctggagtgcagtggcatgatcttgactctctgcaacttctgcctcctgggcttaagtgatcctcacacctcatcttccccagaagctaggactacacgcaccacacctggctaatttttgtattttttgtagagatgggattttgccatgttgcccaggctggtcttgaatgctgcccactttggcctcccaaagtgctaggattataggtgtgggccaccgtgcctggcctatcagagtattttcaggcagagaaaagcataaggtcttacttctagcataaaaggaacattctggctgctatatagagaagggactgtagaggacaagaatgaaagcaggttgactgattagaaagcattgcagcattataggcaagagcttatgatggcctgaactagagtggtaactgtggaagagataaatggatgaattcagaatatttttggaggaaaaaggtgacatgatttactattggatgtgggcatgagggaaggaaattaaggatgactcctggatttttagcctgagcaactttatagcttttcatgtttgtttttgaaatggggagatttgatggggtgggggtttgggaaattaagagttttttatttttattttttgctttttaaaaattgtggtgaaatacacataacataaaatttaccattttaaccactcttaagggcattaagtacattcacattgtgcaaccatcaccatcatccatctgtagagaactcttttcatcttgcaaaattgaaactctgtacctattaaacactaactccccactcccctccttaccctagccccgaaaacccttctataatacagaagtctctatgaatttgaccactctcataagtggaatcacatagtatttgtccttttgtgactcgcttttattgtcacttagcataatgtcttcaaggttcatccatgttgtagcatatgtcagaatttccttcctttttaagactgaataatatgccattatatatgtatactacattttgtttacccattcatccactgatggacacttgggttgcttccatcttttgcctgttgtgactaatgctgctgtgaacatgtatgtacaagtatctatttgagtacttgcttttaattctttgggtatatacccagaagtggaattgctggatcatgtggtaattctatgtttaatttttttaaggaattgccatactgttttccccggtagctgtaccattttacattcccaccaacagtgcacaagagttccagtttctccacgtcctcgccaatacttgttattttctgtggttttg

SEQ ID NO: 37760 - DNA, 1048 bp, Homo sapiens
gtgatgttccttgttagaaacacatagttagatgggctaggcaaaattgcaataaatataatacattaatgtagcatttccataagtccctacatatgcatcaggtattgcctgagatgatttgtttctgatttcctctgaatccacttgcaccttttgagtacctcagaagagataatcaggaagttcaaatctggcaagcatgcagctcacttggcctggccacatgacctagtctagtcttggaaattatcacctgtcctatccttcactatctggcataatggggtgggctgccatcctcttgcatttactttaagttagcttcccgtagcctgaaaaggcgagcattaattgaacacttaccatggtcaaacgtgtcaaattttggcttgtttccagactatacaggccaccccatagtttctatataatgttaaatgtttgcatttcagtcttttaggaaagcattcatgattgctttttttcttctccaaacagaaagcgttctgcaaagcctgaaactgtaattgactctttactgcagtaaatgttacagacttaaagtcacaataaaaattagtgatattctcatgcctggacaaaatctttaattaaaacagtgaagacttctctataatttcaattaatggaagttgtagatcaatgaataagactggaaataataatttgcttaagaacttttagtctacatatattaatataacattaaaattgtacaactggtgattgttcaaattgttgtactactactcttcaattgtactgtgcagggaagttgggggaacagttcatactatagagagttacagtttagatgtatgtgtaaatcgattagctatttatccaactactgtatatttaggtaactagaatttcaaaatagaaaaaaaaaaactgtgtcctgttttgcacatagaaagaagcagatcagattgtcctatgttgcgctgttatatatgaatgtttggactgtacatctaaagaatgattccgtcctaacacccacccagcctgtttgaacaca

SEQ ID NO: 37761 - DNA, 1050 bp, Homo sapiens
atggcaaaaattggcaaaatgtctgctggctaaatccagctcaccacctgtttttgtaaataaaattttattaaaacagccatgctcatttatttacatatgctctatggctgctttcacatgaagccgtatggcctgcaaagtctcaaacacttatctgtccttttgcagaaaacgtttgcctgatttagagaaattttttttgttcacacctagtttttcacagagtagattattattttcaaagctaaagctgataacagatttgttaaaaataaaattttaaatagaaaaatgccagtaatatgttaaaatatttaacaataatgtatcttccttccaggcttagaaatttaaaaattttcagtgagccttttgaaagttttgctatcaaaccttaaacatatttgatagtttgatattttgggggagggagagactgaaagtggagatagactaacctattatgaagggtaatttatcactcctataatatttattgtgtatgactttgagttttaaaactccattcctttaacttatcaacctaaatagtttcagtagactaaaatctcaccaaatgacttctttattttttattcttgtcatttcaaccctttgaatgattaggctttaggtgaccagtaggatctgcccacagtagttgcttaaagcagtacactttctaattcctctgtatggctttgtaaagtagagaatattggataaactaccaagattggtttttaggaaagtaaattttggttctttaatacaaagcttgattgtcctttaaaatttttttctctgaaaactgaatttttctctgtgtgtgtgttcattttcttgtttcctctttctttggttcctgttgggctcatttctttgttttccaggcagtagcagcagcagtagttcagactccacatgttctgtcatagagaaacctctggataagttcttgcctagtgagtggtagctcttacattctctaacagagctttggcttttccataacccatgggcttcatttgagcaatgctgcaccac

SEQ ID NO: 37762 - DNA, 1033 bp, Homo sapiens
agttaacatcaggcaaatttaagattgtaatttatgccaataattgatacgtatcacattttttaaacttgattattttactttttttgacttgtggttgtcctttttgtggtacactcgtgtattagcccataatagtgtcctttggaaactcatgtggttgacactctcattttcgagaaggccaagggtgcatatgtgctttaaatgtttttgatgtatttgtaatggtagtattaattttaactctgtcaagtgtaaaatgatttgtttcatatttctaattcaatagtgtgcaaatattgggccagcagattacaattatgatgaaactatcagtacattacggtatgccaatcgtgctaagaatattaaaaataaagctagaattaatgaagatccaaaggatgctttgctgcgtcagttccagaaagaaatagaagaactgaaaaagaagcttgaagaaggtagcttttcctcaaaatattaatctttatgttggctaaaaatacattgttgaaccactaactgttctaacaaaagccctctattaaaccttttttgagcctctaacattggtagttaaatgaatatttctagaaagtgacttggtacttacatactttcgcattttcatattaagcttaagtaaaattacataatatttgtgtatgtggttttttaaaaacatttgcatgatgttttgtagatttcatatgaccactttttaaggaatgaatgtttatttgtctctgtataagagcaaattctgcaatgtatgtatttaggtgaaaatgaccagaattctggcattgcaatcaatatcaactaactattgtttgaagtaaagcaagatattagacagtcatgagtaaaccaagtttgctataaggaaaaatgcattgcatgacctttaaaatatcctttcatacctaaatttgaacatgagattgtattttggaaattcttttctaacaatatcatgctagaaagttggaaaatttgaagatcttatttatgagagtgagacgct

SEQ ID NO: 37763 - DNA, 1038 bp, Homo sapiens
tgtgccaccacacccagctaatttttgtatttttagtagaggtggagattcaccatgttggccaggctggactcaaactcctgacctcaagtgatctgccctccttggcctccccaaagttctgggattacaggcatgagccaccccgcctggccatagtttattatctttaaataatagtaataataataaatagtgcctattttttaggattggggtgaaagttaaataagaatgcaaacatagctgggaggtgcacctgtaatcccagctatttacaggtggattacaggcaggaggattctcctgagcccaggagtttgaggctgcagtgagctatgatcgtgccactgctctctagtctgagtgacagggcaagacctcatctcttaaaaaaaaagcatgtaaagtacatgacctagcacatagcaaatgatcagtaagtgacagctgatgtccttataaagcttattttttatttaataatttaatgtgtctattctgaaatgcagtctatgagctcatgatattttctgcttcaagtgcagtgttatattcctaatagcagagtttgaaatacttagtcagtttgaaaaaattaagacttttttattcccatgtgtaaaaaatggcttctggtatgattcatttattttcacggaaaagtctgaaaagtgtgttatgattattttcacaaaaaaaagtctgagaaaagttgaggttaactgaatagagtagtattagttgaggaaccgttttcatatatgccatcacatccaaggctatcttttcttactacactgtgtcctgaccaactactccagccctctgtttccccacatcgacccttggttttctccaattcttcatccacaatatagccatagtgatcatgatgtcactcctctgattgaaaaatcattctatggcttcatgttgcttttaggataaggtctaaaaagtttaataccgtccttattatactgtgtgattatggcattgtcagtttctctagctctgcctgcatccatcttccct

SEQ ID NO: 37764 - DNA, 1870 bp, Homo sapiens
atcatatacagggagaggtgggtaataaacttcctgtaatgacagtgtttggcatttctttatggatggaattggaacatgaacaagaccatgtccagcgtttttactgtgaatgtaaatggaacagcagcccaaagctgttgtctgtgccccagaggtgctacctgtagacagggaccaactccatgtgtgtgtgttaagtgtttgactccaattaagactcccaagcaaatcctgcatattccaaatgtaaagagtactcagtgggaaaaaggttgttacctcaaagtcattgcttctttcctggctgggtcacagggtgaagagatgaaggtgtctgatgtatatagacaattagggaaaaatgagcggcaaaggagctttccccttcagctgcactctaaaggggaacattttaaggaagtactagcagctttgactcttctatgctcctgttggtttacaagccaccaagaatgtcagtgttgagaatacggcctggtaaaatgggagatgtaaaatgactaaatgaaaggaagggtagttttaatgttgaagcaccgtgctgggcactggagctacccagaggaatgcacaacgctcccctcaaggagctcacagtctagcctactccctggctggaagcctcaggaagacgtgctaatttattgtggaattggtagtttgcttttcatgcccctgtcttccttctcatgaccatttccccctttctgtctggcttgcattattgatttccaggaccaagtcctggcttcctcctgccttcctgagatgatgttctgctcagggagaagtggaggggtgagctgtgtgtgtccaccgaggcacggccaggaagaggcagcctttacctgtgaggggctccatgctccagcagcagagcaggttctagtgacaattcaactttttatgctatgaccaggggtggatctaaattttatggggctgaaagcttgaattatttagaaagacttctttaagaaaaacaatgttaatataaaattaggtacagggtcttggaaggggccctgaagattaagcttccttagcgtcacaataagtccgtatctggttgcaattgaaaactgatgcttcagtgagggtatctaaaaaggtaaactggcatatccagggcaaatgtgggctgccaatggctcatctctagggtaattttatgtctgaaagtgtatgcagttgggtcagagcatgacctttaagatagcctctctcagctaacatatttatgaagatgaggcctggtgacccagcaggttcattggatacataagaaatgagaattcctggttcatgggccaacctaggactctggagtatgcagacttggccattcgtccattgtggcctgcgggtcgcaccccaggcatactgaaaggccatactcgtggctggctgcctgcgggcctaagccttcccaggatcttcaggacacttgacagacttgtgttttctggtctgagctgcctccacaggtccctccagcaagcctcactgcacctctcccctgctgtttgtgtttggaattttgtcttctttagctgagaccaaattaaaccttggtgcataaagtgagcttaaaacttgccactgtttagtaagttagcccccatagaatgtgaccctgtctgcagagtctcatttacccctctttttctcattgtcatttgttggctttattagggctgtcttacaggatcatgttggcatttactatcatgtctttatcataaaccatgtttgtttgaggtagaagaatcaccatataattcgttgcccaaattgggactattgagagagaaaggggatgctattaattacaccagatcaaaag

SEQ ID NO: 37765 - DNA, 1060 bp, Homo sapiens
aagcttcagtcagtttggtccctgggagagaaaacgctcttcccatgacggctctgtggaggccaggaatggggtaggtgggttgactgggagtactccttcctgccgccctggtcaagggactagtgtgagtcgggagtgcatttttggaatgggggcaggggtgtttttcatgaccatttatttgagtggttttgattggttatgcatactctttaaatttgaatccaaattttttgcaaaattacttcccaatcagatcttgacccttagcctgggacaccacaaactgaggtgaattctctgctttgctcgtcacaaatgccaaactgactgccctttcacggtgtccatcttgctgtcttttgcttctgtttgatttggtctgcatatcttttaatgtgtctgtttttgttttgtttgttttatttttatttttcagttaacgcacgcacagacttacatgtcaagagtggactttagactttcatgtgttaagttgcttgagttacaccttgtgacccttctcccataacatggtgtgaggacggactgggagccggtacagactccagtgtttacagccttgctttcctcccaccgaccctggccccaggctgccccgggcctggcgggccacccctctctatgcaaacacgtaaaagccatgaatgctggaatccaaaactgacgaggtttatttttttcagagccagtggctggtcttccatttacagtgtcactattccctgacggagctgttatgtgccgctctagcgaaggccccagccgggatgctaggcctaattgttcagcgtggagatggcaactcacgtggtgccctaggtgcagctgcgtggtctggtatacatgctgcaaaattcacccagttcccctcattttaatttttctaacctacagcttaattttaataactttaaaacacttctaaatatttattttggcaccagcgtcaagacaaataatatcctctcccattattttcataagtaacacagattccctgatttttaaaaactaaaaatacagctaaaccttt

SEQ ID NO: 37766 - DNA, 1031 bp, Homo sapiens
acctgtgtttctgggagctctggcagtggcggattcataggcacttgggctgcactttgaatgacacacttggctttattagattcactagtttttaaaaaattgttgttcgtttcttttcattaaaggtttaatcagacagatcagacagcataattttgtatttaatgacagaaacgttggtacatttcttcatgaatgagcttgcattctgaagcaagagcctacaaaaggcacttgttataaatgaaagttctggctctagaggccagtactctggagtttcagagcagccagtgattgttccagtcagtgatgcctagttatatagaggaggagtacactgtgcactcttctaggtgtaagggtatgcaactttggatcttaaaattctgtacacatacacactttatatatatgtatgtatgtatgaaaacatgaaattagtttgtcaaatatgtgtgtgtttagtattttagcttagtgcaactatttccacattatttattaaattgatctaagacactttcttgttgacaccttgaatattaatgttcaagggtgcaatgtgtattcctttagattgttaaagcttaattactatgatttgtagtaaattaacttttaaaatgtatttgagcccttctgtagtgtcgtagggctcttacagggtgggaaagattttaattttccagttgctaattgaacagtatggcctcattatatattttgatttataggagtttgtgtctgggtcccaggaacatctactggggatgactgttaggcagcttgtgatgatgttttttaaaaaacctaagtaacttggggagacagagcatttcaaacccatatagacacctatcatacctgtatatcccctaatacatggaacataaatttcatttcagctttatgcattaatgtattgaagaggcaggctttttttccagtaataatactgtacatctaaggttgctattcagtaaaactaatagaagagataattattgaataccttggaatatgta

SEQ ID NO: 37767 - DNA, 1574 bp, Homo sapiens
actcctgaggattgccgcctgtgtgtctttaattgattatctttgatagttagagttatttttcagatttttccccctcatactggattgtgatgctctgatatgagcatgcaatgactgatacagaaataggctggagcttcggtgtgtgcttttgctatacagcttacagttctaatgcctgatgtagagatgatgaatttctcctttttaaacctatcttctgtttactccttttgcattatgaaggccctcttcaatgatgtatgtttctgatggaatcagaaaatttcacactagaaaagtgtacctaacttgattcagtgtgagctcttgggacagggagtggagccaggggtagagcttaaagaagctggctctgtaagagttgtatatcaaagtaccttttgctacaaggtgcatatagaagtctaagataagaaatgtaccctctatactttatttttcatgcccctatcatgtttggtgtgccttaaatcttacctttaaatgaagactctatggattgtttacaaatgaagttttacactaggaccagatcgtccatacatgattggtcttctacaataataatgttcaattctttcattttaaatctttctttagggtcatataaagattagttctttcagaaaagctattgctttggtacatgacttagtctaaccagttgggtaatgctgctttgaaaaatagtttgtccctctccccattccaaaaatgaatccattcagtcagaaaaaaagattatcctactatttgtagatgattgctaaggcttgaaataggaaaggggaaagaagggatagaaaagtttcaagtccagtagtgcagtgaatcctttgtgtttgagacttttttacacttatttctgaagttagtgaactttcattgtccctgtggcctcatatttatagagcttcttaactgttttgtacctcagattgtttttagatgtcattgaagattgagatgtacaaattatgttgaatttaacctgtttctcttggagaaattgcctctgatatctttctaacttaatcttagtgtgttctaggaacagttttccataagaggacaacttctcaatgatcatgatagttatttagtaagaaataatggttgttaatcaaatacatgttatgtcttgtccttctctgatttttctgacttggattccttaatttgcagtgatgtcttagaaatggaaaaagtatcctctgggctttcagactttcagcaacaacagccagtgggatacctctgagttcttgtgttctagtctcttgtatgtcctgaaaggcagcaggagcatttttggggtcacactgatattttgttaaagcagagtttcctgcatggtttatggtgctgctctaatattttctctttaaaactgtgtcaatttttggagaatgaatttttcaaccttttcattgtggaggatttttcccacaaggtagtaatgggcaatggatcaaaatcctatcataaatgattgaattttcaatgtcatagtgtgtggaaatactactccctttcctccatgtcta

SEQ ID NO: 37768 - DNA, 1043 bp, Homo sapiens
ccctcacctttacccttactctcttggcctgtcagaagaattctagggaagatagtcttatggtcccaagagattgtggttgtgtagattgagagtggtaagatcaggaaccaatgcaaatgtctgggctttaccgtatacctctgtaacaaaacaggtattctttttgccaagagcagtaacttcttaattaaggtagatttgtactagtcataaggtattttggaaatgaaaatgtggaactttttgatccttagtttatcttcagtgatcttaatgcagggataaaactagaagaatacctcttttgatgttatgctttctttatctgtctatcaatttcttagttccaccttaaaggccgtagcttacaggaaaaagggatttgacattgttaattatgcagaaaatgttaaaatgcagaaaatagctaactataggccagagaatttacattttctctcttctttttgtttccttttttttctcagcttgttttccctagtcgtcatcttttaagaatgcttcatccttctactcttctctcattctcttttctgaaagctgttcacaaatgggatcataagctgcctctactcattatttgtgtttttcactttgttttagagctatttctatatcagcataaagctctagctcattgtttaaccttaaaattatgttataatatgaaaatatcttaatttatttcactagtcccctatcgatggacatttttttccagtttttgccattacaaaccaggctataataaacattcccaagtgtgtgcttgtgtgttcgtgtattcctcaagattatacctgtaatgtaaattcctttcattggaattattaagtcacttagcaatataattacagtactgagaaggtattaccagattgcccttcaagaagatcgtatgagtttatagtcctaccagcaacatatgcacatgcttatttcccctgtagtcaccagtatctcatattattgggcttgaaggtgttaccagtttggtggttgaagaattatatttcatt

SEQ ID NO: 37769 - DNA, 1094 bp, Homo sapiens
aacctccgcttcccaagctcaagtgattctccctgtttcagcctcctgagtagctgggattacaggtgcccgccaccacacccagataattttttagtagagacagggtttcccagtgttgcccaggctggtcctgaactcgtgatccacctgcctcaccctcccaaagtactggggttacagatgtgagccaccacacctggccttaagcaattcttaaacaaaagccttaagtttctaatgtcagaaattctatctataggaacaatggggatgctgatggtcagtatctagtgttagtgacttcctgttacaaagaagtgagtcagccgggcgtagtggctcacttctgtaatcccagcactctgggattacagggtcaggagttcaagaccagcctggccaatatggtgaaacccccatctctactaaaaatacaaaaattagccgagcgtggtggtgggtgcttgtagtcccagctacccaggaggctgaggcaggagaatcgcttgaacctgggaggtggaggttgcagtgatccgagatcgtaccactgcactccagcctgagtgacagaacgagactccatctcaaaaaaaaaaaaaaaaacccaaaaaaaagaagtgggtcaaagtgcagtataattaatgcttaattataattatatttctgtccagaattctgtttaaccctgtgagggtggtttcatatccttgccttgttttggtatctgagtaatgatggccttatagaatggattgggaaataattgcttccccttccattttctggaatagtgtgtatagaaatggtattttttcttttttcttttttcttttgagacagtcttgctctgtcacccaggctggagtgcagtggtgtgatctcggctcactgcaagctccgcctcccgggttcatgccattctcctgcctcagcctcctgagtagctgggactacaggcatgcgccaccacgcccagctaattttttgtatttttagtagagacagggtttcactgtgttagccaggatggtctagaccatctcctgacctcgtgatccgcctgcctcggcctcccaaagtgctgggat

SEQ ID NO: 37770 - DNA, 1025 bp, Homo sapiens
ttattgactaagtatgtagaattttggaggagctgtcatgaaaccagtatttataaatacaaatctggtttttagctgtataatttttatccttgacctggttgaaaacaaactgtaataattacatttcaggagatgacgcattcatggcctccccctctaacggctattcatacaccatgcaaaacagaaccttccaaatttccttttccaactaaggtaagtaaataaaatgtatctttcataatgtaagaaaactctaaatggcttgactaaaatcatatggattaaaaattgtcttgccattcctattctagtgggagacagacagtaaataagtgaataaatagataaattcagatagtgacaactgttatgaagataattagcagggtaatggaactgagagcatcttggatcaagaggtattaagaaagctttgaaggcaatatgcgagagagatttaaaagacattaatacagccggacacggtggctcactcctgtaatcccagcactttggaaggctgagccaagagactctcttgaggccaggagtttgcgaccagcctggtcaacatagcaagaccctgtctctaccaaaaattggaaggaaaaaaaaaaaaaaaaaaaaaaaaaagcttggcatagtggcacaggcccgtggtcccagttactcgggaggctgagatgggaggatcacttgagcctgggaggtcaaggctgcagtgagctgtgattgcaccacagcacgccagcctgggaaacagagcaaaattctatcttaaaaaaaaaaaaaaaagacagtggtatttattgcagactattatggtattgtaggccagaggtggtaagggcttctcaaactgttgttttaagaacctgtttccataagacatagcaaccatacttgtcccgtggaaagaggttcctcagataacagttccaaggttgtttaaaatcagcagattgacttttttttaaacttatacttaacagtattaatttacacttaaaacaaataat

SEQ ID NO: 37771 - DNA, 1035 bp, Homo sapiens
tacctgcattggttgcttccactcttttctttcccattccttcctttagcccactataatctcccttttacctctgccattttgctgaacctgtttctctatggtcattatctttctccctccatccagaggcatcatttgagttcttttttattctttctgctatgtattttttccttctgcaaacattcttctttccttgactgtttttatgcttcattgtttttatttgccttccacctttcttgcctctctttctttgccctttttggaacccttgtgccttctcttgtttcttaagtgcaggtgcattcttctagcctctgctctttgacttgccttttccaccattcttggctttatctcttagacagctatttagtctttctgtcctacactggcctttgggttttggtttgtctcttaattgcttcttagctgagtttccatttggatttatttctctttgcctcttcagactcaacatgtctaaagccatacttatcagacttccttggattagtagtacaccgttttcccatgcttgtaactgtagaatcctaaatatctctaatttcttcctcatgttctatgtagttgcaaaactagatgtagactttaaaatttttgctttttaaatatccattcctttcttcccgtttctgccgccttgagcttcagtaattataacagaggcctcattcagcctttctgcctccagaatctccctactcatatgtcttttgcattgctacctgattctttacttcaggccctgtggtcttcataaattaatttttccctaaaaattttcagtggctctctaagattatagaaagaatagtatccaaatttaatatccgcaggccaatcctaacctctctcattactgactgaccgcttttgctaaactggtttccctaagccacatacattctttctcttttacctccttaaataaagtaagcttggaatgtatttctcctccctcttcagttatatatagattttttttccctgtaatcccaatgaaat

SEQ ID NO: 37772 - DNA, 1052 bp, Homo sapiens
gcacccagcacttctcagtctcagaaacggtcctcaggcttacagagtggacatagtagccagcggaccagcgcaggtagcagtagtggcactaacagtagtggtcagaggcacgaccgtgagtcatataacaatagtgggagcagtagccggaaaaaaggccagcatggatcagaacactccaaatcacgttcttccagccctggaaaaccccaggctgtttcttcattaaactctagtcattccaggtctcatgggaatgatcaccatagcaaggaacatcaacgctccaaatcacctcgggaccctgatgcaaactgggattctccttcccgtgtacctttttcaagtgggcagcactcaactcaatctttcccaccctcattgatgtcaaagtccaattcaatgttacagaaacccactgcctatgtgcggcccatggacggacaggagtccatggaaccaaagctgtcctctgagcactacagcagccaatcccatggcaacagcatgactgagctgaagcccagcagcaaagcacatctcaccaagctgaaaataccttcccaaccactggatgtaagtcacacatttagagcttttaacattgtgactacgtgaagcaattgactgatcatgaaattacgattgaacttgaacactgcttccttgccttaatagtaaggaatgtaaaagttgaaagatgaaaaaaatgtaaagacagacttgtgagttactcccaagtggatgcgtagatctgttaactcgtcctcttgggaaatggagaaaatgtcattcacagttttcaaatacttagatgacaagtcagttatagaataaaagaatgactaattgatatcttagatttctgcattttgattttatagaacaatatacctttgttgttgtttaaaaacaaaattaacttttctatgcttagattgatactaatgaatgagatgcaggtgatggtttatggttatgataaatgggacttttgggtctgtggaaatagtaatattgtatactttgaatgctatgatccttttctc

SEQ ID NO: 37773 - DNA, 1025 bp, Homo sapiens
atgatgaaacagtcaccagctaagctacgtgaggtttaaatagacccaattgttatactgcagctttattctgacattattccctctgaaatgtaatatagtagatatgcttatcttgaattccatccaagagaattaagttgctgaagtaacaatgccttgtaaagagagggactgtggtttacaacaggcaatctccaaaatatcaaacctaaggataacatgctagcaaagcttcaatatataagcatatatatggaatcatatgaaatcgcttttggctgggcgcggtggctcacgcctgtaatcctagcactttgggaggctgaggcgggcagatcatgaggtcaggagttcgagaccagcctggccaacatggtgaacatgatgaaaccccgtctctactaaaaatacaaaaatcatctgggcgtcggtgtgcgcacctgtaatcctggctacttggaaggctgaggcaagagaatttcttgaacctgggaggcagaggttgcagtgagctgagattgtgccactgcactccacactgggcaacagagcaagactctgtctcgaaaagaaaaaaaaaatgaaattgcttttaacattctattacatgtcaccttcccatgtatataactctgtattgtctaataggtctaagagtgtaaccagttccagtagcagtagcagtgacagttctgccagtgattcttcatcagagagtgaagaaacatctacctcttcctcctcagaggacagtgacactgatgaaagctcctctagttcctcatcctcagcctcctccacaacctcttcctcctcctctgattcagactcagattccagctcttccagtagcagtagcaccagcacagatagcagctctgacgatgaaccaccaaagaagaagaaaaagaaatagagttgctccattcatattggactgatggactgaaaacattgatgtgattcttgaaagggaatttagaatatgttaaggccaagtaggttaactggtgaacatttct

SEQ ID NO: 37774 - DNA, 1082 bp, Homo sapiens
taatccacagacccagtggaaagtacaactccctggggccccagtcgcccgtgtgggacccctccccaaggctgctggcctgctgggaagcagggatgccagatgaagagggaagacccaggctggaagctttgccttatctccatgccacagaggctcaaggactccccgatggccctcacaggagctctgcccccagctccattttcctcattcgcccagtgctggcggcagagggcatcagcagaggtgcaggcattgcgagtgccctctgatgcagctccaaacattctgttcacttagagcagcaaacagtctcacctgtctcctgctcatcatgggtacataaaattccctgttgtttattcactctcctcctcacagtcctggatggcaagacacagtaattaatcatcaggctgcttttgcgaggggccacaccctgctggtgctgcacctgggcagctgcctaacagattggctgccgaaggtttgttctgaggctgaattcttgatcttggccactctctcggggatggagagccatcagcacccactttgcacgcaggcctcactcccggcacactctcagaaaggccctggaatttattttgcccatttgaatacaaatgcaattgagacaagattctttttgtttcagaagtcattgcttcatttctgtttctcgtcaagtgaactgacagccaaagagagttgaaataaacaactctgtgcctggctgagccagatgaaataagtccccccacccatcactgagacatggtaccatcaggttgtgttaccagttaagggcttggtgctggtctttgggcagctctggaggcagaatgtcaggctttgggctacatctgtgccaggacaggctgcaggactagtcccagagttgggcaagctggaagacaggtgcctaccacagcaggacacctgcccctctgccctgtgtcttagaggccttttccttcagcatggatcctggggaagggagacacatgcagtcattcattcaggaaggggagaaagtggcagccaaggccccactctcaggagctcctgacccatct

SEQ ID NO: 37775 - DNA, 1057 bp, Homo sapiens
gcaacctacggaataggagaaaatttttgcaatctacccatctgacaaagggctaatatccagaatctacaaggaacttaaacaaatttataatagaaaaacaaccccatctaaaggtgggcaaaggatatgaacagacacttgccttcacatttctaagggcaaacaattttgtacctagacttctataccaaataaaaacattttcagtatacaagaaatgagatttcttgtatatctttctgatttaaaaagtgggggccctgtagtaccagctacttgggaggctgaggcaggagaatggcgtgaacccgggaggcggagcttgcagtgagtggagatcgttccactgcactccagcctgggagacagagcgagactccgtctcaaaaaaaaaaaaaaaaaagtgggggcatggagggtgaggagtgtaatccagcaagacagaaaaggaacctagaaagaagaagagctggtccaagaaacagaagagctaagccaggtatccagtgaaacaaaaccccggcaggacttgtgggacaactgtgtaagaaacctgggagagaatccattcaagttagaacagaaagtcagaaggttctgaaaagcaagtcttcaagaagaaagttaattccattgaacaaaaataagatgaagaaactggaagacctcagagatatgatgaagaatacgtatgtgctatccctcaataaattttttaaggcagttaaaaattctggagaaggcaaattgctaaaccagaaagacatcataaaatattaagcaaactaaaatatgtcacgattttgagcaattaaaggaagatgaagaaagagaacaatttaactatgaagcttaaaataatctccttcaaacagcacaggtgagtcacctgggctgacatctcccctgccgtgaggttcactgtatctttctgccatggatgagggttacatcatcagaatgttgataatgttctttattcattttcacttttagagtcaatgaatagaaacttacacttattacttatagttacagaatgtaatgaggtaaa

SEQ ID NO: 37776 - DNA, 1030 bp, Homo sapiens
aactcacacaagttgatatctgggtatagagtgtgatttttctcccattagggactccagaagagttcttgaaatagctgcctccccagctccacctctcaccccttgtgcctgcccaatgtttccagaaggcgcaactatagacagcaaaggtcctgtgtgcacctccccagagaaacccaaaccctcacacttctctggagccacatggccagatgaaacctctgagaaggaaccaaagccttgtctgtcctgatggcagaagttgcaaccctgtagggcttctcaacatgtgatctaagaccacagctttgtaacctaactcagccacggtcctagttaaaaaggcacattcctagaccctgcctcagaactactgaacagagtcactgggtgtggagtccaggaatctgcatttttacccctatcgcccccgccattcccgcccttccccccgccattgcgtgcactaattgctggaagcactcatgaggagagccgcctgtgttgtgtagaactcccacccccgcaacacacactcactcaccctttcacttaccaacagtttcctgggcttgggaggtctggagaaggcagtagccctgcaaattgagaaaggcaagcctcggaagtggactcttatatctctactgccaaaaggggctacatcctctcaggcccctgggttcattccttgagaacagggctcagctgtgggagctgataaaacaaggcacccttccagttactgagcaccttctggtggcccacactgtgctgggcattgcacatgagccgtctctcgtccttggggaagatagtagttgttatccatgctctataggtgtggaaactgaggcccagagaggttatgtggctggtccaaggtcacacagctgaagtgagattgtaacccagggctgcctgactccagagcctgtgtgttctccagtggtgacattgctggggtagtcttggggggcagtgtgagctagttcataggatggaagagtactgtgaggaatgttgg

SEQ ID NO: 37777 - DNA, 1070 bp, Homo sapiens
gataaacaacagaaatttaaaatttcggtggctgagaagtctaacatcaaagcactggccaagtcagagtctggtgagggcccactttctggttcatagatggcacctttcagctgtgtcctcacatggcagaaggggcagaggcctctctggggtctcttttatgagggcaccaatcccatccatgagaattccactctcctgacctaatcacctcccaaaggccccacatcctaataccatcaccttgggggttaagatttcaacatatgagttgagggggacacagcattgggaccagagcaatcccttcatgaaccctttaaggttcatgagagtagaagctgattcactcacttatctccagtttctatgcctggcacaaaacagggcgaggatcagagtgaggcaattgaggtgcgtgcctccaacacaaagacgcggtagttaaaacaaataatattttaatgcaatattttacaaatcaaaattaatgcaaaaaaatccatgatgaacaaaataacattaatgtccttgatgttataaaattttgcaatgatgtgtctgactttgtggttccttttgtgggtccttcagcctaaagacatatatccttcctcaaataaaagcaattataattttcttaagcaacttcctcttctcaggtttctgtctttctaaaaatcttaattgcatgtgagacctcctgtatcaatattttctgttacttttctcttaaagtgtctgttctatatattttattctatattctggaaaattctcttggctttatcatctgatctgagtattgaactttttgtttcaagactcatgtttttatttatttatttttattttattttattttattttattttattttattttattttattttattttatttttgaggcagagtttcactcttgttccccaggctggagtgcagtggtgcaatcttggctcactgcaacctccacctcctgggttcaagcgattctcctgcctcagcctcctgagtagctgtgattacaggcacgcgccactactcttgactaagttttgtattt

SEQ ID NO: 37778 - DNA, 1036 bp, Homo sapiens
caggatagtctggattatcagactgggtttatttttcttggcattgcagtctggcttcctgattatctttcaaacacacatttgcatggcatttccttccatactgagcagattccatcaacagtcttgggattccacttttcctttgcaatatggacgtttttgcatcagtttgcattagctgttagtgaaactggcactgcatctgcaggcagacatcgccagaccgcagcacagttcatcttcagatgttttccttttccatgttggtggcagcttcctttgctccttccctccttctcaagataaattccccaaagcttggacccagcactttctgcctattctcatggtttttgttggggtatgaatgccttagatggcacagagaggcattggagatttacagccctttttattatgactgcacttgagctgctgtcccagcagcagacctcttccttttgatgacaggtcaattggtcaattccgggttgctctgttggcttcttcatcagactgtaagctccatgtaggtagggtctatgtctgacttgttcacccttgtgaacccagacagtggtccagagcctggcacatagtgagcactcaataaacatttattgaatgtacaaataaatagaatgttctttcaagctgagcagctgactacctgtgatgagttcccttaaaaaagcttaatagctttttttttttttttttttttgagacagtctcactctgtcacccgggctggagtgcaggggcgcaatcttggctcactgcaacctctgcttcccaggctcaagtgattctcctgcctcagcctctcaagtatctggaactataggtgtgtgccaccatgcccacctaatttttgtatttttagtacagataggtgttttgccatgttggccaggctggtctcaaactcctggcctcaagtgatccacccacctcagcctccccaagtgctgggattacagatgtgaaccaccgtgcctgaccaatgcttgatagctcttgaatgatcagt

SEQ ID NO: 37779 - DNA, 1048 bp, Homo sapiens
agcctgaaccagcaaggtctgcctgcatgggaagctgcgccattacctgcccataaagggttccctcctgctttctctgtgagtctccaggcagatattcttcagcatctgctcccaagagctggctgtgaatgtgaactctgcctccttggttgttcagaagcacatgcttaagagaacaaattttcctacagcagcggctgctgaagtgtcctctttgtggccattgaaagaaactcttagaatgtctcatgaaattattttctggacagagaaatggcactacctggggcagacacatttcatttttaaaccaaaatttatggttactgtcaagggtaatattaatgttttaaaatccttgacaaagaaaaaggagaagagctagaaagttctttggctgaagttacccttcaaaccatgcctgaattgagcttgattctgaactgcatggcacctttccctgcagcaataataagaactgttacctaataaatacaaggtgcttacatttagaaagctctgagctgtcacattcacgatctcaactaattctatgacacctatgcaaagtaagaaggaaggaatccccattttacagaaggggaatatgaagccctcacactgacatcggttgcagaagtgtggctacatttcaagtgtcctgaccctgaccgctgacactaggctcttttcactgtgttatgttgttacttaagagacgatagagaccatgttgctgagcagcgtgtagaaagggcttccaccaagtgcagatacagcagtggaggtctagaaagcaggagaaattctctttatgttttggcaaaggcaggatgagaattctaagatgacctgttttaaaccttatagaatagcatatttctctttgacacatgatgattcttgtaaatgtaagagaataaagcttttctctcatgtgggctagtagatatcttctattcttccttcctcctgggctactgaagaaaaccgagatttcttaaatcttggtttaagaaaaccgagtgaagaaaaactctatttc

SEQ ID NO: 37780 - DNA, 1028 bp, Homo sapiens
cagaagccagggtcaggggcctcctgccagtgtcacatgtcaggtgggacccggattctcccctactggctgcataactttgagcaagttatcctctctgggcctcaatttcctcataggtcaaacagggataacactactttgctctgttttgtggcgcttcaatatgtatgtttgtgcctaagaaggtgtggttcaaagttccttctgctccgcccacccaccgccagctcctgctctgggatcactgacccctgtgagaccatcacttcagaccaggagctggggtttggcagggtgaagagggggccgtttctaggtttttgcagtaacacaactgtaaagggtcaccagggttgttttggctttcttagcacaagagatgagagtagcttgtgtcgggtgatggatttttcatagggaaacacgtttttcttcaacttatctcctcaaatgcgctttcagatgtggttgatgattaagctagttttaaagaaaatgaaggacagaacaggagagggaacgcctgctgcaattatgtccctttctcctgttcctcagagaaatcaatcccccctcctctgccgtctctctttctttcttcctctcccccaacctgtctctcccctcctctccctcccgctcttcatcactctccttcagtctctcactgtctctgtgtatctctcttccttgccctctcttggtctctgtttctccccgcccctcgtaccctgtcctcctctttacgtctctctctgatactctcgtagtgtgtctgtgtgtgtcagtctcttgctcccgatctctctctccttccttcccccaatcctgtctctgtctctcaggcgcctctgcccacaccttgcttattctcctccatgagcccgtgtttttaccgatggtcgcatgaaggccacatgttcatgagtgtgagccattctcaccgtgagtgccattcccccaggagctgggcctttgtacttcctgctcccttgggaatatgcccatttaccaatgggaagaca

SEQ ID NO: 37781 - DNA, 1695 bp, Homo sapiens
tttctaattgcaaacttcattagcaacaatggaagccagaaggcaattgaataatatcttctaaacaatgaggtaaaatagtcaacttagaattctgtttgagagtgaagggcaaagatactctctgataaagatttaagaggttactgaagaggttacataaactcttactgaaagaactaaaggtatatatactttaggaggaaggcaattgaccccagaagaaaataatgtaatacaataattgctagtgagaaagggaataggcaaaaacataggcataattataagtaagtgttgactgaagaaaagcattgataataaaatgactaatttggggtcatttaaaatatgaaacaagagatggtgatgatggtcagtactaaagaattttatgcttcttgtgttatttgagaagatactaggccttaaaaaactttaggcgttaagtcagaatgtatattgaaaatttaagggtaacctgtaaaagaaaagaaatagaatataacctctaacagaagagtctggaaaaaaagagttggataaataacattcagacagctcagtagattgcagttcagtagacagcagagaagtagacaaaatgaagcaaagtaaaggcatcataagtggtaataatatatagcaataaaaataatattaaataaatactcaaattaagttggcaaaaactgaatatatcagtaatatgttttagtggattggatttatctgttagtcaatagcaattttcagattgaatttttaaaatacacggatgtgctatttacaaagatcatgtctaaatataatggcacaaaatttgaaatgaaattaattgaaaatatatgctaacaaatactaaaagaaaaaattaggccaggcgcagtggctcatgcctgtaatcccagcactttgggaggccgaggtgggtggatcacgaggtcaggagattgagaccatcctggttaacatggtgaaaccctgtctctactaaaaaaatacaaaaaaattagccaggcgtggtggcgggcgcctgtagtcccagctactctggaggctgaagcaggagaatggcatgaacctgggaggtggagcttgcagtgagccgagatagttccactgcactccagcctgggcagcagagtgagactccgtctcaaaaaaaaaaaaaaaagaaaaaattgtttgtagtaacattaatatcaaagtattgtttaaggcacaaaagcattattgggtttactgcacagtgacaaaagaaacaattcactgggaacacataataatcataaacctatatgcacttaacacagctcctaaacagacataatgcaaagcctaggaacttatacaataacatcgacaaatttacaatctacaataatgggatattgtgacacatatttttataaaatgatgtcaagcaaacaaaaatttattaaaaacaatttttttttctttccaatttttattttaggttcagaggtacatgtgcaggtttgttatgtgggtaaactgcatgttgcagggttttggtgtacagataattttgtcacccaggtaaacagcatagtaaagatagttgtttttcagtccttacactcctttcatctgaactccaccctcaagtaggctctggtgtctattgttcctttctttgtgtccgtgtatactcaataaaaactggatatt

SEQ ID NO: 37782 - DNA, 1042 bp, Homo sapiens
cataaagacaacatctgaactgtgaaaatacaacaatgaccagtctcttacaggagtcctgaccctactcgagttcatattcacagggggagagcaggcattaaacaaataattgtaccagtaattatttgattgcaattgtgataagagctatgaaggaaaagaacagagggctgtgggcacctgactagtctggggaaatcaggaaggcttccctgaggaagtggcatgaaggccaagagctggtagctgagtaaaagttatctagaaaaagagagcccaggataggagtgggaggaagacgagagctctgggagctgagaagagccagcatgggttagggagtgaggggatacatgggacaaggtaatgcagtagaggtaggcagtgactaggtcgctcagagtcccagtgaagaatgttgagttgatcctaaaagcagtggtaagcatcaataggttgtaatcagggttgtgacttgatgaggtttatagttttaaaggattattctgttgtaaaaaatggggattatggaggctgagttaggaaactactataataacctagaagagcaacacttgtggtttggaatagtacaatggtaggcataggagaaatagatggattctacctatttttccctatgtttgaggagcgttttgatcagatatggtgacttactggatatggaaagtgaaaaaggagcttcagggatacttcctagattcctgcctttttcacctggacagaggcactaaacactaatacagggagtttcggggggaggaccaggtcttttgggggtaaatgattgatacggtttggctgtgttcccacccaaatctcatcttgaattgtagttcccataatccccacgtgtggtaggagggacccgatgggaagtaattgaatcatgggggcagtttcccccatgatattcttgtgatagtaagttctcacgagatccgatggttttataaggggtttccccctttgctcggctctcattcttctcattcctcccaccattgtgaagaaggac

SEQ ID NO: 37783 - DNA, 1035 bp, Homo sapiens
tctaaccaaagggatacataattaatggtagctcttgagacatcaaactgacatatcgactgtgggcctgttttgccagaacagcggaaaggctggggcacccgtctgctgggaagactccatgtaacagggttaaaaaggtaaagtttcagaggactttctgatccatgaagttagtggtgcatgtgtctgttcagggactcctcatctaaagcatttacagacatattagcaagattaggtgactccaaagggctgtgaggaggactgagtacagtgaggccaaattcagtcctgaaacctaacatctgccagtgcatctgagtgggtgcccagtgggtggcctcactcactagctgggccaggcagcgggatggctgccttttgtgtgcagaggcccatgggggctgtctgttggttgtgattttcctggctttagcgctatacgtttgaatcactgcagtattgtacaacccacccaggggcggggtggggggtgcatttctggagggccctctatgcacctgttagtattgcaagtacgggtccaaagagacgcagcttggaagaagcacacgttctgtggtgcccctgtctacagcaggcttctctgcgcgaagttgttttagccctctgttctgcaagttacagcatcttgaatgaggcaaagtgacacacgggcaaatggtgtgtattccctacaaactcctcagagttgacaccgctctcgcctttcttcttgcattgccagaggctgtgactctggctcttcactcttcagtcatcacaaagccttttccctttatcatgtcagaccttggaaaacccacagtcatgaaaatgatttatcttcctaaattgtcagtgatctcccattaggcttaggataaaatccaatttcttcccaggcctccaagggcttgtgtgatctcacctctgcctgcctgtctccgttcaagcccgtccatctctctctccagcttcccatgctccagacacgctgacctgtcctccttctgcccctcaagcaggaca

SEQ ID NO: 37784 - DNA, 1001 bp, Homo sapiens
tgtcctctgaatggtttttctccaggtactcccttgaccaaaggggagactccagggcccttgaccaaaggggagactcaggattggtactctaggactctggctggccagcccatctgtgaccggcctttctgagccaggatggccacaggtgacattgcccctactgatgttgttaaaggaggctctgaccttggttatcagagcaaatccagcgtatgtttaccgtgcaatgtacatttttgtcctgttgtgttcagagaatcagaagtccttatggggtagataaggcctggttctgacgcccagagtcctgtttatgagtggctcatgagaggggcctctgttctgtctagcagggtcttccttgggagctcttaagtaaccagtgtcctgggttaaccggaatacctccctccctggccttgttctacaatagaggctttgccgtgtgcctacacaaccaaaaaggaagctgtttctattcccaatcagatctggagatgatattgaacataattctctatgttaggaatgtagaaaatacacagcatggaggggataatgtggggcattttgtggtgactgtagattcctggaagttatttataatagttggcctatggggctgccaacaagtgcagaggcagttcttctttctacatgctctaagggagaatctatttccttgcactttctagtttctggaggctacctgccttcttggcttgtggccccacatcactctgacgtctacttgtctacttctgtcatcatgtctccttctccgactgtgaccctcctgcctctcttttagaaggacctgtgattgtattgagccctcctggatcttgcaggataatttttccatccaagatccttacctcactcacttctgtaaagtccgttttgcagtgtaagagaacatatgtataggtaccaggcctaggatgtggatatctgtggggccgttattccatctattgtgaggcatgccctgt

SEQ ID NO: 37785 - DNA, 1882 bp, Homo sapiens
catattctctgttttctcttttgcctatttaatgacttctgttttccagatttttcttctggttcaaagcaggaaatggcgtgatggcctttgttccaaaacagtggaataccatcgcctagatcagaatgttaatgaggcaatgccttctttgaagattaccaatgattatattttttaaagcactgtgatttgaatttgcttatgtaattttatttgcttgactttttatatgatattgtgcaaatgtttgccataggcaattggtacttaaatgagaggtgagtctctcttttgccttggtgctttggaaattaaatgtcacaaacgagtatataattttttatctgtacttttagagctgagtttaatcaggtgtccaaaatgtgagttaaacattaccttatatttacactgttagtttttattgttttagatttattatgcttcttctggaagtattagtgatgctacttttaaaagatcccaaacttgtaactaaattctgacatatctgttactgctgactcacattcattctccgccattcaaatactattttttatccacatttttttttgttcccaaactgtaatgtacaaggatatgtgtgataatgctttggatttgagtaatatttttttttcttccaagaaaactgctttggatatttttagataatttaaacataatttaggataatgatattgctcaatctgaccacaattttaggtaaaacattaaatgtgtcaagaaatcttggcaacagagactctgcagcttgcagtggacatagataaaatgttacagagatactatttttttggttggaattactatattaaatttagaagcagaaactggtaaaatgttaaatacatgtacaattgcttttagttagcaattgattgtagcatgggttcctccaaggtttcaagcaatgggcagagtttaaaattatatcagattcgtttacttcgtttattattttacagtaaatttgaataaatcttaggggtcattatcacttaaataatactgtacctaggtctttcaaattaaaattatacctgaatgaagttgtttgtatacataaaggatatttgtgtacaattaccttttttcccccacacttgttttctttgtttttgttttttatggcaactggaaagtatttactatgggattcatttatgtctgtctttctatcataaagaattgatcaatatgtaaatatgtgatttgaaccatggttgacttacaagtgtcactacagctttttagaaaacatagccctaatatatgttaagcaggacccgggtgagccagtgggcttgcgctttatgtagagctggaagaaggccgtccatcctgtctcttgggcggacagtgtactttcctaatagggaagggaagcacaatggaaatacccctgaaccgttttattgcagtaatttttttcatatctgaaactattatttaatattttgaataagattttaaaaaataaatggcaaagatataaatctatgatttcacgagtgtgtttctgtgtttcatttcagtgatgacatttaggtggtgacggggagtagtgtatgtctgggagcaatctaacctgattcacttgcaggtgtccctctcagcagtgcaactctgcctctatgaattccacttacattgctaaattcttctttaggtccaacttactgcgaggtactgaagtttattgaaaactgtagcaaagtaggatggcaaagaaaagcaaagtggctaaatcagtgtgctctttctagcatcctggggtcactatctgggatggaaggctccccgagtgtggaggctcatcccccttagtggattgggggattcttgggtactt

SEQ ID NO: 37786 - DNA, 1275 bp, Homo sapiens
ctctcaggttcccgtttcggatgcttctcctttagaagttttttcttctttgtaaggatccttctttttttttgaatttaggagagggagtcctctagttcaagtatcacttagaattactatctacagcatgcctatagcttcccctgaatttgttatgttgtgttgaaagtatttaggtccaaactccatatcttttttgggacctacttgagtgagaatcagccactttttggtctgttctagggatcaggtaaagtctggacaaggtaactgaaatccacaccctttatgaaatgaaaacagaggggatgggtgagggctgtatgtgaactttgccatcgtgacttaaagtcagccctttttcttttcttttggtggcaggctgtatgatgcagtaggtcttttatgctgcttaaattgttagtatctagcaaagcaattattatctgaagaataactgactaagaagaaatgtaactgaatgctggctattgagacttaataactagttttcgagaaagttataggaatgtagcagagagaaatgcttagtgtaaaatttgggtaaatatgcttttagcttggtggagataaagttggagatttcagtttgatattctttgtttgtttcagttgtatcacggactgattcaccgagcccaaccgtactcaactcacatatttctaccccaaatgtgaatgctttaacacatgaaaaccaaaccaaaccttctatttcccaaatcagcaccaccctccctcccacgacgagtaccaagaaaagtggaggagcatctgtggtccctcatccctcgcctactcctctgtctcaagaggaagctgataacaatgaagatcctagtatagaggaggaggatcttctcatgctgaacagttctccatccacagccaaagacactctagacaatggcgattatggagaaccagactatgactggaccacgggccccagggacgacgacgagtctgatgacaccttggaagaaaacaggggttacatggaaattgaacagtcagtgaaatcttttaagatgccatcctcaaatatagaagaggaagacagccatttcttttttcatcttattatttttgctttttgcattgctgttgtttacattacatatcacaacaaaaggaaggtaggtttgggatttttttagccctttattatttcagtcataatgcttttgatgattcatggttcttttttttttttttttttttttttgcaaaaaaaagtgtagtgggttt

SEQ ID NO: 37787 - DNA, 1108 bp, Homo sapiens
atcgttgaagaatgggctgccgcaaggaatggcggtggtggggtctccaaaatttcttggatcggaaagttaggagactctggaagagagggtggcgacaggggctgaggaggtggccggggctgggggtgtggtgtctggaaagggtcctgagtttgggggactcaggaatcttgcaggaccaaggaaaggtgggggttttccagaatgggagaggtcagtggtaaagaccgaggcgggcaggggcagtaatccagtgactggactgaaccaatggaatatttccgagagggaaagtgaaagggaaagagctgtcttagggtactggtgcatatttgaagactgggaggttctggtgtttgataaagattcagagtactggggcgttgggcccctgaaggcttgggaggcagagaggagtttggagacaagggagatcatgattcctcttccctgtgttccgagttaaccaggataaccctgcctcgttttaatgcatctgtaggatttgattgataaaatatttcatttcttgcaaatgttgcatggtgaaatcaagagattgaaggcttttattgagaaattaggaaatctgtaaaccagtgcctgatacttggtgggaaaaatccactattaagaacttgtaaggattaaacggtattttgtttagtagtcccatttttctttcaggccaagacacagtcctgcgtttctccctaaatttgaattttcagctgcaaaacagtgtgacctggtatagtgttttctttcttgccagcagggcctgtccagccctacattcctctgcgacagtactgtgggtacatacttatgtttcctcagcaacatttcagtgttgctaactggacgccctcccagaagtctttgcagtccctgaggaaggactgctgtccatttcctaaggcccttttatcattagtgaaatgtaatgaggatttccctggttgatgcagatattcccgttcctaaagtacttaagtagcttaattgttttggccatttaatcatctaagaaaaataaaacacaaacatttatatttcctgctggaatgcttaagggatatatatctggcaactgtagtttcag

SEQ ID NO: 37788 - DNA, 1043 bp, Homo sapiens
tctcctaaactagaaccgaatttggctcccttaacagcaagcacttaaaaacaagagaaaaggagcctcattatttatatgagcaaaaggacactggcccctaagaggccttccttctctctgctttgttcttatgaggggtgtcagatctcagcacaccctttgaacagaaaggtatgcacctaaaattgatgtattttgtattgaatttaatgaatctcatgaacaaggtggtcatgaaaaattttgattctaaagtccaaggttggttgactaaaaagctctaattttggagatggaagtgcaaagtattatacttaatgttttctctgttttgtcatttccttgattaggctaaagtgaacaactccagcctgataggtttaggatacactcagactctaaagccaggtatgtgttgcttgtgtgtgaaatcggttctttatcttaaaaaaattgtggtgctggtttgctgatttatgtcattgcttataaaatgtttatataatacagtgggtatatataaatggatatatgtaaagtataattaaatgtttataaaggagtatggggtcattataaaacatttggagaatatgagatgtagcaagcaggaggaaaaaggctgaggctaacacatattctttgctattttcttccatccttttttccagtgtggacataatgcttgatacttatttctggcagattctcaaaactaacttataaatcagccccactgtaaaaagacaaagaaataggaaaagtggtttgcaggtttcctctgcacagttggctaggccagtccacggcgtattatagttctagtgtataaccacttttgaaccctggaaatctaagactaccagctactccctgaatcaggttattccagggaatgtcagtttgttgtgtgcatctgtggatgtacatgcacactacacatgtgtgtacactatgaacatgaacatgtaagaccttaggttggattcaggattgaggtttcatttaaagggatgattgccaaagaagcttactgcatg

SEQ ID NO: 37789 - DNA, 1045 bp, Homo sapiens
actagagtttttgttcttaggtcctgaagccctttgctggattccaaagtacgtgggctctgactcacagttaaccaatgccatttccactggaaatgcccacaatgatgaggcagaactcagacactgattttatgttaaagatgtttgagagggtctaggcaggcttgaagaccatctgatgcaaggaggatggtcattcctttttaaaaaattgcagcattaaaatttttcttaatttttttaatcaaaggagtctgaacccatggttgtaaaatcaaacagtacagatgggcctatgaaaagcagtgattccagcctgcctcagcctgctcatcccagctccgcagtggcagccactttaactgtttttgttttctgtggttccctccatggagaaggttgcttctgaccaggcaccagtatgcactgtgtgtataaacaacaatctgaaagcagtaatgagagacagtctatgatctgtgccgaccccagcccgacagaggacaaagtgtagactctgagctcttcgtatgcctttttaggggtggcagtgactgcagagtttgtataggctgttcagctgggtggggcagactttcaaattctgagagcttaagcagggccccaaaagaggaagaggagaatttgaatgactgaagaagggaaagggatattcccagcaactggagtcattcagtgtgtttgtaagagaggagggagcttggccagctggggtttcattctgaatgtttttgaaagagggagacattttatgatgtagcaaaaagctccctttcaaatcctgccaggcttagatgttgcagcatgggtgaggagtatgcataggtggacgagatgaattgtggattaagctcttttgaagtgctgctcctccaagaggctgggtcagtgccaactgtatctccccagcagtggctgcagcaggttgtgccaagggctctaacttgccttctgaggcatatgtgcagccccacctttcttgccatttctggctgtgttctcttctcattttcttctcttt

SEQ ID NO: 37790 - DNA, 1259 bp, Homo sapiens
tataattcttttttttttttttttgagacggagtcttactctgtcgcccaggctggagtgcagtggcgcgatctcggctcactgcaacctctgcctcccgggttcaagcgtttctcctgcctcagcctcctgagtagctgggattacacacgcccaccaccgcgcccagctaatttttgtgtttttagtagagacggtgtttcaccatgttggccaggctggtctcgaacttctgaccttgtgatccacctgcctcagcctcccaaagtgctggaattactggcatgagccactgcgcctggccccgagtgtcattataatgcctagaataaacatactgtttaatatgtttcagcctattgctaatatttttcttattgaggctcacattgctccattgtcgaagcccttgggagcctcttcaggttaccttgtaagtccttttgcctccaccccagtagtcttcaatagctttgatagatgttttaggttactgtgtacatttcctgcctaagatctgtagttggccatttctccaaggagcactggttccatttaggaggaaatggtctaggtgctgaggatgaagcattaatctcaatgtgaataaagctagaagtgaacagtgctgtgtagtccttgaggctctgagtggatctggttcctcctgtggtctctgctgagaatgcagcttcctgtgggagatgtcgatcttgtaactgaatgatagagacaatcagataaaaatgatccatgttgtatttgttggatgtgatcttgttctccagtgtgtacttttggtaaaagacatggtaataataggtctgcaggtgacactattcacctgctcttcctaagggatgctgggtcttgaggaaccggcagtagagacactgaactgcttatagactcacatctggtatcatcaggttggacctgggatactgtctggctaactaacacttcctggcccccatgactgcagagttccaggttctacatcagtacccggttctctgaaatatgtactcattggggtctcatgaatatggaattgaaatccattttactgttgtactcacttagagggaacatagcctttgtttccttacttaaccatgtgagccacagagtaagaagaaaaccgtctctttaaaagctgctatttaggtagctgccttcatggcagataaatcttttccacaggtttggaaaatatcaaagatgcatctgtttcataattacatggtggctttcta

SEQ ID NO: 37791 - DNA, 1053 bp, Homo sapiens
ttgaggtcaggagtttgagaccagcctgggcaacatggcaaaaccccatctctaataaaaatacaaaaattagccaggcatgatggtgcgtgcctgtagtcccagatacttgggatgctgaggcatgagaatcgcttgaacccaggagacagaggttgcagtgagctgagatcgcaccactgcactccagcctgggctacagagagagactctgtctccaaaaaaaaaaaaaaattgtggtaagatatacatataaaacttaacatctttaagtgtgtagttaaatggcactatgaatttttcagttttgccattcattttttttctttcttccttttttcctttccaacagatatttattagagggaggatctaccaagtgcagacctgtgctgggtgtgcagtgcacacaagtgactgggcacacatggttcctatcctctggagatgtcgtcttatagcttggctatagatgatctgaagagaccattgttacggggctgatttactctcattcctcttcgctgctgtagtttctcctgcaagagcactgcctttttgcagtgctgtgcactctccccccaggaactctgccatggtatcagggagcggttatctggaaagatcctgggataggatgagaggctggaggatgtgcccacatgcttgaatttgctgcctgggactttgcctgctgccctgggatagcacactttggaatttgtaggtgatttccttcccatgaccttagggagctttgcagaggtctccaggccatgcagtataaaacacaaaggaaagttttttggttttttttttttttgggttgagggggacggagtcttgctctgtcgcccaggctggagtgcagtggtgtgatctcagctcactgcaacctcctcctcccgggttcaagtgatccttttgcctcagcctcccaagtagctgggactacagacacgggccaccatgcctggctaatttttgtatttttagtggagacgggggtttcaccgtattggccaggctggtcttgaacttctgacctcgtga

SEQ ID NO: 37792 - DNA, 1031 bp, Homo sapiens
tcaggctggtcttgaactcccgacttcaggtgatccgcccaccttggcctcccaaagtgctggaattataggcatgagccactgcgcctggcttatttttatttttaaaaaagattttagattcagggtgtacatgtgcaggtttgttacatggatgtattgtgtaatggtgaggtttgggcttctagtgtacccattacccaaatagtgaccattgtatggaacgtgggaatttgttgtagatcaacaaataactgtcgtgacctggcccgcaaagccaaaagaaggtacttttttttttttattctggcagtttttgtggttttcacattcattccattttctgcatgatgggtggtccaggggaaccatgccagtaggcccccagttcagcagcgggtaatagaggagaatgggtcaggtctcagttttagttttccttgtgcttcttattttcaaattcacctgcattcaaccacataagtgtttttaaagtaatcttagtagtccctttgaaattatgtgtgcagtaattgttggaagaaagaagttttgggtttgaattaccgctgtgtcagctttagctcagtgctttttctctgtactgccctggagccaggatggaagggagatgctttcctgtccagactgaagagttacagggaggaaggaagctgtctgctgacaacaaattccccataagatttctttacatagcaggctcctttactcccatctgtactttaaatatctatttgaattgtagagttagccttggcccccccacattcagggtcttgcctcttgcagaaaggcaagtatagtgtttaggagtgaagtgaagccaagtgagtgctatggtgcaggctgtgactcttctctctcctttgaaggaatttacaagctcaggctcagccaacactgagaccaccaaagtgacgggcagtctggaaaccaagtacagatggactgagtacggcctgacgtttacagagaaatggaataccgacaatacactaggcaccgagatt

SEQ ID NO: 37793 - DNA, 1034 bp, Homo sapiens
ttcattctctggttttccaagtcccgagggaaacttgttgaactggtgtttctgggcttgcagggagggtgacatgggtgactgggattctacagaaggtgttgggcctgttaccccttccctcatggtgggtggatggacagcttgtgctggggttgtcctgagtagggtgcctgcctgtgggtagtggggactactccttgttgattatttagttttatttttgctattctagagtggggctataggcaggggttattcgtagctcagaaagtgggggaccatacagggatgaggtgcctgtgggcccctggccttgctgaacactaggcaggtgtggacagtgaactccatgctggggaggtgaagggcatccaacctctacccttaccaggaagatgctcctgaagcactgaagtccacttcgcctttgatggaatttcccgtggtgtagtgtcttcggtggtagtgactggaagaggcgcatgtgtggttgaggaccagccgaagcttggaggcagcccctcctggtgctcagagattctgtagtctgcggctttgggttttccatggagtcctgtggtagccactgagaaaagttgaccagtgggctcctcagctgggtctgggcgcatttctccattttaccacgtactcagggggtttgggatgagtgggactttaagttctttactcagaactgtgctggaaagagcactggagagtagcttaggcccataacacaggtctggtgagccatagggtcggtctcatacaggtcaagtcactgtcttgtgcctcagtttctctctctcttttttttttttttttttttagatggagtctcactctgttgcccaggctggagtgcagtggtgcaatctcggctccctgcaatctctacctctcgggttcaagcaagtctctgcctcaccctctcgagtagccgggattacaggcgcctgccaccatgcctggctaatttttttgtattttttagtagagatggggtttcaccatcttggccaggttgg

SEQ ID NO: 37794 - DNA, 1057 bp, Homo sapiens
tctgccctcagaggaaaatggagcctagtggtcatgtgtacctatttcaggttgaattgtcttgtcagcctttatggacggcagttggcaactcatttattcttatatgagcactggggagcaggctggcctgcatcattgtggggttaagagcaaagcttggaatgggagtataggcatagctctcaggtgaggcaggcagggcccacacccctttaggggagatgacaagtgtaatccctggtttctacaggctggaggtttgggaacatatgtaccataggaaacaaactccaagtttcctgactgtggagaaggaaaggaaagaatatcatgctctgttactgaaacagcttattcctcagggtcaggctttgaaaaacaaacccagtaaaaagtatctttattctcatgtttaaaagtttttctatgatgatgcattaacaatacaaaaatattttgaacactacaataatctttttctcaagacttcttgcagtgttacactagaatatgtgatctttggattctgagaaaccagtggctaaagtaggaactaaaggctttttttgaggggtgtgtgaatacatggacagcccttttttttttttttttttttttttgagatgcagtctccctgttacccagactggagtgcaatagcgccatctcggctcactggaacctccgcctcccgggttcaagtgattcttccgcctcagcctcccgagtagctgggattacatgcgcgcaccaccacgtccggctaatttttgtatttttagtagatacagggtttcaccatgttggccaggctggtctcaaactactgacgtcaggtgatccacctgcctcggcctgccaaagtgctgggattacaggcgtgagccaccgcgcctggcccggcagccctttttctttggatttaggcaaaaaacaaaaattaaattaaagacttgtttttcaaggctgagggttgaagcttggctcaaaaatgggttaacgtaggctatggtgaaaacctgttgtccactactggaggttttctgggctcctt

SEQ ID NO: 37795 - DNA, 1245 bp, Homo sapiens
gaagagctcttgttaatgtattaacagttactagttttggcacctgcaactttctgtatagaccatacatatctgacatcagaaaagcaggccctagagagaagtatatactagggtactttagagcaacttaatgaggggaggaaatgaaagaatagatcagaatgattttgttgacatgactacagactgaaataatgtgaatgaattaactgaatttgctctgtcaactttagtaaattgcccattgcctttgctttgttcataatttcagcagggcagaataaaaaccatgggaggcaaagaaaggaaatccggaaatatagtcttaacctggtgttgttctaattttccatctgttcttctgactcaactcactggctatcgatgaatcagtaggtagtatttataagtcttaggaaagactactcaagttaaggtacttccctatatccatctcttttaggtacgcaaagagaaccagtggtgtgaagagaagtgaaatgttgtgcctgacactgtaacactgtaaggattgttccaaatactagttgcactgctctgtttataattgttaatattagacaaacagtagacaaatgcagcagcaagtcaattgtattagcagaatattgtcctcattgcatgtgtagtttgagcacagatcccaaaccttacggccaagtttcttctagtatgatggaaagtttcttttttctttgctctgaataaaactgaactgtgggttctctataagtggcattttgggctttccctcttttttgtaaagcaatgtctgcctagtttattgtccagttaactttagtgaccttttaaaagttggcattgtaaataaaacaacttgcaaaaaagttttctggaatagaattaacaaaatattatctttattcatgagttggaaactggaaaaaggcttcttgaagtaaatgttctgagtggagctactaggatgtcttccagcctcctgcagtcaaggagtaccactgtattgattagcctgtatgtagcagggctcccttcattgcatctgaggacttgttttctttttctttatttttaatcctcttagttttaaatatattgcctagagactcagttactacccagtttgtggttttttgggagaaatgtaactggacagttagcttttcaattaaaaagacacttaacccatgtgggatgtcatctttttataattagtgttcccatgtggagaaaattatt

SEQ ID NO: 37796 - DNA, 1041 bp, Homo sapiens
ttgcagtgagccaagatagcgccattgcactccagcctgggcaacaagagtgaaactcagtctcaaaattaaaacgaaaacaaaaacctttcgctggccaggcacagtggctcatagctgtaatcccaacactttgggagggcaaggtgggtgaattgcttgagttcaggagtttgcaacatgatgaaaccttatctctacaaaaacaaaatacaaaaatgagccaggtgtggtggcatgcacctgtagttgcagctacttgggaggctgaggtgggaggatcgcttaagcacaggaggtcgagtgagccatgatcgcggcactgcattccagcctgggtgacacagtgagatcttgtctcaaaaacaaacaaacaaccctttgcttggcttttccttattgaaattgttctttctttttttttttttggatcctggcaatgtttcttggctctgccattttctctcagcattgtttactcctccaacattttgctatgaaaaagttttagccatacagaaaaatggaaagaattacacagtagacaaccatgtagccactgcctagattctacaactgaaaacactttcagtattgattttggtctttatgctggtatgtatagtctaagtaatcagcttcctgaaactttatggagtaattattctcctattaaggaaattttggggcttttcctgctttgttcctacaccaaatagtctcacacatgtgtctagggtatttggaatttgctggttacaatatatgtacatattcagcttttctgaggagtgctggattagctttcaaaggggttataccaatttatactctctagaagagtttgtgtttcctttccactattgcccaacaattagtatcagtttcttgattttttttcaatctagagaagtatctgtagtgttagttttgcttctagtaaagttgagcgttccttatgtttggctattcagatttcatttattggctgtacatattaacccatttctctttaatgatttttgaaagattttatattct

SEQ ID NO: 37797 - DNA, 1026 bp, Homo sapiens
agctacttgggaggctgaggcaggagaatcacttgaactcaggaggaggaggttacagtgagcccagatcgtgccattgcactccagcctgggcaaaaagagcaaaactccatctcaaaaaacaaaaacacctcactgctgtttcctaagtacatacttaagaaaattgggatacatggtggtggttcatggatgttgataaggaattaaaatgtaccgtgcgactctctgtttcagtggtgacttttacctgtttagtataaatattcctttgcttccaaccataaatgtgttcttagaaatgggcctatagtttagtaacctatagtttggtaataggcttgtttgttttcagatggattttggttctgtgagctaaagctattttgcattaaagccttcgtcctcacacattgttttgacatatttctagtcttcataaacttttttaatttagatttttttcccttcacaagtatacatctgttttagcaaatagccttatgaaggttgtagatgtattattttgggcatgcctggtgatttctatattttttccaattacatttaaagctttatgttttaggaatataagtacattttatttctactttttattatatatatttaattgcacaagtactactgtctagaaaaaaatgggatgttgctaacacagcattgttggcttgtaggcagtgctgtcctgtaaatagattgaaatgtatttttatcagctggtatataaatttgaggaaagaaaaatgtggactgtgtttgaattgtttaaaagttgaacatacaaagatcagtggtaaccaagtaagtgatataggcaacagaccccagtttgttttgtatttgctgtcatgcctggaccagaattcctcattcccaagagtgaaagaggaaataattatagctaatgagtgaatgctggaaaaagtcacacttttttgttttttaaggaaaagcacaaaccctcatgtctgaggttgaatttaattaagtgcagtcggccctcca

SEQ ID NO: 37798 - DNA, 1005 bp, Homo sapiens
ctttcagaatgttgaatgagccttggcttcaactgaaagtcaccagctacattagcctctaacaagagtcagcctgtccgttgagggtttgagggcaggcattgacttctctagctagtaaagtcctaagtggcatcttcttccactagaaggctatttcgtctacattgaaaacctgttgtttagtgcaaccaccttcatcacttatcttaggtagatcgtctgggaaacttgttgtagtttttatattggtacttgatgccttatcttgcccttttatgttatggaaatgggttcttaaatctcatgaaccagtctgctagctttaagcttaacttctgcagcttcctcacctctattagcctttatagaattgaagaattaggacctacctctgaattaggctttggcttttaagcgaatgttgtggctgatttgatctatccagaccactaaaactttgtccgtatctgcaataagactgtttggcttacttactatttgtgtgttcactgaagtagcatttctaatttccttaaagaacttttcctttgcatttataccttagcagtttggtgcaagaagcctacctttaggcctgtctggagtttccatatgccctctcctaagtttaataatttctaacttttcatttaaagtgagagatatgcaactcttcctttcacttgagcatttggaggccattgtagggttattaattggcctaatttcaatattgtgtctcaggggatagggaggcccaaggagagggagagacagaatggccagtcagcagcagtaagaatatatacgacatttattaagttcattgtcttatgggcacggttggtagtgccccacagcaattacaatagtaacatcaaagatcactgatcacatatcaccataacagatacaatagtaatgaaaaagtttgaaataattttagaagtaccaagatgtgacaaagacaagaagtgagcacatgctggtgggaaaatggtg

SEQ ID NO: 37799 - DNA, 1029 bp, Homo sapiens
aatgggcatagaaaatttctggctatatatttaaaaaataagagaaacaaaatgccaaaaagttacttaaaataacagtttaaaatagtttatacaaatacttcagaacatcatctagctcttaatgatcagatgttcaaaaatattcatggacaacttgtataagaggagaaataactgatggtaaataaacatggaataaaaagtttgtactcagaaatgaaaaatgccaattaaattagtgataccacattgtatatctgaaatagctgagaatgagtatattctttcatttattattgtataacaaattggcataattgagttttatagtacatatgaaacaaaaaaagttaatgctattttgccctgtaatcccacaattaaagctttttgaaaggaaataattcaaatgagcaataatactgtacacgtataggtctatttagaagggcattatgtagttttaaaaaatcactataatgtagaaacgagttagtatgaaactttaggacacaaaatgagatgccagtcaattataagtaagaggtctgtgtgggtaaaaactgaaaggtaatagaaatgagaagagttctggttggtaagaataagatagttatatatcttaaagctttcagtgaaatcttaaccttttaattttttttttagcctttttttgttagttttgagagagagtcttactgtgttgcataggctggagtgcagtggcacgatctcagctcactgcaacctctgcctcctgggttccaataattctcatgccacagcctcccaagtagctgggattacaggcctgtgccatcttacctggctgatttttgtatttttagtagagatggggttttaccgtgttggccaggctggtcccaaactcttgacctaaagtcatccacctgctttggctcccaaagtgatagaattacaggcgtgagccactgtgcctgggcttttcagcctttttttaatgcaaagaattgtgacatggttgtaatcattttgtgcttttat

SEQ ID NO: 37800 - DNA, 1051 bp, Homo sapiens
actctgttgcccaggctggaatgcagtggcacaatctcagcccactgcaacctccgcctcatgggttcaagtgattctccagcttcagcctcctgagtagctggcattacaggcatgcaccaccatgcccagctaatttttgtatttttagtaggggagggggtgtttcgccatgttgcccaggctgttctcaaactcctgacctcaagcgatccacccaccctggcctcccgaagtgctgggattacaggcatgatccaccgtgcccacccgaaaccacttgtaatatacctttaggagaatgcttttagttacatcatgatccctttcatgtagctaacaacaaaaatgaatattaaccccaaatattggaactcgtattttgaagcaagttatttcttggtatactttagtgccagaattggtactgttatgtgattaactgtttttgagactaagaaaatattttgctggacatctgatgaaattatcttaaaaacagtgcttgggtgttttccctggagtgtagtggcaagagtactctgttgtccatcagagccacttgctgctctcagctggccttgctgttgaatggcataatctgatttcgttggagtacccaagtcctaagatttgaagaataagggttattatctcagtctcatcttttctctgagatagcatttgttcaggaaatgttatctgttttcaatggtgaagggagtgagagtctgcttaggagttactgtatacattaaacattggtgaccggactttaaagaattagaggctaggcctggtgacttacacctataatcccagcagattgggaggccagggcaggaggatatcttgagcccgggagttcaagaccagcctaggcagcatagtgagaccctgtctctacaacaaaatttttacttttttatttttatttttatttttattttttgagatggagttttgctctgtcacccaggctggagtgcagtggcatgatcttggctcactgcaacctccacctcctgggttcaagcgattctcctgcctc

SEQ ID NO: 37801 - DNA, 1085 bp, Homo sapiens
tgcagtggcacaatctcggctcactgcaagctccgcctcccaggttcacgccattctcctgcctcagcctcccgagtagctgggactacaagcgtccgccactacgtctggctaattttttgtatttttttagtagagatggggtttcaccgtgttagccaggatggtctcgatcttctgacctcatgatccacctgcctcggcctcccaaagtgctgggattacaggcgtgagccaccgcacccggcttccataattttttcaacaatgttttgtagttttcaaagcatacattttgcacttgttttgtaaaatttattcttaagtatcttattctttttgatgctatcatgaatggagttttcttaatttgatttcaaattgttcattgcacgggcataaaaatacaacttatttttgtatattgagttcatattgaagtggtgtcattgtctggagtaaatacccagggttcgtcatctcgtgccaaggagatgaaggacatggacatgcatgaggagtgagtttaggagcagaggtttaataggcaaaagaaagagaaaggagaacagctttctccctagtgagaaagaggggcctcctaaagcaaaatctggcccgcagcagactgcattagattttataggcaggtttgaggagatggtgtctgatttatgtagggcccacagattggttcgaccaggtgtgacagttacatactgcaaggggaaggctggttgccccactctaatcttattatgcaaattggatctttgcctggctggggccatattgtcttcttactctacatgtggtttggcaaagagaagggaagatggagccaccattttgaacatgcttagtcccaggtagccttttcctgttggcacaactgctggcattcacctgtgcaagcttacagcttgcgtgtctgtgtctgcagcacaattttacaggctgctttttgttagaaaagaaaatgatttggggctgcttttcattaaaaggaaaaccttactgaggatcccgtaccctcactgcctgcctaaataatttcttcttaactcatatcattatcatgcaac

SEQ ID NO: 37802 - DNA, 1039 bp, Homo sapiens
tgttgcagtaggaactgccgagtttcccatttcctggaaaaatggtaccctctttgtgaagactggcaaataattttaaattgtactgttttaggtgcaaaatttagccaggcgtggtggcatgcgcctgtagtcccagctactcgggaggctgaaacaggagaattacttcaaaagtagcatgatctcggtctaacataaaacagcagcctaaaatataaataatcaatcttgagcataaagagataaaagtatgtaatttaatacctgatttaatagaatacatggaggaggataattcttgtgcctttcctagaaattattattgtgttattataataatatgtaatattaatgggtacttactttctgccagaaactgttctaaatgctttagatacatcaaataatttaatccttacaacaaccctatgatgaagttgctactattagcattctcattttaaacagtagaacactaagacacagaggtcaagtaatttgcctgaagtcacatagctgcttaatagcagaactgaaccaggattctaacccaggtggtcaggattcacaatccattcccctgggtaccttttcaactgtacctaccgttgataccctgtacagactgtctctgtacctcaattacttcatctataaaatggaaataataataggactcacttcataggtttgtgatgaggattaaatgatttgatatatgctcaataaatatctactcttactcaaagtcctcaaaaattttttctttatttcttttttgcctctggacataatgtagcctgcataagatctctctgtctcagttttaccctcatttgatgatgtagcttaaattccttttctgatatactccctagccccccaatcctagttgacatcttttagtacattatctgtaaattttgtgtcagttaatatttaacatgggctagttctttctctagctcttttttttttaacctcccactaaaagttaagttcctcaaggataggcataatctcttgtattctgcat

SEQ ID NO: 37803 - DNA, 1009 bp, Homo sapiens
tattgattataaaatggattacattttcttaaaataggaatggaagcacattggttgagaaatttcagttgaaatgcatggaacataggctgggcatgatggtgcacacctacaattccaggagttggggaggctgaggcaggaggatcacctgaggtcaggagttcaagaccagcctggccaacatggtgaaaccctgtttctactaaaagtacaaaaatgagctgggcatggtggtgcacgcttgtaatcccagctgttcaggaggctgaggcaggaggattgattgaaatagggtggtggaggttgcactgagccaagattgtgctactgcactccagcctggcgacagagcaagactccatctcaaaaaaaagaaaaaagaaatgcatggaacaaagctaagaatatgactgtttctttacaaaatttacacgttatatgtacaaattgttaggcttgaaataattaaaaatttgtgttgtttcttttgtcaatagcaatttcatcacgaaaacctggtcaatctgattgaagtttttagacagaaaaagaaaattcatttggtatttgaatttattgaccacacagtattagatgagttacaacattattgtcatggactagagagtaagcgacttagaaaatacctcttccagatccttcgagcaattgactatcttcacagtaataatgtaagtgcttcagaataagccaatttgtaggatgaatatgaatcataagtgctccttatacattgttttatttttatgaaggtggctaacattctttttctatacaataataatagacatcctgaaaatggggatagggaatagggggcactaccttttagttgcagaaccaaaaaatattgagcactcagtaattccaactataaggcagaccaagtatgggatggtaaaggcagtatcagtaattttgtttagtagaatcagtagtcagctggagcactattattagagaaagtatattaaaacattgaaag

SEQ ID NO: 37804 - DNA, 1041 bp, Homo sapiens
attatggagaaacaagtgtaatactctatcttatctacattttgtaattttatagtgatacaagatatatgtgttttggggtatgtaacaaaagctacaccaatattgtttaataattattcagaaatattcaagtataatacttaataaaaatttctgctatgtgcaaggcatggtgctaggtactgagactataaggaggtaaaagatagttcctgcccttaaagacttctataatttaatcagaaaggagagtatatgaaaatcatactgaataaaaagtggctcataataaatgccaaggaatcaacacaaagtcctttccctggtagggaaagtttttttgaggaaatgggacatgaatttggctttgaaggatgtggagggtttagataagagggagaaactgttgtgttctaggttagaggaacaacataaactcaaaagagactaaagaaggacaaaggataaagggcaaagtggaaaggacaaagagcaaagacatgtgcctgtagagttttctgagcagaattggaaagaggtatattagaacagtaaattggaggtagattttaaagtcttttaggctaaggagtcaaaacttgattttgtaagaggtggaaagtcgtgaaggttttgaattcagtgtaaagaaatgtaaattttaatctaccactattgtgcagaatagattggaggactaagagtaaaaataggtctgttaggagttcaattaaggaattttggaaaatgtctgaggacccttgctaaaatgcagcaatgtgaatgaaaagtaaagttagaacatgctgtattgtaaaaaacaaaaaaaaaagacatgaggccgggtgcggtggctcacgcttgtaatcccagcactttgagaggccgaggcgggtggatcacctgaggtcaggggttcaagaccgtcctggacaacatagtgaaaccccgtctctactaaaaattaaacaaaaaaaattaaggccgggtgcggtggctcacgctcccagcgctttgggaggctgaggcgggtggatc

SEQ ID NO: 37805 - DNA, 1056 bp, Homo sapiens
aatttagctcattttattgaatttagatacacacataatttcaactagactatctgatgtttgtatcaactagactatccaacatttgtaactaatagtgtacaagtaatgtaggtgtcacagctcccagcagagttgaaaggcactttgttgggaatagggaaaattcctaggaaacaatggaaatgaagccctctgggtggtgaccaccatcctcctaattgaaaggtggggacaaaagtttagtagcctgttgattaaaaacaaagattctaaaacaaagatcctaaaataggctctatttctgcagagtcccttatacagggttcaactgggggtttagttaattgacaaaagtcaagacctatgtttataaagcctcttaatttatttaaaattagacattaaggctcaacacttttcttgcttctacttagtaaacaaattaagccttgccttggaatgtggatttttattctgggggcaatatggagaacaatttgagatttttttttttttttccaagacagactctctgtcacccaggctggactgcagctgcaatcatagctgcaatcatagctaactgtggcctcaacctcctggagtaaagggatcagcccacctcaacctcctaaatagctgggactgcaggcacacacaccacatctggttaatatttttattttttttgttgttgagacagggtctcgctatgttgcccagactggtttcaaactcctagccccaagcagtcctcctgccttggcctcccaaagtgctagaattacagtatgagccatggcatctggcctaagatgtgtattaaagtcactgagacttcagtgatggcaatatactactacaaacaagctgataatgttataaaaagaaactgaatagtttttttgcttgattgtattgaagaggtttgggataatgggtaacagattcctttagtcaaaaaactttgcatgaagcatgtcatatggatgtcatggtgaaagatcactggaggttaggtaaggatgaaagagagagaagcacttgttgggg

SEQ ID NO: 37806 - DNA, 1026 bp, Homo sapiens
attgagtagataaaattgtctgcaaaaacagcgtaatttccaacctggccaacatcgtgaaacccgttctgtactaaaaatacaaaaattagccggacacggtggcacgtgcctgtaattccacctactcgggaggcagagacaggagaattgcttgaacccgggaggcggaggttgcagtgagccaagatggcgccactgcattccagcctgggcgacagagggagactctgtctcgaaaaaaacaaaaaacacagaaaaaaaacccaacaaaaaccagcataactggaagagactacagagtggtcttaaatattaggtgtaagtcattttttaattttttgacgttgctctatttcatttattcaaatatttattgagcacctactttatgtcagacattgttctggatactaggggaaaacagatgctatctcaacctttcctgcagctcacattcatttcaactcatattttttaattaatcaaaagcatatgtgatctattctggtgtggaaaagaaaacatttttgaaaaggaaaaaaaagcatatgtgaaaacctacatatatcctatgatctggcagttctactcctagttacttacccgagagaaatgagaaaatacatttaccaaaaaccttgtacaaaaatgtttatactagctttatttgttggtggtgagttattattattttttttttttgagtcagtgtctcactctgtggcccaggctggagtgcaatggcacaatcgcggctcactgcagcctcaacctcccaggttcaagtgttcctcccacctcagtctcccaagtagctcgaactacaggcacatgctaccacatctggctaattttttaatttatttgtagagatagggtttcaccatgttgcttaggctggtcttgaactcctgggctcaagcgatcctcccatccagcctcccaaagtgctgggattacaagtgtgagccaccatacccagcctatactaattttatttgtaatagccaaaaactggaaaca

SEQ ID NO: 37807 - DNA, 1068 bp, Homo sapiens
catcacctcaacccaaaaaggcataatcaaactttatttcctctctttcttcttcccactcatcctaaccctactcctaatcacataatctattcccccgagcaatctctagtacaatatacacaccaacaaacaatgttcaaccagtaactactactaatcaacgcccataatcatacaaagcccccgcaccaataggatcctcccgaatcagccctgacccttctccttcataaattattcaacttcccacactattaaaatttaccacaaccaccaccccatcatactctttcacccataacactaatcctacttccatcaccaaccccactaaaacacttaccaagacctcaacccctgacccccatgcctcaggatactcctcaatagccaccgctgtagtatatccaaaaacaaccatcattccccccaaataaattaaaaaaaccattaaacccatgtaacctcccccgtaattcagaataataacacacccaatcacaccactaacaatcaatactaaacccccataaataggagaaggcttagaagaaaaccccacaaaccccattactaaacccacactcaacagaaataaagcatacatcattattcttgcacgggctacaaccacgaccaatgatatgaaaaaccatcattgtatttcaactacaagaacactaatgaccccaatacgcaaaattaaccccttgataaaattaattaaccgctcatttatcgacctccccaccccatccaatatctccgcatgatgaaacttcggctcacttcttggtgcctgcctaatcctccaaatcaccacaggactattcctagccatacactactcaccagacgcttcaaccgccttctcatcgatcgcccatatcacccgagacgtaaattatggctgaatcatccgctaccttcacgccaatggcgcctcaatattcttcatctgcctcttcctacacatcggccgaggcctatattacggctcatttctttacctagaaacctgaaacattggcatcatcctcctacttacaactatagcaacagcct

SEQ ID NO: 37808 - DNA, 1070 bp, Homo sapiens
tacatacttcctattctacaccctagtaggctccctccccctactcatcgcactaatctacacccacaacaccctaggctcactgaatattctattactcactcttactgcccaagaactatcaaactcctgagccaataacttaatatggctagcgtacacaatagcttttatagtaaaaatacctctttacggtctccacctatggctccctaaagcccatgtcgaagcccccatcgctgggtcaatagtacttgctgcagtactcttaaaattaggcggctatggtataatacgcctcacactcattctcaaccccctgacaaaacatatagcctaccccttccttgtactatccctgtgaggcataattataacaagctccatctgcctgcgacaaacagacctaaaatcgctcattgcatactcttcaatcagccacatagccctcgtagtaacagccatcctcatccaaaccccctgaagcttcaccggcgcagtcattctcatagtcgcccacggacttacatcctcattactattctgcctagcaaactcaaactacgaacgtacccacagtcgcatcataattctctctcaaggacttcaaaccctactcccactaatagccttttgatgacttctagcaagcctcactaatctcgccttaccccccactattaacctactaggagaactctctgtgctagtaaccacattctcctgatcaaatatcactctcctacttacaggactcaacatactaatcacagccctatactccctctacatatttaccacaacacaatgaggctcgctcagccaccacattaacaacataaaaccctcattcacacgagaaaacactctcatgttcatacacctatcccctatcctcctcctatccctcaaccccgatatcattaccgggttttcctcctgtaaatatagtttaaccaaaacatcagattgtgaatctgacaacagaggctcacgaccccttatttaccgagaaagcgcataagaactgctaactcatatccccatgtctaacaacatggctttctcaa

SEQ ID NO: 37809 - DNA, 1055 bp, Homo sapiens
ttttaagcattaattgtggtatcccaccacctcgactgcctctgataccacattatgtttatgctaaccttttcacccccaagaaggaaatgtgttatttatcctaaagataagaagagtatatttttaacctttttattgcaaaataaacacacatatagaaccacatgaacaaatatatagtgtaataaattatttcaaggccaatatccctgtaactaccacctaggtcaagaaatagaactctgccatcccagaagcccctcacatgtcccacatcccaattacaactccctccctccacccaaaattaaccactatccaaatttttatagtaattaataccttgcatttctttatagataaaaattcatgcatccatccctagaactaataagtcgtcttgccattttataaatttttaaacttttggtgtatcttttaagtctcccattcctttttctttccttacaatttatctgttaaagaacctggggagtttgacttgtaaaatctcccagtctggattttgctgagtgcacgctcatggtacagttcagcatatccctctggcctccatatttcctgatctctttggcaagattagaggtgctgttcttttatagacggcacataatttctggttgtctctcttttcattgatgctcagtgcctagatcaataacttctttgggcattgaaaaactgtgatattctatcatttctttttcatttattaagggggacacatctataaaaagatgtttcccctcacctactatatgcttactcagtattgcagttcacataaggtcagtaatgcttgactctttcccttaatttactaattatcaagataaaggattagctccttatcatcctccaaaagtggacagtttgttttggggtatcattaaaacctcatagattatttggtgaatttcaatacattgcaattattattcttactggagcccaaactgtcccatctttggccagtagtaaaacctcacagattatttaatgagtttcaatacatggcaattattcttctt

SEQ ID NO: 37810 - DNA, 1061 bp, Homo sapiens
agcagctgcagagcactcacgagagagggccactggagccctggctggaggggctgcaattccatgaatcagaccactgctgaggagcaggtcagggtgcaggaagctgcttgtggagcagggaggaggcagagggcaggctggccctcacaggggatgaaagctgctgtggctggctgaggcatatgtctcactctgtgctgtcccccactgcacttgacatgtttcatttctcttattagcttcattttataaatgggaaatggggagctcaaagaggtcatgtaacctgtcctaagctgtaccacaccactttagggactcaatccctagcctgactgcagagtcaatgggctgtgactataagcactgcctcccagaggctggccctggcagctgaacaggatcagtgtagtcagacagccagcatggtgaactgagtcaaacaggtatagacagcaacccctcagaagtgtctgcacatagtagatgctcaataaatatttgttgaataaaagaattgaggcactttaggaggctgaggcgggtggatcacgaggtcaggagatcgagaccattctggctaacacggtgaaactccgtctctactaaaaatacaaaaaaaaaatattagctgggtgtggtcacaggtgcctgtagtcccagctactcagcaggctgaggcaggagaatggcgtgaacccgggatgcggagcttgcagtgagccaagatagtgccactgcactccagcctgggcgacagtgcaagacgccatctaaaaaagaaaaaaaaaaaaaaaagaattgagggaaggccctccctcacccccacattccacaaaacaaatcttgaccctttccccctctctgcactcctttgtgtcctctctcttgcatcttcccttctgccactcactcgctcactccttttcagcacaggcagctcttggcaccgcttttaaaagtgtttctgaacaataaaaaaaacaaattcaaaaatgggcaaagggcttgaatagacatttctccaaacaagatatacaaatgaccaataagcacat

SEQ ID NO: 37811 - DNA, 1095 bp, Homo sapiens
acctgccccacaaggcacagctttgttggagactgggttcacagatgatttcagctgcaggaacaatacaggcacatggactgagtgacaaccaagaccatctccatgcactctgaagagcagacagacacatatgcctgtgcacaggtcaccacccccactcccctgacccccgccaatctgtctccatgtcagaagcacacttgttcctgaaaatggccttaaagcctcaggtgcacaaggaggaccctttccaaatgcttgcccacacttagggttctcagacttcaggtacatgaaaatcacctcaatctgacatggtatccttagaccactcatgagaaacatcatcctagacccagaaagcaccttcctttcccttggcagctgataaggcattgttggttgattcctggtgtgctaaatagctgagggtggccaagaaagagggcacttgagatgccatatcctgaggctgcagattcctggcaggagtatcaaatagtgtcctgctttaagaacacactgagggacctgagggggaggcacccatgtgtgatagaaaaaaagcacagctttagagctaggtggaaggaactggaatcctactgtcaccatttactgatcatagggcctggtcaagtcacttaactcctcagtgcttcaggttccctatctattaagtaatggtaatgatgggaattacattaaatgtaagcaaagcaccttgttttgtaaagcctggctcatgattggtgcctgctgtaaggtatcactcatgtgtatatataatttttatagtaaatgtactggtcctgagagcagccctctgagtgtggattcaaataccagcttccaaagagaatggttacatttccagtcagcagacagtgaagtcatctggaaggatgaggagatcaggattttcacaagcgtcctggatgctagatgtgcagtagctcacaatctctggctgcctggctctgcttggcatcactagcaaagactgctgttcagtcttccccagccactgcaatttggactaatcactctcctgggcactttggattttggacatggatggaaagacaaact

SEQ ID NO: 37812 - DNA, 1058 bp, Homo sapiens
aaacagaagggcaatatctccaagtgagttcttatggaggaaaactgccccagagccatggtgtctccctgttcaagatggcagatggttcagggcagactgagaggtgcccctcaagtgtcctgcctctatggctttatctttgcatatgtggcactgtcagctcaatggcacgacagggctgctctgctgctcttcgatgtagaggcttgccaggggaaataggcacacagatgcagcctccttcctaaccctcaactgcaatctattttgtatcccttgagctctcagcttctgctgtttttgtcagatagcagacttccttactgggagatacactcattccatgggcccaggcctgacccacacgaactgggtgcaacagtgggctgaaaacatgaggactggactcaagagtgtccagcttgaacttgttttccaactgccttatacagatacttaaaaaaaaaaaggccacaagctagaaaaagcaaggattctatccaaagcacattttatactaaaatacaaaggccaggtgcagtggctcacacctgtaactccagcgttttgggaggctgaggcaggaggattgagtgaggccaggagttggagaccaacctgggcaagatagtgagacctcatctctacaaaaaataaaaaacttagctgggcttggtgacacgtgcctgtagtctcagctactcaggaggctgaggcaggaggattgcttgagcccaggagttcgaagctgcagtgagctatgattgtgccactgcactccagcctaggcaacagcaagatcctatctgtaaaaaaaaaaaaaaaaaaaaaaaaaaaaaaaaaaaaaattaaaccataaaaataagataggctagagtaagagatgggcctggaaaaatattgatagagatcggcccatatgttgaggggaaaaaataaaggcagtcctctacatatatcaatactgttctctgggttttcaagagaaatcccttgaaggtagacaaaatggtaaatgtcacaagaataaaaatcaaagcctgcaagttgactgc

SEQ ID NO: 37813 - DNA, 1032 bp, Homo sapiens
cagcagtcaggccccagcccccatgctgtctcttttctgtgcctctgtcctggtgccagggctctgagctgctgagagcttcgctttgtgagatcacccccatggcttccttcagcttcaagggtgtgggtggcctctaaatcactctatagtgcgaggagcaataacccagaaagtccatatgaataatacttggtcctcttctctgagtctttaaccaaaaatgaagtccactgccctggccagaattcttccttggctgtttgacaaaacttaattccacaactgtttcctcccagaggatgactcttagtgtaagcacatccctctttgagaatctgactgtttctgggaatcaaaaatgtgggtttatatttccgatacttctggagtgccaggttgtttggttttgttttcaacaaaatgtttggccctagaaatgcagcaacttgctctgttgccaggagcttccctgccaagtgtcttgtgcacagccctctcctgggtgagctcctggacaaagcctcatgccctggtaaaccctgcagactgcagccactattctggcctaggtcatagtcttgagcaccagctctgctagggctactcaggcattgcacttgtctgcaggtgttaggaatttatgttactgaagagtgagcaatgtcattgtgagagcatgtgcaagagcaagctttcctgcaatacctaaagaaaagcaaggggaatagtaggacctgggacagcagtcctaggcccattaattccccttgcccctctgacagaatttcgaactcagtattcttcgaatactcagatgccagggttgccattgtaacagaataacagtggctgggggacacccattcagtggctcttcagaaagaacaaattcactgggtggatataacacttaaggaaaatgctcaataagccacccattgagtctcagagcaacctgaccaacaaggtgaaaaccatttaaaagacacattgtcttgctggagaaccttcctcccctgggtttcacca

SEQ ID NO: 37814 - DNA, 1046 bp, Homo sapiens
cccaatgttcacacacattgttgaattgttttaaaaaagaaatcagtgctgtgaatctgagtcaactaaatgcttttgctttgtgttcagccaagatttgcagccttttttcagaggttttaaaattttcagaaaaaacatttctaatgtgtctaatgtgtcagtggtaacactgacttaatggtaaatggtaaatgatttaagtttccttgtcagagtcagtattatttgaaggagttaggaaggcagtctgaggctgtgatgagtctccttacctcccaaatgatcaagatggcaaccccagctcgcaagccattcaaggcgggcataacgtaccatgggttttctccctttgatccacatacccttctcccgggagctggaagaactgtgaggagaaagggagctcttgaagttgaagcatcagtgaggagaaaaaccattcaccccttccccccactatggctgaggactggcttctgagacagtttaggaaactgacaaagccatgaaggaatggctcagctatcgaccatctggacatccagcagtatctatccatgtccttatctttgtggggctctttctagctggacacactagattctgcccggcccaaggcctctggagaaatccagcttgggcatgcatgcatgcagggagagccacacagcacagctgtgagggcaggagccagccctggagtgtgccccagggaagacacagctctcaggaggagactggaaagggtcctatggaagacattgcccttcccattcccctcgttgaagtgaactttggggacaggaaaataactgcattttaggtggtcagccaggcttccttccttatctgttatgagaaaatgagagacaccaaaatctgacagttacaggctagatttaacatactactcaggcactatctttaacagccactttcattaactaaaattgggtttctaatcatatttttttaaaagaaccaagaaggaatgtactatttcctgtagccaagtaggtcaggtcaggcagtctgcatgtcca

SEQ ID NO: 37815 - DNA, 1361 bp, Homo sapiens
cttggccacatcttacagataattacaggagctgggatccaaaccccgacggtctgtcagcagaccccgggctctcaccacagtgccatttgcgattgctgccctcccctgcagacagagcgggcagctgaaacagcaccagaggtgaggaaggcagaggaaaacttcctgacaaggaagatattcgggcactgagttgggttggtgggttagattaaggtaatgtttgctaagaatcatagctcccctgtgttattatgtataatgtaaacttatttattttttactttgaaatagggctgaaagttccagtcagtggaacttactttacagattcccaaattaagctgcatttccatcttattgggagactttgtgggaaggcagaagactggaccaaatgctgtctctgagacccctggctcctcctggacttttcggaggagtctgcagtgggcttaacaacagtagaggagtttgtgtcaggcttggaaccatctttggaatactactttcaatcactgctgtaggttttattttctctatggaattctggttcctttgaggcccctgggacaagcagatggagagctttgctgtggcccagagctcccagctgatggctgggcaagcttcagaccctgccactcaacctcctgaaaaggtgggatgggggcaatggattctgggatgcggctgcaaacactcagagccaccaagggaattggaggaggttgtggtgtggtcagaatgcaggaagctcttagcagtcaccttccgattggggttgattgggttaaggccttctgggatggtgtaaaacagttctgaactcaaaggactgctgatggaaggatgatgaatcgaaagaaatacaataaacagattccttgtcatgttgttggccttgtagcaaacatgttttctccttgggattacgtgaacatttgcttttctttgatttctggttgttattttcagtatttcttttgttaaatgagctctgttttacagagcttcagacagctccgttaaagcccctgactctttcctattgcaagggttgtgtttagagtttggctcagcctcaacacatcacctgttagctgttaggagtctaattctgcaaaccatgacttcatcttgctgaaggaagatagacaaaatgcttcaatacaacagatatgttttagttcaagacatttggaaaaaagaaaaaggaccctaagcctttcgtctctgggtggacttgcaaagtagacctgtcaaaggtattcatgttcagacggctggtctgtagtcaaaaaggctgccaaaccatgctgttatccaaggatgtgggaattttgtcaagcggcctt

SEQ ID NO: 37816 - DNA, 1082 bp, Homo sapiens
tatctggttcttcatggtcctcctaaagagtccatgaaattgttcaggagagcgtaaacatgatctgggcctactttgtgaagcaatgggcccattttcctctgctctcccaaggccagcggtcagactataatacttggatctgagaggggaaagacctcattgcttcttgatgcaaatattttcttccaatctgtggcttgtcttctcattcccctaacaatgtcctttacagagtagaaatgcttgattttcataaagaccagcttagtaattatttatggtatagattgtacccttggtgttgtgtccaggaagttactgccaaacctgaagtcatctagattttctcctatgttatctaggatttttatgggtttgcattctacatttaggtctatgatccattttgagttaatttttgtaaagcttgtaaagcctgtgtctagacttggcttttttgcatgtggatgtctagttgttctagcaccatttgttgaaaatctcattgctatcttgaagataagccatggtgcctggaaatcttcaaaagtcaaaggagtgtcactgctgtctcatgatatcactttgaagggcaaaatgcaactgttatttttaccatcagggtctgcagataggtagacaagttccacgtggagggttctgcttttgcttgggccaacggacaagcacacaacaccacaaaacctgtttctggtagacaagttccatatgaagggttcttcttttgcttgggccaacagacaagcacacagcaccacaaaacctgtttctggaatcaggcaaggaaaaaggtgtgaccaaaactaagtgtgccttcttttcatctagaccttccatttgggatctatttacttcttattgaagtatatcctctagaattttatttattgagggtcttttggtgataagtgtcctccacttcggtttttgaacatgtctgtcacatctataaagttttcagccatcatttcttcaaacagtttatactagtcacttcttatggaacacagattaagcatacgttagtattttactctgtcttctgtatctgttaatct

SEQ ID NO: 37817 - DNA, 1030 bp, Homo sapiens
atagagagatgtgttggaggtcaacagggcctgtgcacaaggttggagtctggacatgcagctgccccaaactagactgtgactgacagaaggcatggccatggcaggaatgcagaagagggagcacattgatggatcattgccagggaaggtattgggaccagtaggcaggattactccagacaaagggctagagagatgttcagactgagcatgctgggtgtgctgaaggtgccagtgggaatgaaggtggtttgcagtgcagggagcagcctgttaggatgcctgctgggaagggataggagggtgtggcagggcctccatggcactttggttctttgcccctactgcccctcctagtagtacacagcttgttgttctcatgtccaccttattcatggggtctacatagccagccttctaattagtcctgtgctaaaagaactgactgcgttgctccagtcgcatctcgattgctgaggggcctgtggtcagactctgttgcttctcactgtagcctgactcatctctccatccagctcctctataaaagtttgtctttgggtaagctttgaggttttataaacaaagttaatgtttattgtgatttataattggaagagttgcagaaataaagaccacagagatcccttcaagatcaatcacagaaccttcattttctaggccaataacagccaaaagggcagtcaagctaatgtgcaatgatgaacagacacagttgcctgaggacctatcattgttttcaaagcatgcagagccatgagtgaagcctcctggtttactgaaggaaggaagaacacatctttgtcaagtttgaccagatagtatagctgttctcctgtgaccagcttcactgccctgcagaggtgatgagtgcttaggaagctgctttgtctatgatgtagggctgtctgtttctcaaacaaggctggatgcagaacatgggtcaaacagggcccaacaggttttgggtggtaactcattctggggttagggtcagcgttcagat

SEQ ID NO: 37818 - DNA, 1050 bp, Homo sapiens
atggttctataggcagggaagttcaagatcagggggttagcatctagtgaggccttcttgctgtgccatcccatggctgaagggcaaaaggggtgacagagagcaagagataaaacttaaagactggaatccttttataattgacattcatcattcatgagggtggagctctcatgacataagcatcttccactgggctccacctcccaacactgttgcattggggattaaatttccaatacatgatttttaggggacacatccaaaccatagcagtcagtatttgggaataattgtttccaaccagccttggcagtaagtatgtctattcatgtcctttgcccatctttcagatgggtccttggtctttcatttgttaacttctggaagctctttatatagagagatattagccttttacctatagtttgaatcagtttcctgtggtggtgtttgtcttttgactttgcttatgtgtactactaagtaaaagtttcattgttatgtgtttgtatttattaacctcgaattttatggcttctggattttcaggcatgtcttaaaggccttttccactttgaggttaataagagatttttctagtttttctcccattattttttaaatttaactttgctcccaccacccctcaatttaataggattttcctatcaatctcattatccatttggaatttattttggtacgtgatgtaggatatagaaccaactttattctttagatgctatccagttgtccttgtgtcactagttgaatatacatttttttgtccactgatttgagatgccatcttcacttacactgaagtatttccatttgtatttggattagtttctggactttgtatttagatctatttgtttgtcttatagtcacattccagtaccagtcccacactattttaatcattgttcgataatgttatactgtctgatatgcttgtccttcctcatgacttttctctttcagagtctctctttttttttatagtcctatatttttctaaatgtatttaaggataaacttgta

SEQ ID NO: 37819 - DNA, 1034 bp, Homo sapiens
ggagtgaagaacaattcaaggtcagttttcttcctgactgttggggcattttcagctcactacctggggcattgggggtgtctgaggtacaatcttgctggcttcaatatatgtgtgtcctaagaagcatgttcctgagagaactaatctcagtatctataacaagtcagggtttagaattcaaaagcaattattttagaatcttgttctcttgccaagtcttcttgaagctctaatacctagtttcttcacaggtaagatggaaattagtgacaacattagtaataataatgagaattcacatttattgaatactatgagccagacactgcgctaggcactttgcataaattacctcatttgatcctcatatgaacccaaaaagagaggtgctaattgtgttcctttttaatagatgagagaatctgggcaaagaggaagtaatcaattagcttactcagggacacatggacagtgagaggcagggctggagtgatcatcgtgtaatgaataagccttggattgggagcagagacttggatttcagcctcgattatctccttctaattctgtgactgtggaagtcacccaacttctctgtgtttcagggtctgtttttgggttgtttttgttgttgtttgcttgtaaatggaaaacatgcttggaaaaaatggacttaagtgctattttagctctgacattctggaatactgagaaattctactgagaataaaaagggccactaaagcgaactgaatagaattctctcccatgcagaacactccagatggccttgatttctagcagtgacacctctatgccagtgcctgtgattactttgcagcaaagttcctagcaggctccgagcagttctcagccatctcacactccaagccccttgaacattgccctcagttttgcagtttctcctcatgtgccctgaagcccagactgcacgtaaacaaccagtccaagaacaataattctgcttcttgggattgaggagtgtatcaattttctgtaattctttgtag

SEQ ID NO: 37820 - DNA, 1083 bp, Homo sapiens
attaagctggttgatggggaagaatgtgatcaataaatgctacccgcttaaggacttgtagttcattcttcagctaagctttgccaatcagttaccttgtgttgtgctaggcagcattgggagatggcgtgcagagacagagctggtacacttctcactctgcataggctcacagtctataaagggaagtagaaagaggtgtggctaaccaaccacatacaaggcagaatggggttgtggctgcccatcacctaacctggcaaaggcagactatctgcctttgactctgccttacccactaagattccaaccccttgttccccagccctgctctctgctccagcctgggcagcttccacacatctccttccatgcttattctgaactcattttccattcattcacttaaaaaatatttgagtttgtgttatgtgccagcaaataagacaaggtctctcatggatcttaagggctagtggaagaaacatagtcgttcaaacaatgctgtgaggatgagggacatagctcgataagagttcctaataaaaaatgaactagacagggatttctatggtgtatgtgcttatgtttgtacacatataggttatttgatatagaaataggagcaaactatacatacatactactcctttccttttctgctcccttcccttcctttccctttcccttcccctttccccttccctttcctttccttgccaaattcaagttatgtccagcctgacttaagtatataattagaaaacagggccaagtgttttaggggaaaagcacattaacatatttgcacaaaaaaaatgtacttaggttaagaaaaattggagtccttttttcctcctggcagataaagctttcatttcaactttctgccatcctataaattttgttgtagtttttttccttagaatttcttttcttctctcttacactgcttattctgaaaaattaaaaacctactgtaggtttgaaagaatgaacattcatgtagtctttacctaaactcaccattaacattttgcttcatttactttatctctctagacttaatctttcattttgctt

SEQ ID NO: 37821 - DNA, 2211 bp, Homo sapiens
caacagctacggtggttacggcggcggcggaggcggcggctacaatgcctacggaggcggcggcggcggttcgtcctacggtgggagcgactacggtaacggcttcggcggcttcggcagctacagccagcatcagtcctcctatgggcccatgaagagcggcggcggcggcggcggtggaggcagtagctggggcggtcgcagtaatagtggaccttacagaggcggctatggcggtgggggtggctatggaggcagctccttctaaaagaaaatttaaaatgcctgggagtggctataggggtagctctttccaacagcccaagtggggtcaactcctaagccccaccccctcacacacaccgccttccctgttttgcccttgggggagccacttctaaggctgcttacccttgggggtgttcctctatttgcctgccacctctcttgtctctccctctgaagatggactcggccccacatacacatttttgtgttacagtcattgatggactctatttttttattattacttggaccttggtcgtttttatactagcaaaatgtcttgttttaatttgtgttttttggggggagggagggagtgaacttgctgattctgtagcaaaacctgggtgggggttggggtggggggtagtttactttgttgtaaggacttgataacctggctacagcgttttctatgaaatctacttggatcccatgcctgaaatttggaagcatatgtacaaaaatcatttttacgttttatttttaataaatcattgtgtttgaccgtacatgtctaacattttttttctaggatccattccgtaccgttttttaagggatatttgtttaagactttacgtgttaattctttattcttgatgtgtacttagagaaacttaagaggtcctgtggtttttttcccctctcctgttgccctgctagttgcgtgttgaattatatcccttacaggcaaaacttttgaagtggtggatgtggctttttaaactcttaagtttctgtgcatccatctcttgtactaagcgaattgtttatcatcttgacatggttggtcatttctatgacaatttacttcaaactgtgtactgtgtagttctatatagtttgtgttaagcatgtcattcatataaactgtttaaaatttttcagatggcctagtttcatccctcttactggtttgtctgtaatgaatggttaaaaataagggttatattttaccctcaaatgcgtttttgtactttcagagcaggtttaaacgttttttttttttttttcctatatccgaactgttggcctcatggaaatccctttcccgatctttgtagcaccatctactggcagaatggcagagtagctgcgaaacaatttgtttaaaaacttgcttaagacaattgcatcagatttggaagttttgccatcaaaattctttgcagaattggaagttaacacatttgcttgtaactgagatgggcttcacaggaatgtagttgccagttcatatcacaatagccctttctatatgaggtttgaaaatgtaaactgctatgcatagcttgggcaatagccctaaattgctatgacaactaatgaaccagctacgtatactggtattttaggtgcaagttgtaaagcaaaatatctgtgtattctgcttggttaacaaatgtatatttgtagccctttcctgcaatagcattcaagttgttgtttataagagaagaacaaaagtgataataggtgaaaattgcctttctggatagaaatagagaatagcaacgtttatggatatcacaaataaagaattcaattctttacatgattgagtgagagtatgtataacctggtgggtgggttcagagtaccttttaatctagtatgcttaacttgatgttaatatttaacttaaatatttgacttacatgttgacgttgaaggctcaaagctatactaagaagctttctgaaagattgggctttaaaataaaataatattttaatattgaaccattttttaacttcttgtcactgttcaattcctaaggtctagttcttgccagttttttttttttttttcctgattggcagggcttttaaagaagtaagaagaaaggttaagattattaggctaggttatagctgctcagtagtcattttgacaaagggtagcggatggttggtacaa

SEQ ID NO: 37822 - DNA, 1084 bp, Homo sapiens
attattccactgtagtcagagaagatgcttggtattatttcaatttttttgaatgcagacttaatctgcactacagaccaaatggacctaagaaatatttatggaacatttcatccaatggctgcagaatttacattcttctcatcaacatatggattattctcaaggacagaccatatgttaggtcacaaaaacaagtcttaaaacattaaaaaaaaatggaaaatataccaagcatcttctctaactacaatggagtaacacaaaaagtcaataatcatcacactgagggttttaatcataaagggatgctgaattttgtcaagtgttattctgtgtctattgagatggtcatatgatttttgttttatttttctttcttcttctccttcttcttcctttctttcctctttctttctctttctctctctctccctctccctctctctctgtctctccctccctcccttccttctatttttttttttttatggagtttcgcttttgttgcccaggctgtaatgaagtggtgcaatcttggcttactgcaacttctacctcccaggttcaagccactctcccgcctcagcttcctgagtagctgggattacaggcatgtgccaccatacctgactaatttttgtattattagtagagacggggttctgttggctgggctggtctcgaactcctgacctcaggtgatccacccaccttggcctctcaaagtgctgggattacaggcatgagccactgtgcctggccgatttttgttttcaattctgtttacgtatcacagttgttgacttgcatattttaaagtaaccctgcatccctggtatgaaacccacttgatcatggtgtattgtctttttgatatgctgttggatttggttagctaatattttgttgaggatttttgcatctatgttcatcagggatattggtctgtagttttgtttttttatgtcctttcttggttttggtattagagtaatactggcttcatagaatgatttagggaggattccctctttatcttttgaaataatttcagtaagattggtaccaattcttctctaaa

SEQ ID NO: 37823 - DNA, 1068 bp, Homo sapiens
ctatatccattcatcggtcgatggacacttaggttgcttccacgtcttggctattgtggagagtgctgtaataaacatgatagtccagatgtctctttgatatactgattttctttctttcggtttatacctaatagtgatattgctggatcgtatagtagctttatttttagttttttgaagaacctccatagtggtcgtactaatttacatttctacccacagtgtacgagggttccctttactccacatccttgccaacatttgttattgcctatcttttggataaaagccatcttaaatggggtgagttatctcattgtagttttgatttgcattctctgatgatcacagatgttgagcaccttttcatatacctgtttgtcatttttatgtcttcttttgagaaatgtctattcagatcttttgtccatttattaattggattattagattttttcgtatagagctgtttgatctccttatatattctagttattaatctcttgtcagatgagtagtttgtaaatattttttcccattctctgtgttgtctcttcactttgttgattgtttcccttgctgtgcagaagctttttaacttgatgtgattccatttgaccattttcactttgttcacctctgcttgtggggtattactcaagaaatctttgcccacttcaatgtcctggagggttttcacaatgttttctttcagtagtttcatagtttgaagtcttagatttaaatctttaatccattttgatttgatttttgtatatggtgagagatagggtctagtttcattctagaaaactgcatatggatatccagttttcccagcaccatttgttgaatactctgtcctttccccactgtgtgttcctggtatctttgtcgcaatgaattcactgtagatgtatggatttgtttttggcttcttttttctgctccattggtctatgtgtctgtttttatgccagtaccatgctgttttggttactttgactctgtagtataatttgaagtcaggtaatgcaattcctccagttttgttctttttgctga

SEQ ID NO: 37824 - DNA, 1031 bp, Homo sapiens
aaaagctgagagaattcatctctagctcattacaggaaattctaaaggatgcatacttcagacagaaggaaagtgatcccagaggcaagacctgagatccaagaaggaaagaagagcagagaaagtggaaaacatatgggcaaacctaaacaaagacctattgtataaaacagtgacaataatgtcctggtaggtgtaaaaaattaaaatgcacagcacaacaacaatataatccaagagggggataaatggattttaaatgatcctcgcgtcatctaggatcaggataaagatgtttagtaatttcagttttgataaatatgcatgtggtaattcctaatataactactaaaagaataaaaacagtatattatttcaaaaccaatagatgaaggaaaagagatgataaaatactcattctttacaagttgagaattagggacacaacaaggaggatgttaggttttctggatttagcaaccaagtggggatactattcataattgatttgggaacaggaaaaagagaaagtgtggaaggaagatactgagttatgtttgggacaggttgaatttgaggtgcttgagggacagccattaagtttcctcttggaactagggcagcaagttttctttttaaaaccattttttgtacctttttgagctaaagtgattcttagctctttctggatttatgaatttgcctaacaattctgagctccattaggctgtgctttagtgaagtatatttttaacaggtttcccaacagtaagttaggggaaaattgtgaacttgatgtctctggaagcctttaaaaataagatgcttttctattttaaaagatttaggtttgccttccttcaagagggctggacttctccaggtgtcagtctttcttttgatatttaggaatttattctctgctcttctctgccatctggtggcagatgaatggaacactgcatttggaaggaaaagagggaatttgagctttttattataatttatttatttatttaggggggacaagt

SEQ ID NO: 37825 - DNA, 1051 bp, Homo sapiens
cctctaggtctttgaagaattgctacactgtcttccacagtggttgaacaatttacacttccactaacagtgtaaaagcattcttttttctccacaacctcgctagcaggttctctattctgttccattggtatatctgtctgttcttgtaccataccatgctgttttggttactgtagccttgtagtgtaattggaagttgggtagtgtgatacctccagctttattcttcttgcttaggattgtctttggtatttgggctctttttgggtttcatatgaatttttaaattttttttttctaattttgtgaagaatgtcaatggtagtttaatgggaatagcattgaatctataaattgctttgggcagtatggccatttttacatattgattcttcctatccatgagaatggaatatttttccattcgtttgtgtcctttctgatttctttgagcagtggtttggagttctccttgaatacgcccttcacttcccattagttgtcttcctaggtattttattctttttgtggcagtcgtgaataggatttcattcatgatttggctcttacagagccaataattcaatagacattagagttaggatctcctaaacttgtggcctgatactttttttacactatgatgatttatttcctcaaaccaacatttaggtcacatggccccacaaagaacttttatattatttccatgtaggagaggtcgattggaagatgtagattagcctaaataacaaaatatggtaatttccagaaagtcattggtttatggaaatagaatatctaaaactaactattcgagaaaatttaggtcataagtttgcattacacaacaatgctttaatgaaaaaaaattggttcccacttaaaagtcttttatatatagtgtttgataccattattagaactagatttatctaatctcctcctaatctcaatatataatctcttaatacttggtggctcttttcagtctttaaaaaccctttatcatcttgaagttgtattaccgtatcaggcttaatttgct

SEQ ID NO: 37826 - DNA, 1135 bp, Homo sapiens
ttcagcttttaagcccttaaagtacagtgcactaacatactaccactctagcaagaagcccagaattaatgggactattcaacaagtattatttatgaaaattagctagacttggaattgatggtggttcatttttcagatgactattttatgacaaagggtgatgtgtctccctggtgcatttgaaatgggagcacagagtacagattgtcctttagtaaaacaggaatagacatgaagtcacttgtattggcagtagctgcagggtattatgcctgctgctcaaaagtggcaccaacagcagtaaacacatattagactggaaaattcttctctttttagctcgtggcacaaaatcctgatggactccacgaaaggtatgtgtaaggctttgaaaaagctttgtaaaatagcattaattcctgtttaataaagttgtatttaagcagacatcttttaggatttatatccgaacagcagaaaattatttctatttgagaataaaatcagggatttatgaaaattataagagaactaattgattaagtagtgtgtattttgcgtttcactgtgcttagcacagtgggagatacaaagtggaaaacacagtccctacccaaagctctgtaggagcacacaagatctgagtacaaataatttgctttgggatgaatctatttagctaatgtattttgtcatttttaaggcaaaagtcttacaactctgtaacaatttttggctagccttaaggttctctaagcaaaatatcaagacaactggtcaattcagtgatcaaacaaatcaactaattttttggtaaagtaaaagtaatccaattaaaaatatccaggctgggcacagtggctcacgcctgtaatcctagcactttgggaggccgaggcaggtggatcatgaggtcaggagatcgagaccatcctgggtaacaaggtgaaatcctgtctctactaaaaatacaaaaaaaaaaaaaaaaaaaaagccgggtgtggtggcaggtgcctgtagtcccagctactcgggaggctgaggcaggagaacggcatggacccgggaggcggagcttgcagtgagccgagatcgcgccattgtactccagcctgggtgacagagcaagact

SEQ ID NO: 37827 - DNA, 1056 bp, Homo sapiens
aaaaaaagctttagaatagttttaacaaaaggatttgggctttcctgtactgggactctcagctgttcacaaaattatgctttctaaagtaacagattatctgaaattgaaattattagaggaaaaacacccatatataggtaatcaaatttacataatttttttttttttagagatggagtctcgctatatttcccagtctggcctcaaactcctgatcttaagggatccccagctcaacctctcccagcagctgggactaccgggctgtcaaatttacattaactatgagaattaagcaggtaatctctagagactattcttattcctttgagcataacagactgaaaaatcctgaagaattagaaacctgtttggttaaaacaaaatcacaaattcagtagattcagtcatgatttaagttcttgtgattgcctttgaagtgcaaaccatggcaagtctagcttagtttctagaggaattggctgagctgtaagtgagcttcacactgttctagaatataacattgctcttttggaacttgttattcataggttttgctgagtggagttttattttacagatctagacttttgtgaagaggagacagtccgttttaaatatttgaattttattttcttttgacatacaactgtggaacactcagataatctataccatgttagtattcctacaagagaaaacgggtaaaacagtatttagaaagcagtaccagtaaacgttattacaagcattagatgtgtttaaaaagttgatactaatttataacctgtaattgttaaatgtgcatgacttaaatgttaaaatcctgtattttaagatagtcttctgcagttacaaatccatatacccagatttcctgtaggcttcacaaatcggaggggtacatagaatgtgcaagagtcaaaggataaataatattataaatatatattaactatattacctaattaaaaccataatctgttaatacagctatggattaatttcaaaaaaatgtaatcaaatatattactaatggtgtagttggctgtt

SEQ ID NO: 37828 - DNA, 1461 bp, Homo sapiens
aagaaaattaaagccaagcttaggcttcttgaagttcttataagcaaacaagattcttcaaaatccatataagatacgttccttgaaaattcatatcataaagtcagttgtattccttgaagctatcatcgtgtgtacttggctggtacttaaattcgttttgtcaggcactcagagaatctcattttgtacttggttgtggtgccactaaacaaaacaaatgatgggagagtaagtaggccctctcaagggagcgtaagtgatgttccatattaaccacagactgtcctctccacctttagcaaacatatggtttacttcattgttttgtactacagatacatccttttagcaaaagactggaattttatcctttcaacttcaagaactttggaaatgcaagctttttgttattaccaactttttgtttctcattactgaagaaaattggaggaaaatcttcatactgaattcttctgttgcctttttcttacagaatgactgaaaatttgaaagaaaagcctataaaagtgcacatacgcaactgtgttctctgttttcctagaaaaccaaaatcaaactgagatttcaagtcgtactatggaacacctttctgtttaattcccaaagtgacatcttctcacaggtagtatgttagtaaaattttgcaattcgctggtcacacagctcccggatgaagataacagttggtagaccaaaaggtgacctcgcttagtatattgaaaacacacaccacacatcacacacagaactgaatcataccacatgctgcctatgggacttcagttactgtttcctgagttactgtttatccgctggcaatggtgtgatttgtctggatcagatccgcgctattccccaacccacctccagataatgtgagaaaatagccatgtcagtatgtaggaactctgatggtgctcagatttgtgtgttcaatcaatgggcttaaatcagcaaaatattatgcctaaagtaaatctgttcttaacaagggctctaccactgcattttcacatgtaccttcagggggttatctttttttttttcccctcctattttaatcagcaaaatccataccaaaacaacgacaacaacgccctcttaagggaccaccctttggtcaatcataacatgctgtttaaagcagctgtttacaggatgtgtagtggtatgccccttgtcatatactcttagcatatctttttttcctttggctttgcatggcttttcttcaggtactgtctcggtatcattctgctaatcattgttacagaatggtgacttcatttgtgctaacagtacaacagcagatttgggtcaggcttaatctaagtgttaacttttttttctggtgcttttttggattgatgactgtctcactttgactatacccatgttttgcatgcaatgactcatgcatggttttcttaactagct

SEQ ID NO: 37829 - DNA, 1019 bp, Homo sapiens
gggatggggttttgccatgttgcccaggctggtctcgaactcttgggctcaagcgatccccctgcctcagcctcccaaagtgctgggattataggtgtgagccactgcacctggcctataaaaataaaaaaatatatattttttatttttttgagacagaatcttgctctgtcatcgaggttgaagtgtggtagcatggtcatggctcactgcagccttgaactggtgagctcaagtgatccttccacctcagcctcaagagtagctaggactacagacatgcactgccacacccaggtaattttttaaaattttgtatagagttggggtcttgctttgtgcctggattggtctcaaacttctggccttcagcagttctcccacctcggtcttgcaaagtgtggggattacaagtatgagccaccgtgcccagcccagtaaagtgttaagtatttctgaggtactaaatactttgtagacaactagggatatagcagtgaacaagacagacagagtccctgctgtcatggagtttatattcttgtggttaagataatgtttgcctctctctctctccttttttttttttttttttttttttgtttgagacagggttttactctgttgccctggagtgcagtggcacgatcttagctcattgcagcttccacctcccgggctgaagcgatcctcccacctcagcatcccgagtagctgggactacaggcacatgccaccatgcccagctaatttttttgtattcttagtagagatggcattgcaccatgttgcccaggctggtctcaaaactcctgggctcaagccatctgtctgccttggcctcccacagtgctgggattacaggcgtgagccacctcacccggccaagataatgtctcttaactcctctttagagtatcacttaattttcccctatacttctgttaaagatttccttgtttaatgccaatttccagtcatcagtgaaaattattaccttgattttattagtagttgat

SEQ ID NO: 37830 - DNA, 1029 bp, Homo sapiens
ttgagggaagataaattactctctgtaaaaagagatgctaagtactacagactattataaatgatagctaattaggggtgtttgactaatctgtattctaatatcctaatttagattggcaacttctcttatctgagtattgggagctccattaatacatggtagtgttctttttgtcagtctgtaggtatattgttagagccatgcagtgaccgtggtgatagtgaagatggctgtcttgagaggtaagcattttttcttgttgctaattaatcattttgagaattggagctcttcacagatttttgaggtgatttttttagatgaatgtccattataaatatatagtttagataatcttaaacagccttcttgttataatggtaggcataaaggatattaaatacccataaatgtttggatttgtacaggttcagacagtagttataacttggaaaacattcagagggaaaaacagcctttttggagacatttaaatctttcagttgattgtggaacaattgggaatttactgatattctgagtatacctgtcagtgagttaattcatgatcttgtaactgtgtataactaactgagagatactgtatttgattcaacaaatatgtataggatgtttttcttcctctttgaatttatccttggtgtgtctcagtacactcttaggcagctggtgcttttttaacctctttggctggctgtaatggtagagaaatactggaggcaatgagtatttcgactaatgtagagtctcaatagatagcctctttgaatagaagctttctagaatgttttaaatcacagagtaagatttgggttcttgttaccctttgcatcagtcttcaagatgctgccaaaaagtataactttcttaggaaggtgatttgagattctgaaaacacttcagtaatgaagttgcaggctagattgtaaatattgagagatcccagacagtatactaatttgctgacagcctgttggccaggacatatttgtattctattgtttc

SEQ ID NO: 37831 - DNA, 1050 bp, Homo sapiens
gggcaatacacaataatacctgtttacttggacagtataagcaaaaatacctgatttaagttttctttcttttttttttttttcttgagacggagtttcattcttgtcgccccggctagagtgcagtcgtgtgatgtgggctcagtgcaacctccgtctcctaggttcaagtgattctcctgcctcagcctcttgtgtacctgggattacaggcatgtgccaccacgcccggctaattttttttttttttttttttttttagtagagacaggatttctccttattgatcaggctagtctcaaactcctgacctcaggtgatcctcgcgccttggcctcccaaagtgctgggattataggcgtgagccaccgtgcctggtcgatttaagttttcaatgacttgataatctaggttgtacatgcacatactttctaatacagaatatgactagtgctattagggcactatagtcttgcagaagagaggaaagaacttctggccagggtagttatggaaggtcttggaatgagggggattttgaacttggctttttatagggctggatttggttcaagatttgtgaaagaaactaaaatgaatagtataagtaaagattacagggtaatgttgaatgttaatgaaacagagctacttgtagaactcagggtattgtgggaggatatatagtagaagataattctggaatattggtagatttgggtcatacgtagagcctggaatactatcttaagaattgtagattttctcagtagaagaaaaatatagaaaactttgaagcagagggaatgatgtacccagatctgtattttaggaagaaggttttttgtagtagtcataaaaagtttgtgggaaagactgggggtaaggacaacaacaatcagtaggctttttgcactgtatttggcgagcacttaaaatatctgagctggtgggcatggtggctcatgcctgtaatccttgcactttgggaggccaaggtgggcagatcacctgaggtcaggagttcgagaccagcctggccaacatggt

SEQ ID NO: 37832 - DNA, 1060 bp, Homo sapiens
agcagttatttttcttgtgtctttattttagctctcacatccctgtgatatctatatattttagctgcagatgcataactatattgatatatcttttttatttctattggtgtgtgtgagccctggctgatatatcagggctttttacccacaggatttgactaaagtatgaaaataaagaataattaaaatctgtgaaatctgaaagctaagtcagtcctttttgtccttcagaagctcagagaacaaagttgtacaattcattttgtatgtagccttgtgggtgacaacctgactcttaaagtagaaaatctatttatttgatttgtttactatggctggtgggaggctccttattaaaaggagctgtttatttgattgtcccagcatattcttcagggctaaagaatctttactcttgcagtaataatcgagcttgctgatcactacttttatatatacttgtagttttcagtagcaattaaaagggttaggaagcaaaaaagatcaactaccttgtgatctattcaatttaaggccactggaacttttgcctctttttgtctcctttgaataactggaaattttattaaactttattctttttggaggctggatatagacctaggccagtgtttctcaaacttactactatggataagaatcatcattggcatttgttaaaaatgtagactcttgggccctactttagagatttggagtgggaacttggaatctacctttttaaaaagcttttttccttgttttattttattctatttatttatttattttgaggcggagtcttgctctgtcacccaggctggagtgcagtcgtgggatctcagctcactgcgacctccgcctcctgggttcaagcgattctcctgcctcagcctcccgagtaactggaactacaggcgcacaccaccatgcctagctaatttttttgtatttttttttagtagatacgaggtttcatcttgtaggcccggctgctctcgaactcttgacctcaagtgatctgcccgcctcagcctcccaaagtgctggttatagg

SEQ ID NO: 37833 - DNA, 1022 bp, Homo sapiens
ttatatgttaggtgctcccactctttcccggcttttagaagctggtcctacacagttcaccacacctcttgcttccttcactactgttgccagtgagcctccagttaaacttgtgccaccccctgtagagtctgtgtcccaagctaccattgtcatgatgcctgcgctgccagcaccatcctctgctccggctgtctccactactgaaagtgtagctccaggtgcgtccctgagcagccactagatctaaaatttcattttgagctttagttagagaaaaatgaccaagagcatcagctccgattcagatgcttcttctctgttctacatagacatgtgccatctttatccttagaaataaatatccttagaaatagatgtgagaagaggtgggtgggcatttatgtattgcaggaagaggctaagtatacagatatgagcaggcttgaaaatatgttctcacctttctagataaaactggggagaagaaaacataggcacatgttgatgactctttctgaccttaagtgtttggatatttgacatctgtctgtagcgcttatgtgatctcaaggtggtcgctttgtacccaataagcttctgagatgcttttctctttctgttactcagtgagtcaacccgacaactgtgttcccatggaggctgtgggggatccacatactgtgactgtttccatggacagcagtgaaatatccatgatcatcaattctatcaaagaagagtgttttcgatcaggggtagcagaggctcctgttggatcaaaggctcccagcatagatgggaaggaagaattagatctggctgagaagatggatattgctgtgtcttacacaggtgaagagctggattttgagactgttggagacatcattgccatcattgaggacaaggtaactattcagcgaagccccagagaatctcatgggtcctacataggcttctcttttcagcctcactttggtgctgctgctgcttttttttttttttttttggagacagag

SEQ ID NO: 37834 - DNA, 1043 bp, Homo sapiens
cgtgagccatcactcccagcctagaactatcatcattttacctttctcggtatcagcccctcaccccctttcttttgaatcatccattatgaatttaactctcttgccacatttataaacaattcagtactttgctgattgtcatgcttcctagcattttttttgtttgttttttaaatctaatttttgaagtaatatgtggccaccataaaaacaaaaacactatatagaaagcaatagcaacaaagaaatgggttaaaaacttaagtttaaggccgggcgcagtggctcacgcctgtaatcccagcactttgggaggccgaggtgggcggatcacaaggtcaggagattgagaccatcctggctaacacggtgaaaccccgtctctactaaaaatacaaaaatcaggtgtggcggcgtgcgcctgtagtcccagctactcaggaggctgaggcaggagaatggtgtgaacccaggaggcggggcttgcagtgatttgagatcgtgccactgcactccagcctgggcaacagagcaagacgccatctcaaaaaaaaaaaaaaaaaacttgagtttattttttgtcacacatacaggaagtctaggcagtccacagctctcatagcaacttcacagtgacattagaggctcaggatattctctttctgttccaccttcctcagtgcatagtttatcttctggttatcttatggttcacggtggctgcttgaccttcagctatcacatccttgttccatgcaacaagaaggaagggggttggtaagaaaagtcacatctcttcccttttaacaacttttttgtgatataattgatgtgcagtaaactgcaccttttttttttttttgagatggagtctctgttgcgcaggctggagtgcagtggtgcaatcttggctcactggaacctctgcttcccaggttcaagtgattctcccacctcagcctcccgtgtagctgggactacaggcctttgccaccatgcctggctaatttttgtattttttggtagagatagggttttac

SEQ ID NO: 37835 - DNA, 1035 bp, Homo sapiens
tgcccagcttttttttttttttttctttttttggagtcagagtctcattctgtggcccaggctggagtgtagtggtatgatcttggctcactgcaacctccaccttccaagttaaagcaattctcctgctccagcttcctgagtaggtgggattacaggcatgtgtcacaacgcccggctaatttttctacttttagtagagatgaggtttcaccttgttggccatgctggtctcaaactcctgacctcaagtgatctgccctccttggcctcccaaagtgctgggattacaggcatgagccactttactctgggtattactagataatttttgcaaggatggtttatctagcttagatattaatatttactgactctccttccatcattagcagagtaatgattctaagctttgataacagtaactatcacatctaatactattctagttccaagagtgtcatttatgtcaaaattgatacttacctatgtattgttttttttggtcttatgtacttttactttttttatcactaagttgctttgggatatcattggtatttaaagatcagtttcttttgtaggcttcatgaacagttgactgagtcagaacaggctgcccagtgttacatcaaatatatccaagatatctattcctgtggggtatgtatcataccatgagaattgtactgctgatattattactgtcacctcagtaattttgctttccctttctaggaaatagtagaacacttggaggaaagcactgcctttcgctatctggcccagtactattttaagtgcaaactgtgggatgaagcttcaacttgtgcacaaaagtgttgtgcatttaatgatgtgagtatcagttctttaataaaaggtttgaattttaggctagaacataagatatttaagtggaaagcctaccttggccaggcaagcggctcacacctataatcccaacactttgggaggctgaggcaggaggatcgcttgtgtccaggagttcaagaccagcctggacaaaaaagg

SEQ ID NO: 37836 - DNA, 1052 bp, Homo sapiens
aaggaataaaaacttgcagtgtttaagaatacttttttttttaaccggaatgtgtgacagatgaaatatatttcccaagggaatatttcccttttgtacaatttgggtgttttgccaggactttagagggaatgggttatggtttcacgcccatttggtggaatgctatctattttaatggacttttatttttacctttctgattattcatttttttgtttgatttttaatcaggcaattattacagtttacgttctcagcatgagaaagcagccttatatttccagagagccctgaaattaaatcctcggtatcttggtgcctggacactaatgggacatgagtacatggagatgaagaacacgtctgctgctatccaggcttataggtgattatctataggtggtgaggtagagcagattgctgtggttaggagcctctaagcctgcaagttgccaaccttgattctgccttcttaacaacctgtcttttccatttcttagacatgccattgaggtcaacaaacgggactacagagcttggtatggcctcgggcagacctatgaaatccttaagatgccattttactgcctttattattatagacgggcccaccagcttcggtaagcctggtcacttgacaatgcgtctgatatgggaagggctaataacttttttttcctcttttgatagctattgacaaatcacagtggatggttttggctcttggggatctgaggttaaagttgctgaaggctgtttggttattttcatttagtatatttcactaatgggttaatagtataattatgaacacaaagtaatctattatatggagcatcaggttaaagaccagttgttgcatagatttgaaatagtggtgtactggttcctcaaaagagaacttcagtttctgtaaagtctttgctcagactgcctgttcttctttctcagacccaatgattctcgcatgctggttgctttaggagaatgttacgagaaactcaatcaactagtggaagccaaaaaggtaccttaaattgggtcctgaa

SEQ ID NO: 37837 - DNA, 1051 bp, Homo sapiens
acctggatgaaagagttttttctggctcatatatacacagagttgcagttgatagaggaggccctgcaaaagtatcagaatctcattgatgtgggcttctctaagagctcgtatattgtttcccaaattgcagttgcctatcacaatatcagaggtgagtgaataaagacaatgaaatactatcagaccctgacaggtgcattgtgctgttttctgaactatcttctttctgcagatattgacaaagccctctccatttttaatgagctaaggaaacaagacccttacaggattgaaaatatggacacattctccaaccttctttatgtcagggtgagctgcttcccttgcttggatttgattaagctcttttgtgcactaatctgggttggattgtcacccacttgtattagctacaggaaaaataatttagggagttcttttttcatgcttatattgtctttttcttttatcccagagcatgaaatcggagttgagttatctggctcataacctctgtgagattgataaatatcgtgtagaaacgtgctgtgtaattggtaagaattaactacattttttcttttaagatttatatttattataagtaacacatgtgaaaataaccacaattagctagggatggtggtgcgtgcctttagtttcctctactcaggagactgaggcgggaggatcgcttgagagcccagatgtcagggcagcagtcagctgtgatcatgtcactgcactccagggctgggcaacagagtgagagcccatctcttaaacaaacaaacaaacaaaccaacaagcaaacaaaaactcaataatacaaaagtgccaaaggtaacaaatacataccatagaatgtgaaagctcactgattaatcctactctgaagattgtttggtgaacatgattccaggatatttttctgtgcaaatagtaaaaatgtatgtgtaggggctgggcgcggtggctcatgcctgtaatcccagcactttgggatgccagggcaggcagatcatgaggtgaggtattcgagaccagc

SEQ ID NO: 37838 - DNA, 1026 bp, Homo sapiens
gatcataccactatactccagcctgggcggcagagtgagactccgtctccaaaaaaagaaaaaagagagtctgaatgtttactttgctttttaaccttttatttgaaaatgattccaaattgacaagttgcgagaataagaatagtacaaagaatacttatgtactttttttttttttttttgaaatggagtctttctctgtcacccaggctggagtgcagtggtgcgatctcaactcactgcaacctctgcctcccgggttcaagcctttctcttacctcagcctcccaagtagctgggactacaggtgcatgccagcatgtccagttaatttttgtaattttagtagagatggggtttcatcatattggtcaggctggtctcgaactcctgacctcaggtgatccacctgccttggcctcccaaagtgctgggattacaggcgtgagccactgtgcctggcacttctgtactctttatagttttgcctattgtgaacattaatcctatttgctttatcatttctctctactttatctctacacaacgtgtgcatacacatggaattgttttactctgaaccatttgagaataagttgcagatatcatcattctttaccccaaatgctttaatttgttctctttagaataaggacattttcttaaataaccacaacatagttatcaactttagtaaatttcacaccatattgttaaatatggcatttgatactatattcaatctattattgaattccaattttttttttatttgagatggagtctagctctgtcacccaggctggagtgcagtgttgtgatctcagctcactgcaacctccgcctcccaggttcaagcgattctctagcctcagcctcctgggtagctgggattacaggtgctcactaccatgcccggctaatttttgtattttttagtagggacggggtttcgccacgttgaccaggctgctctggaactcctgacctcaggtgattggcgtgcctcggcctcccaaagtgcta

SEQ ID NO: 37839 - DNA, 1005 bp, Homo sapiens
gtaatcccagctactcaggaggctgacacaggagaattgcctgaacccaggaggcagaggttgcagtaagctgagattgtgccgctgcactccagcctgggtgcgacagagcaagactccatctcaaaaaaaaaaaaaaaagaaagaaagaaagaaagaaagaaagaaagaaaaagggacataggtgtttgggaggatattatttttgactttaccctgagtaactggagaaatggtgacaacagtataatgaatttgaaaagaagggtggattcagcgggaatagatgtgttctgttttggacattgagttatagatgctaaggaggaaatttagatggaaatactaaatgaggagttgaagctatcaggatgagaaatgtacatttctggggcagctgtatagaggagaaaatggaagctaatgactctaagtttaaagtgaagagaaaggctgggaagaaagagcagtagccactgtgggactgataatgaagtagacacatataggaataatattagccaggaatcagaaaggagagatctaggacacaaatacaggtggcacatttatatattaattctttttatacattttttgttatggtaaaacaaaatttacaattttaatcatttttaagcatacagtttagtggtattaagtgccttcattttattgtgagtgtacttacccatctctaggatttttttattaccccaagcagaaattctctctttttttttttttttttttttttgtgagatatagtcttgctctgtcgcccaagctggagtgcagtggcgcaattttgtctcactgcacctccacctcctgggttcaagtgattctcctgcctcagcctcccgcgtagctgggattccaggcatgccccaccgtggccggctaattttttttgtatttttagtagagacaaggtttcaccatgttggccaggctggtcttgaatatctgacctcaggtgatctgccctcctcagcctcccaa

SEQ ID NO: 37840 - DNA, 1067 bp, Homo sapiens
gctaattttttgtattttttgtagcgatgtggtttcacaatattgcccaggctagtctcaaactcctggactcaagtgattcacacaccttggcctcccaaagtgctgggattacaggcatgagctaccatgcctggcctacatttagcatttctaaatcagctttgttgctttgaaacaagtagggctatgggtttgtctttaaaatttattcatttcacaaggccagtatggtatagtggagttagaacagttgcattctagtcctcatgcttttattttttttaattatttaattaattagatagggtcttgctctgctctgtcacccagactggagtgcagtgttgaactcctgggctcaagtaatcctcccacctcagcctcctgagtagctaggactataggtgcataccaccatgcccagctaatttttaaaattttttgtagagatggggtcttgatgtgttgcccaagctggtttggaactcctgcgctccagcaatcctcttgcctttgttgcgggatctttagggtgttgcttttctggccagaaacctttctgcccagtggtgcctttgcctgagttgttgtcctgcgtcgaggtaagcagacaagtagagggttagcaagacgaagagaagctttattgagtgttagaacagctcagaggagacccacagggggcagctcctctctgtaggcagtttgtcttatcccgtattcagctctcagcagagaggaggccctggagtgggtggctcctctctgcaggcaggtcctccctgttgatttcccagctttcagcagacagcatagctcctctctcctctttggttgtctgatcttttctccatcctctaccctgctctggctgagcctgggccttttatggacctcagaggggagaaagtgcttcctgattggttcatggactgtgagaaaaggcagcacaaatccccatccagtgggtgggactagcagcccggtccccagcctttaagccctccccgtcctgaaggtggggacttacaggaacctcccttctacccaggagcctgtctgtc

SEQ ID NO: 37841 - DNA, 1044 bp, Homo sapiens
ttgaccaggatggtcttgatctcctgacctcgtagtctgccctcctctgccccccaaagtgctgggattacagccgtgagccaccatgcccgacagcatcaatatttttaaagtttttttttttcctctccctagaaataagggtctcactatgttgcctaggcaaatcttgaactcctgggctcaagccttaaggttttgatactttctccgattcatttctaaaaaagttacaagaatttacattttcattagcaatccaaatctcatagaatttacttatttatttatttatttattttgagacagagtctcactctgtcacccaggctggagtgcagtggcgcagtctcagctcactgcaaccgctgcctccctggttcaagcaattctcctgtctcagcctcctgagtagctggaactacaggcgcatgctgccacgcccagctaattttttgtattttagtagagatggggtttcaccatcttgcccaggctggtcttgaacttctgagctcaggcaatccacttgcctcagcctcccaaaatgctaggattacaggtgtgagccaccctgcccagtcttctcatggaatttgttttttttttttttttgagatggaatcttgctctgttgtccaggctggagtgcagtgggacaatctcagctcactgcaacctctgcctcccgggttcaagagattctcttgcctcagcctcctgagcagctgggactacaggcgtgtggcaccacgcccagctaatttttgtatttttagtagagacggggtttcaccatattggccaggctgatttgaactcctgaccttgtgatccacccacctcggcctcccaaagtgctgggattacaggcatgagccaccatacctggacttctcatggaattttttaaaaaattactttctgctgagcagtctagtttgagggaaaatgctaattaggccagatgttgtggctcatccctgtaatcccagcactctgggaggctgaggtgagaggattgcttgagtccaggactttgag

SEQ ID NO: 37842 - DNA, 1035 bp, Homo sapiens
ttaagaatttttttcgttgtaaaaaatacataacatgaagtttaccatcttaaccatttacaagtgtatagttcagcagtattaagtacattcacactgttgtgcagccagtctctaggacttttcgtcttgtaaaactaaaacaactattaaacaactgcctagttccaccttactccagttgctggcaactgcatttctactctctgtctctatgaactttaatattctaggttacctcatgtaagcagaatcatacagtatttgtccttttctgtctggcttatttttcttagcataatgtgttcaaggttcatccattttgtgtgtcagaatttccttcctttaagactgaataatatttcattgtgcacacacaccacttttttttatttgttcatccaccagtggatgtttgggttgcttccacctctaggctattgtgaataatgctgctatgaacattggtgtgtaagtccccgctctcactcttgggtatgtaattgaaagtagaatggctagatcatatggtaattaggtgttaaaaaaaaatttttttttttggaagagctaccacacttatcccacatggctgtaccattttatattcccactggcaatgcacaagggttccaatttctccacatcctcaccaacactttgtttccttccttccttttttgagacagtcttatactgttgcccaggctggagtgcagtggcaaatcatagctcactgcagtttctaactcctgggcttgagtgatattcctgcctcagcctcctgaatagctagggctacaggcctgcatcacgtgacacccagctgattatttattttttgtacagatgggggcctcattatgttgcccaggctgttctcaaactcctggactcaagtgatcctcctaccttagcctcccaaagtgctgggattacaggtgtgagccactgtgtttgctttgcatagaagtaggaattttccgatgagatatttcttgactggtagtgatgataagtgtctttggaagttgt

SEQ ID NO: 37843 - DNA, 1881 bp, Homo sapiens
ctttgagggatacattgctgtatgttgtctcttgttttgcccagtttttacaacctgcatgtgacacattgctgtaccccatgattcactagttctttgatttcggaagaggagtatagggatagtagaaaaacgaaggaaaactattacagttaaagaaggttgtagtttgcctgtgtagccagcatctccttagtgagagctttatttttcattttcccctgaagggtgttcactttaaaagacatggaagtattcagcttccttaattttattttgggtgtttacacaaactggtctaacaactttgattgacttgcaggagtgagggtaaatgaatgtttatcttgtttggaaactttactggaaaaacgttaatctgcttgttttttttgtttgtttgtttgtttggttttggtttttgttggttttgtttttgttttttgagatggagtctcgctctgtcacccaggctgtagtgcaatggcgggatcttggctcactgcaacctctgcctcccaggctcaagccgattctcctgctgggattacaagcatgcactaccacgcccagctagtttttgtatttttagtagagatgggtttcctcatgttggccaggctggtctcaaactcctgaccacaggtgatccacctgtctcggcttcccaaagtcctgggattacagacatgagccaccatgcctggcccagtctgcttgtattaaacctaacatacaaaacatcagaagttattaaagtaccctttaaatttttaaagtgaaagccatccatttaataatctgcatttcccctccctagtcaggtgtcttattttaaaggtaaattcagaaacttaatgtttcccccatagaaggtagggggagggggcatgcagggaaactagtgaaaggtaattttttgcacctaattcaaaaggaataagaagccaagaccaagtttcaagttttgtttcatttatcaactttgtagaaatctaccaaacaaaaaacaattcttaggcaagctacacttttgagccattttttaaagtggaatcctataacaagattacattcttaggtgtatttgctccttggtcctctggaatgttacatggatatggaatgtaaggttgcccaactgggctatacagtagggttgcttaatgaatgtttatcttcttaaactatcagcagtggaaagtaagtagctgcttatcttaaggtcattgctttgccctccacatcattatcttatttgaagggttgctgtaaggcattttgagttctctcagttaatttgtcccaaatttctcccctctttagccttaaacgttccaaatctttggggtttgttgcctgttcttcctcagctctgagactttacctttgccatccgttttcattccattccctgccgactgcatcttaggaaactattctctgtaagtcagagcatgtcggctttttaaaaaaccaacaccttttaagaaaaaacttccagccgggcatggtggctcacgcctgtaatcctagcactttgggaggctgaggcgggcggatcacctgaggtcgggagttcgagaccagcctgaccaacatagagaaaccccgtctctactaaaaatacaaaattagtcaggcgtagtggcacatacctgaaaccccagctactcaggaggctgaggcaggagaatggcttgaacccaggaggcggaggttgcagtgaggtgacatcgtgccactgcactcctgcctggggaacaaaagggaaaccccctctcaaaaaaaaaaagaaaagaaagaacttcctacaaacccctagggttgtaggccccttgagaattggcttaccaagcataagccagtaaaattggtact

SEQ ID NO: 37844 - DNA, 2980 bp, Homo sapiens
ctggaccagacttaggggagtgttcttatcttatggatgaatgaagggggtggtatgagggtgccgagataccaagcagggctacttggacatggcttgttcttgaagtaggaattatttctggctgggcaccgtggctcatgcctgtaatcccagcactttgggaggctgtggcgagaggattacttgagctgaggagtttgagaccagcctgggtaacatggtgaagctccctctctccaaaaagttaaattagccaggcatggtgctgtgtacctgtagtcccagctactcaggaggctgaggtgggtggatcacttgagcatgggaggcagaggttgcaatgagctgaggtcatgccactgcactccagcctgggcgacagtatgaagtgaggtcttgtctcaaaaaaaaaaaaaaaattatttcctgacttacccaatcttgtgatgtttttccataaaactatggttgttggtatatttgtgccgtgatgtatttgtcaacacatcactctgaagaaaagtatgtggtgactttctgtgactgagcatgatacatcttctttctctgatcccgtttccccagatgagcatgtttcaacattttagttccttttgaggacttctgtcctaatgctgcgtctttgtacaatgcatttgcttagctgaaacagttgctattgtatgcccatttgctgtactaatcctacttctattccctataaagacatcagcctttgttctgaacataccgtaaattaggagtcttccagtcttggaatgtaaacctttggctttcattttttctatagaaatggagtaggttaatcacattgacaacccaggagggtttcttcttccctaggtattctctactgccgctgatggtcaaacgcaagtggaaattaaagtgtgtcagggtgaaagagagatggctggagacaacaaactccttggacagtttactttggtaggttattgtgaatcctgaatactatgcctccttcactgtaaagtgagataatattctaagccataaaaatattagtataaactgctggcatacacatacatactgagtagtcttgagaagaagggatgcaactagatacccatggcatcagtttttacctgaaagccttgctttttccttgtgccttaggaatttcctcagaaataaactcctgattactcatttaaaagacatttgatattgttactggtttctgatcagcattgcttattggttattggtgaggtgaataataggagatttgctatctgtcatttagtgtgtccacaggtacatacagccattatggttacttgctatagctaaacttcactggtataaaaccagttgatttcaggcagcgaactactactgttgcttataaactttgtgttttgtacattaaatcacttgtttctcccaggaaccaagtgacttgtttactagaaaaccatatagatttggaaataatagcactggacccctctgtaagaggaccttactctggatattatttattttagattggaattccaccagcccctcgtggagttcctcagattgaagttacatttgacattgatgccaatgggatagtacatgtttctgctaaagataaaggcacaggacgtgagcagcagagtaagtcaccttgtttatcagaccctaagagtgaggtgagggaggtcttgggaatagaccctcttagaatgatgagtcctctttgcccctcagttatcagatttacttgtacaagtgtaatgtttattccccacaaacaggcactgagcctgtggattgctgaagttttgatgggcaaacaggccagttggtgtttgtgtatatattgggtccttggtttcattttgctttataggactatagggtatttctcctcttcataatttgtatcaagattggctgctatgagcaggagtactcttaatgcaatggaggaagaagaggcatataactttacctgggaattaatgaaatgccttctgtttactacagttgtaatccagtcttctggtggattaagcaaagatgatattgaaaatatggttaaaaatgcagagaaatatgctgaagaagaccggcgaaagaaggtgattacttcttgtcttctgaactttaatcttagtaaagctcagtcttgacagtgggagtttggggctgggcgcagtgtctcactcctgtaatcccagcactgtaagcccactgccaaggtgggcagatcgtttgaagccgggcgtggtggtgcacgcctgcagtcccagctacttgggaggctcaggcaggagaatcgcttgaacaagaaagtgggagagtttggacatgtcataggttgtgggtaagagaaaacctaagataatctattcttccttccccgttgtttataccttatgtttgcagtgcctttattatttcttctgttttccctgtcacaattctgatgttacaaaatctagcccaaatctctctcaaagccatcccagactctttcatgccactctgatttctccctcttactctatttttatctgtaactgtatgtaacacatagcttattgtctgagtatagacattcagcaaactttggttgattggaaagtcttcgtttaaacttctaatttctctaaggaacgagttgaagcagttaatatggctgaaggaatcattcacgacacagaaaccaagatggaagaattcaaggaccaattacctgctgatgaggtgagttctattttaaagtaactcaagaggttgaacacatttttaccaatgccagtgaagtttatttttctgtgggttttgataggggtttaattattttaaaatgtttctaaatagtacttctacttgtaatggtacaggagacctggaaaagtaaggatttttgttttctttttttaagtgcaacaagctgaaagaagagatttccaaaatgagggagctcctggct

SEQ ID NO: 37845 - DNA, 1078 bp, Homo sapiens
ttcttgtgggtggcatgactaggatgcccaaggtatggaccagtggaattctgtcgtggagagagagggctggcgcatagtgtattcttgggacaggtggcacaaatatatggcccattctgctggggtgacctaaaagggagatgagattatatactcactaaagaattcttttctgtttgttttgttaaaattgaaaaataggctgggcatggtggttcacgcctataatcccaacacttcgggaggctgaggcgggcagatcacatgagtctaatttatatatatatatgtatgtatgtatgtatgaaaaattagggaggggcagaatttctttaggggcagtagcagggaggatcccgaactcagtcatagaatttttaggattgaaacaaagtttgaggtcagaggggaacataaaaccttggtaataccccgcccccggccaccatctttgtacatgtgtctttgcagcttagtgcatctctttgacaaagatttgtgcaatgatgtattttattcaacacatcattctgaaagaacgtgtggaaaactaatgactgagcacaaacctgttgaagatgcagttcttcttggtagcctaaataggattatcttggacctaagatagtgaccttgttttttttcttaatttttccattgaaatacatggccttaaggaaatatgcaaaaaaaaaaaaaatgaacctggaaaaaaaaggtcctggaccaggtggatgcctcatatattaagaaatccccgaggccgggtacagtggcttacgcctgtaatcccagcactttgggaggccaaggcgggcggatcacgaggtcaagagatcgagaccatcctggctaacacggtgaaaccctgtctctactaaaaatataaaaaatttggtgggcgcctgtagtcccagctacttgggaggctgaggtaggagaatggcgtgaacgcaggaggtggagcttgcggtgagtggagattgcgccaccgcactccagcctgagcgacacagcgagactccgtctcaaaaaaaaaaaaaagaagaagaaaaagtatccccgatactattca

SEQ ID NO: 37846 - DNA, 1027 bp, Homo sapiens
tttctgcaagcttttccttgactggagggctggaatatctgggccgtgaaggtcattgttttttctcatatagtgttctaagaccttaggggcttagtcagggcctttggtggcctctggccctgacaccaggtttggttcttctatggatacgtcacacttctggaaacaatgctgtgaagcagctcttttccctcttgtccagtttattagctatgtgttgttgtataacaaattattctcagatgtagtgggttaaaacaacagtaatagtttattatttttctgtttctttgggtcaggaatttggaaatgtaggcagggtgttgactgggtatgagaatctgcttccagtttacacgcctggctggttggtgccagttgttggtgagaggcctcggtttctctctctgtgagtttctccacagggctgtgcaggtctccccatggcttcccccagagtgaacaacataggacagcaagatggaaacttcagttctttttgtggcctagccttagaattcgacatcatcacttcctctttattcttttggtcacatagatcatctatagttaatgtgggaggcaccaacacaaaggctgggatcgctggtggggatcgccggtgaccgtgctggagactggcaccacacctagtatctggggactctgtcctaggcactgtggaaggagaccccacacatgcagggacagtcagtcacctcatggacccttgtctgaggcaggtgttccttgcagctcactgagcctatgcccttcccccatgctctggcctcacggtgctgagctgcccagctcagtagctgcctcttggctgaagtggtggcgtgtcagggggaggacagtggtttcatttttgagtctttgatcatgagagaaggctgagctcttctggaagtctgccagtggcttgtgcttccagacactggatttctcgaaatggattgaccagctgaccagccccttcctataggcttcttgccaaccttcagaggagggagccatt

SEQ ID NO: 37847 - DNA, 1078 bp, Homo sapiens
atcaacccaaatgcccatcagtgatagactggataaagaaaatgtggtacatatgcagctgtaaaaaggaacaagatcatgtcctttgcaggacatgaatggagctcgaagccattatcctcagcaaactaatgcaaaaacagaaaaccaaacaccacatattatcacttataagtgggagctgaacaatgagaacacatggacacaggaagaggaacaacatacactggaacctgttggggtggttggctggggggcaagaggtgggagagcatcaggataaatagttaatgcatgcagggcttaatacctaggtgatgggctgataggtgcagcaaaccaccatggcacatgtttacatgtaacaaacttgcatgtcctgtacgtgtgtcccggaaattaaatttattaaaaatttattacacgtatccccaaaatatgtacatctattatttattaatttaaaaattgccttggatatttttggcgctttactcttccatatggattttaggcatactctgtgaggctcaacaaaacactggatatttaagctagaatgcagtaaatgtatagattaatttatgagaattaacatatttataaaatgtgtttctgttcatgaacatgatatgtctttccagttagatggtctcacatcttttaataaaacatcataattttttccatataggtagtgaatcaatctcttttgttatgcctaattacctcatagtatttgttattgtaaagaggttaattttcaagtttttattttataattgtttgttgctggtatatgactttatagccaacaaacttgctgatgtcttattagttctaatagtttacattttttcttggatgttatttgtagataatcgtatcatttaatataaaaataattttgtttcttttcaatctttatcctccatttctctttcttattgcaatgtctagcacctttaatacagtgtttattgaaatactagtagacatccttatccttttcctgtctttaaagggaatgattctaatattttaccactaaatatgatatcttccataggttgatgaa

SEQ ID NO: 37848 - DNA, 1044 bp, Homo sapiens
gatagtacttaggggataagatctcttttctatctttattctgctgtctctctaatatatagcataggacctagtattgggtgggtgctcaggaaataattattgaatgaatacatgaaaaacaaaggaataaattgataccttggacatgaattgtttttcagagaacgttggaggctgagtggacggtgctgtttttattattaatgatgtaatcatggatgattcagataccgcaccttgaccctttaaaatctaaggccatggaaatgagtgtatagccccactggctgaaggcccagaaaatagaaggttggagattgggatgaggtcacacactggagatgccagtgtttgaataaaagttcaaatgtgacccctaggacttgtctgacctcttgtctctagtagctcatttttccacactcttatagtgacaggagaggtgctcaagccttttgcatctgataaactgattagcatattaaccgagattggcctaggaaattggatagtcatagctctcttaagctacattcaaagtctgattacttttttcaaatggcaaataatgacgaatggaaaatgacctctgactctgaccagctatcctgagtactgcagaaactaagccttcattctggggagggaggcaccactttgcttaataaacttgtcccttcagcatttcgcttgaatttgtctttgtgatgtacctctgccttctccacatcctctatgtggctgtcttcagattttttcactactatccccttcttaatttcttccttacataactctcagcacacaaagttctttgttttatcatcatctttattagcatttgttgttggactcctaaactgactcttttttttttttttttgagacgaagtttcactcttgttgcccaggctggggtgcaaagacgcgatcttggctcactgtaacttctgcttcctgggttcaagtaattttcctgcctcagcctcccgagtagctgggattacaggtgtgtgccaccatgcccggctaattttgtat

SEQ ID NO: 37849 - DNA, 1142 bp, Homo sapiens
aaattagctgggcatggtagcatgtgcctgtggtcccagctatgctactcgagaggctgaagtgggaggattgcttgaacttggaaagtcaaggctgcagtgagccatgatcacaccattgcactccagcctaggtgacagagtgaggccctgtcaggggggaaaaaaaaaagagtagacagaaaggaatacaaatgagtgcacatgggcattaaattaatgtacttgaaactactattcctacaatctggtttctgtccctgaaatttttcaagagtactatccctgaaatttttcaagagtactttgtcatcattggcatctttgtggcagtcaaactgttggctgccactttccttagggaactttacctcttggctgccatgtcattatagtcccttggtttggggatgattgtaattaatcactcactccccttttccttttttggcaacatcatcatcttactatcttctgttaataattgtagctattcacaaagattcctccagccttgtcctccttctctcttttcattttctcccataatggtactatctattcctgtggtttcgaatccaacctcactgtggatgactctagtgtctacatttaagtccagcctttctcctgtggtcttctacgtttctaccacactgtctcatcgcacctcaaactcaagaaagtggaactcattattgtttcacaaactagatttttcctcccacattctctttttatctgttcttggcattgtgactattgtagttctccaagcttgaaacttttgagtgatatttgagtctacttccttcttcactttctcattaacttagtgaacaagtcctgtggattttaatttctactattgttgtctactagacaatcattccccatttttctggtttttaaggtttttttttagagacagggtctcactgtgttgcccaggctggagtgcaggggctcttcacaggtgtgatcatagcatactacagcttgaactcctgggctcaagcagtcttcttgccccagctttctgagtggctgggattacaggtatgcatcactgtgcctggcctccccctttttcatctactaaggaacctcgataatgtgagggcagcaacatgtttaggcag

SEQ ID NO: 37850 - DNA, 1031 bp, Homo sapiens
ataattcccataattgaaggcttggctttgggctaggctcccaaagtgttgacatttccggaggactcacgccagcaccagaccttccccgcagcccacgttctagcttgttactgctattgaataggctccctgagtgcctctcttcaaccgaagaagaaagtggcttttattgagagcctttaggaggggttcaggagactggatattgggtattccagaaaccctgagttgagcaaatgagagattcgtcaaagccatgtgcctttggcttcctcattttgctgctctgcttgggtctggcttgattgacagcttgcgacggttgctcctacctgagaagtggggagtggctataataatttgggcatgagaacaggagcatagggggagggacatatttagtagataaaattgacaatagttgatgatggctgagtaggggatagaagacagggaagggagaggagggattgagagctcttgggtttccagcgtgtgcagtagaactaggcagtcctggaggaggatgagacgtgtggagggaagagcaggagctgagctttggacttcttaagtgtggaacatacaagaggagagtacagcaggcatatcacccagaagagatggcaggaagactacctaaaatctcaggctgcttttctgttgaagttatccgctggggtttaggccactatgggtagataatacagtccaaatcaaattctgtttactggctccttctattaagtgaagtagaagttgagagtttgcaagagctaacaaaccactgagctgccaggaatgaattcataatcagaggtcacaaactgtggtgactgtgttatgcaagttgcaggcttatagcaggcttccttctcccttctcttatctctcattcaccatggggaagttctaaaaaggagagatttgctaagacagtgcagtgagctatgtgtttgaactctatctaacctgtctggcaaggaggtcttgtatatcatcatgctactctccataagccctttgct

SEQ ID NO: 37851 - DNA, 1442 bp, Homo sapiens
gcacacacacacaagcacaactgtgttataaagaataggcacttctctaagaggaacttgtcctgcttcatgcaaataccctccattgcagcaaaattctggaaactttgaaagaggtacaattagtgattttttttttccccaagaagcctcaaagctcttaaaataaatcttaaaaaatctggtactcagagcttcagctcagaaagcagacaaattgcaaacctggtgcaataagactcttctctcctctgatctttttccgttttctctcaatttattttaacatcccctttcatggtcttacgtttcagaaacttgattcagtccttccttgccagctcctggcaggacaagcagcagggcttccggccctaatttatggtttatatttcttctccatcccctctttgctgccccagttctttacctcctcacatcctgctggcctttcttccatcagaaaggacagtgtcatgtgtgacatgttgctttggaattggatggcatcagtgttagcctagtgatttgggtagaatttgggaaactgttttgcgcatgtgctgctaaatgaggagatggggcctttttttttttccctctctctcttttagtaccatctttctttccccttgtcccctgtagcctccattagccctgttgccagggggaatgggaaattctttaccatgattagttctagggtattatcctataaagttacaaaatagcatttcagagcaagatgtcagagagtctccctgcagttcccatggaaccagttgacctttcagttacattttttcaacatctttaggggcccatttgaagagagctaaagcaataactaggactaagcaaagaaagctaatttggagccagaatatcttaagaagcttaaaaaattagaacctgcggatacataataaataggagcttgagctttgttcttttctttttttaaaaaattattttacctttttttctcatctgccattaactgaaaggctttgttctcttcttactccttatctttttacattactttttggttttctcccccacacttggggactctccattatttccctcatggtgcgatgaatgaggatcttgctggtgacagcctgctgagatcaggcaggtggagggagcaggggtgggctcccttcaggtactgctaaatccgaggggtttggttcatctggggaaggggtaagcttgctgtcatttctagattcatttgcctcccacaaggattcttagggactaactgcattttcaagatgattctctctgaggatgcaggaatggaagaaattttctagacagaattctaagaacatttttgtgagtctttctgagcacttcagaggctcacccaaagatgtgtaatttgtctcttttagttcttctctagcttacactattaactttccccc

SEQ ID NO: 37852 - DNA, 1038 bp, Homo sapiens
agaatcgcttgaaagcaggaggcggaggttgcagtgagccgagatggtgccactgcactccagcctgggtgacagagccagtctcaaataaataaataaataaataaataaaataaaggccaggcgtggtggctcacgcctataatcccagcactttgggaggccaaggcaggtggatcacaaggtcaggagatcgagaccatcccggctaacatggtgaaaccccatctctactaaaaatacaaaaaattagccggctgtggtggcgggcgcctgtagttccagctactcgggaggctgaggcaggagaatggcatgaacccagaaagcggagcttgcagtgagcgaagcttgcgtcactgcactccagcctgggcgacagagtgagactctgtctcaaaaaaaaaaaaaaaaaaaaaaagaatctcagcttctccacttggaagctatgtgaccttggactatttactttgctttcctgcccattaattttctcagctctaaatagggaataatgatagtgccatggtctgaatgtgtgtcccctccaaattcatatgttgaaacctaaccctcgaggtggttcctctgggaggtgattaggtcatgagggctccaccctcatgaataggattagtgcccttataaaagaggcccgaggagcttccttgcctcttctgcatgtgaggacccagtaagaaggtgccatctatgaagcagagatccctcacctgacgttgaatctgttggcatcttgttcttggacttccaagcctttagaattgttagcaataaatttctgttatatataaattatccagtctaaaatatttttattttatagcagcctgagtggactaagatagaaattggttctgagaagtagggtgttgctataacagatacctaaaatgtggaagcagctttggaactgggtaatgggtagaaggctagaggagttttgaggtgcattgccatgaaaggagccttaagggtaattccgacgaaggttcagaagagagctgtagagaaagcctc

SEQ ID NO: 37853 - DNA, 1139 bp, Homo sapiens
aggtgatatctttttagactgtttctggctgtaggccagcttatcactatggctaccaccagcttaaagaatgtcaggacagaaagtaacttctgtaagaaatttgggagagaaagggggaaggggagagaattgtttggcttaaggtcatgtagggaggagaacagctctaagtagaactctttgatttggatacagcttcgttttccttctctctgaaattttattttttcagtcaacaaatgtatataaaacatctgttacattccagagactgttaggccctgagatacagtgtcagatagggttccagcttagagtgtactgatgaatatgtcaaagttagtaaaattacacttggaataagtgtattgaaagaaagagttaagaacatctgagagggatttgacttggtcctagggctaagagggtatcatagaaggcttctttgaggaagtgatgttcgagtaaatattgtgaagaccaaacaagtatttaccaagcagagtgacaggacgttgaggaaaatttcaggctgagggcctggatttgcaaaggctctggaagcaggcagtgggtggggagttttatgaggaactgaaagtatggttggagcacagagagtgagaggagccagctgaggttggaggggttggtgagggcaggccttgtcagctgtggcatggcatttcatatttacctggagaacaggggaagcctttggagagttggtggtggttttggtggttttggatttgcaaatgagcagcacccttttggacactggatggattttgttgagggagtgaaaatgaagatcagaaaaggaacattactgtaataggttgttttccttcagtcagctaaatggcaatcttgagactaatctcctttagtgtggccttgttcctcctgattcatgtgctctctcagtgccagtagtcagtgtgttgttggggcacctggccactcagcagacatggtggcccagggtgccagcacttggcatctttccatctgcacagaaaaaggcctggaggtttcaggcttgtcacatgttaacggctgacagctacagagtcctttgtaacctgctgtgtcaccatccctctcttggctgtcactactgggtaagggct

SEQ ID NO: 37854 - DNA, 1029 bp, Homo sapiens
aactgagataaatgtgagctatacattcctttaagaaggattaacaaaaacaagtgagataattactaccctattagttcagggtcttgggtggccagagcccatcccggcagctcagggcaccaggcaggaaccagccttggacaggatgccatcccatttcaaggtacactcacacaccctgacactcatgcagactggaccccttacacgcaacagtgaacctaacaggcacgtcttcgggatgtggaaggtgactgaggacttggagaaaacccacacagacatggggagaataagcagactccacacaagcagtggccctggctgggaaacaattatttttttctcgtcggtgttataaggaaataatgttgatcgaagcaatgttatttggagacctgctgtattgttattttttaaatgtagctgagcagacccatgtgtggtcttctcttcaaattttactctgtcctcactttattcctgacatatggatttctctgtaaacaactggacccagtcgctgtagactgcctctcagatgtgacagcttggcctctctgctccctagaaatgtcctagggtttctcatgcaggggtctttggaataacaatcaggtgtaaagtatgtgcaatattttactgttttcaaattttactgttttcagtctgattcttatgacatccccatttatttattttttagttgtagtttttttagagacaacatctcactcacacccaggctggagtaacagtggtgtgatcgtagctcactgcaacctcaaaatcttgggctcaagatatcctcccacctcagcctcctgagctgggactataggcatgtgccaccatgcctggctaattttttaaaatttttttgtagagatggggttttgctatgtttccgaggctggtcttgaactcctggcctcaagcgatccttccaccttgacctcccaaagtgctgggattataagaatgagccactgtgcctggccacacaacacccccattttatggtgg

SEQ ID NO: 37855 - DNA, 1180 bp, Homo sapiens
gtttaaagttcagttggctttcccacctcaataaacctaaataaaaacatgatctgagagatggggcgggggttaagttaacccaaactaagtagacaggaggagaatgaaacttacatatttgctaagagaagaaagtgatgtgtttataaacagttttttttttttttttttttttttgaggcggagtttcgctcttgtttctcaggctggagtgcaatggtgccatctcgactcacagcaacctccgcctcccaggttcaagcgattctcctgcctcaccttcccgattagcagggattacaggcatgcgccatcgtgcccggctaattttctatttttaatagagacagggtttctccatgttgatcaggctggtctcgaactcctgacctcaggtgatctgtctacctcggcctcccaaagtgctgggattacaggcatgagccacctcgcctggcatataaacaggtttttttttgacattgtgaaagatattttgttgtgtgtgtgtgtcttttctgctctcaccccacccaagtttttttcttttctgataaaagtatagccagatttggggattgggtaggattttgatgggagccagagtgtaacgatattgggattgatatttgtataacatgggtcagaacttggtctgtggttttgagaacatggctctcgggtttttaagatggtgttaccacaccacatttatttcccctttctttcatttgtttagtgaatttaatctgctcatgaatacatgtgctgttttaatgaaattggcaatagaagagacgttctgctcccattttacaggtgatggaaatgttagtagggatgcggcagtccaggaatgaaaagttgcctagtactttgattcccacttacttccccttccctgctgttttctgaaggccagctattacttctctactgaggccaactgtgagccctggtgtgtttcattggcaggagaagaggctaattaagtgaaactgaaaggtaacaaaatggattttaaaataactgacatgtgggaacttgatccaccaatgaatgttctcctttagagtgatgtgtgcaggtgtaggtggtgggagttgaggatggcgtgcctaagtgatttggctgttgtccaaggcagttttgaaaatccacctctggaattgttttc

SEQ ID NO: 37856 - DNA, 1028 bp, Homo sapiens
ctggaggttgttggtgcctgtaaccagggtagtctcagaggagtgatggagacacatgcctggctgaactggatgaggcatgtgaagggggcgtgagagctggagccagggctgtgggcacagagccaagagatggggacctagggtggaggtctggttgtttacaactccatccaactgtgtgtcagtgggcatgggcgtgtgtgtgcacctgttgctggagtgtgtggttaactctgtgtgtgtgcatatgttgtgtgtgcaggtgtgtgtgcgtgaatgaaggggtctgcctgtgaatcagataggcatagttagaaatctctgtgtgtctggagggtttgtagccctgggtgtttcctggtgtgtacacctttgccacaggatatgctgcaagcccaagaggttagggacatttcccagggctctgccaaggcattgaggtccagcctccactttaccctgagctgggaggaggggccagccagcaggtgtggtgggcacgggtggggtctccgggctgtagccttgactacagctagcgctgtcaccttttactttttcttcctcctggctttctctgttttagaaggatgggggttgccccagcagcagcagcagagggtaaagaggacagtcggcctttgggagggctttgaggcccagcctagctcagctcctcagcaacggtgggggctgttccttgcacaccagcactttcctagatgccaggggtccatggtgccactggcgggcttctcacaagcagagatagcaggcctggagggggccagggccactccctgaccaggctgcaggggtaaacaaaggcattcccatgatcactgccaggaagaacaactcctcttggcccaccaaggttctttgcagctaccaggccactgtggagcagggcagggtcaccggccagactgagctgtcctcccctgctctacagcctcgggagctttgcctccactccatcccttcccattcccctgcattttccactcatgtgctctgggcag

SEQ ID NO: 37857 - DNA, 1006 bp, Homo sapiens
gccgagaggaatgaggttaagctgctggcagcagcggcaccccctggtctcagggctgggatgtgggaagagagcagtcctggttgttgttgctgttgtcgctatctttaatgaggagcttcctggggatggcctgtcaaacagatacaggccagaagccctggcttggcaccaggagataggaagcagaagccaccggataccctgtggcccaactcatggcaaccatggggaggtgtcctaaagttttatggagcccgtcctggaggaaaatctttttgtggaggcctgggccatccttgagagagcttcttgttcttataaagctgccaagggagacctccccacatccccacacctcaactccagtgaacccttgtcccaggaggaagagaatggatgaagtagcctctgggcttcccccaaaacccaaggagtatgggagctcagcagagggtgcttggtctgaggaggaaaccttaggggaaggaagagctgcccaatacccaaaaacctgtgtaggccatcagcttgccacctgcccctttcgtctctggggaaggagctgctgcagggatcagggtgtcagtaatggccatgggtgcagagtgctgggaactttctcccctttcttgtgcacacagaacttcctcttgcttttgctagatgcctctcatctgtccactcttctgtgtgctggacctttgagggtcccctttctgcatgagaaaatatgcatgaacccccaggactgctgctcctcccttcagccacaaagctgaatttatggagaaattcattgcaatattgttattattagcagaacgttggagacaacctaatatgctcatctgaacaatgaaatattatgcagctactgaaatgattctagacttggaaaaatgttttgaatgtatattgactgagaaaaatgggatataaagcattttggagagaaaagtcttttggcagacatttgaaaatgcctacagtggctttctctctg

SEQ ID NO: 37858 - DNA, 1050 bp, Homo sapiens
tctgctccatgactcactgagagtttgtgggtctgaggcttggtatccctaaccgggaactgggtctcccccatcccccatttccccttctccccagctcatagtcttgccagccttggcagcggtgctgggggtgttgggtaataagcccactcatggtatagtggaatggcacagctggaagccaggcacctggggttcatccctgttggacctctgtgtgacctcagacactgtcctccctttctgtgggtctctggatatgcagtctacgctcagccctcaccttctatatgagaagggcagagcgtaagcctgcatacccagcatctctgagaacccctagaggagagccatgagattggaggagtggggaaaattggccttaaagaaaatcagaatccctgtagttgctgtgttgttttaaagaatgactttggaaggggattctaagttaccagccttttctgtgtgccccagttggtcagggtttcatttaaaaaaagtctcctctgctggaggtccctgtgaactgagagtctgaagctgcccacaggcagacatggagcagactttggtcttcaccagagtgtcctggagtgtgaaggcagattagcatcactagctgagggctctggacacatctcatttcaattccctggacacagataaatctttgcaaagcctttctttcccatctttgctatctcctgcctctgataaagatgctgccctgacttctaaaacaaactcccttctttaggctgtccaggaccaggtcagaggtgggatatgctcatgtgcatgtatcggagccacatctgggggttgcttctggcagcctccacctctggtcttggcccctggctgaccctgctgagccaggcaccttgagctgtcctcctgccactctggagctcagcctatgcctcatgctctgctctggctccctggcacctcgaggttcattacaaacaataacaacaagcagagtaactttgtacttcccaacagtctttcatcctgagagctcaaagcaatttacagacc

SEQ ID NO: 37859 - DNA, 1085 bp, Homo sapiens
gacttttaactcacgggcaaacataccgtgggcttggagatggctcagggatgtcttcaactgggatggagagagtgggttcaaggaactgcttaaggctctccctaatctgaggccactgaagctctcccccaataattcccatgacatagtgagtccaaggggagtgggaaaacttcagcatggttcccaagacccccttgcaggagaattgtataggtaagactcggagtcccaaagtctcaggtaggggaagaggtagtatggggttttttcccctttcactgaaaggcatttttgcacatgactcaaacaagtctaaactttcctaaacttcaaagtttgccatggcacagcctcaaagtggaagggaaaatgttaaaaaggaaaaaagtttgtaagccagttaaatattgtgttttttcttcttaaaggaattgaattaacttgttatgttactattagcgtcccattgtgaaaatagggtgggtctttttggggtgatgtggtctctgggcccatccccaagccctgctcactctgcatgaggttgtacagggcattgcacaacctgtggtaagaggaaagagttcccatggcaacaggcctggctcacagggtcattttcaagctcctggcaagagccctggtccaggccagaggtgctccagatgcctggctgtcctccctcccctgagaaacctttgctctggaaactgggaggctggggaagtgggagcccagctggcatgccccagggtgcctcgtgactctctccacctgcccatgacccaggaactaagcatcagtcatagggctgtggagactgtgcaggtcttgcgaccagtggttaggcttgaggggtgagggctttctctactctctctcatctcctatcttcttgagcaacaccatagagctgtgcttaagagtgagctctggatacccaactgcaagggttcctaaccttgctctgccacttactaggtattgacttagacaaaaattacctcacctctctgcacttcagtttcttcaactgcaaaatgggaataatagtagacctactccatagtggtgttgtg

SEQ ID NO: 37860 - DNA, 1101 bp, Homo sapiens
atcttaaatcctcagttgagcccatctagtgattttttaattttacatttaatttgtacaccttagctctgtaatccattttaaaatgtgtttccatttccttgttgagattccctacttgtttgtttcttgatggcatattttcctataattatttgaacatatttataataaatcctttgaattctttatcttctaaatccaatatctggatccagttggagttccttcaaaattaacttggttgtacttggcctttgggcttcactctttaaccttggccccagcattttccttgtagcctcggaccaggggaagggcctcctttctgtttcatctcttcctaccctactctcaggaacctactgtcatcccacctgctctatgttgacttccctgatgattgggaccctcagagatcttgttactctctgaactactatgtttaaatttatatcccataatccagtgctggaccatgtcctgttgtttgctaatgtttatgtactttgtattcctaactagattataaactctttcaggattgggaatatgtcttttcctctagaatatcagtacattgagttccctctgtatgacaggtcttggcctgagcactttatactacctttcatttagtcttcagaacacccttgtatgataggtatcattatcctcattttccatatgaggaaactaagacccagaaaggttaaatgatgaagccaaagttagtgccaaagttagtgagagagaatgactaggcgagcattcaaactcagatctatctcactcaaagctcatgtggccatggctttttattctagttggacttgtaacctcttattctttctggccactagtctgactgttaccgtgtgaaacagacccagataaatctgtggattctttgaatggggtctggtggcccaatgttccctgcacagcgtcttgttacttcagacagcatcccatggcctgcctgtctgctttagccctggctgtgctcttcatcaggatccacccatgggctgctgcactcagaacccctgcttggtagcccaaaatagcctttgttttctcctggtggctggtggattt

SEQ ID NO: 37861 - DNA, 1107 bp, Homo sapiens
aaattgaaaggaaggtacagagatttcccatatggcctctgccctcatacatgttcaggctcccaattacaatatcccccacgagagtggtacatacattacaacagataaacctacattgacacatcattatcacccaaagtctataccttacattagggttcactcttggtggtgtacattctatgggtttggacatgtgtataaggacatacattcgctatagtatcatatagtattttcactgccctgaaaatcctctgtgctccatctattcatccttcccttgccccaacctctggcaactactgatccttttactctctccatagttttgccttttccagaatgtgatacagttggaatcatataatacgtaaccttttcaattggcttctttcctttagcaatatggatttaaggttcctccagatcttttcatggcttgatagcttttttctttttagcactgaatatttcatttactggtttaccacagtttattcattcctctaatgaaggccaactcggttgctttcaagttttggcaattatagaagatgatatgaacatctgtgtgcatgtttttgtatggacgtaagttttcaactcctttgggtaaataccagagagctcaattgctggattatatggtaagagtatgtttagttttgtaagaaactgtcaaactatcttccaaagtggctgtgcccttttgcattcccaccagcaatgaaccagaattcctgttgctccacatcctcaccagcatttggtgttgtcatgttctggactttggccattctaatagatatgtatcttgaattagtttctgaaaatcaacctgcagaggctgggcgtggtggctcacgcctgtaatcccagcactttgggaggccgaggcaggcggatcacaaggtcaggagatcaagaccatcctgtctaacacggtgaaaccccatctctactgaaaatacaaaaaattagccaggcatggcggtgtgcgcctatagtcccagctactcgggaggctgaggcaggaggatggcgtgaacccgggaggtggagcttgcagtgagccgagatcgcactactgcactccagcct

SEQ ID NO: 37862 - DNA, 1079 bp, Homo sapiens
tgcccacagctcactctggtcctcagtttctgaagacaagttggcttgcttgagacaggaggtactggggagcctgcccgctcctggtctaaagagcaatgcctgggaggaagcctctaagtgcttcttccttctagttgtgggaacctgcatatttctcaggcatgcagcatctggggctgaactgcccgtctgcgtctgtggcggctctatttttttttaaatccactttcttcatactttgcattttagtcaggaaatcactgctgcccactgtctatctaattagagtgccaggaagaaaaaggtgcttttgccattctgagcctctctgggaaaaggttatgagacaagagtgatagaattcatcttcttgcgttagtgatggggggcagggtctctgttccctgaaaagcttattcagatgacctatttggtctagactctgtctgtctcagcaatagctgtcatctgaatgtcactttagaaggtttgggtgcttccttttccttctctttcagcagtactatattacaattcgaatgctaattagtatgttttaaaagtaccccttttatcacacatttcccaaatctaaaaccttttatctctcctcattgcctctaggctgaagttcagactcctcagcctggcctccaaggcctttcacattttgacccaacctcccttcacaacctccttccatctcctcatcttcttaaaacccttgtagttcatcagagccaatccatcctttcattggccccaaatacatttacaggctggcttctgcatacccctctctgaatcaccctccttccttttgtggaacccaattctactcttctttcctaggccagctcagtccttcctcttgaagtctacccagacctcttgagtgcacagtgatttctcttgagctcaactcttttagcactatcttctatacaagtctataccacttcatttggcattaaaaaaagtgatagtgaagaacacaacacaaaatttgccatcttaactatttctaagtatacaattcagtagtattatgtgtttatattgttgtgtaacagatc

SEQ ID NO: 37863 - DNA, 1051 bp, Homo sapiens
tccctaacttgaggacgtggcaagtaggagccagcctatcccataacttcggcataaggagccattttactcccttcctccccagtgtagaatgaatgatgggctacaaaggtgtctgagccaatgccagccatacctattgagatgtggcgccttgaaagaaaaacacaagggatgtgtttgttgaagtaacttgattttccagtttctgggttactagaatttggggcctggaaacctgacgtaacagctaaagcatctgggagcctgttttgcatctgttacttttgagatcaccgtgtgcccacctggaaactctacctgtgcagtcagatgctgaagccttggttaaagcctgcagggaagccctccctgagtgaggcatcccttcctccattgtgtttactggaccacttctttctagtaattgagaattatatcctgaaagatccagaaatggaaagctccaggctgggagtggccatgcaggaaacaggatacttagacgtggaccctagaatgctggtaccgcacagatccagtcctacctcattcattttcaggtttttttcttttaattaaccaacacttatggaatctccgttaatgtcttgggtactggggacacaaagatgaatatgtcacatccctgcccatgggacactcacagtctagtgataaatagaccatttatttctccattcattcatatataagatattttgtaggcatctatcatgtgctaggcattacattgggcttatccattcattgagtaatatttgagttcctcctatatattaaaacttcttccaggtgcttggaatattgagaagacagaaatctctgccctcatggaatttactttctggtagtaagcgaccaataatatacataataaataagcaaattagataatatttagaaagttataaatattataagaaaaaaaaatggagggaggtaatgggagtgcagaggggtggattgcaattttaaatagagtggttatggtagacctaaattacaacgtgacattagagcagagaac

SEQ ID NO: 37864 - DNA, 1054 bp, Homo sapiens
ttcccataacatgtagcctgtgtttgcagctaagcagttttctcagcctgcttcctacttgtagatgtcccttttcatccaagctggtgatgttcctgctagtatagtagtccccccaatccatgcgggatatgttccacccccagtggatgtgcgaaaccacagatagtactaggccttatatgtactatgtttttcctacacatacatacatatgataaagtttaatttataaattaggcacagtaagagattaacaacacataataataacagaacaattataacaatatatactgtaataaaagttatgtgaatgtggtctctctctcaaaatatcctattgtattaaaccgtggaaagtgaaaccatagataaggggggactactatatacttcttttaaaaagtgtatggtttttccggtgaatcctattggggtttactgccttagacaaaagccacgcccacgaatcttcttaacataagctcttctctactttgagttccctctgaagctgcagtgggataatgctctttaagatttgtagaattcctattatttaatagaaaggatctgtggggcacattcttaagatctatggagaggcctggtgcagtggctcatgcctgtagtcccagtactttgggaggccagggcaggtggattgcttgaacccaggagtttgagaccagcttgggcaacatatggagacctcatctctacaatttttttttttgaaattagccaggcatagtggagcatgcctgtggtctcagctactctagaggctgaggcaggaggctcacttgagtctgggaggttgaggctgcagtgagctgtgattgcaccactgcactctagcctgggggacagagtgaaaccctgtctcaaaaacaaaaacaaaaaagacccacggaaggacttttgtttgtctcaaacattcttcgaggcattgcctttgatctttccggggtcttaacaaaagatataattcaaaaattctcaaactgagctcaatatcttcttgccataccctgttatgtttaggaca

SEQ ID NO: 37865 - DNA, 1044 bp, Homo sapiens
gaaaaaagtaaatatgcaaatatcaaagcagcagaagtcttaaccctctaagcgctgtttgcttagtggcatttggcaattttgaaaatttgtgaaaggaatggtgatatcagtatcattgaagtttccccagtgcagttttcaacaacttgttcttagatctttctttgcaagatctgaagtgctgttagtataatttgcactaaaagtaaaagaaatttcccccaaattttgtgtttggatggatgggtgtatatggtgtggggatttctgtcttacttgttgctagcaaattaaccctctcctcccacttactttttcgaatttgtacatagaaataagtccagtttatgaatttcaagagatgatacaggcaactctttaggaaactagggaaagtagatgaattaatcggtagaagtgctaaattatgacaagtttgaacaatgacttttatatttaattaaagtagacttctttaaaaacagtaatacacgcagatgaatcttgctgaactagagctccatgtcaggttgtaagaactgaagcacacatagaggacgattaaaaggtattaggatgacatgaaaggacattctgtacccaggcaaagagctaggaagcttttgccagtctggggtcaaaagacaaatttgcacttatggagtgtgattaattgctgctaatcagctataatgtttttgataattatgaaatgaagttaaattaaggagccttccttctctggctagttgggagagtgtggcatatgagctccattctacagtaacattcccttcccactttgtatatgcaggaagatccaaatggcctctccagggaccttctctgggacagaggcctgacacttccggagcctgtcagctctgctctatgcctctgttcaggacctgattgtgctgctagcctcctgagtgtggggcaggactggtggttaacatttcatttacccttgcagatgtttctagagcagcagaggcacaggtactgtagaaagtttctgtattctgcaagcaacgcaga

SEQ ID NO: 37866 - DNA, 1195 bp, Homo sapiens
gaaatctgtagatctctgcagctgggaatggaagtctcccatgtcaaaagtcaaagaaatgtcagtctaagagctttttcttcttgtccctgaatccagtacttacttcttagtaagatatttcaaatcaaattgtcccacactggagtatttggtgtaagcctgtctcgtgcttattcaaattgaggtttcgttttgtcccaactaaagctgaatttgttggcatgcggtatgacttgctggactgtgtaatcgctgaattatgatagatgtcctgtactctcatagaagttggtatgtttaccagttttaccaactgattctgggtagtgtagacaggctttgtttgagtagcaaaatatgtgtaacagcttatagtaagttttgctgccttcatctttctagatcgatacctatgatttttggaagctttcctcccccacccccttcaggaggcaaattttaggagtttagtgatgggagtatatctagacactaactatgttaaactgtgatcactttaatgagaagaatcttggcaatgtcttaataaggaggggaaaactttgggggataacagcagtttatcgctctgacattatccttaggaatattgttgactgctttttattattggttttatgttctgaaatgttttataaagacaagtagagaccagctaagaatttctaattttttattctattaagtattttgatacttggggagtattaaaatactctgagatgccttggggagctgtgaaacagtattgtacagtggaaaatagatagtaaaaatatttattgaatcttgtccaaggacagcttctgtttggttgttggtgagttgctcctgcatttgcacagtgtacatctccacataatccctagtctgggccgctgaggacttgatggtctttgtcagataaccccatagagtaactggcttctctgctcccttgtctccctcctcctactttctccttcccccaacacaatacaccttatcaattacacattgtttgttctagtgggtattcagtagcttaacagttgaatgcagaaatcatgaaagatttgaggggcagaaatatggtctgtttctaggttatgatcatctcatattatcaaaatagcatgtgtagtatagttcttaaaaagatacatttagaactgcaatcactggtaaagga

SEQ ID NO: 37867 - DNA, 1050 bp, Homo sapiens
catgaaagctagaaggagaaagtgttccaagaactgtgttgaacactgttgagaggttgagtaagatgacagagaagcacccatagagatcattggacttgaatcacagccaattcattagaggaggtagaagtgtgattggagaggtctgaggagcagataggagggaagacaggggaggcagctgccttagaaaaccgattcaagaagttttgcagaaaaaaggcagtactttcaggggactgagaggtaaagaaagggttttttaatggtttgcctcaccaagaaggatcttgcagagtaagaaatagaagattaagaagaaaggaaggttaatggtaagagtgaagtttctgagaaggtatgtggggatgaaatcattgtctaagtggaagggttgtgtgtgtgtttttgttttgttttgagacagggccttgctctgtcacccaggcttgagtgcagtggcatgatcacggctcactgcatgcagtctcaacctcctggactcaagtgatcctcctgccttagccttctgagtagctggggctacagacatgcaccaccatgcccagctgatttttttatttttgtagagatgggggtctcgctgtagagatagggtctcactaataggtgggtgatattctcggccagggttctgtaaattacagcccaagggccagctggtctcaaactccttccctcaagtgatcctcccacctcagccttccaaagtgcagggttgtattttgattcctttaaaaacacagtacagggatgctatcaattttaacagtagagaaagaagagactatacatacaggtgtaggtcgattagtagatttggtagagggaagatagagttcttatgagatttattttctcagctgagaggagggagaataggcgatttgaggagacaagacaaagcatgaaatagttattttggagagcagacaatgaacatataaaggaggtttaatagaatttccatagtgcccatttgggattcatggctctgaatttaaagtgagaccattcagcacagtt

SEQ ID NO: 37868 - DNA, 1086 bp, Homo sapiens
atgtctaatgaaggttatgatgaagggagtggtgaagtcctcttgttgattttcctcctgaatatttcagaaatctatctgctcttcttcatctccattgtcaccactaagatactgtcatctctttccaagacgattgcagtggcctcctaataggtttccaacattcacgcgtgtattctctaatccagtgcttcccaggcttttttttttttttttttttaacagtacagctctcagaaaattgtatttgcacaattcactggggtaaccggacaaaggtgctcaaagctggaggcaactgctcaggggggttttggctgccctggaccacccagccactccagggactgagggatcaatatcctgggcacatctgttacccattcatgactcataggacgtttttgggaagctctgttctcattcattctgtatgcttcagctgagtgagattgtttttaatggaaatttgacttttgctctcctgcttaaaacccagtggcattccattgccttcaagataaattccagaactttaatatggcttaagaccccacacgatctgactcagcctcaccagcctcatctctgtattctcaccctttctgtctctgtgcttcagtctccctggttgacattcagttctcccaacttgccggactccatttatctggaattactctctccccactctcacctctcctcttgttaattcctgctcatccttcagagctgagttctcaagtccctctgtgagttccttgattccatcagatgtttcctccatcgaagaccatggtttccctcagatcccttattacaatggtagctaaatgtctgtgtggcctgcaacagtataatctccagggataagtgtgtgctttgttcgcttctctactgttggtgctctttggagtgctgagtgcccaatacctgttggttagatgaattatgtgccagttcttggtgctagggttatagcattaatcaaatcagacatgatccctactctttggagcttacactgagatacagacaataaagaaataaacaagaaaccatcatgtagtaagggtgatgttt

SEQ ID NO: 37869 - DNA, 1041 bp, Homo sapiens
taggtggggctagggcagaggagagggcatttcaaatcaaggaatagtgtggacaaaagtctggaagtggagtggtggttgcagtggtgtaaccctccattgggaagtgagtgagtgggaagtgaggctggaaagatctaagggaaaggaattaaagtgaatgaaattagcattgcttctactcactttttctaagtactgcttgttctgtgcaagtagctgttctaagtcccaatgctattcattcagtgtggtttctactcagcattccgtatgtcctgggctccacagagggatcgtcctgctgcagacattccaggtcctgctgcaggtttataggaacaaatgtgctactgcttattcatagatcaatgtttcctagtcagttttcaagttttgaaactaaatttttttttcccccaaaactaattttaaaaggaaactgaaagtttggtttgggcctttacctttgagattactattagacacccaagtagagatgttgaatagacagttggatatatgaatctggaactctggactagcgaaataaaatggagaattgtctacaaattgccagtttatagatggcgtttcaagtcatagaactagcttgggtcaactaagggaaaagtatagctggagaagggacagggtttgtggactgagccctgggtcactgtagcaggaccacagaggtgtggacggcgtccattttgagtccaaataaccaagtgaatacccacatgggcaaccctctgctgatacagggccaggctgaagggttgctctcaactcccttggtggtaaggggactgctttttcatgggctgtccaagcagaggctggcagcagaagtggtcagttctgttagacctgagtcgcaagtgctctgtatgtggacaacactgcagggaggggatgcccgaacacagtccttttaaagtatagcagataaaaggtctgccatggatctgtggaatcctgagtaaaatttgagggaggtgggtactaacatgggcagaagcaaagatgcctgcg

SEQ ID NO: 37870 - DNA, 1055 bp, Homo sapiens
gagcttaaccaggcctgccagggccttcagctgtgtggctgagatgagaaaatcagcattgaggagaacactggagccaaggcatttctttgaatgtttactaagcagtcagaaggtgacttactccattccccagttccagcccctgagcatagagggtttagggttaggaggagtaccacagactgaagaggaagtagagttaagggcttggcaagttgcccactcctatccctggtctagctgcctcagaactaaaggaggcctggaactaacaagtcactcccttccagattagatgaggccagctggcctttggatgccccaggaagaggtggtggcagcagtggcatgagggatccctctgtaactccacatgccaggtcatctgcactggattagatgtccatttcaaattgtgcgtcatctggagagagaaaaggcaggaagacaggttgctggtctgaggatctgcaggctcagcatcagtgcagaaacccctcttggaactgaacccccgcactgtgtcacagtggcatttgaactcaaaggctgggacaattcttaattcctgctttccttaccgggtatctcttcctctgtctcctgctccttcagctcctccagcttggagagaggggctgttggaggagttgtgaccccgggaatctgagggaggcagcaggggggtgtccgggcaatgggtgagttcttgcactccagcaggaactttcggtcgtagatgatcctggtgcctgtcaaggggttgggactgaggtaagagtcaggagcttgggtaccgaggtgactggggtcccagactcaggccttttggggcctggaggtgagggtggtgtcaaatttccctgtgtatcaaaggacatcggctctgaagcccagctaggttctcagcagacaagccttcatagtgcttaaaatcttccagacctaaccaagatgtgggtataaagcaaggggggcatcccagctggtataggcaggggctttatgtttgggagagcttcagatcttggctctaagaggaacaccaaact

SEQ ID NO: 37871 - DNA, 1162 bp, Homo sapiens
cgctattcttgtttttcttaaaatatcaagagctctggcactcagttcacacgtgtaagtgtcagcatgcagccagagttgtgcagaagctgtgccctaaagagttggcattgttcctgtttgtctcatttaggtttatttcctggcatctgtgggcatttgagtgtgggttgcttatacttcgttagttcagtttgcccattcattcaacaaatatgggtgcctacagggtcccagacaccatagctgaccctgagaatttagtgctgtagagggcacagcccttgccttcacaaaacacttaggatagagccaagatagaccagaaataagttgtacaccactggttgatggaagaggtggcccctttaggggtcaggaaggctacctgtaagaggtgatagaaatccgacagtccaagagggaagttagccaggtgaaggggagtggggcaggtgtaccaagcacagggaaccttagctgtgaaggtgagagatattagtggatgagagtatctgaaagaatctagtgtatctggcatgcaagggggacgtagtgagaggtgagatcagagagaatgacagaagccaggtttgggggacctcataggtcagggtgatgagtttatctggaggcactaggaagcactggagcccgagagtgaagtcagggttatggattaggatgaccacttaagctatagtatgggtaaaagatttggaggacgtaataggaggtaggaaggccaattaggacacctttgagctgttcagatgagatgactgggagcagttgcattggggctggagtttgagttgtacacctttacccttgactagggaatctgctttgccagggactagtccccaccagtgagagatggaaaagaggcaacatagtggtacatgtaattaagagtttaggctctgcaatcagagagaactaggtttgaatgccatttctgcctttctctggctgtgtgaccttgggcaagtcatatactctctgaatctcaatttcctcttttgcaaaacagggataataacccctcataaataactgaattatacaaagcacttagcagtgtccagcctgccctccttaagtgtctgatacatgttttatgattttgttattgagctacctgggaatgctctagaaa

SEQ ID NO: 37872 - DNA, 1045 bp, Homo sapiens
ccccaacctgtcagtgctttgcagtccgctctctgggctgggtagaggtacctgaagaggacctggcaccggggaagagcagtattgcagtcaataactgtatccagcagctggcccagacccgcagccggagccagcctccagatggtgcctggggtgaggtgagttggctgggccctttaatggtttgggcccagggcccagcagaggtagctgtccctgaatttcctatttctcatggcaatgacctttatctgagctctgggctgacctctgtccttggcagggccagaacatgctgatgatcctgaagaaggatgccatgagcctagtgaatcccctggaccacagtctgatccactgccagcctctggtgcacatccgtgtgtggggcgtggggagctccaagggccggtgaggatgcctacatcccccaagcaagagctacttctccctcccggctgcaggctgtgatccccactgatgctgatccccagtacttgaacccctggacacagatcctctgatgtggacccaggactgcttcccctgcctggtccagccctggttggggagggtgggcccagctcagcagggacagtttggggagagtccgagaggctgggctgattcccttctgtgctcccacatgcttccggaacagtgacaggtgagtgaaaaccaggtatcctgagccccatccctgatgtccctactccatccctgctatatccctagcctgactttccagcctcctgcaggctcctgcctctaaccagcttctaccccagccccatctctgcccctgctagggacttcgcttttgtggcaagtgacaaagatagctgtatgctcaagtgccatgtgttttgctgtgatgtccctgccaaggccattgccagtgccctacatgggctttgtgcccaggtaagtgtcaggggtggggcagggaatgtgggtaaggggttgggtctgaagcttccaaggtagttggggtggtattggcccttttaccctaattcccctctctccctgtgggtcatgc

SEQ ID NO: 37873 - DNA, 1031 bp, Homo sapiens
cccattttggggatggagaggggattatgacagcatgttattctgaactcacaaatcatatgctccctcctctctaatccggtgttcctgtagatgacttgtggggggaccacagtctggaggtggaggctggcctgcctcctggctggaggaagatccacgatgctgcaggtacttactactggcatgtacccagcggtagcacccagtggcagcgcccaacctgggaactaggagatgcagaggacccaggcacggtaggtagagtgtgaggaggaggtctgagcccatgtgtggacctaggtctgctgttaaactgactaactcccactctacagggaacggaggggatctggggactgcggccccccaaagggagatccttctccagcctggagagttcactggaccggaggtaacgggtggcccaggcaaaatgaaaggcttggggttccatggtgttcaaaaatgcagctggacccatggtctgctttccagcccaggttctggattctgtcacatgttttgggttctgttacgttcttggctctgtcccaggttcttaactgtcagtattttgagttttatcccttgttctaagctcttgtttgtagctacatgtttttcatattcttggtcctaacctatcatgttctagaccttggccattaagtcctctgttctagggtctcttgtcccactttggggttctggtccacatattggaccctgttctattttgtgacttttattttttattttttgagatggagtctcactctgtcatccaggctggagtgcagtggcacgatcttggctcactgcaacctccgcctcccaggttcaagtcattctcctgcctcagcctcctgagtagctgaaactacaggcacatgccaccatgcccagctaatgtttgtatttttagtagatatggggtttcaccatgttggccaggatggtctcgatatcctgacctcatgatccacccgtctcagcctcccaaagtgttgggattacaggcgtgagcc

SEQ ID NO: 37874 - DNA, 1044 bp, Homo sapiens
tggcactatttgaggttaagacaaactgcatatgtacttcaattgctttgcacttttccgtttcagcggaagacctgaagagtggtcagaacagagcctttgatttttattatggttattttattgattattactggcaaaaacggccaggtacaacacctttttcatacaaggcccaggaggcttagtccagtctgtgctcctgggctacaaggacccagcctgagatggtcccatctgcagggccccgcaccagttggagcagatgcctccccaccaccaattgccaaaggtccaataaaatgcctcaaccacggagtctgcgtgtgtcagtgatgcctagccccgccttccccagcagaccaatgtagggatggaaaagggagaaaaacagtaaacttgtgaccctgaggttcttgtctccagcgtccaccctgcggcttgggagctcctcctcgggaggcagcccccgtacatacgcacccgcgactttgcagctttcacctgaaggtctgagcgaagcccgggcggcgcacgtgcagtggatacctccacccccctgggaggcggggtcgcgctcagagccaatgagagcttgcggggtggaggggtagggaagcttccagaggccggtggggaggaagttataaagagggtacgagggggccagctggagagccatgcagtccaagcgggattgtgaggtaagcggctggcgacttgggggccggcgagccccgccggagcgggggtcggctttagggaccccagtaccacaggagaggtgggggcgcgcttggcgatccgccattccaaccttcctttccctctcagctgtggtgtgagagggtgaatccagagaacaaggcggcgctggaggcgtgggtcagggagacaggcatccgcctggtgcaggtgaacgggcagaggaagtatggcgggccacccccaggtacggtagtcccagcccctccgcctgtccggctacaccagccccctttgggggaggggctgctccgagccttcactgtcagaaactgcgaa

SEQ ID NO: 37875 - DNA, 1055 bp, Homo sapiens
tgccaccaccatttgtttgttttattgagacagtctcactctgttgcccaggctggagtgcagtggcacaatctcggctcactgcaacctccacctcccaggttcaaggatcctcatgcatcagcctcccaagtagctgggactacaaggggcgtgtcgtcgcacccggctaatttctgtatttttagtagagacgaggtttcaccatgttggccaggctggtctcgaacccctgacctcaggcaatccatctgccttggcctcccgaagtgctgggattacaggcgtgagccactgtgcctggcctcaggtaggtgtttgttattaggccaggaaatgttctgttatctgagagagagtgtttagaaaaatggcttaaagaaaagagttctaagaattttagaaaatagacccaaacttaaaagggaatggagtttggaaggcagatagcaaatgggtgtgggaattaatagggaattatttgtacttgttttaaaactcagtggcctgtaggaaaatctgtttagagcaggatttgctttttcattattgaggtcatccttttatatttccaaaacatattgttcttggttttcaaacctcatttctggttctctggctgatttcaactccaagggcacaagagactatagtccccggcagatggcagttcgcgagaaggtgtttgacgtaatcatccgttgcttcaagcgccacggtgcagaagtcattgatacacctgtatttgaactaaaggtgaggaatgggcaagaagaaactacatggtagatgagtgggcatttgaataacaaagaagatgacaacaagagagtgagggtccaaagggcccactcctgttgtggacacagaccagtctttgctccaataagaagggggacaagaatggcttggagggagaggccctgtcttttattatcttggttgtggccagcagattccaaaagagagccattctttggaatggtaattgttctgggtcctctctacattgtattgcgtggcatctgtacttggaatgttttctagattcatgc

SEQ ID NO: 37876 - DNA, 1068 bp, Homo sapiens
ttcaaactattagatgaaaagcttactgtggaatttatgatggatcagtctgtcctcactagtgatcagttttaacatcactaaaagtaggacaactagacattatgttcctgctgatgtgatgcaagaagaagtacacagcaccacctgggaagtattcttgccaagtaaattgaacttgaatctaatcagatctttggactaactatcagtttacaggaaatactagagatggaggaacatgttagatggcacatcaagcatattgttcaccaaatctagaatgtgaaaatttttttttaggacaaatggcccaatttcctcagttaataaatgacctttttaaaataaaaaaaaaaagttggggagggaaggaaactattgtagattaaatagacatatcagctgattacaacgcatagacttcattctgaagctgattcaaataaatcaaccataaaaagatattattgaggcaactggggaaaactgaccatggcttagcattagataatattaaggagttgctgttagttttgttagttataataaagatagagtctttggggttttttaaatgtccgtatgagttagagattcatactgaagtatttatggatgaaatgatatgacgtctgggatttatttaaaaatatgtaagaaaaacatgtcagggcttaaatgaaataagaatagcagatgttaatggttgttgaagctgggtaatggataaatggtgacctgtaatactattctctatattgtgtctttgaaaatttccatactatagtgttaagattatgctagagagttaatatccattttagtattaacaatagaaaactcagtattgtggggacaagactctttcaagggatcttcatggtcaaaactatttctataataattcttttgttttgttttgttttgttttgttttgttttgttttgtttgagacggagtcttgctctgtcgcccaggctggagtgcagtggcgtgatctcagctcactgcaacctccgcctcccgggttcaagcgattgtcctgcctcagccttccgagtagct

SEQ ID NO: 37877 - DNA, 1180 bp, Homo sapiens
acagaatctctcgtcttctcttgcagccaacaggaaggccgggtgtgcagtcacatctctgctagcttcggagctgaccaaggatgatgccatggctgctgttcctgccaaggtgtccaagaacagtgagacattccccacaatccttgaggaagccaaggagttggttggccgtgcaagctaatgtgggtcctgtgaccgcggcagctcctcagcggagccgcagactgtcctgccctgcagcatgtgcctaaaggctcaaggggatattcctctggggtggccactcccaccaccctgaccctgtctttctctctggcctgctgctctctcaacatcacatacagcttcagctgcctggaggccagaaggaaagggcagtgcaggggaggcctgagcccgacttagccagccctggctgttgtattaccaaagcagggtccatgtttgctgccttaaccctgtctcctctctgttactcagagggcctcatctcagacaaggcccagcctgctttttctcagccctgactttctaatgggctttcccccctaggtcagtcttgctggatttgtgcttttcttttgtggtttctctggccctgagaatagcatggggcttgtaaacctttgggctagatccctcctttcattgctgttgtctctgctcttccctctcctggctgtggttatttattattagtggtgtggcactgggagctgctcctaaggaagcagggagcaaatcccacctttaccccaccttcctgggaaaggcctccaaagcaaaggatctggaccagtttccctgctgtgctgtggcccaggccagagcctgtgggcaggcaggcagggcatagcgacagtgtgggacctgcccccagcttctgccacgctttatgcccttgcctctctggacgctctgcaccaaccccaggctactgagccaccttccctcctcatgccttccctgagctttggtgcatctcatctggactatgggttgtactgtgaccatcccaacacctcaccctctgtctacaaggaaatgggaggtggagcctcctggctgagaaattgttttgcaaatggatctatttttgtatgaaaaaaaaaatttttttaaagaaaactgttccttccccctttcccctccataatgtaagaagctttggtggcag

SEQ ID NO: 37878 - DNA, 1035 bp, Homo sapiens
catgggagtatatatacttagacgtaaatatatgaacacatgcctcctataagcttacgaaaatgttggtatagttttcttctaggcgattccaaaaggcttatctgagtcttttctagtctggctctaaccaagagccctagtgctttatttttaagtaggataagagaaagctgagcaagtaatttgaccagtggctttgatttttctcagtgaagaggagcagggtcttcctggaacaaatggggaagtggtggggcagtggggaaagtgggaatatgttggaggacctgccaagaagggtgggagaaagtggaattgggacacacaaagagaattgctaacagcgcggaggccccagttatcattggtgctactgcaaattcatagactccagtccgcatcagcctaggtgtcagagtagagaaatgaaatggctagactgaccagggacccagaaggagaaggaagcaaaagaaaggtaatagtaggagtaataatactaatgggagtcatagtagagagcaaatgaactgatggtttagaggctcctaatgaaataggaaaggcagagtggaactgatatatcagtgaaaacagaatggtcaggagactggaaagagaggtcctgataaggctgaagagtcaagtgagagattagaaagggagagttgaaaaaacaggatgtatttgttagggaataggatatggtggtttaaggtcaaggcagctttgaggatcacgtcctgagagtggggaactaaagtagagtggggtgaaagtctttgacgtatatatacttttttgagacgggtctcgctctgttgctcaggctggagtgcagtggtgcggtcacagctcactgcaaccttgacctcctgggctcaggtgatcctcccacctcagcctgccgagcagctgggactacaggtgcacaccaccacgcctggctagtttttgtattttttgtggagatgaggtttccccatgttgcctaggctggtctcaaactctggggctcaagcgatccgccca

SEQ ID NO: 37879 - DNA, 1098 bp, Homo sapiens
acaagctgattagtatactgccctctacctgtcaggaaatttatttggaggactgatcagcagttaaattatgcagaaagctacagcttgcccttttacaaaaggatcttgtcctgttgcagctagtattttcaatagtagcaatattcgtgttctttttggggtccagaggctggaaaggtttttgttctttagtctgataccttcatgaaagcatagccttcctttgagagggctcaaagagaggtttgtattttatcagcttggtagctcattgtagcctcattatatacacactcataatcccatctctgtctcagtttctgctgaaaaactactttaagcgcataatagaacctacccacattatatatggataactagcttgagataacatactgaatccatttcttcagggaattcccctggtctaacttggatagaatatgctggtgcagaaagattttcacggtcaaagtcaaccctttgtgtcatatgttaactcctaattatccccagctagtctcatttttagagcctctttctagccatcccagctttagtgtgtgcctgtattactcttttctagaaacatatagactgaaatggtatcttttaagtccaaggtaccatctgccattatctgtggattccagattttatttctaaccaaatgtccttttaaatgtcattgtctgagacttagaccatctagttggggggtcagtattacttaaacttctaacatcttggtacagtcagttcctagccttaaatgtctgttgataccagtaaatctcaaactttagtataaggattacatgaggagcatgtttgtaacatgtaacatgtttacatgttaatggtgtgaattaagccactcttcacctgttctcttaataatattttggtatctgtatctgaataggtattatataagtattatccctgttcttatggaggtcatatgagattgattaggaaacaattcaacattttctgttgacttggcagtcaattttggagtcactgtttcagaggcacttttcttgccatcttccaaacttctcagtagccatcttagaaggacattttgaa

SEQ ID NO: 37880 - DNA, 1032 bp, Homo sapiens
ccaaagtcatggatttatgaatccactctcctatcccaattccgcaggatgtgagttacacaggccatttttttttttttttttgagttggagtcttgctctgttgcccaggctggagtgcagtggcataatctctgctcactgcaacctcagcctcctgagtagctaggattacaggcgtgtgccaccatgcctggctaatttttgtatttttagtagagatggggtttcaccatgttggtctggctgctctcgaactcctgaccttgtgatccgcccaccttggcctcccagagtgctgggattacagacgtgagccaccacacctggcctacataggccatatttgcatgcacagtattgttcccatgatgtgtttgagatgcctgtgattctgagtgagttagcctttttcttctagaaaccaagttaatataaaggaccttagggatttgctcataaaatgagcaaatttggcacagttagccaaactggtgggagaaatttaatgatgagcaagacttctctgaaataaagccttaatggttatgaagctagaggatttggagttaggaggaggatacgtagtatatatatgaatctagttcttgaataatcaccaattaacagatgaactggaagtattctctcctaatcccactgcagctattctgtgcctcaagttagtcttattctagtaagacattgctgataatcagccagccacctattttacagcctcatccgttttctaggacggaaagtacagggctcagtttactaattcttaacaccctgcctttatccacagcttgtggctgaggacctctcccaggactgcttctggacaaaggtgaaggaggaccgctttgagaacaatgaacttttcgccaaacttacccttaccttctctgcccagaccaagagtgagtaccttcctctttgatgcaaaggtccagtgtagggcttagaatattttttcattaggtttcctattcccttcccttccctgggtgaagatagaaagggtat

SEQ ID NO: 37881 - DNA, 1021 bp, Homo sapiens
ccggggataattctggttttcaattaaaaaccaggttgaaaagcttaggtttctaaccacagaggatacttttgggttccctgacttctacttttgttgttgacaggaccttcgagagattgaaaatgaagatatgagagtgcaactaaatgtgtttgatgaacaaggggaagaggattcctatgacctgaagggacggctggatgacattcgcatggagatggaatatccttttgctgactaggttcaaggcagatgagacattcattgtatttagttccctgatccctgtgtggaatggtttgggagatgatgactcagaacagagcatcaggcttatgtgtcttctcattaaataaggcaggtgtatttttattgcgctggctttacttagcttatcatagatcagggaagtcagtaaaggtgatctgagggttgttgagcatggaagccatcaaaatcagtgtaaacttcctagaatgtgatagcttagcttactaagatgtagaactggcttttagagatgtttggactgacagagggagtaatttagttacctgttaatattttcagtaagtgactttgaggcagttacctcttattttctgtctactgcctgatcttcaagccaagtacttactaggaatcctctgtgtgtatagtaccacccaattcactggtcccttaaaggacgttttagaaagcttaaagtttctggtgatgtttacaggaagaacagccagtagaatggaagtggtgtcttgctacttttccctagctttttcaagagttaaataagccacctgtcaaacataatttctgcatatttgctttccttagcctatttcccttttccactgactttaatgaagtctttcagattctcttaaacacagtgaaggattcaaaggcagagccacacttcctttccatcctgcagcacttactcttggtccgaaatgactatgaggccaggtaagatgctgtgcttatgagaagttttgaatttgagcctaagtgg

SEQ ID NO: 37882 - DNA, 1045 bp, Homo sapiens
aacattttatgtctgcatcaattctgtttcattccattatataagcctgttcactttttactgtcttatttagttaccgttcttacatacattttgcctggttaaattttcatgaagtatgtaaatatagggaatgggataggcagttctaagtctcatttatgttggtggtatgtgagatgggtatctgccctgataaacgtggcctgacatggtggcttactcctgtaatctgagcactttgggaggctgaggcagaaggatcacttgagcccaggagtttgaaatcagcctgggcaacgtagtaagaccttgtctctgctaaaaataaaaaataaaaataaagtataaactctattgactaatactagtccttaatttatgactgggtccaccattactaatctctgtctatgccttctgtctagggcatgagccagaaggagagctctaagtctgccatgatgtatattcaggagttgaggtcaggcttgcgggatatgcctctgctcagctgcctggagtcccttcgtgtgtctctcaacaacaaccctgtcaggtgaggattctgaggaggtaacaggagtaggagccaaatgttggacttcactggtggtgattgaagatcaaaggagccagggaagcatgagaatagtctgaattgggagtagtaagttgtcaggataaactttgtttggcaaataagtatttattggtttgatattgcattgcctctctctgttccttacagttgggtgcaaacatttggtgctgaaggcttggcctccttattggacattcttaaacgacttcatgatgagaaagaagagactgctgggtgaggacttccaagtctttgcaacttcaagttggagagtcacaggggacttggctatttgctctgaaggagaaagtagcagttaaatgtaaagttgtgggctaggggaatgtactgttagccaagaaggggtttatcatagtggtggctagaggatgaatgatgattatagatacaggaaagggaggaggaacttaaatttcatgt

SEQ ID NO: 37883 - DNA, 1051 bp, Homo sapiens
cagaaaagagagaagtaggagtgtataccgagggagttagtgaattgtgttgtgattatacatataagaaaacctggctgggcatgatggcaggtgccttgtaatcccagctactcaggaggctgaggcaggagaatcacttgaacccaggaggtggaggttgcagtgagccaagaacacaaaaacctttgtagttcccagggatcctgggcctcctagaatcgtcagagtgtaaggaccaagtggcattcagctgtgctgttctggtggtagtccatttagccaagaactcaaatataattgtagttgtctattacaacttagccttaacaaaatctttagaaagtaatgaaatacaggcttacagtgtgggtttatatttcccgtgtgctggccacatggttcttgcaattaccgtccatgattaactgtccatgtgaagcacagaagtaggaattagaaacactttttgctatgtagaatgtactctgtgttcagagtaatgtttagtcatactctctttttagatccctgctaacctctctgctgctaagaactacccaattaccttttgcttggctacatgagcatcctgtgccaagagaccatgcttagttgtctgagtattctctgggccctttttctgattaaagtgaaaagttaaagattcagagaatcaagtagaggtgaatcagtctcttggatgagttttcttgtgtcctgaatttacaatagattgaattctgttactaagcaaacagagggagcctctgtgcagaagactgccattggaccgtttttaaaaagctgaagtattaatacacacaaccaccaccactgcaagaacaaatccagatatgcaaaataagttttaaacttcatttatgttttctgataataattaatcagggtgtttcaaactcattaagttattaattagcttgaccttacagggaataaataccttggggtcttttgacttttttgttgttgttgttgttataaactataaagtatctaggaagtttctaatttcctgtagatggtaacc

SEQ ID NO: 37884 - DNA, 1029 bp, Homo sapiens
aagactgaaactgtggtcgatttttaaaagcttaccctgactttacattcctttagtggaaatgtgataaattttgtggcaaaggccaggcgtggtggctcacgcttgtaatcccagcactttgggaggccaaggcaggtggatcacgaggtcaggagttcaagaccatcctggctaatacggtgaaaccccgtctctactaaatatacaaaaaattagccgagtgaggtgatgggcgcctgtagttccagctactcgggaggctgagacaggagaatggtctgaacgcaggggcgtagcttgcagtgagccaagattgcgccactgcactccagcataggcaacagagtgagacttcgtctcaaaaaaaaaaatttttttttgtggcaaagctagatcaggcctcaatggtaactgaattcaagatcctattatgaccctctgttgcctcagtaccctaaggaactgtgtcaatcctgaataaagaaattaatcagagctggacccttatctctctgttctgcatgattctaagtgacatatgccttaccttacctgttctttctgggtaggtagattaggatatgaaaggaaattatttttggctgtagtgatacttatttcccattttacccataggtagactttgtcattattgagggcttattgtcctgtgggctccagtcaaggttccttggtctcattcataaggaaagacattactcttgaaggtttgatttactgagctattcgtaacaatcatagtgtactgtcatataccttgaattgaaacttttccttacttttctcaatttgaatagagtaatgaaagaataaatatactgtttcggatgatgctcctaaacctgtagtgatgctaattttaaaatttatttattaaaatgtgggccacatcagttgaataagacatgattttgccctcatgcaatttagtctggttcacagaaaaagttacaacaaatgatctgttaagaaggttctaatatagtcccggtgcggtggctcacg

SEQ ID NO: 37885 - DNA, 1031 bp, Homo sapiens
ttagtctagtgcttgccctggaccgagctctgttcttgctaccttgctttcaaaacatggtggctatcactataatttttttcatgtgttccatgggtattgcacacattgaaaactgcattctcttggaaaacctgtcactaattttctgccaggataatggtctcacgcgatttttggtctgggatgtgagagggtccaggctgtcaggctgtacagccacgtgggcgctgcgtgggagccagaggcctgcgctgctccaaccgccagggggcggtgctctccgccgcggccgcggagagctgcaccgcccactcaccacccccccccacgtgggtccgaatggttaggtccgctgggcaggtagcgcgcttccgcggcttccctccgcccctctcccttcccccattggtaggggctgcgggtccgggcggaagtggggcaggcgggcgggagcgaggcgtcgtcgttgtatattcatgaggcgcgcgcagcccggcatgctaatgaggcggggcgcggcggctggctaaagagcgactgggcggcggcgggcgcggagctgccaggcgggagcggcgtaggcgcggggtcgccggccagcgtgaaccgggacatggagccgcccggcgggagcctggggcccggccgcgggacccgggacaagaagaagggccggagcccagatgagctgccctcggcgggcggcgacggcggcaaatctaagaaatttgtgagtgtccctcccatcccgctcctgcctggccccgtaaccgccctctggacccctgcagccggcccctggggcgcctgcccggctttggggagccgcccccgcgccttccttcctcgtttcgctcggtccgcagctctgcagcccgacatcctctcccttcgggacctcgggaagccccggaatcccacccggctcttgccccggccacctcggggcttccctcgttccccagcccttacattctgccctcccgcccgcatatccccggccggctctcagccccgtctctcccctc

SEQ ID NO: 37886 - DNA, 1089 bp, Homo sapiens
aaaaaaaaaaaaggtatcaaggtacaggaaatttccactacccaacaaaggtcactcacccttttgtagttaataacttctctgcaacctagatccagccaactactgataagatgtctgtccttgtattttaccttttccagaatgttacataaatggagtcatacagtaagtaggcttttgtgtctggcttcaagcctttactttttataaagaataacaatggtaataattatagctgacatttattaaaggctgagcggatactgtatactgtgctacaggcttttcgtgggttatctcatcactgtttcacatatgtaggtatacagttctttctttaaaatatgtgactgaaaaatattattgaacattatgctaaaatttgttacactgagaagactaagaaaaacagagctcatgttttctttcaactgatttcctttttacattgtacttgagtacctggaagctgcttgcttctttccgcagctaggatacaaactccctgacagttaagtgcttctttacttcccatccagtgccttgcacagggcttggtacatggtttggtccaaaatatttgttgaataaatttgcagatagcccacgtgtgtaggagagggagagaaggttcttgaaaaatggagattggaggaatctaggatggggagggagatatgggaagggcccagacagaggcaggagggttccaacttgttcctcttccctgcagcccagtgtttcccgggctctttgagttctgctcgcgttacacaggcgcatctctgcaaggagcaacccagctgaacaacaaggtgacatagtcccgagtcctgttcttcctttcctctggatccctggactcgggatttaaccctgatcctgggctcccagcttgaggggtgggcaggaaggactgtgacttaggtgtttgtctttcagatctgtgatattgccattaactgggctggtggtctgcaccatgccaagaagtttgaggtgagtgaggaggtgatgggaaagacagtggccatcctagggtaggtgtttaggatgatggtggggggcagctgggaggggaattgc

SEQ ID NO: 37887 - DNA, 1032 bp, Homo sapiens
gtattcctgctgttatttctgagctcactttctagctctgtgaatacagggtcagcccttacgccacactggggtcccgtagatgctctttgtgcgattagggaatgctaattagaatactatctctgggctatttatgctgcatcagtcttcctgtcaaacaagttacagttgtgcttatctgtatttccgatgagaatcaggaatttttcttctgtttaatgaatttctgattggtttcaaagtattctaacataagtagccaaattgtactataggcctttaaatgaaaaaaataaaaaagtagtcccaagccgggcgcagtggctcacgcctgtaatcccagcactttcggaggccgaggcgggtggaccacctaaggtcaggagttcaagaccagcctggccaacatggtgaaaccccatctctactaaaaatacaaaaattagtcatgtgtggtggcacgtgcctgtagtcccagctactccaggaggctgaggcaggagaattgcttgaacccgggagttggaggttgcagtgacctgagattgcaccactgcactccagcctgggcaacagagtgagactctgtcttaaaaaaaaaaaaaaaaaaaaattccagacctctccttttcacccataaatccctctgcccagtgacagccactttcagctcctttcccctatgtcttctggtatttacctttggatttctaaataataatattaattgactgttattactaatctgtaatccttaggtaatacctgttatatactaggtactgttctaagtgctttacagccattagcttatttaatctcaacaacccctatgaagcagggtctattattgtttccttttaccgatgaggacacttaagcacagaaaggttaaacagtttgtacaacctcactatcattagtaggtgttaaagaacctaggtagtctagctccagaatcggtgcttgtaatcatactcccctcctgtattgtctctcattgctatttcttcatctgtcaattttagg

SEQ ID NO: 37888 - DNA, 1038 bp, Homo sapiens
acccaaaaacaacagaagaaaaagtaaataaaaacaaggaaactagaggaaactgaagcctccagtacctacaattatggcaaacattaaatacagcccagctcctagccagattagcatgaaacctcacactaaaagtctaattacttcagttttgatatatcaatcatgtccagctttcagcaaaaaaactacaaggcatgctaaaaggcaagaaaaacccacggtctgaagagacaaaacaagcatcagaagcagtcctcagatatgacacaaatatttcaattatcagatagggaatttacaatacctatgattagtaggttaaaggctccaatggaaaaaagtagacaacatgcaagaagtgatgtacgcagagagatggaaactctaaaaataaatgctaaggaatgctgtaaggaaatgcagaatgatgttgatgggctcatcagtagactgagcacagccaagcaaagagtcagtgagcttgaagatagataggtcaaaggaaattcccccaaactcaaatgcaatataaacatagtagacattaatccagctgtatcagtaattactttaaatttgaatgctctaagtacaccaatcagctatttttttaactaggaggtgaaaataaagtttgccaccagatgctcactaaaaaattattagaggatatatcccagccaggcgtggtggctcacaccggtaatcccaacactttgggaggctgaggcaggcagatcacagagtcaagagatcaagaccatcctggcttacgtggtaaaaccccatctctactagaaatacaaaacttagctgggggtggtggtgcgcgcctgtagtcccagctactcaggaggctgaggcaggagaatcacttgaacctgggacgtagaggttgcagagagccaagatagcaccactgcactccagcctagtgacagagggagactccatcttagaaaaaaaataataaaagtaatcccatctttaagaaggactgaagaataacaaaagtggtaaataatatagata

SEQ ID NO: 37889 - DNA, 1061 bp, Homo sapiens
tactaaaaatacaaaaaatagctgggcgtggtggcgcgcacctgtaatcccagctactcgggaggctgaggcaggggaatctcttcaacccaggaggcggaggttgcagtgagccaagattgtgccattggactccagcctgggcgacagagcgagactctgtctcaaaaaaaaaaaaaaaaaaaaaaaatcatctttaaagagataactaacccttccccagaaggcagggccaaagtctaaggttcttccaggtcctttgtattccctataaattttagagtcagcctgtcaatttctatacacacacaaaaaaagcctgctgggattatgattggtattgcattgaaattaaatcaatttgggtataagagacttcaatttggggattgagtctatattgagtcttccaatccaggaacactgtatatctctccatttagtcagatatttagtttatttcaacaatattttcagatctttagttcctttcagcaatattttctcatttttcctgtaaagctcttgcacatcttttgtcccatatctattgtgtatatgtgttttgctagttattaaattatattaatataaattttattttccaattgtttgtcgcatatatagaatgttttaaaaatattgtgtcctgtgaccatgctaaattaactaattctagtcattatgtcttcattatctttctcttgaattttcattgtcttccccttctgggactccattcatatgtaaggccatttgatactgtctctcaggtccatgaagttctgttaatttttcttcattcttctttttctctgtgttcttcaactgaatgaatgccattaataatttggtatgtaatggctcacttaaacttccttttgtttttaagatatttctactctcagctgtgtctggaatcctttagtccggagccccaccaaccctcagcctagaaggaaggaggagaaggatagggtgaaaggaaggggagagcttctagcttcaggacagagatcagaacaaacaacagagcagtcatcttggataaggaaacttcc

SEQ ID NO: 37890 - DNA, 1048 bp, Homo sapiens
agtggcctctaagtgttgaagtgaaagagttgcatgtctctcactttaaataaaaagctagaagtggctaaacttagtgaggaaggcacatcaaaagccaagacaggccaaaagcaaggactcttgtactaaacagctaaattgtgaatgcaaaggaaaagctcttgaaggaaataactagtgctactccagcaaacatgtgaatgatcagaaagtgaaacagccttcttgctgatacgaagaaagttttagtggtctggacagaagatcaaaccattcacaacattcctttaagccaaagcttaactctcttcaattctatgaaggctgtgagaggtgagaaagctgcagaagaaaaattggaagctagcagaggtcggttgatgaggtttagggaaagaagccagcgctgtaacataaaagtgtaaggtgaagcagcaagtgctgatacagaaactgcagcaagttatgtagaagatctagctaagattactaaataatagattttccatgtagatgaaaaagccttttgttggaagaagatgccatctaggactttcatagctagaaaggagtcaatgtctggcttcagaggacaggctgacattcttgttaggggctaatgtagttggtgactttaagttgaagccaggtctcatttaccactccaaaaatccgaagacccttaagacttatgcttaatctactctgcttgtactctagaaatgaaacaacaaagcctggatgacagcacatctgtttatagtatgcttcactgaatattttaaggccactgtaaagacctgttcaactgctcagaaaaaaatgattactttcaaaatattgctgttcattgacagtgcacctgggctcacccaagagctctaatggaattgtacaacaagatggatgttgttctcatgcctgccaacacatcatccatttgtagcccatgaatcagggagtgatttcaagtttcaaatcagtacattttgtaaggctatagctgctatagacagtgattgctctggtggacctgggcaaagta

SEQ ID NO: 37891 - DNA, 1045 bp, Homo sapiens
cttggttcctggctgctattccaaggtgctataaagtcagctaaagagagcaatcataatacattgatagcatccctcaatgtgtttctgagctacttgagaatcttatttttgaataggtagcaggaaaccatctttgcagggcagcatgggcaaagggattggagggactattattataaagatccactgaactgcttcagtatcataatatcttaaactaaaggactggaaagagccagattccaatttaatctgctcttctatgaattcttagctgggttcatttaaaaagaaaaaacttgaagattgcaagattttgaagacatcttaaaataggtgaactccaaggtgcactttaaacttgagactgataactgaatactccttcaccttttgatctgatattgtcaaaatgaatgaggacttagtgctctagtaagtttggaacagaatgatattaatttattttctcatgattgattcttttttgctttttaatagattaaacttcaccgtagaacagtttctcaacctctggactattgacatttttgattggataattctttgctgtcagggctgttctgtgtgttgcaggatagttagcaacatccctgacaatcacaaatgttactttctgtctctatggatttgcctattctggacatttcgtataaatagaatcatatatatgtggcttcttgtacctggcttatttcacttaacatgttttcaaggttcatccatattgtagcatgtaacagcacttcattttctttttatggctgagtaatattctgttatgtggatatactaccatattttgtctatccactccttagctgatggtcttttaggttgtgtccattctttggctattataaataatgctgttaagaacattcatatacaagtttctgtgtagacatatatctttatttctcttgtgtggatacctaggagtagaattactggatcatatgataactctatgtgttaccttttgaggaactgccaaacatttttctacagtggctgtatc

SEQ ID NO: 37892 - DNA, 1026 bp, Homo sapiens
ggaccccaaggctcttctcgccaagcccacggtttttttgctttatacttttttgcctcctgatcaccatggctgcagtttctactgtggacaatgtctgtcagcaagcattgatcccctgccttcagcactcttacgtcttagcaaggactggaaagaaaaagccaggagtttacagtctgctggagcaacagaaaagaatgatatgaaatatgaagagaccaaaatgatttataataaggtgctagactatgtagtaaaaatctgctttagctgtaagtcaaaagcaagagcagtcttttcagaatggaatagaaatgttggaattaaaggaattttcaaagttgtgaatttttttcaagataaacatgttttattttggtaattatggtattactaatttgataaccttcagggagccacctaatattatagaagatgtacatataatgacaaaagcaaacattttatttttaaggaccacaatctaatctaaaacaaaatttcccccttttctggtctttggttaattaaggacttatttaaatatcaaagaaagacacatagaaaacatttagtatatttctatacttttattaatgtcctccataccttacacagatacttgacttggctatggtctagataatccatgaaaatttaaaggacagattttaacaactttatgctaaattgatagatctctaggatcagattgccatcactctcagatgcgaagcttccaaccacttataggttcctgatatcttgcttttatacagacctaatttctcttcctttaaactttcttttcctcagttgctatttgattgaaatattgagtcattaaaaatttccaagtgggaatttttgtgtttcttcatctatcatgaagctgctcaaataagtaggtgtttgaataggagtagaaacagtaataggctgaagccagaccaatacagcttcagctaaatgccgaccttgctaaagtctgggaggaccggtgtggtattctacaatgtacaa

SEQ ID NO: 37893 - DNA, 1057 bp, Homo sapiens
cccagcaccatttattgaagagactgtcctttccctagtgtatgttcttggcacctttgctgaaaatgagttcactgtaggtgtatgaatttgtttctgggttctctaggtctgtgtatctgtttttatgctagaactatgttgtttgggttattatagttttgtagcataatttgaagtcagataatgtaattcctccagttttattttttttgttcaggatggctttggctattccggggcttttgtggttccatataaatcctatgattttttttttctatttctgtgaagaatgtcattgatatttattaataaagattgcattgaatctgtagattgctttgggtagtatggacattttaacaatattgattcttccaatccatgagcatggactatctttctttttttgtgtgtcctcttcaatatttttcctcagtgttttattgttttcattgtagagctctttcacttctttcgttgagtttattcctaggtgttttattttatctgtagctattgtaaatgagattactttctgatttcttttttagattgtcctctgttggcatctagaaatgccacagatttttgtatgttgattttgtatcctgtaactgtactgaatttatctgttctaatatttttttggtggagtctttaggcttttccaataagatcatacagtctgcaaacaagaataatttgacttcttccattccattttggattccctttatatctttctcttgtctgattactctaggtaggtcttccagtacttccagttgaataacagtgggcactcttgtcttgttgtagatcttagaagaaaggctttcagtttttccccattcagtatgatactagctgtcagtttgttgcagatggcataactttcaaactaattgattatagttaggaagtggatactttaacttgtggtaccattatcagatttatatttcggccataagcttgaagaggagctgaaaaatgcatatgtgatgcatatgcttcctatttggctctcttctcccacccccctgcccta

SEQ ID NO: 37894 - DNA, 1030 bp, Homo sapiens
gggatacattggcagaacgtgcaggtttgttacacaggtatacatgtgccatggtggtttgctgcactcatcaacttgtcatctacattaggtatttctcctaatcctatccctcccctaaccctgcatcccctgacaggccccagtgtgtgatgtccccctccttatgtccatgtgttctcattgttcaactcccacttatgagggagaacacgtggtgtttgatttttctgttcctgtgttaatttgctgagaacgatggtttccagcttcatccatgtccctgcaggatgtgagggcaatctggctgcgacatttgtcaccccattgatcgccagggttgatacagctgatctggctggctaggtgggtgtccccttcctctctcaccgctccacgtgcgtccctcccaaagctgcgcgctctgtcaaagaggacgatcatccctgatagacgaggaccagtctttggtcaagggtacacgagtagctgtgctctcctgctagaaccttcaaacaagctctcaaggtccatgtccctgcaaaggaaatgaactcatccttttttatggctgcatagtattccatggtctatatgtgccacattttctttatccagtctatcattgatgggcatttgggatggttccaagtctttgctattatgaacagtgctgcaataaacatatgtgtgcatgtgtgtttgcagtagaatgatttataatcttttgggtatataccaagtaatgggattgctgggtcacatggtatttctgattttagatccttgaggaatcaccacactgtcttccacaatggttgaactaatttacactcccaccaacagtgtaaaagcattcctatttctccacattctctccagcatctgttgtttgctgacttgttaatgatcgccattctaactggtatgagatggtatctcattgtggttttgatttgcatttctctaatgaccagtgattatgagcttttttcatatgtttgttggccccagaagtgtctgttcatat

SEQ ID NO: 37895 - DNA, 1098 bp, Homo sapiens
ttggaagaatagaatagctaagtttatgtgatttacaacttggaccctggctcctaagagttgaaagtcccttcattagttttagacattccactggctttgtaagtaggaaaacaggaatgcctctgcatttttggacatgtcttttagacatgtcccaggctaggctgggagttgtgaaaggaaagggatgggattctttccaccctacaatgacatccacagtgtccacagtgattccctgtcaccttatacataccttaaatgaatgtaactctctctgttgcaactgcttattttactaggtctgatttccccattagtccgaattctttgtggagaaaagggaatgcatattcaccactggtgggaatgtaaattaattcagccattgtggaaagcagtttggtgatttctcaaagaagttcaaatagaattaccatttgacccaggattcccattattgggtatatacccaaaggaaagaaaatcattataccataaagacacatgcatgtgtatgttcatgacagcactattcacaatagcaaagacatgaaatcgacctaaatggccatcagtggtagactggacaaagaaaatatgatacatatctaccatggaatactatgcagccataaaaaagaataagattatgttccttgcagcaacatggatggagctggaggccattatcctaaccaaactaatacaggaacagaaaataaaatgccataggttctcattttataagtgggagctaaacattgagtgcacatggacacaaagaagggaacggatgctgggacttacttgaacatggaaggtgcaaggaggatgatgattgaaaaactacccatttactatgcttattacctgggtgatgaaacaacctgtacaccaaaccccccacaacatgcaatttagctatataataaacccatgcatgtacacctgaacctaaaataaaagtgtttttttaaaaatacattctctacacagtggccagagacgtctttaaaaaatacaagtctgatcacatatcttccctgcttaacactctttaatggcttctcattggacttgtagtctaagcca

SEQ ID NO: 37896 - DNA, 1962 bp, Homo sapiens
taggatgtatctcaaatatcttcagatttccattttaagcaattttctctatacttttagcctaggttaccgcttgggataaaacattgtgtctaacacagcaattatttatacacatcctaaaggttaccttcagcacattcaagatacctcttaaattcagtgtcttatgggtagtgattgaatttatttataaggacaagtttttctttaactcggtgtttgggagcctcttcaattgtgaattataaaagaagtcaggctcctagtgctagataactttaaacataacttttgtcaagtcaacaataatatctgtgtccatgcagctccaccagagaagtcttggtgctgagggcaggttatgatatgaaaagccattgtaaaatgatgtcatggcaagttaaagacagtggcaacatcagaatagtgggaagttatgggatacaaaaatggaacattcaggaacactgtggatcagggaaatattaaggtcaaaattgagtttaccatagagcaagtttctcaacctcagaactattgacaatttggactggataaaccttcattgtaagggattgttctgtgtactttaaaatgtttagcagcatacctggcctctgtctgctagatgccaataggaaccccttccctgagttgagacaccaaaaatgtctttagctattgccaggtatctcctcgtggaaaaaattgcacctgcttgagaacaactggtataggaaattccacacagcagagatatcactaaaggattgattgatgcaaatgactgataaccataaatgttaatcctctatattgttagcctagacaacttctcttacttccaatctttgtatttaactggcaacatctgtatttagatgtctgaaagacactttattctgaataggtacaaacgtgcactcatggccgggcgtggtggttcacgcctgtaatcccagccctttgggaggccgaggtgggaggatcacgaggtcaggaactcgagaccagcctggccaatatggtaaaaccccatctctactaaaaatacaaaaattagctgggcttggtggtgcacacctgtagtcccagctacttgggagggtgaggcagaagaatcacttgaacctgggaggcagaggttgcagtgagctgagatcgtgccactgcactccaacctgggtgacagagagagactctgtctcaaacacacaaacaaaaccaagagtgcactcatgacatcattattattattattattattattattattattattattattatacttcaagttctgggacacatttgcaaaatgtgcaggtttgttacatagggatacatgtgccatggtggtttgctgcacccattaacccaccatctacattaggtatttctcctaatgctatcggtcccctagcccaccacccactgacaggccccagtgtgtgatgttcccaaccctgtgtccatgtgttctcatagttcaacacccacttatgagtgagaacatgcaatgtttggttttctgttcctgtgttagtttgctgagaatgatggtttccaccttcatccatgtccctgcaaaggacatgaattcatccttttttatggctgcatagtattccatggtgtatatgtgccacattttctttatccagtctattactgatgggcatttgggttggtttcaagcctttgctattgtgaacagtgctacaataaacatacatgtgcatgtgtctttatagtagaataatttataatcctttgggtatatacccagtaatggaatggctgggtcaaatggtacttctggttctagatccttgaggaattgccacacggtcttccacagtgattgaattaatttccactcccaccaacagtgtaaaattgttcctatatatatctccacatctccagaatctgttgtttcctgactttttagtaatc

SEQ ID NO: 37897 - DNA, 1034 bp, Homo sapiens
gatctccctccgagtaatagcattttttgagtgatgggtactttaattgtaatagaacttacttaaatgaactgtgggacaagtatgaacaagaaactactattagtcttgttttgcacatgaggaaggtgatacaaagaaaaagttaaatgacttgcctgagatcacgtagctagctaaggatggagtgccagggtggaactaagcactccttagtcactttgctactctgcctttacagaagtcacactgaaccgcctcaggtgactgtgcctttgttcatgctacctgtgtggcttgcattgtcacttccttgtcaaagatcctgtgtgtacttgaaggttctgcttacaaggcaccatgtctataaagccttaccagacttcttgcaattaacagctccctttttttttgggggggggggtcctctagcaactggtatatatttcaattataatattatatcactttttgtaaagtgagcttcatgatgtgtctctgcttaattcaagtgaactctctgatgactttatatcttaatcatttttaagtccccattgtccagtacatagcaacaccttgggaaatatctgcaaaaggtagaaggagtaatattttcattatctcattagattattattggctaatccaaacatttcttctaagtaaactaatttcaggtattaacatataaacattgaggattctcagtaagctgctaaaagtttattaatgacatgctatgagcaggtgttttcaataactttaattgtgaatacctagaaagtagttacttctttgggaagcaccaagaggccttgacagaggtatgatacagtcaattgtgttgataagacgtttctcagtgatgaacaacagaaaagcagacccaaacaataaagagcactttttgcctcatttttaaaaaaagaacggtggcaggaataacttgattttgtaaggataagatgtttttcttttttcctttttggttctaatttcttggtgttgcttctattttcagcaagcatctc

SEQ ID NO: 37898 - DNA, 1571 bp, Homo sapiens
gtgctgcagtgaacatacacatgcatgtatctttataatagaatgatttatattactttgggtatatatccagtaatgggattgcttagtcaaatgatatttctgtctctagatctttgaagagtttccacactgtcttctaccacggttgaactaattcacacttccaccaacagtgtaaaagtgttcccttttctctgcaaacttgatagcatctgctggtgatgattactttttaataatcaccattctgactggtgggagatggtatctcattgtagttttgatttgcatttctctaatgatcagtgatgttgagcttttttccatgtttgttgaatgcgtgaatgtcttcttttgagaagcatatgttcatgtcctttgcccactttttagtggggttgtttgtttttttcttgtaaatttgtttaaattccatgtagactctggatattagacctttgtcagatggatggattgcaaaaattttctcctatgctgtaggttgtctgttcactctgatgctagtttcttttgctgtacagaagctctttaattagatcccatttgacaagttttgcttttgttgcactttatttttgtgtttttgtcatgaaatttttacctgtgcctaggtcctgaatggtattagctagattttcttctagggtctttctagttttgagtttaatgtgtaagtctttaatctgtcttgagttaatttttgtataaggtgtaagaaaggggtccagcttcaattttctgcatatggttagccagttctcctagcatcacttattaaatagggaatcctttccctattgcttgtttttgtcaggtttgccaaagatcagatggttgtaggtgtgtggtcttatttctgaactctctattctgttccgttggtctatgtgtctgtttttgtaccagcaccatgctgttttggttactgtagccttgcagtgtagtttgaagttgggtagtgtgatgcctccagctttgttctttttgcttaggattttcttggctattcagggtcttttttggttccagatgaattttaaaatagaattttctaattccgtgatgactgcaatggtagtttaatgggcatagcattgaatctataaattactttgagcagtatggccattttcacaatattgattctttttacccatgagtatggaatgtttttccatatgtttgtgtcctttctgatttcttggagcaatggtttgtgttctccttgaagagatccttcatttctcttgttagctgtattcataggtatcttactctttttgtagcaatcgtgaatgggagttaattcataatttggctctctgcttgcctgttgctagtgtataggaatgctagcgattttgcacattcattttgtatcctgagactttacctaagctgcttatctgcttaagaagcttttgggctgagatgatagggttttctagatatagaatcatgtcatctgcaaacaaagataatttgatgtcctctctttctatttgaatatgctttatttctttttcttgcctaattgccctggccag

SEQ ID NO: 37899 - DNA, 1054 bp, Homo sapiens
tcattagttttctgtctaatgagttgattccttaggattcaaaagttgcctataatgtttttgttagtcatactataaattcatattttaaaactgctggatgttttaactgattgcaatggactccagttgccgcaatttttgccaatagctggctgttcggattaactcttgggtcttcttgaaatgaccttagaaacctttcatagattccttgatcacaagatgttcaggttcattttacagatttcctaccacagacttgtatttggccacttctctaaggagccctggttcctttaaatgggaaatggtatttaggggccacaattttggtattagaagtgtcctttgctactgagtccttccttgtttctatgccttttcaatagacaagactaggacgtatgattctttttaagaaacaaaatatatcatgaattttactgatacttccaatccatattcaggactacagtctttttattttactttactgatcttacatccattttctttctcccatcctggatacctcagctctcaagaacactaacataattacttttctgcttagtcacattcacagtagtctcagaataaaaatatcaacattattgccaacaacatgattactaaaaatagtttttattttcaattctttcttttcttgaggtatatattccaataggaaggtgtagtcaaactattggtgcctattggtgacttgaaatagttactttctctgtcattacatagttagcttaatatgtttcattttatcttcaatgtctgtcggttgcatttttacattaaatgttattttataattattaaaacataattttaatgttaattacctgttatgcaacaaagtaattaagtctagcttgaattcttaactctcagctctatttactttgtcttcttgaaagaatcaattccaaaaattttatgattggattttcactttttaaaaaatataagcaatgatgtaaatacatttgtttcctcttttttagatgtagagtagcagattttgcacacttgtcta

SEQ ID NO: 37900 - DNA, 1052 bp, Homo sapiens
ctgatttacagtctactctggaggggctagtttaacttgaaaaacctgagagtccaagcaggtttcagtagtctgaagttttatttttctaatagacatggaattcattaacgaccagggtatggcatacactacaatactgacatcttagtccagtgcctggcacactgaggtgttaaatgagaatttgttgaattaatcagtggatgcatgaatgtatagaactggcaaaggtggagctttgccagtttctgcaattttatttatattgtctatgataattttgagctctttgatttggtgcttccaaactacaacccacctttacctcttctttttgaacacgaaggcttaaaagactttgctttctctcttggtattactatagattaacctgtcatagaaaggccgtgccaaaaaaataaatagtgcagggtaatcgatagtaaataacatggctgacatgtggtgtgccatttattgactctggctttgaactagtgtgtgtgtgtgtgtgtgtgtgtgtgtgtgtgtgtgtgtctattatgactcttcttcttcttcttcttttttttctttttgagatggctctgtcgcccaggctggagtgcagtggtacgatcttggctcactgcaacctctgcctcctgggttcaagcaattctcctgcctcagccacctgagtagctgggattataggcacccgccaccacacccagctaatttttgtatttttagtagagatggggtttcaccatgttggccaggctgatcttgaacttctgacctcaagcgatctgcccacctcggcctcccaaagtgctgggatttataggcgtgagccaccgtgcctggtctattatgactcttcttaaactttagtctttgttaaactaacatgagttcattgcttaaaaaatagaaaatacgataagcaaaacctcaaattactgacaatctgaccacctagggacaatcactcttaatattttatggacttatatgttttttataagttttaacttgatgaattatgaatattcttgtcaata

SEQ ID NO: 37901 - DNA, 1195 bp, Homo sapiens
atgttagcaaagaaatctagatctgggattttcaacaagattcacctgcccttctgatagtgattattatttgattgatattggatagcttgaacatagagttaagaattcttgacttaacatgtagaatgccatatcagtatgtttgtctgggtgagaaagagaaagtggcaggatgcatgccataagttcatttgaagtatctgaaattgccttcataggttaaaaatggtcaaatattggcagtattgtattgttcaacccaatactcatttatctcgaattttaaattgttctgaactaattttttctactctgtgaaatgctttgatacccctgtcagaattcatgccaatggattagttcagtgtgcatctatcatcagatagttggcaaaatttccagatctgttatgtcatgtacctttggctagatatggcttgaagtctacagataggtaagactgggtactaccttttctagggatagtaaaggaaaataaaatattcgggcactaaatagtacagttactacatttagttgctaatacataggataatttatttccatgctctttgtagaagccttataattaaggaaatagtgtcataaattttctcagatctagaaatctttgctaaaaattcagttatttaattttcatatcaatatttgagcttgtaatagtaacagtttctaattacttatgttcagcaaggttaactctactgatgtgcttatgttttctgctatgtagtattttttgaccatatggagcccctaatttgcatttcgtgtttgccattcatcttctcaatggactatggaacagtgacaaatgactaatcactgagggaagaaatgttgggggtcaaatcaggacaagccattagtgagcagtttctttagcataaaatattttaattctgcttctcaagttatatttaagatatgcaaacaaattcatccattgtccagggtcttatactatatattttctttgaatctgtattttgaagactgacttctcttaaagtcaagacacaaagtgagtttatctcatgtacgaactctgatgtttaggttctgattgcgcaggggtccccactgagaataaatcacagtgtttgttgtggggaagtactgtgcattttttgatccttctaaatagtcagtgacttattgtaggcaagaa

SEQ ID NO: 37902 - DNA, 1045 bp, Homo sapiens
acagacatatacataattctctaccttaaatcatcagaatatacattcttcccatctgcatgtggcatacactctaaaaatgatcacacaatcagccataaaacaaccctcagcaaaatcaaaaaaccccaaaatgtaccaaacacactcttggacaacagtgcaataaaaatagaaatcgatactaaaaaattcccaaaaccatataattacgtgaaattaagcaacctgttcctgaatgacttttagataaacaataaaattaaagcagaaatcaataaattatttgaagctaatgagaacaacgatacaacataccagaatctctgggacacagctaaagcagtggtaagagcaaatttatggcactaaaagcccacatcaaaaagttagaaagatctcaaattagcaatctaacatcacacctaggggaactagagaaacaagtgcaaatcaacctcaaagttagcagaagacaagaaataacaaaaatcagagctggactgaaggaaattgagacacacacaaaaatcatacaaaagatcaatcaatccaggattttgttctttgaaagaataaataagattgataggctgctatctggtctaataaagtaaaaaagaggggagatccaaataaacactatcagaaatgacacaggttacattatcactgaccccacagaaatataaaaatctctcagtgactactacaaacacctctattgcacacaaactagaaaacctagaagaaatggtacattcctggaatcatatgacctcccaagattgatccaggaagaaactgaatccctgaaaagccactaatgagttccaaaattgaatcagtaataaaaagtctaccaaccagaaaaagcgcagccaaattctaccagatgtaaaaggagtgctggtaaaattcctactaaaactattccaaaagggttgagaaggagcaacttctcactaattccataaggccagcatcatcctgatagcaaaacctggccgatacacaataaataaagaaaaattcaggccaatat

SEQ ID NO: 37903 - DNA, 1055 bp, Homo sapiens
cagttggtaaaacacctggttttcacactgctctgcattatcatcttagatacaaagtgttatttgttcatgggtctgtttttctctgagttgttccattggtctatttgtcaatgtttgtatcaatatgacattttcataataactgtagcttttcagtaaatcttgacttctcatagagctagatctactatattttaccattcttcaagtatgttttggctatttttggcctattgcaatttcatacacgtgttaggattagtatttcatttaccacaacaaacaatcaaacaagcaaaaaatatctgttgggattttgatagggattgttttgaaattatagatcaacttgtggaaaattaattttaaaaaagttgtgtctttgtgtatctgataatagtatattctttcatttaattaagtattgtttaatccaataatacaatgtttctgttttgaatagagttatacccattttgctaggtttatcctatgtattggtaattttgtagctattatgaaaggtcttagaagaatttttaattttctattagttgctgggttatggtattgcaagtaatttttaaaatttgaggctggttgtggtggctcattcctgtaatcctaggactttgggaggccaaggcagttggatcactggaggtcaggagttggagaccagcctggccaatatggtgaaaccctgtcttccctaaaaatacaaaaattagccagtcgtgttggtgcatgcctgtaatctcaactacttgggagggtgaggcaggagaatcacttgaacctgggaggaggaggttgaagtgagccaagattgtgccactgcactccagcctgggcaacagaacaagaccccatataaaaaaaaaattgaccttgctaaattcgtttctcagttctaataatttatctgtacagtctttggatcttcactgtacagaaacattatctgccagaattttaatgacgattttacttcttcatttacaattcttctctctctctatatttcatattacatattttaatatttattt

SEQ ID NO: 37904 - DNA, 1072 bp, Homo sapiens
acaagattaatgtacacaaatcagtagctcttctatacaccaacagcaaccaagcagagaatgaaatcaagaactcaacatcttttacaatagctgcaaaaaaaagtaataaaaataaaatacttaggaatacccctaaccaaggagctgaaagacctctacaaggaaaactataaagctctgctgaaagaaatcatagacaacacgagcaaatggaaatgcatcccatgctcatggatgggtagaatcaatactgtgacaatgaccatactgccaaaggcaatctgcaaattcagtgcaatccccatcaaaataccaccatcactcttcatagaattagaaaacacaattctaaaatccatatggaaccaaaaaggagtccgcatagccaaagcaagactaagcaaaaggaacaaatttggaggcatcacactacctgatttcaaactacacaataaggccatagtcgccaaaacagcatggtactggtacaaaaacaggcacaaagaccagtggaacagaatagagaacccagaaataaacccaaatacttacagccaactgatcttcgacaaagcaaacaaaaacataaagtggggaaaggacatccttttcaacaaatggtgctgggataattggctagccatatgtaggagaatgaaactggatcctcatctctcaccttacacaaaaatcaactcaagatggattaaggacttaaatctaatacctgaaactataaaaattctagaagataacattggaaaaacccttctagacattggcttaggcaaggatttcatgaccaagaacccaaaagcaaatgcaataaaaacaaagataaatagctaaacctcattaaactgaagagcttttgcacagcaaaagaaacagcagagtaaatggacaacccacagaatgggagaaaatctttataatatatacatctgacaagactaatatccaaaatctacaatgaactcaaacaaatcagtaagaaaagtacaaacaatcctgtcaagaagtgggttaagaatagacaattctcaaaagaagatatacaaatgttctc

SEQ ID NO: 37905 - DNA, 1085 bp, Homo sapiens
cgatcttctcagcccaaaatctccttaagctgataagcaaattcagcaaagtctcaggatacaaaatcaatgtgcaaaaatcacaagcattcctacacaccaataacagacaaagagccaaatcatgagtgaactcccatttacaattgctactaagagaataaagtacctaggaatccaatttacaagggatatgaaggacctcttcagggagaactacaaactactgctcaaggaaataagagaggacacaaacaaatggaaaaacattccatgctcatgtataggaagaatcaacattatgaaaatggccatactgcccaaagtaatttataggttcaatgctatccccgtcaagctaccattgactttcttcatagaattggaaaaaactactttaaagttcatgtggaaccaaaaaagagcttgcatagccaagacaatcctaagccaaaagaacaaagctggaggcatcatgctaccttgcttcaaactatactacaagtctatagtaaccaaaacagcatggtactggtaccaaaacagatatattgaccgatggagcagaacagaggtgtcagaaataacaccacacatctacaaacatctgatctttgacaaacctgacacaaacaagcaatggggaaaggatgctctgtttaataaaaggtgttgaaaaagctggctagccatatgcagaaaactgaaactggaccccttccttacaccttatacaaaaatcaactcaagatggattaaagacttaaatgtaagacctaaaaccataaaaatcctagaagaaaacctaggcaataccattcaggacataggcatgggcaaagacttcatggctaaatcaccaaaagcaatggcaacaaaagccaaaattgacaaatgagatctaattaaattaaagagcttctgcacagcaaaagaaactatcaccagagtgaacaggcaacctacagaatgggagaaaaattttgcaatctatccatctgacaaagggctaatatccagaatctacaaagaacttaaataactttacaagtaaaaaacaaacaaccccttcaaaaagtgggcaa

SEQ ID NO: 37906 - DNA, 1097 bp, Homo sapiens
aaaaaaaaaaagctattatttattgctcactatgtgccagaaactatactaagccatatatacatgattttcaagttttagatatatatagagttatatttatatatgcatatttagaaagagttatatcgagatacacatatgcacacatacatataagcttgaagattaaactttcacatatgttaacatagttaattagctagccagggttagctaaaatggaccccagtgattctcccccctctgatatttatgcttttgtgtggtcccctcccatattatatcagagtcagtctatgtgatcagttgactatggtagaagtggtgatatgttactcctgaggctacgttataaaacacattgcagcttcctccttgctcactctgggtcattcattctggggagaagccagctgccatgttgtgagggtcctgtggaagggcccacctaagcagggacagagactttgtgcccccagctgtgtaaacgagccattttgcaagcagatgcccaagaccccgtgaagccttcagatcattgcagcctacctgcaagcttcactgcaattccacaagagactctgagccaggacctgaattctcctgggcaagggtgatgtcatgggacaactcaaggaagaagagcaggttggaggtggcactggaaattgaccaagaccacatttctcttctaaaaaagtgatatagtctgattttgtgcattagctggcttctctctaccttattctcccttccctaccaattgcttcctagtccactagcctctagtcattcaggcctccttcagggctttgaatgcaccaagctcttttctgcctcagggcttttgcgcacgttctttgctgtacttaagcagctcttcttctgcctcttgacgtgactgacttattctcatctttcaggtcttggcattcatgtcacctctacagagagagcatctccaactgctctaaaggggtagctcccctccctgtacctgtttgtttccttcaacatgcttaggataatctgtaattatttatatctttttctttacttgttagtgatgtttgaccataagattttatactttg

SEQ ID NO: 37907 - DNA, 1252 bp, Homo sapiens
agttgttagagtgctttccatttgtaaagcatcgttattttatttaattctcagaccctccgagtgagttagacattatatgttcataaatactcttagcttgcaagtaacggaaaccaccttgggtgtcttaaacaagaaaatggaattgagaaagactgactttaaaaataggggatttgccctgcaacccctgggctcagctgggcttctgaaagggcctggaaagcagtcatgactctcagctccttcctgtgtgtgctttttaatctctttgcacagctcatctgcctctccctgtcagtacaagtgcatctggctgctaacagcccaattctctgttttactggtcccaccactctgaaggagactatattccctttcgggcccaattctaaattttatctaggagagaaacataggtggcccaactttctcaagatttcactcctggtccagtcaactgcagccgttgtcaaaaatggctcctgcggaaaactatttacaaagtggctcctctatacactgggggacattaagaggaacagttgtgggttaggcagatatttcaaaagttttctatttcattatattgtttcctattttacagaggaagaaattaaaccttagtaacaccaagtgattctcaagtagtactttgtcaaatatgagtatgcagactccagatttcaagtgtgttttgagtacaccagactgttgctcatggattgctgtggacttgggaagtcaccccagtaacaccatatttgggctgcagatcgtgttttgctcatttctcatctcattgcttggtatatcattggaagttgggaatttcctctgtgtcttttacattgtttccaggttgcagctggaagctggatggacagatgcaaattttggaattttctcctggttgactgctgtgcttagagttttgatccatcagtggagggaaattgagtgaaaatgatccacatgccaatctgggctggcatctcatcgcttagcccagcgtttgtctcacatcttgtgtgtaatgccagcaactaaatctccaagctcgattagcaatggttacagcccagtgagctcacatccagaaacccccttgaaatgatgtttcatcagggagaactttaaccacaaaacctgcttctgaaccaactgaggaagacacctcaggtactgtgactctaattctggggcagttgttgaataaaatatgccatgactttatggatttattttc

SEQ ID NO: 37908 - DNA, 1087 bp, Homo sapiens
ggttgaatttctgccttgtgtgcccggttccagcacagtgcggttgtgtcgttggtcttttttagtatttcctatttccaattttctaagaaaagacagaattaaaaaaaaaatctcctagttttttattggcaaccaattcagaattgtttaaaacattgtgctggccaaaacaaaaaacatgtttgccagccagtagtttttagcctctgcttccagagtgttaaggacaggcctaaacatcctggccaagctttaatggatttgcatttttgtactctggatgtaagttttattctgcctctcctctaagactacttttagatgtatcttcctcctcattcctaaataatcctcagggattacttttcctcactcagtaattttccccctgcaggcagctattgcttccagcttcacatatatggcttagaaattttatggtctttttttttttttttttcatttacttttttttgagatagggtctcactatgtttatcaggctggtcttgaacttctggcctcaaatgatcctcctgcctctgcctctgcctcccaaagtgctgggattacaggcttgagccactgtgtctgtcctctttttggaattaattagggcttgttaatttttttaaattatatgttttgtgataaaacatttagaagtccatgttttttattctgtactgtgtagcttaagaaatgtcaaaaccaggagtacaggcttattgggcacactagaaacaagagtgggaaagggttaattcacagacctggccagtctcctcctgtcttcaaggcgatgatttaccctgtgattctcagacttcacatgtaccagaaatctttggggcaacgtgctaacgtgcaggttctcagtccctttccccagcgattctgattcgtggaatttcagttgatcattcaggacacagtataaagttcttatgcagagagaagctgacttgaactatccctatatgactgaggtgcttttaccaggaaggggcttttatagtttcagtcatatatggatgaaaaaggtgctgtattctttttctatgaactactttgtgtattttat

SEQ ID NO: 37909 - DNA, 1050 bp, Homo sapiens
ttgttagactgttacatacatatgatatatacagtggtatttgtagtagtttcatgtcttcgggaaaggaaaaggagttagtttacacgttctgtgaagaaattaaaaattataaggaaatgcaaaatgaagtcaaatatacctttaaaaatcccttaaatcatccataaagtagtatagcatacatggcatatgtatgcagcctgtgggatcgttctcttgcacactgcagtttgtgatcagctaagccaggatcaagaaagacaagggcttttggcagatatctgggtcttcagatcacattgctttcatgagagtctctagtatgaaatggggattgaagaatcccatgtgaacctgcttgtctgcgggctttacactattatatttatagcagaaatactctgtatattaatacttgataggtttccacgctttgagaaggactgaatgagatcatgcgcatggcagcttctctaggatagcaccctgcgtgaacacagtagctgctcagttaagtctttgatgggtgtgatcctgattcagcttgatcaattctgcagtcatactggattgtgtttgaaaaggtgtccagaaaaacctggccatctgcctcctgtcttcccaggtaagtgttcctggtattgacctctgagaagccttccctctttcaactttttctcatgggagttttggtaaattttcatgaattaaaacatgaatattcaggttaccacaagatggcgtcagatcatttcaagtaatgccaggtagggggagcctcagttcaataaatctttaaagaggttgaaatatgtgcctttcatagtatggtagttagctattgcaaataaacccctactttcttctactgttcttctatggaaacttgaggctcttggctgttcaactccaaaaattatgtaagtgtgaagtatttgagtttataatgtttaagaatttctctgatagcttagtgaagtaatcagaacttgaaaaatttgatcatcatgtctccctggtgtttacattttcaacgtcttttatagt

SEQ ID NO: 37910 - DNA, 1028 bp, Homo sapiens
atgctgggaagatgaaggtcatttgttaaacgataaggtgtagcctccgttagaggaggtgacacggtggccctggtcacagaggagtgaggaggacactggttaacactttgttgctatagggggcctctttagaaggaatgtcagcttgctgatatgttcgttgattttcagtatctagactagtgcctagcacctactaggtatttaataaaaacctgagcaatgaataaatgaatgaaagaatgatttacagacctgttgtagactttgccttaggccaggcttctgggcccaaaaagtaacagccaacacccaatttttttgttagaactggcactttggagtctgggtacccttaagccactgctcctttgtaaagtctttttggattgtcatcatcaagagtcagttgatctccaccttctcagaactcacagggcactctgtctaggcgttgctgaccgtctgcagtgtcagatggtgacttctgtatgtgttgtgtttcccgttagactctaaggtttttaaaggtgagactcactcctgcagaagcacataacacaatgccaaactcttatttacggaggtcctggcgcattgtcagcttttggtaaatgcttttcttttgttgaatacttatcttctgtgtgccaagctttgtgttaagtgctagaaaaatgtgggaggtcaccgcagaccctgttctcatggaactgatggtgtgtagtggggagattaacataaataaatgatgcgcaaatgaacacaaaattcaaattgatgatgtgtacttatgaaaggaaaatacatggtgcttgaatatagcagggaggcctgctgaagtcagagagggtgatctttaggaaaggctttcctgaagaagtggcactggtgaaatgatggctgaagcatgaatagaagtttcctaggaaggctgggtgtgtggtgtgtggtgtggtgtgtgtggtgtggtgtggtgtgtgtatgtgcgctcatgtgtgctttccatactttatcatgtttac

SEQ ID NO: 37911 - DNA, 1068 bp, Homo sapiens
gaatcttgaccttgccacttactagctgtgtgaccttgtgctgatttttaatctttctggttctcagcttctcttttgtgaaaaagggtacaaaagaactacttcagggatatagaactaacgtcgatgaagtgcttagtacaatgcctaatacatagtagagattcagtgaatgatggtggttgtggaagagaaaatgtagttattgttagtgtccatcattggtgttgatatatgtagttgtagtcatctttacctaggcatttggttataagcatgagcttgtacagcttttctttcatatttgagtactccttagtcatgattttaaaataccagaattagatctgtctttcattgggcattgaaaacgtagcagagattcctcctccctcagcagtattcaagttaaacaatcattttcttgttgttttcctagcctggtgtgtccgtttctctggtgaatccccagccatccaatggccacttctcaaccaaaattgaaatcaggcaaggagataactgtgattccataatcaggcgtttaatgaaaatgaatcgaggaattaaaggtaagttgttccccaaaactcccatttgtcagtagcttgtagatttggtgagttctaagcagaaaggaaaaagaaaagaaaccggcttgcttatggacagctgtgtattattatggaaaaagtactgggatcagaatcaagaaaactattctttttgggactctgtggctaggtagcttagtggctttgccatgtcacttaagctcaaaactgatttttcatttactaatgtgaggacaatagagggattagatagttttcatctttctttctagctctaaaattgtaatgagtgatttctgtctctcagagatattcagaatcaaggaacacatacccttaatattctaaactaacctgtccagcaggtctgttccttgagaaggaagagaaacagagtaaaagttattgcatgtcttccatgtattaaccatttaatccttttacagttctataatgtagagggtattcttattatttcccttttatagatggt

SEQ ID NO: 37912 - DNA, 1041 bp, Homo sapiens
ttaattcactattctctgaaacagctttaagaaggtggtatctcagaaaattaaaattttgttttttttgggtaacttaaagggatattttcacacatttggctgattccctgtaaagtgaattctttgggcttgcatgttaagtcagtctaaataaacaatcataaaaccgtatttattttataaatctgaaaaccttgtgccttcccatcttttcagtgctgccataatcttataatactttaaaagataattatttggagctagtaaatttcattaacaagcaaatgtaggtaaaggaaatcatgagtccaaggcctttcctttaactcctgaaatctgaagattttatcagttgagagaagaatgattactttggaggaagtatgttttccaacatattcttactgtgattttgtttttccataccattttggctattaggaaaatctggagaagatggggcctcgtattctggatttgcaattagaatttgatgaaaaggctgtgcttatggagaatatagtctatctgactaattcgcttgaggtaagagggccagggattgtaataaccagttaactgtagttaaaccataatccagctcttttattttataataaacctttttataaatttcatcttctgtgtttagtatctttgttaaatatattagtcgaaaatatttttggagagaagaaaaatgggtgagtataaaagttgcaggaaaaaaagtgatatgtcatcttatttcatcaattcttaatttacatataatcaattatacattaaaaaactgtatatctggctattctactgcaaattatttttaagagaccttatattcaaatgctttccaagcctctcatgttatggagtactctgaattgttgccttttttcccccctcccttttgatttgcagaattggattaattataatctttggtttagaattgctgcactgatatattggttcatgatatattatggttcatgatatattatgatttggttcatgatatattatgattgttccatg

SEQ ID NO: 37913 - DNA, 1071 bp, Homo sapiens
gtttttaacaggtcagtagctagggattcttttcacaattgtggtaacagtttcttccaagtgtccaaaagcagacattatataaacttgtatgatagttgtgtaattttttattttaatatgactaataaaatgcttttagaaatttgaaaacaagtttttatgagaccatttagtttctgaacaggagaaatattcaacacaaatcacttctttttctcttctaaactaaaaagtatgtgttgttaatttatagagaataggagagttccttctgcattgttcattgagctttcacttccccgtgatgctagggctggacacttttctgctgttctctaaggattgatagaggccaccattctatgcctggtcacatctactgttctgccttattcttgagacttttttttctacattactctccctccttccttttcttaggccaataacggaaaactgcctgacaacaaagtcattgctagtgaactaggcagtatgccagaactgaagaaatacatgaagaaagtcatgccatttgttgccatgattaaggtaagctgtggaccttatgcagctgtgaccacatgagcaatggttagatgggacaatagaaggatggggaaaagccttggacatagtctcctgccagaaatctgctaaaatagcacttttcaatcaatgactgagagaaatgatctatcagattttgggtttacttgtggaattgctgagtatgtgaaaaatattattgtgggagaaaaattggtttagaatggctgcactgaactattcccttcatattctaccttcccttctttcaaactcttttggcttacattaggcttatagaggcttgcatttcctagaccctattcctggaaccaggattcaacatttgtataggtatagcttaacagggtaaacattggttatagtggttagaccagggtgtctcagcatagctctgttggtattttgggctagatagttcttgtggggcactttcttgtgcactgtaggatatgtaatggcatccctggcttctactcattagaagccagtagaact

SEQ ID NO: 37914 - DNA, 1032 bp, Homo sapiens
tgtctaacccagacagtataggctaaatcacagtggactgagtgtgagtctggaggtcctctcctagctgtgtcactgatagctgagtaacccaaacaaggcactttatcggatgaaattcagttttcaccgctctaaaattagtgtaatatcttttcctttccgtattttgaattcttttttgtttttatctggtcatggccaacctagttaattttatttggctcatttggtttatttatattactgttattaatgattgatcactgactctctatttcagatgtcaaaatccacaggcaacttcctcactttgacccaagctattgacaaattttcagcagatggtgagtaaacatttttcttattgctgttctgtagggtccagttctcagattatagaagacacgttaaaattggtgttttaattttactttctgttttgcttttaacaaaattttaaaatcttaatgtttcctttgtggatgagcaacataatatttaatatataagaattgctgacatgatgtgttcaggaacaaatcaagctgaagttagtttgagtcttcctttaatgaactcaatatcattgctaagattcaagacttgttttgtagagatgttgagtatgggccaagcgcggtggctcacgcctgtaatcccagcactttgggaggccgaggtgggtgtatcacctgaggtcaggagttcaagaccagcctggccaacatggtgaaatcctgtctcaactaaaaatacaaaaaaaaaaaaaaaaattagctgggtgtggtggcaggtgcctgtaatccaggctactttgggaggctgaggcaggagaatcgcttgaacccgggaggcggaggttgcagtgggctgagattgcattgcactccagcttaggcaacaagagtgaaactctgtctcaaaaaaaaatgttgagtatgtaggaagcttttccaagatatttcctctgtatttggtattccattcttattaactgagacagagtcttgctctgtcacccaggctgga

SEQ ID NO: 37915 - DNA, 1286 bp, Homo sapiens
aagaaatcataatccaaagctacccagctaatgaagatagtacaagtatgcaaacccagagagattggctccacaactcttgctctcaaccccccatatgatctcattgctagaatgaatgaatgacatgtacatagtttgaaaatttaaagaatacataaaggcaaaaagttaaaagtgaactttcatccttgcctgcacactactctatttcccaaaattcatcatgatgctattggtttcttgtgattttatataccagcatctgatatctctatttgttaatgtatataaagataccacattgtttacactgttctgtcttgttttcacatgtatatgtgtgtatatatgtgtatatatatgtgtgtgtgtatatatatgtgtgtgtgtgtatatatatgtgtgtatatttatatgtgtgtgtgtgtatatatacatttttttgagagggagtcttgctttgtcgcctaggctggagtgcagtggcgcgatcttggcttaccgcaacctccacctcccaggttcaagcaactgtctgcctcagcctccccagcagctgggatcacaggcgccagccaccacacccggctaatatttgtatttttagtagagatggggcttcaccctcctggccaggctggtcttgaactcctggcctcatgatccacccgccttggcctcccaaagtgctgggattacgggcgtgagccactgcgcccagccttcacatatatttttaagatctttttatatccatacgtgtagccccacctaagtagttacgtcattgtatacctgtatcctagtttatgtagccagtcctttgatttgttttcacttcccattacaaaaaggactatagtgtatatccttgcacttttatcttagcaagcctttatgagtctattagcttttacctcaaaattttaagccagaactatcatctttgtttttttattttctatctttaaacatttatctgtgaagtgacaaatggcctacagctgtgagagcaaatggacatctcctcctgaactctgagaaggtaaggcttattgcatcttaaaagtttaaaattctgtggaaggcttttcagatttaggttgttgcacttttttttaaatgtatgtaagaaataatgtgtccaggtgtggtgcctcatgcctgtaattccagagctttgggaggccaaggtgggaggatcacttgaggccaggagttcaagaccagcctggacgatatagtgagaccccatctctaccaaaaaattagtaaataaataa

SEQ ID NO: 37916 - DNA, 2475 bp, Homo sapiens
aaaacatggtcagttttctagtggaaatttttcatggcactataaatctttagtaacaagattttctatgtttagtctttgtatatcttttttttttcttaagcagtagtttataagaaggataaaaagctgccatagggctgtgcacagtggctcaaggctgtaatccaaacactttgggaggctgaggtggaatacttgagcccaggggttcgagaccagcctgggcaacatagtgagaccctatttctataaaaaaattaaaaaattaactgggtgggttgacatgtgcctgtagtcccagctactcaggaggctgcagtgtgaagtagaagggtcacatgagccaggaggtcgaggttgtagtgagccatgatagtgccactgcgctccagcctgggtaacagagcaagaccctatctgtcaaaataaaaacaaaacaaaaaaaacataaaaccccaaaaaactgtcataggaagcccaaccttcaaaccataggattcgaaactgctgaccatcttttgtgtttttttttcctttttgttcactttttaattttcactgaaatgaaataatcagtagctagagaaagtgatccacttgatgaagattcatgcctttttaaaagcaggtgttacatagaaggaaaggtagaagatgactgaccctgggaaggcgggcaagacataatgaaaatgtgggctttcagttattggtggtatagcatttttttaaagtaatttttatccttgaggaatgaagattgatttgacatagtatctaatgtatgtttatttaccttcctttagggagatgcacttatttacatggaaccagagaaacaagtgatgtccaggtcgtcagatgaatgtgttgtggctctgtgtgaccagtggttagtctcttatagcaagaaaattcccctagtcaatttgctcacctttgacttaaaaaaaaacatatcaatttgtccactcccaggtacttggattatggagaagagaattggaagaaacagacatctcagtgcttgaagaacctggaaacgtaagatgggagaaagtgatgaaggaggaaaaaggagatgaaaaatgtggaaacagtaaagttgaaatgcaacaaaaaaagtgaaccagtaaagatacactttgtcttttgctcttttctagattctgtgaggagaccaggaggaattttgaagccaccttaggttggctacaagaacatgcttgctcaagaacttatggtctaggtaaacaaacttgaaatttttctgtttggataactttgccagttacacagaaaatatacatttttacctttcccccctgccctcaattctagtgttttctgaattgaaagcagtaagtttcctctggatggtcatgaaaactaggatatagtccactatcatctactgtgtggtagaaatatgccctctctatatagattttgtggtgtgacttttttatggagagactccaagcttcaaccatttgtcttttttttcttttttagagacagagtcttgctctgtcgcctaggctggagtgcagtggtgcgatctcagctcactgcaacctctgcctcccgggttcaagcgattctcctgcctcaacctcccgagtagctgggattgcaggcacccaccaccatgcctggctaattttttttgtacttttagtagagacggggtttcaccatgttggccagtttggtcttgaactcccgacctcaggtgatccacctgccttggcctcccaaagtgctgggattataggcgtgagccaccatgcctggcccattttgtcttttatctacaattttatttttattaattattcaagaataatttaagagcttcctaaataagtagctttgtaaatgttatagcccccttcttaaaaatgtggattctatagatgaaatgtctctcaggttcctcatgcgttactttttatttttcaggcactcacctgccttgggatgagcagtggctgattgaatcactttctgactccactatttacatggcattttacacagttgcacacctattgcaggggggtaacttgcatggacaggcagagtctccgctgggcattaggttggtaaacagataagggaaaggagcataatttgtcagtaagagttgtgatatttgatttatgtatttaaatgttttaataagatttatttcacagaattttgtcatgatatttttgcttttttactattgaactgggaaaaattaataaatagccccttactgtcatcatctattcttcattcttatggaagctgttgtccttatttgttcctgtaactacattaagaaagagattcctaatccatgtttcgattcaggtactgattcttccaaagaaattacatatatatatatataaaatagtttgttttatttttaatacagaccgcaacagatgaccaaggaagtttgggattatgttttct

SEQ ID NO: 37917 - DNA, 1023 bp, Homo sapiens
aattagaaaaaatgtagaaaaatttaacatagtttcagctatacattgatttgagagcttaatatgagaatgtattctatttccaaatttctaatttttgtttttatcatgtcctttgcctaaaagcattttcagaaattgtctttttcgtgccctctaggaatctctatggagtgaatttcttgacaagatatttcaaattagttcatattattatgcagtaaacttcaaagatttattgaatggagaatacctggtcccttcttttgctcttttagttaaggagttcatattttagataagcagttttattcagtccattaatttatttattaatgtctactaaatgccaggtgagttcaacaaacatgttctgaaccattcttttctcctaattgtgcatatgttaatgtggtttatatttccatggaaagaaggctaggctagagaacataaaaatccaaacaagttattaggtgcttcagagtcaaatgaagatttttaaggacatcaacaagaatgttttttagtttagctttcctacatttttctggataaccaagaattggttacatttcttttttttgaagtgacacatattttgaatgatgataaaagcaacacttatgtagcacttatatattaatttacttaattctgaaaataaccccattctgaagtaggcactcttatctccaatttacggatgaggaaatggaggcacaaagagattattaactgatttacttgagattagccagatagttagccagtgggaactggaattcaaactaggtagcctggctctgggatttacatttgtgtgtgtgtgtgtgtgtgtgtgtgtgtgtgtgtgtgtgtctatctgacggagtcttgctctgtctcacaggctggagtgcggtggctcaatctcagctcactgcagcctccaacttccgggttcaagcgattctcctgcctcagactcctgagtagctgggactacaggcacgtgccaccatgaccagctaatttttgtat

SEQ ID NO: 37918 - DNA, 1050 bp, Homo sapiens
gacagcacatctgtttaaagcatggtttggtgaatgttttaagcccactcttgagacctactgctcaggaaaaaaaaaaatttctttcaaaatattactgttcattgacaatgcacccaatcactcaaaagctctgatggagatatacaaggagatgaatgtttttatgcctgcaaacacaacattcattctgcagtccatgaatcaaggagtcatttgacttgtaggtcttcttatttaagagatacattttataaggctataacagtcatagatggtaattcctctgatggatctgggcaaagtaaatagaaaaccttctggaaaggattcattgttctagatgccattaagaacattcatgattcatgggaagaggtcaaaatatcaacattaacaggagtttggaagaagctgattttaactcttatggatgacgttgaaaggttcaagacttcaggggaggaggttactgcagatgtggtagaaattgcaagagaactagaattacaagtggagcttgaagataagcctgaattgctataatctcatgagaaaacttgaatggatgaggattcgcttcttacggatgagcaaaaaaagtagtttcttgagatggagtctacttctggtaaaggtgcagtgaacattgttgaaatgacaaagattttgaatatcacataaactttagttgataaagcagtagcaggttttgagaggattcactccaaattttttttttttttttgagatggagttttgctcttgttgcccaggctggagtgcaatggcatgatatcgactcactgcaacctccgcctcccgggttcaagtgattctcctgcctcagcctccctagtagctgggattacaggcatgcgccactacacctggctaattttgtattttgtattttttgtttgtttgtttgttttagtagagacggggtttctccatgttggttaggctggtctcgaactcccgacctcaagtgatccgcctgccttggcctcccaaagtgctggaattacaggcatgagccaccatgcc

SEQ ID NO: 37919 - DNA, 1028 bp, Homo sapiens
agtgcagttgtgtgatctcagctcactgcaacctctgtctcctgggctcaggtgatcctctcacctcagcctcctgagtaggtgggactgtaggcgcacgccaccacacccaggtaatttttctatttttagtagaaatggggtcttgttatgttgctgaggctggtcccaactcctgggctcaagtgatctgcccaccccggcctcccaaagtgccgggattataggcatgggccactgcacccagcattgaaaaaatttcttttgtagaaatgaagtttcactgtcttgcccaggctagtcttgaactcctgggctcaagtaatcctcccacttttgcctcccaaagtgttgggattacaggtttgagccaccatgcctggccttaatcttctcaatatactttaaggttaacagcttttaaaatttctcttttacagctgaggaaactgaggcacagagaggctaagtaaccagttcaaggttacatcactgggaattgactgggcctgggcttgtttttaggactttctgattcaaaagtcttttttccttgcttattaagctatattctaatggatatatatatatatatatatggatatatacatatatggatatatatatatatggatatatacatatatggatatatatatatatatggatatatatatatatatatggatatatatatatatggatatatatatatatatatggatatatatatatatatttgagacagagttttgctgttgttgcccaggctggagtgcaatggtgtgatctcggctcaccgcaacctccgactcccgtgttcaagcgattctcctgcctcagcctcccctgtagctgggattacaggcatgcgccaccacgcacagctaattttgtagttttactagagacgggttttctccacgttaggctagtcttgaaatcccaacctcaggtgatccgcccgcctccgcctcccaaagtgctgggattagaggtgtgagccaccaggccccagcctttttttt

SEQ ID NO: 37920 - DNA, 1026 bp, Homo sapiens
ggttgcatttaacagaagtcaactcaagttggttaaggaggaatttagtaataaagtggaagttggccaaaggcgatggctcaagcctgtaatgtcagcactttggaaagccaaggctggtggattgcttgagcctaggagttcaagaccagcctaggcaacatggtgaaaccctgtctctacaaaaaaatacaaaaactatctgggtatggtggtgcatatgcctgtagtcccagctattcaggaggctgagatgggaagattgattgagcccagtaggtcaaggctgcggtgagctggtgcttgcaccattatgctccagcctgggtggcagagggagaccctctctctctcacacagacacacacacataaatacagtgaaatttcatattacccatgaccgtagggtaggagatatgactaggcttcatgaggccctacatacttttgcctttgtgggtgggtcctttcctctgtaaaaatattagaaattatattttacagaccgggctgggtggctcatgcctgtaatcacagcactttgggaggctgagacgggtggaccacctgaggtcaggagtttgaggccagcctggccaacatggtgaaacctcgtctctactaaaaatacaaaaattagccaggtatggtggcacgcacctgtaatcccagctgctcgggaggctgaggcaggagaattgcttgaaccccagagatggaggtttcagtgagctgagattggtcttgctgtgttgcctaggctggagtgcagtggctccatcttggctcactgcaaccaccgcctcttgggttcaggtaattctcctgtctttgcctcccgagtagctgagattataggcgcatgccaacgcatccggctaatttttgtatttttagtagaaatggggtttcgccatattggccaggctggtcttgaactcgtagcctcaggtgatccacctgcctcggcctctcaaagtgctgggattacaggcatgagccaccaaacctggccaaaaaaatt

SEQ ID NO: 37921 - DNA, 1051 bp, Homo sapiens
tagatgatcatggaactaattagtattgggacttaatttttcattttaaaattataagttaattcactttttaaatttaattttgaatttcataatcgagtttgtgaccatttgtatctgtatcaagtccagctctagctctaccacttacttgctatatgagtttgatcaagttacataatcattatgcctcagttttctcatttgtgaaaatggccataataatagtatcaacctcagcaggttgttatgagaattaaataagtttgtacaagtaagatatttaataattttacttcccatcattattactattgttatctgcagaaacagaatcataataatacattcatttttgaggatatgttaattgatgctactttgtgatcatgatcttaatccaaataaattaacttcgggtgtttttcaggataactgtctgctcaaaaacctttacaaatattttcaagagtttgagtcatcttcttcattatagcatgttaagacaaccctttaaatgagattacttctatagtttgtaattactttgatctttgcaccttcctagggcatcttttatttattctgtaatttagtttctatttatacgttaactttgaggctctgctttcatctgttctttcaaggtattctttctattcctttgaataattttccattttgagcaatttgttttaggattttaatctttgtttcaaatcttttgctgtgatgaagttgtttcaattctaagaaccatctcaaaaaccatatagatgccagcattcggttctgggtatattcttcaacacttgacttagctttgcttttgaagtgctattattttaacgttttattttgaaatgattacagactcacaagaaataacaaaaatagttcagagatcccttgaacacttcactcatcttttgccaatggtcacatctcacataacagcaatatgatattaaaaccaagaaactaacatctgtacaatactgttaggtaggtggcagggccttattcagatatcaccaatttttgaaggata

SEQ ID NO: 37922 - DNA, 1044 bp, Homo sapiens
gcatcttggactctcttggctgccttcttctttccaaaggtaccatcttcttacaccatacttcttagatgttatgatgtgtgtctaaccaataatcagttgtctccttctttcttactgaggcaaccctgatttttttgttgacagaggcaatgtgcccagcttaaaaaactacatgttccagcctcccttacagatgtagttatgcagagctgaatgcaagttctagctgatattaatgtgtataagctggagacggagtaaaaattaaaatgtcagagtgtgtattaagaagacctatgaactccctctaacagaccaatgaatacaaagggaatgtgtgaagttctgtgagactgagagatatcttatgtagtgcataacttaggataaatcattaattgaaaaacatttttatgagagcaataatgaaaaagagagctcaaaatgtaagatacaagagacatgaattctggtcctggctgtaaaaagcaaaattgtgattctggacaagctctaagaaaggcagtcttccttttctctctgcttgcctttaacatcttttctttatcttcgcagttttgcaattttagtaaagatttagggccgggcgcggtggctcacgcctgtaatcccagcactttgggaggccgaggcgggtggatcatgaggtcaggagatcgagaccatcctggctaacaaggtgaaaccccgtctctactaaaaatacaaaaaattagccgggcgcggtggcgggcgcctgtagtcccagctactcgggaggctgaggcaggagaatggcgtgaacccgggaagcggagcttgcagtgagccgagattgcgccactgcagtccgcagtccggcctgggcgacagagcgagactccgtctcaaaaaaaaaaaaaaaaaaaaaaaaaaaaaaaagatttaggtgtttttatttttccttctctgcactcaatgtactttctgaatctgaggattcacatctttcaacaattctggaaatatcacagccataaattatctctgtgaatattgccg

SEQ ID NO: 37923 - DNA, 1015 bp, Homo sapiens
acgtgtgcaccagcacatccagctaattgttaaattttttgtagagatgctgtctccctatgtttctcaggctggtctcaaactctcaaactcaaatgattcccctgcttccacctcccaaattgctggaattacagacatgaaccaccacgtcctgcccatgatctgtccatttctgatagaaaagcgttaaaatttccaactatcataatggattcatctctttccccttgaagttcttttaggtttttgcctcatgtattttgatcctctgttgtttgacacatacacattgagggttgttatgccttctcagataattgattacccctttatcattatgtaatgtccctctttatttctgataacttcgcttgctccgaggtctattctggatgaaattaatatagttatttgcactttcttttgattagtgttagcatggtatttctttctccattccttttcttttaatatctctgtgcctttgtacttgaagtgggttttttgtagttaatataaagttaagccttgcttcttgatccattctgacaatctctgtcttttaactggtgtatttggatcattgacaagtaaggtgattattgttacagatggattatagatggatatataccgtatttgttgatgtattctatttgttgtccttgtttttgttcctacttttgtcttctataatttttctgttttttgtggttttaactgagaattttatatgattccattttctcttctttcttagcatatcatttatacttctttttctcaactttttaaatggttaacctacagtttgcaacatatatttacaaataatccaagtctactttcaaatagtgctgtattattttatgagtagtgcaagtactttataatgataatattcctaattattttctcctatctcttgtatcatcactttcatttatttcaattatacagaagcagatgtatgtacatcagcatatataacagaatacattgttgctattgt

SEQ ID NO: 37924 - DNA, 1059 bp, Homo sapiens
tacatacatagcatacactcccacaccagatatcaatgccaagttccaaagttagacttttctaattctatttgccagagaatccaggaactagaagctactttgtacaatgctctacagcaagaaactgttatcaagtttggtgaattattaagtgaaaaacagcaagaggagctgaggacggcagtagaaaagttacggcggcaaatgctgaggaagagcagagagtatgactgtcagattcttcaggagagaatggagctcttacagcaagcccatcaggtgaggactgagtcactgcctctgcgtagggttagtactagcaaatggaacttagtactaggtacacggtattgagtatgggtacggagaagcccaggagatacaagttattttcagagagtaaaataaataaccattgttttctaccttcatgcacatacaaaaatgacagttttataataattcaatcttgagaaaattggcatttcagaaggactgaatactgctactatttttagaactacgttttcatgaaataccctttgaatttcatggtgtctgattatctgccttatgcagggaagcaggacactctccagggcaaaaatagtgcttcccatgtattgctcactccagtccgtaaacaagcctgataataatccgaatagtgtaaaagagagcaaggaccgttcacattacaaacatcaccaccaacaaagcctggcagctgctgtttacttactgacatttgctttatgtcagtaactaaactaaggactctacttacatcatttcatttaatcttcataatagccctatgaggtaagtatttttattatctcaattttggagataacaatactgtagataagaatgcttaagtgatttgcccaagataacacagatggtaagcaacagtcaggatgacagcctaggtctgctgaactccaaggtcagtgtgtctaaccactgtattgtaccgtcatccatgacttatgtgattcatcagcaaggtccaaaataggcacccactactaatttccagcaaaaattttt

SEQ ID NO: 37925 - DNA, 1031 bp, Homo sapiens
cttcatacaaagaaagtcctactcttgaaacactagcatttgttgcctatccccagtgtacaataggcatcacattttagctgatgctgtaaggatagagccatctgtggtgtttgtatttctggaattctatttttgttctgcgattggcttttgctattgttgttaatccagaaattttagggttttttttatgagtaagatgttcaagaaaactagttcatttatggctggggtaaaaaatgtttcttaattcctctctattccccaagccactcagccttcatcccacctcacttgcctctctgcctaccctcttttcttgaggtcttgctgttatttaaagagtccctctctaattgtttttttttcaccaatgtaaacaacttccctagatctttcaattactttttcttgccctggaattctctctacatctgttcttcaccatttccacccaggctagagcctgattctgtcttatttaacaattgtacacattttcttactgtaacccatcttgacttacttgaacacaactgtgctcatgtcaacacatactcaagccagcagcaattctttcaacctaccaaatcagaactttaactgccgttattttctttaaattttctttaccctacatttcaaatgtgatatgctttagtgtttttcctactgtatgtaataatagatgggtgtatattttctcttttattgattagatcatagcatgagcaaaggcctgggggatagaagagcatagacaaattacaggaaaaggtaggcagtgaatagatcttatatggccaaatcttagataacgtagattgtgataaatgaggttcaagccagactgtgaagagcctttcagagctgaggaggtggcatttttctatggcccacagagtaccagtgaaaatccagattatttttgtacaaccactttccactttgagcaactctaggaagctatattagtccattctcatgctgctatgaagaaatacctgagactgggtagtttatgaaag

SEQ ID NO: 37926 - DNA, 1057 bp, Homo sapiens
atgtgtgttgaaaaagtcttctctcaaagctgtctacacctactcaccacacactttatccacagctgccctagttgggcttccattgtcatcattctaatgatactgcatctgtcaaatccttaacaaactatgtcccttgatgcttaattctaaagtcatttttttctctttctttttcttatattgacctctcagataaaactgttgaccacacttttcttattaatggctttcccttcatggttttgataactacacactgagtgattttttttttttttttcactgactgcctcttctcttgtccctcttctgctttccatctctaaacatttgggtttaccaaggctcagtgcttgacttccttgttttctggctacattctccccaggtaatctcatgcatctgcatctctaggataacaccagtctgcagtcctgacttcccctcagaagtccaggctcacactcagttgttgacttaacatttccactaatgtgtttacaagtctttcgatcttcacaggggcaaagtagacttctttactcatatgcatgctccaccccagcacaaacgtgtccttctttctctccattttagtaaatggcattaggttttaaagccaatttgaagagctgtccttgatttctttctttcctttataactctcattcaatctgttaacaatcctgttgcttttacctcaaaacattccctaaatctgtttacttttccatctctattgccaccttcccatgtagggctgccatcttcccctgcctgaactacctcagtaacccacgactgggactacctgcttctctcccctgtatggtaaattctcctcacagagaacacaatgacccttttaaatattgtcaaaattaccaaatcctacgaattgactttgcagactcctctcctgatctcttcctcatgtcttcctcttcctgttaatcagacacacttttcttgacttgcacttctccttaccttattaggttagctgcttcttgtcattcaaattgcagcttaagtgtcctgttttaaggga

SEQ ID NO: 37927 - DNA, 1077 bp, Homo sapiens
tgtatgaatgggatcaacctgtaaggggaaggggtgatggacagtatggagtaggaactcattcaaagatgccccattaatatattatttaaaatgtgtctctaagtatagttgtccatgttaaatttcacttttgcagtatcctgaacatggcagtggtttcacaactctatagcttggtcgaaactcacagatctgtacacccaaaccagcaaattttactacatataaatctaaaaacaaattataaaattttagtgttgtcaggattttcccagtccttcatactcttgatgtctgtttcattgttttggctgcccttgcccgaaagagctgactcgggacactgttttctagatttcctttccagtaccctgaatgttcatctatttgatttttattgataataaaatatgaattagttaactgcagtctcaaacataaatagattaaaccaaacaataccgggaagactggaggacaaagaccagctaacacagaaaggggccaggaggctcttatctggactgtgataactctgctttgccaccctttatctgcctctgttctctgctgcttcacacggtcggcttttcagtgttcaaacagcaggttaatatggagtttgccggatagtaagtgattaagaacgccctattttgaattgatgtggtcttatgttcccttgctcaattctgttaattccttttgaactaggctgacttctgggcagctgtttcccagttagatacagtctgaagcctctctcctccttctctggctccacattcattttttagttacagacatatgatgtcactgtgtctgaacacctgttctgctttacaacccctcctgcatgtgagtctacttcttcccaagccatctcctctcataaaaatgagtgatcatcgtttagttcacatggaagcggtttcctttgacatccaaggacccttggttcctgggcaactgtgacccctctggagaggacagatgctcaagggaaaatccaactgtccctgtgttcatgtttccacccattcacctcttaccaagtgagtgtccaccctaagc

SEQ ID NO: 37928 - DNA, 1025 bp, Homo sapiens
tgtttactaccctaaccatagttactaagcagagttttatcataataatatagacagctctcaaagtattgacattcagaggggattacaaatattatttttctatcatattgacctaccatgtccacagtcttccttgaattaccttccagttttactgggctgcatctaccgtttatgtctagtttgactttttctgagttcaccaattgctgctaggaatgtgctggtcactcagcagcacacccacatcacaggggaagattttgaaatacctggacagtctgaacacactgctctgaatacactcaattctaagaagtaccagggaaccgcatcttcttgctgaaatcttgaatttttgtcagcttttttttttactgtggacagtaaagctggaaagatctaaataacccaacaggaaatgcggatgaaagtgcaagagttggtttgtggtcatctggagtccatgtctccaagactgctggaccttcaaattctgcaacttgttagatcatctggatgatagcacaactgttagaagacctagaagaatacagcgttgctatgactcagtggtgttgaatgcagaccatctaccagctggggaaagaatcaattataaacaggtattttaaaactccagaacgtcagaaatgtgtagcagaatgaattctgttataaggaagacaaaacaattcagtctgttttttaatgcagtttaggaatagtgtatacctcctatacttaaaattgtcatttatctttcccaactttaaatactcttttagtttctatagggaaggaagagttattacaggttttttttttttaattattctttaactttagatactgccaatctgatttaaaattctccaagcttaattctgtgcaacaaacagaaccacacaagcagccaggcactgtggctcactcctataatcccagcatttttgaggctagatgggaagatcacttgatctcaggattttgagaaccatccggacaacatagggagacct

SEQ ID NO: 37929 - DNA, 1031 bp, Homo sapiens
acttttgttgaagttaaatagcttttttatcacaaaatttaagttcataaatgttcatgctcctgagcaaatgaatcttaatcattcagtttagtatacagtgaagaggaagtattggcatgaataatcaaaaaacaaaaaacatgctttgtaataccttaaattatccacatgtatcatctggataatcatttaacccttttccatactgcccagctttattccaggaaccacctccagctattaaaaaaggtttcagaaattcagagttatttttattcaggcaaagaagtaccaagtattgtgactagttagataaggggtggggggaagacagtagatggtggatcattaggcatattataagaataaaactagttttatagtgcctcatttttacttacccattcacatattttgcttacatttcgtagcatcatttaataatttacaaagaaagttgtattacattgtttagattttgtacatacaggttagctaggtttttagtaaagtgaccttgtgaatgttttagaagggcaagggaaattatgacccctggttaggaaaaaaaaaaaaatgctgcaagtactaaacactaagattagccacagtgattttgaagaaaatgtgcctctattgaatggaattatggaattatccccctactttttttggtttttggttttattttttgttttttttggggggtttttttgttttgttttgagacggggtttcactctgttgcccaggcaggagtgtagagtgcagtggtgcgatcttggcccactgcaacttccacctcccaggttcaagcaattctgtctcagcctcccgaatagctgggattacaggtatgcgccaccatgcccggctaatttttgtatttttagtggagatggggttttaccatgttggccagactggtcttgaactcctgacctcaagtgatccacctgccttggcctcccaaaatgctggcgttataggcatgagccactgcacctggtcaaattatcccctattta

SEQ ID NO: 37930 - DNA, 1034 bp, Homo sapiens
taactactactagcctactgttcactggaagcttcaccaataacatgattggtcaataactatatatatatatatatatatatatataaagctctttaccctcatcatcctcactttgggctgaggaggaagaagaggggttgatcttgtttgggtagcagaggcagaaaaaaacctgtgtacaagtggacctgtgcatttcaagccccttttgttcaagggtcagctgtattgagtttctgttaaaacctttttttgtgtgttccattctaaattgaattaagttctccaaaggaacaatttaaaaatttttttaaattttttttatatagatgggctcttgctatattgcccagactggtcttgcattcctgagctcaagtacttctcctgcctcagcctcccaaagcgctgggattataggcatcagccaccgtgcaatgacccaagaaacaactatgacataccgaaaaattctttatctagataggttttggaggtttgagctgtagatctgccatgtgatattgactgggtcatctacagtcagtcagttccttaatgtgtgtaagcccatctgtttcctcatttagaacataaaaaaaggattgttctaatgggaaggagagtgctgaatagaaagatttagggctgcctacccttcttttgccagctaaatactcatttccatttgcctttgcatactgagcttttgggtagggttttgtttgaacaagggttccctacttaaaagtgtcactggcctcattgatcctaaggacttttagtcctggaattttaagacctattttcaaaggatagtagctagaaaaaaagcattccagcagtttgatattgtgtctactacttgccttcctttcttgtttttcctatttttctttcatcttttattatttttatttttagcggcaggttcttgctctgtcacccgggcggagtgcagtggctattcagaagtatgataatagcacactacagcctcaaactcctggactcaaatgatcctcctgcct

SEQ ID NO: 37931 - DNA, 1052 bp, Homo sapiens
ctgcctcagcctcccaagtagctggaattgcagagctgcactactacgcctggctaatttttgtatttttagtagagctgaggttttgccgtgttggccaggctggtctccacctcctgacctcaggtgatccacctgcctcagcctcccaaagtgctgggattataggcgtgagccaccgggcccagcctgttagcccctttttctattccagtttgtatttttcatgtcttgaattaaggactgggttgcatagtctttacatggaaacaactcaaataaaactgtccttaaaaagagttccagccaggcgtggtggctcacgcctgtaatccaagcactttgggaggccaaggcaggcaggttactttaagtcaggagttcaacaccagcctggccaacgtggtgaaacctcgtctctactaaaaatacaaaaattagctgagcatggtggcacgtgcctgtaatcccagctactcgggaggctgaagcaggagaatagcttgaacccgggagtcggaggttgcagtaagctgagatggcgccactgcactccagcctggtgacagagcgagacgccatctcaaaaaaacacaaaaaaacacaacaaaaaaaaaaacaaagttccaatgctgatttacagttttaatggagaattgagtgataaaatgtgctattggttgtaaatgagcaagtaaatcatttggaagaaagttgcaaatttatcttatgaggtgaagattaaatctgagatgatatagatttgaagtttttaaatcattcttgcctttaaaaaaaaaacctactatgtgggaaaataaggcccctcacccctgatttgctttccattactatagtttttcctagaatttcatataaatggaatcatacgatatgaggtcatttgtgtctggcacttttcacttaacataatgtttttgagattcatctatgttgggagattttataaatttcacaaatcaggttaaatttaatgtatttgaaatcagtttcaaaaagcattaagcattgtcatttttcagtgctaaacc

SEQ ID NO: 37932 - DNA, 1056 bp, Homo sapiens
gaggacgtacggatttcgtcactaccccctgaagaggcctttgaggctggttgcctcgttttataattaccgagagctttctctttccagcttttcacttcttcttgtagtcgcgacttggagttttgctaatgtctccctcctttcctaagtgacattgaatccgtagggatgttgatgccatcatcccctctttcccctgcaggaagtggcagtgaagctagaatctcagaaggccaggcatccccagttgctgtacgagagcaagctctataagattcttcaaggtggggttggcatcccccacatacggtaagaacccggtgcatataggcgatccgctgagggaagcacggaatggggaagtgggtagaggcaggtaatgagaccagctgaatccgggtcttggtgttttagttacctgggttccctatagctggtggtttcctgtaagtcagtcatctcaattactgagtaaatttcagtttgccaacttatttcattgtattacactgctccatttcgcttccgtcattctcactcttcccgaggctttcatttgcagttatgcgtgcaggtcatctttgatccctacgcggaagggttggctgctgccttttttacggcggcacttctgatgtacttaggtttgtccagtgaagtggatttgaaggtgccgaagcgacccggcagtgtcagttcgagttgctattggagctggcttgggaaatggctgctcttttgttgtgtttttgttccaacatgtcttcctcctccgcttagaaaatggcggaacgacgtgactcaaccccatattcctgcccttttctcagcttgagttcacaaattatgcttccttgattcctcctttagcagccccgagtggattaaacctttgaaaagccaagaataaagctgcaggaggcggtgtggaggttcgaggaaggagatggcatagtgacagtgtttgtgatctctgcagcagatgtgacacgaaattgttgaattacactatgtaaaatccttcgtagttcttttaaaagtgttaattactct

SEQ ID NO: 37933 - DNA, 1067 bp, Homo sapiens
ttgaagggatcaggtggagcacaggaaaacaggagatgagaggcttgagggctgtgttggtaagggtcccttgaattctaagctgaggagttcatgcaggaatcaagcagctccctcgccccatgaagggtgttaggaatggtaccagtacatgggtagctgttggtcttgggtttcttcttgccttttggggtgcagccttcaggcatctgctgctagatccctaggcttctatcttgtaggtgctgtgagctgagctgttggtagtttctggggaaaggatacttctcatggtactttgccatgtggccacagttgatacccccccaagtgcaaggagaaagaagttttagtgaggcagaaatgagagaatacagtagagtattggatggaagaagacagggacatgaagcaggactagggtttcatttaatagccaggggaaagggattctggaaatgttttgtctgttaaccttgagtttcttttccttccactcagaaatggcacctcgaaaggggaaggaaaagaaggaagaacaggtcatcagcctcggacctcaggtggctgaaggagagaatgtatttggtgtctgccatatctttgcatccttcaatgacacttttgtccatgtcactgatctttctggcaagtgagtacctgggtggagaggcatccagctggcaaaaggctgaggaaggcaatggctgggacgggctagcagttcaggggattctctctaaagaaatgctgttttgtccaggtaagaaaatgtgcttgtccatttagcccacaaatattgtgatttcccaggggttacaagagaggagacacattcttcgtccttacagcgtgatggtcattgaatccttggtttcttgggaattatcttctttccctagttccctttgcaggagcagcagtggactgcaagtgggctctgggtgcgggttcgacggccatttagcaagttgtgacttgtgtgaaatcactcagattctgagttttggtttcctcatatgtaaaattaggacagtaatgtctaccttgtggagtaatggtaagga

SEQ ID NO: 37934 - DNA, 1009 bp, Homo sapiens
acacagcagcccctagcaccttgtcaccactctggggctctgtggaagaaagggcacttaaaactcccagtaaatcttggaataaatatatttttccttcccttgtagtttccatggtagctgaatgtgctcagatgtgagcagtcagagactgacagccatgctttcctatacttgttcaaaggatcgatggaccgtaaataagctgccattaacacatctggttactgctgtaacatgactaataaaaccgaacgcctgttccccttacccgtgtgggggacacgcagatgagtgaattggaatgtccagcagagttaccctcccaattatatgttcattttgtatattttttggtcgggggaaaaattgacctgcagtaaaaaaacctttgaccatttttatgtccattggatactttcctttttatcatcttaaaaaaagataactagtactaatcattgtagtggcctaagtgtgatttaactcttgaagtcacaccctccgaaagatgagtagaaaccagcaccagcacagcccagatcttctctttcctctccttttcctcatttattcctaaaggaatctgaccattttacgtctctacggcccaaaaaaagacaaaaataaaaattcctttttattcctgtcaactggatggaaacacaaatttcatggagctgtgtaccatcgaagaaacctggtgtctggcatgaaattactgtaaagaacttcctgtaaaacacgttctttaacaaactgaaatgaaaagcattggagcgtctgaatgaaagacgtgacctcctgctgggactctgatggtcttcagcattcaccttcgtgtgtcttcagtgtctcattgtcatccctgcttctgtttggtcttagagtgtttggatataactgaattgtagatggtaaaggaaatttgatgtgttttttgtttttaaataattaaaacgggtcaatttttcacatgttgtcatgggtttatttctagattcctctt

SEQ ID NO: 37935 - DNA, 1006 bp, Homo sapiens
tcatagacatgagaagcctacagatccagatgacccccttgctgatcagaatattaaagaccgttattacggaatcaatgatcctgtagctgacaagcttctaaagcgggcttcaacaatgcctcggctggacccaccagaggataaaactatcaccacactatatgttggtggtctaggtgataccattactgagacagatttaaggtttgtgggtataagttagagagttatttttgcctttaactgccctggaataatttatttgcaaaaactgcaagaatgatcattctgtacaaaatacatttttctgtagtctctctattgttagtatcatgctgactggaatttttgtaaaattgtcctttatggtgccacagtaataatgtgcttatgtggctgggcacagtgcctcatgcctgtaatctcaacactttgggaggatctcttgaaccgaggagtttgagaccagcctgagcaacatagtgagaccacatctctactaagaaatcaaaaaaattagccgggtgtggtggcatgtgcctgtagtcccagctgtttgggaggctgaggcaggaggattgcttgagcttgggagatcaaggctgcagtgagctgtgattgcaccactgcactccagcctaagcaacagagtgagaccctgtctcagaaccaaagctcaaagagtgcttatccatcctggcatatggtaataatgacataggattctatttgacctaacagccaagttttaaaggatggcacgcatccaagtatgatgaattatgtagaggagggagagctttgcgatgataaaactcttgtggtttaaattgttggtttttaaagagactggcatttgataaatttgtgttatttttggcttgtattatgcttggctagatgagacttctgggcagatagtaatggaaattacctcttccaaagagataaagtggagaagaaactcctgtaagtttataacctgcccttggtagcctgtctc

SEQ ID NO: 37936 - DNA, 1034 bp, Homo sapiens
actgtgcccatcctggtttgaactttttatgattaatatgtattgcttttataattaaaatgtattttaaaaattaaaaagtgtgatggagttggggaataaaatacagtataaaatgctatgttcttagaaataagtggtcctgtggccatgcagaaaaaaaataagagcagttgtgaggggaaataagtaatgaagttagagagcaaaaaatttccaagcctcttcattgcccatttcttcccatccttgaacttcagttttccatttcacttcggaaaacagatcacataacgaagaaaaattatcttagaagaaaaagggcaaacttgcccatcttaataatttgtcttctctattcattatgtgtctagtcagtgtagttgattaatttgatatgttttctgttagcttttttgtgtactgagtctgtgattttcttacagatgaacaaattgattgaatattaccagcagcttgctcagaaagagaaggttgagcgagatcgcaagaaactggcacgacgtagaaactatatgcctctggctttttcggtgagaatttggtactaaaatgatttgcaagacctctaaggcctaagaacagtgatcatttcagaaaatggccattgtcctagattcctgaatggtggatatcagagagagggattcttcaaattatagacgtttaagtccaatagttaggcttttgctatatcattagttctgtttgagttatttgtgttttgaggacatttgtgtttctttctccatcactcccctttatcttctgattatttccccagaaaggctgttaattttgtaggcactgcagagttccacgtacagcttttgtgtattacagaaagtctgagaagaaggaggtgggcaaatggtagatttcagtcatattacccctgtagcccacctttgacatcctggcagtagtggtttctcagctttagttataatttttttaacatcctcccctgtttctccaagatgaaaaacactgactttttacatagtgcactt

SEQ ID NO: 37937 - DNA, 1032 bp, Homo sapiens
aatgagattattatgtctcccaaattgctacttagaataaattaccagttcaaaagaagcaattagataaaatattcagacgtttaaaaatattacagctgaaacatttctttcacataattatttttcatgattgccttaagtgaggcaacttctaaaataatattatactaaagtgttatttctgccatttcttgcaagaggatacaatgtcaccttcagcaaggtaattgcgtcctttttgttttgaaaaaagtgattttatatgaaatatgtatattcatgtacttatcacccagtttaagaaatgaaacagccaaaacagtttaagccctccccctactttatcttcctctctgcccgctagagataataatcacaatcctgaattcagtgtttattagcatccatacatgtctttatacttctccacatatgtatgcagccacaaacaaataacatttttcacttttaagcaaatgaaaacatactgtatatatcctgctacaactttactctatcagcattatgtttctgatacacagttgattcctgtatgactcaccacagtttacttattccgtcttctcttaatgaacatttaggttgttttcattttctttgcttttgaaaaaatatagctgctggaagcaatcttgtatgtgtttcctaaggcacaagtgtaaggacttttctatataactagaagtaaaattgccagtcataagttgtgtacatccttagcactccaaaatgatttagcagtctttgctcctagtagtaatatgtaagagtaaactacctgtagctccagttccttgtcagctcttagtacttttggactctaaaatttttccagactgatggttgtgaaatggtatctcattatacttttatttttccctttatttggctagctttaccaatatataatttatatataataaagcttaccaattttaagtgtagaattctgtgatgtttgacaagtgtgtaatcacatagccaccaccataatcatgatacacaaca

SEQ ID NO: 37938 - DNA, 1050 bp, Homo sapiens
atacctttgcaaatggaggttatgcctttgttgagggctaactggacagctttattgtagaccatctgaaactgcaccttctctttttccttcagtgcagtcaatctcaattctctgtgatttctgtttaatagggtatccagtttccaaaccagatgtcatctccaagttggaacaaggagaagagccatggatcataaagggagacatatcaaattggatctatccagatgaatatcaggcagatgggagacaagggaagtgaaatatcaatttatgtttttttaattgattggtgcctgaggtttatgtttctatccttatcaaaatctcctattctttgcttctatgctgagaatttagtagtcactcaacaagtaattgtgaagcctttcagaggagttctatttgttgttgatcctgtctcttgtgtgtatatatatatgtttatatttgttgtctttcctgaaagggttttaaaggcaatagaaggcaaattcctttcaagaacacaagctgtgctttaaaaggcaatattcccagataaatgactgtattaaattaaatgtcaaatacagttactgttttagaagttcagagaaaattaagagtctaaagagatgtgagcgtatttgagaaacatttttcagagcatgcaactgtaactgctctgaatgacataaatgctgatgaggctgaaggaggagggtgaaggcaagcagtgttggagagagagtatatgaacaaaaccttagggtcaggaagatacagcttttctgggagaactttactagttttacttgacatgtatagaaagtagtttattgggagtagtggaatttacgtctgtattctcagtttgactctgatactgaatctgtagcaggatattggatttttctattatttgttagttgttaggaaaatagatggaggagagttaaagtattttgcatacagaagataccttgttttttagagtgatggtaggataataagaatgtgtagcacatgatttataatataaatgaaattaaaaggtgaaaaggg

SEQ ID NO: 37939 - DNA, 1085 bp, Homo sapiens
gagaaccctatttcattaggttctattttttgctggctgtgtggccctgagcaagtcacttacactgtctgggcatatgtccagggagataagcatgctgctgcccaaaatggttgtgggaatctgctggcagagcaaaacaggcctggagtctcttggaacgaaatctcatgtcaagggatagtgggggtcagaaggtggcccatgggtggagagccacggctgtgctcaccactgatcactgcaactcagtcctctatgagcccccttcccttctctgggcacgtggaatcccagagcaccgcatctgaaacagtggccagaggagataaggggagaggccatgagggtgcctgaatcctcccacagccgggcaagagaagagggttccaatggcttgagagttggatgatgggactcagccaggactctggctggctggggctgctggtcttgtgtctttctcctctcccgtcttattactcctatcaatatgatgctgtgagaagtggtctgggagtcaggagacctgagtgctgggctttgctgtgtctctgatgccatgtgaccccctttgctggggctccagctcctccattgtaagatggagtcaggttcagggctgtcttaagggccctttaactctgtcagcctgtggttccatgattctctctgccaggtttagtcacctagaaaccagcagttactaggatcccgtgcacgtcagcagttgtcactctttccggcttctgcagtccttttgtagagacaaggagcgtgggcagcctgaagttggactggggaggtgacgcagcaagaagaggaggacctggtctcttccctagcatctccctttcaattggtaggaggaaaacacctctctggggctgagtcacctttcgtccattccattctccacatgccccataaccctatctctttaccctggggttgggggtaaggtgagtggttgggtcctaacccagagctaagacatctgaactctaagaacttgggagcagagatgggcatgcccaggctttcattagccagcaagtcctgactggttgtatgtgatatgatca

SEQ ID NO: 37940 - DNA, 1044 bp, Homo sapiens
tcctgacctttaaaatggggatatggggcttttatgagaatggctgggataatagatacataaagacttttcaaattgtaaatcattgtctttatcattgaggcctgttcagggcagcaaggagcagcagccaacttgggattttcccagtaagcccagggagcatggtctctctgctcaggctctgccccgtcactccagggcaggccattttctcagactacctggccctgatgagaccacctcccattctcccacactcgagtggggaatcctgtctgagaacccttttgtcaagggctgtccttgagagggtggtacctgggcttctccccttcccagtcagttcatctgtgctttcttgattctccaggaaaggactcaaatgtcacagcatctcccacagcccctgcatgccccagtgacaagccagcaccagtccagaagcctccatccagtgtaagttttatttggagtcatgggtggaggttgcctggatggacctcaagtcctactgacagatacaagaacatgaagaaagagggttgaggtcaagaaactgtgttccgtctcgctgggtgatattgggcaagtccatcgcaaactctctggggcctcagcctccccattttgaaatgaaggtcatagttaaaacttaccaggaagaccctggtatgtacaaggaattcttctcacttactaagttgtatactgttaagtatcactgagtgtgcacagtgctaggaaaacagacagatgtgacatggagctcacattctcaaagagggctcagaaactatcttctacaggctgggcgcagtggctcatgcctataatcccagcacttggggaggctgaggcaggaggattgcttgaacccaggagtttgagaccagcctgggcaggatagtgagactccatctctctaagaaaaaaagtagtcaggtgtgatggtgtatgtctgtggttccagctacttgggaggctggctgaggcagaagggtcgcttgagcccaggaggtcaaggctgcagtgagccatgtt

SEQ ID NO: 37941 - DNA, 1033 bp, Homo sapiens
acagagtagtttcactgcctgaaaaatccaacccggcctttgatggatggacctgaggctgcagtttccccagcctggaaattggttggggaggactggaggtcatcataacacaaatatgtggacagttttttgtttatgtctgcaatgtgatatcatggcatctcacttcctttcatccttgggtggaattgcaggatattgccctttacagcagaggaaatgaggctcagattcccagttgttggtgagtgtggcatcgtggttcaagggcttcttatagctacatgttcactagctatggtgtgtccaggcaccctgcttaaccacagttaaatggtgatatgcaggtcactagagaataagtggaggccagaacctagcttactgagctgacggaagagcctaaaatcccattaaaggagagaacaaatggggaaagccttggcccttagataagctgggcacagttgtggggttgcctcagccttttattaagcacctgctgtgtgtcaaatgctgagctagttactgtatactcttattattttggaaatcttattataaaacaaagatgtgtttcttgttaaatcagataatcaggaagtattgcctaaagtagaaagtgagaattcccttccaactatacacatattgtttcatttaatttctttgatcttctatcaggtaggttctattattactcctgctttacagatgaggcacctgaggctcaggaaaggtgagtggctgctccagggtttcacagcccacagggtggacagagctgaggctagtgcaggtgaggccccctctcaggcctcgtgttcgcaaggttggccttgagcactttccctgtgtggacctttcttcctgcctccaaggcagcgatgtttccatggtgctggctctctctctttcctcagcttgctgctagctcctgagacttgggtcttcttgatcctgaggccagctttagccatcacccggtttctgtgtggcccatgctcctccccttgcatgtgagggaatg

SEQ ID NO: 37942 - DNA, 1040 bp, Homo sapiens
ccttccctgatctttttatgcaaagcagccccttttttcactttctgtcacgttactattttatttttctcatacgtgtatcatgctatgaaagaatcttatttgcgaatgagaaagcatatgtatagaacttagtgtctggcaaattgttatttttagtgtttatttgtttactgtctttctcttttcctagaatagaagggggtgagcagggacctccttagtcctctcgagtgtatttctgtagcgggagaagagtgcctggtggatggctcttctgagtttgttcagtgaatgagtagaataatggcacatttcacaaatgaggaaattaaggcctagagatgagaaggcaggaggagaaccagagtgctctcctagcgctctcccaagcatcatttcctgatgactcctgtgcccagtgccatgcagtgttcttgatgcacaggtgcgtaaggagctggctttgccttccaggaacttttggtcaaatggggagatgtgctatgagtgtgacctgaaaggcattgtgtgccagtaagtgccaaatgagtcggattggcataggtataactggagtgcagagtaatttgggggcaccagatggttggaggggtcttctggagggaagtgacttcaaggtcagaccctaaaaaaatgacaaagtgcagagtggaacctgggtctcttctggaacttagtagactagtcacaataactggaatcagcctctcctcggttgggagaattgaccagttggcctgggaaagaccctaaaagattttgataccagacatagaaatgttgatttttctccttagcagcattgggaaatggtcagagcagttggttcacaaacatgagcatgcatcacaatcctggggatggaggtagagggtggttgttaaacacagattgctgggctgcaactccagagcatccgatccagtggatggtggtggtgccagtgccgctggtccgggctgctccttgagcacccctggtgaagagcacatgattcagtgcttggcagacctggg

SEQ ID NO: 37943 - DNA, 1081 bp, Homo sapiens
tgttgttgtgtaagcccatcagaggaggacaaccaaccaggctgtgtggagggcagacttcgagcccaacagccctgacttgaactctgatcctacttggcatcctattctgggagacaagactagctccttggagaaccaggcagtaaatgagatcaagccttggaaaacgagtgaagtccccggggaaggctttctggatacggtgaggcgcacagcgagtgaaatttaaagaggtagcagagaaaaattgattctccttcaaaagtatggatcccattctgttcacttttccaggagcattctagaaactggtggtgaaggggttaactgtgccagctaccacatcccttgcccccacagggctttgaaaaaccagagtgctgggatttgcccaaggtgagtcagggtcactaccttcctgctgcctttggccgttcccaggataaaactcccctggttgagtgagatggaaacctaaaatgaaaccttgctagagtcccggactcaagcctcattactgtcacctttgtcagcagccgcagcgccaaatctatcgtcaccatcatcacttctccctgaggcctggtatcccgttggggtaggaatgtgctgattttgcttgggcaacgcaccctctcactgggcctcagactcaattttcctacattggaggatactttagaggcaaaatgagattaatttcatgaggagcctagcacagtgcctggtaccctgggaatgttcaggtcctattacctgcccttctgtctttcccagtgtcctctcctcttttctctctcccatcccagggtccaggttaattgcagtgcaatatttgcatagacgtgagacctcacccggggaaattccccctggtgaccaaccaggtttcctttctgaggtcaggccacatcatcagacactgctccttcctctccggcttgccactgccaccgctggctttcgcccctgtcatctggtgggtttagatcctggcacacagatttaggctcatcctttgaccttgggcactgtccagagggtggggatgtggaggctgggctagggacccagagca

SEQ ID NO: 37944 - DNA, 1050 bp, Homo sapiens
ctcaagggaagaacagtctattgtatttacttaggtctttaccagttctgttactcttcctacattcttgaagtttcaagtttcaagtttccctctggtttcatttgaagaatttcctttagcaattcttttagagcaggtttgctggtgatgaattctaagtgtccttcatctgagaatgtctcgatttaatcttctttcctgaaggatattttcactgcatatgggattctgggctttttgttatggttttgtactccaaaagaaagcaggaaagagaaaacagaggataaagatcagcgagaacaaacagaaaacacatcctaaaatggtagacctcaacccaacattatgaacatcaacattttccagcagtttttaaatttttttcttctggtctctaaggtttctaatgagaaacacacagttattcaagctgttgttccctatatgtagtgtaccatttttatctggttccattctacaccttttctgtgtcattagcttttggaaatgatgttgtctgggtgtggatttctttgggcttactttggagttcagtgatcttctttaatctgtaggtttatgttttggcaagtttgtggaatattcaatcattctttcttcaattttttttttttgcactgcaccctttttcctctaattctttgactgtgatgatagtaatgttagctatttgggcattatcttacaggtctctgaagctccgttcatttttttttctaatctttttttctcctctattgtccagatcagataatttctattgatctatcttgaagttcactggctctttcttatcatctcatctccattctgctattgatttcacctagtgagtttttatttcacttattatactttttagttctaaaatttccttttggttcttcttaataactctatttatttgctaagactttctatttttctattattcctaaaagtatattcactcttactttccttttctctttttccttcttgccgtcagtgacagaacacccatacttcttggagtctttttac

SEQ ID NO: 37945 - DNA, 1035 bp, Homo sapiens
tctgagagtcaggaatttgggaacagcttggcctagtggctccagctcagaggctctcataaagctgcagtgagatgttggctggagctgcattcatctgaaggcttgactggagctggagaatccacttccaacatgtctcactcacatgcttgttagctcgagggttcaatctctcactttgtggacctctccttgtggttgctggaatttctttgtaatttagtagctgacttcctctagtgcaagtgaccccagaaatggagcaagacagaagtcacagtgtcctttatgacattgtgatagcttcagaagccacataacctcacttcaagccatattctataagacacacagaccaacccgagacatgtggaatgggattactcaagggcataaataccagaggcagagatcattgaggccatcttggatgctggctaaccgtacttaaaatcctgtgttcatcccattcacaaatctagagagggactcttaccctcaattttcagatgtggaaactaaggcacagagaagtaacatattgatgatcatgcaactagtagtgccagagctggtatctgaagccatatttatctgatttcagatggtctcatttccagagattttaaaataaagtattggtataagtaatccttgtgtgaaagcaaagcaaaagatccagaagttcaaaccagccatgtcaattatccattgactcaaaaataagttttaagcacctactctgtccaggcactgttccaagtattaggaatccagtagtgaactgaacaaaacctctgtcttctgggagcttaccttcagacccttgatctgttagatatcctagagactgtagaatgtagagcttacatgaagactaggagccggggatcccttcctgcctggcctccaacccactggggaacccaggcaatcctttctttccctggacccagatgctgcctctgagaatgcggcccttggatgaaagcagaatcacctggggtaatgagtagacataacagattcccc

SEQ ID NO: 37946 - DNA, 1055 bp, Homo sapiens
aggcaggagaatcgcttgaacccagggggtgaagtttgcagtgagctgagattgtgccgctgcactccagcctgggtgacagagtgaatgagactgtcttaaaaaaaaaaaaaactaatctaatcttcaaacagctcatttcaacagatagggaaaccaaagcaaaaagaagttaaataattgttcaatcatgacattgtgaaaaatgatactttgccctttcctcagttgccaccaaggtgcttggtccttccgaggaagctaaggccacattggggtgaggccatcacttcatccagtgactagcaccacctctggcaatgtcagccccacactcgcccgcgccatggcctccatctccgagcttgcctgtgtctacttggccctcattctgcacgatgacgaggtgatcatcatggaggttaatatcaataccctcattaaagcagccagtgtaaatgttgaaccttttggcctggcttgtttggaaaggccctggccaacgtcaacattggaagcctcatctgcaatgtaggggctggtggacctgctctagcagctggtgctgcaccagcaggaggtcctgccccctccattgctgctgcttcagctgaggagaagaaaatggaagcaaagaaagaagaatctgaggagtctgatgatgacatgggctttggtctttttactaaacctgttttataatgtgttcaataaaaagctgactttactgctgttggtcttgcccatagtttgggaatgtgctctgcaaaaatggtctcagttttgtaatgttggcttttaacctattctgccatgacacaggctggttttgcctgccaccgttgcctgatgtgagatcttggacaatcctgatgccaacaagaaggcacctcatggtacagtgttgaaagctgaagtggggtggcaggaggaaggatcagagcagatgctttgtccaagttacgtataaacttgataattatcaagtattataaacttaatagagccaccatgtccaatttttaattgtggtaaaacatacagaacataaaatt

SEQ ID NO: 37947 - DNA, 1068 bp, Homo sapiens
gtggtttgtggttctccttgaagaggtccttctcatcccttgtaagttggattcttacgtattttattctctttgaagcaattgtgaatgggagttcactcatgatttggctctctgtttgtctgttattggtatataagaatgcttgtgatttttcaacatcgattttgtgtcctgagactttgctgaggttgcttatcagcttaaggagattttgggctgagacaatggggttttctaaatatacaatcatgtcatctgcaaacagggacaatttgacttcctcttttcctagtcgaataccctttatttctttctcttgcctgagtgccctggccagaacttccaacactatgttgaataggagcggtgagagagggcatccctgtcttgtgccagttttcaaagggaatgcttccagtttttgcccattcagtatgatactggctgtgggtttgtcatagatagctcttattattttgagatacgttccatcaatacctagtttattgagagtttttagtatgaagggctgttgaattttgtcaaaggccttttctgcatctgttgagataatcatgtggtttttgtcgttggttctgtttacgtgatggattacgtttattgatttgcatatgttgaaccagctttgcatcccagggataaagccaacttgatcttggtggataagctttttggtgtgctgctggattcggtttgccagtattttattgaggatttttgcattgatgttcatcagggatattggtctaaaattctctttttttgtcgtgtctctgccaggctttggtatcaggatgatgctgacctcataaaatgagttagggaggattccttctttttttattgattggagtagttttagaaggaatggtaacagctcctctttgtccctttgctagaattcggctgtgaatccatctgatcctggactttttttggttggtaagctattaattattgctttaatttcagaggctgttattgctctgttcagagattcaacttctttctggtttagtcttgggagggcgtgtgtgtccagga

SEQ ID NO: 37948 - DNA, 1026 bp, Homo sapiens
gaatccattcttgctctccactcttggctcaggctggtccattgtcctggccacctttcatttcctcaaagaacccaactctttctacctctgagcctgccctggggctcatagtgttaggggttcctctcaggagccctgggtatgcaccatgcccatgaagatggctgagcttccaacagtcctgcttctcagatggggagagtaaggcatagagaaatgtggttcactgaaggccaaactgtggtgagaggtacgactccccagttatggcagtgtctgaatctccggaacctgtgaatatgttaccttatgtggcaaaagagacttcgcagatgtgattaaggttaaggatcttgtggtggggaggttatcttggcgagcctgatggaatcacatatcattaatgtaatcacagggcttataagtgaaagaaggaggcaggaaagtcagagtcagaaggagatgtgatgaaggaagcagaggtatgaaggaaagcaaggagaaggaaacagagatctgaagattctatccttctggctttaaagttggaggcaggggccatgagccaaggaatgtaagcatcctctagaagccaggaaaggtagggaaatggattcttcccaaggcatccagagggaatgcagccctgccgacactatgattttagcccagtaagactcatttcaggcttctgacctccagagttttaagcataaatttgtgttgttttaaccttctaagtttatagtaatttatcacagcagctataggaaactaatacagcgggagagcttgggcttcggctttgtatccagagatcttttccacacgtgtcgcaggagaactggaacagctcacaggacagctgcagggacagtgagcctactgttggggagaagccccttccagagcttggagcaccagagaggggctgggctctatttctgtcttagccactcacagagctcctccttctggagccttagtccctcatctgcaaggggctgagttcttcactggtag

SEQ ID NO: 37949 - DNA, 1056 bp, Homo sapiens
tgcaatagttccttcattaaattctcttctgttactccaggagtgggctatatcatgacaagatcttagccgactcagcatgctccatgaccttcttgctaaggtcaagttcttatactctcacgtgtacttctcctttgcagagcttaccacagtccctaactatacatttattttaatgatcatttgtttaatgtctatttttctaactagatcataagtgccttgcacagtcttttaatttctagcacagtgcctggtatatagtaggcatttgatgcatttttactgaatgatagctaatatttttctcttatctgtttcatggaattcttctgagagtctggggggtacaacaggtataaaaggctttaaaaattgaatctctccccatgtctacaaagctgtaaggtgttattgtgtgaggataacatgagcatgggcatactgaaaacctggatggactgtgtcagtcaccaccatgtcatcttgggtcagaatttcccctttgtgttattcagcctttgtcaagccatggtccatagcaccctctggtggtccctgagtgacagcatgagggggcagcttccagcttctgttcattgtcacccgtagcccccaaccaagactcaatcataggaccacaggtggagctggaagcatcatccaaaaacttgtcattttactgtggaaaacaggcctagttggaagcagcatttgcacaagatctcactgagtttttttgtagagctgggccagacagtgctcttcctaccatatctaatacctgatagcatgaaaatgttttggtaagcaagtactcatgcctgttgggtaagcatcagaaatgagttacagctgggtgtggtggctcatgcctgtaatttcagcactttgggaggctgaggcaggaggactgtttgaggccaggaggtcaagaacaatctgggtaacatagcaagactccatctctacaaaaaataaaaaaaattagatgggcatggtggtgtgtgtctgtggtaccagctactagggaggctgaagtgggaggatcac

SEQ ID NO: 37950 - DNA, 1020 bp, Homo sapiens
gttaattttctgctttcctccctgagcaaggctgttgctgccagtggcccccatgctcttgggtgagtacccctaaagccactcctttgcttaatactgacaaaaagatggaatggctgttctagggagggtaaagctagaacagggtcagtcactagtaaatgttttaacttttctacttgtttgatttctgctagagttcagagaagggggtctggctcttcttgggtgagtctttcatacaaaggttttgtttctaaggcataagagtcaattcattggcaacagtatccaaccaatctcaaaaattttctgagctcttgttttgtttctgacacaggtagggatatgataccttcaatccattcaaagccaattctctgccttttgcttttgcctttcctcatccctccgtacatatacattttcattctctttaaaagctcttctatgggatggtctttccaattttctatctttcgtaatttctttgtaatatctggtgacaaaacggagctctaacattcctcatccaagggggttttctaattctaggccagcatatttcctcctttgctctttaagcctctctaagaattccgtaggtcctttatcctttccctgttgtatattaaaagctttggtatattttgagttcgaggaactgattcccgaatccctttaattatcctatctctaagatctctcatattccctcaatgggctacattgttatctcattgaggatcttgggctgggaacttttgtttagctgcaaggacgttatgactgagggggtgttcacgttcccaaaccgtcatagtgcagatcatgcttctttcctctcccgaaaagaggatgcctaggatggacattaactcagtccaagtatacaactggggtcctagaaattgatcaatttgatctgctactccatagggattgtctaagagtggtttgagccctttttaggcttcggacttctgaactggttaacagggcgttcacaaaacaaatgcc

SEQ ID NO: 37951 - DNA, 1050 bp, Homo sapiens
caaatagctcaggaataaattactgtttcaatggttcttaaactttcttggatcataggatccttttgagaatcagattaaagccaaagatactctttggagaaaaatgcatattcctaattttgcatagatgacctttggattattggactctgactattgggaccctaaatactatttaattataaatcttttttttctcctccttggttatttaaacagttgaacagtgtcaggaacagatgtttctgtaatgtcacagttgctagcatgggaaaatcagagtctggcatgggtgtaggaaggaacactcctttcagataattgaactgttttctctaggattcattgtgaaggcttttctgctcacgtttgtagtttatttttcaattaattcctaggattggagctgttgggacagtgagaatgaaattcatttacaggaagtcccaggaaggagaaagtttgaggcagttttcaaagacgtgtatgtgcctagcattagagtttaataaactcacaaagggaaatactgtagaatttagatcctcacagttcttcatacagtgaagtgaactttaggaagacgatgctttgttaccagggatggagaatctttcttgattgcaaagacataaataggcatggctaggtagaaaacctagcctagttggtaggacaccagttctaccaactgctaaaatgaactttacttacagaggtggaaaaaatatatactcccttccacttgagtaaagagtgatattgttaaactagaattctaaattcctttgtgatctgtcagaagcatcacctgtgggtggaggagtcctgcacactcctcagttactgctttggtaagaacaagattatctatttgagtccaggcatggtagctcatgcttgtaatcccaacactttgggaaaccaaggcaagtgaatcacttgaggacaggagtttgagaccagctgggcagtatatatggaggcagtatatatttgagaccaacatttggcagtatatatggaggggctgaattgcactcagtt

SEQ ID NO: 37952 - DNA, 1026 bp, Homo sapiens
gtccaggaggtcaaggctgcagtgagccacagtcatgccactgcactccagcttgagtgacagagtgagaccatgtctcaaaaacataaagaaaggcagcttcaactcatgcactgagccctgaggttactgggaacggcaggtgcaaatatctcatgaggagatagaaagttggcataatttggatgagaaaggctactatggctgcaatatggtgagggaggaggttggagcttcagaagcaggtggaggacagatgtgcatgatttagagaaccaagggaaggaattgggtttttatctgaaatctgatgagaaattatgtttgcaattgatttctcatcagattttactaaaatacagagaatcagtaggaagggtactagctgtactctgatagatttctaagtactgcaaatggtgctaagtgctttgtagctgttctcttatttaatccttagaacaatcctgtgaagaaccttctaaatctgatggtatttatggctgtaagttgctggcaatgttttaatctctttgtataaataaagtcattttagccttacaactactgaatgaaatcagtattctttttacactcatatttcagatgtggaagtggaggctcagagaagttatgtaatttacccaaggttaactgactagtgggtggcaaagccaggatggaaactaggcattctagttttccaagcctgaacactcaaccttcatacttcattgcctctccattccctcatgttgttactaagtcacgtaggtaagtaagtagcgaaaccaagagtggagccaatattttgaccctaaaatccatgcttgcaaatactacttgatactgggctgaacagatttatagatggaaactatgagttccctttgaacatattaaggtgcttatgtcttagcttagacttctatgagtatcttaaggagattctgtgcttataattctaatcttcctaaaaactcttagtaggtattatccccattttatgagtaatgaaaattgagg

SEQ ID NO: 37953 - DNA, 1028 bp, Homo sapiens
agaaaaggaagaaaatattccatctgtagttatgaaatgtaacaggtttgtcttgtggctctaataaatctttggtctgtgtccataggttcttgatagtccacaatgggtgaaccacagcaagtgagtgcacttccaccacctccaatgcaatatatcaaggaatatacggatgaaaatattcaagaaggcttagctcccaagcctccccctccaataaaagacagttacatgatgtttggcaatcagttccaatgtgatgatcttatcatccgccctttggaaagtcagggcatcgaacggcttcatcctatgcagtttgatcacaagaaagaactgagaaaacttaatatgtctatccttattaatttcttggaccttttagatattttaataaggagccctgggagtataaaacgagaagagaaactagaagatcttaagctgctttttgtacacgtgcatcatcttataaatgaataccgaccccaccaagcaagagagaccttgagagtcatgatggaggtccagaaacgtcaacggcttgaaacagctgagagatttcaaaagcacctggaacgagtaattgaaatgattcagaattgcttggcttctttgcctgatgatttgcctcattcagaagcaggaatgagagtaaaaactgaaccaatggatgctgatgatagcaacaattgtactggacagaatgaacatcaaagagaaaattcaggtcataggagagatcagattatagagaaagatgctgccttgtgtgtcctaattgatgagatgaatgaaagaccatgaaagatgtttctttttctttttttccttttgataatagcatcatatattagttcattttcttttggacagtcttaagagaagtttcactaaaaatgtaaacagctttaatcttgactccaaatttttcaattatgagatgtcataggcagtaatttcgctgtataacaagcatagacaaatgagtgtccctgcactaagaagaatcactttaaaaagcaaag

SEQ ID NO: 37954 - DNA, 1028 bp, Homo sapiens
gtggtgtggggacacggttcagtctctcttctcccatcctttctactgaggagggggagcccgcttagtagagtgagagtaagagagactgtaggtcattgaatgttcccattctttttaggggacacggtgactatttctctttgggcacttaaaaataatcatgaacctgggacacattatggtggtttagatttcctctgatggacacaagttaaaatggagaaccagacactcagaaaattttatagtattttagtggatctctcaaggattctagcactatgatttctaaagttttttttttaaaaaaaatagcaaataactttaaaaaaaaagcaccaaaatctttcaaggaagaaaccccaatatgtaaaactgataaaaagtagtgttttgttagtacaaatacgttctctatatttacattaaccacttgagagaatattggggtagttttgatgaaaccaaatgttaagttatggattatgggtgagatgtctagtcttaaatctgtctgagtcttttcgtttctttgttttttttttttttttgagacggagtcttgctctgtcacccaggctggagtgcagtggtgtgatctcgacttactgcaacctccgcctcccgggttcaagtgattctcctgcctcagcctcctgagtagctgagactacaggcatgtgccaccacacctagctaatttttgtgtttttagtagagacgaggtttcaccatgttggtcaggatggtcttgatctctttaccttgtgatctgctgaccgcggcctcccaaagtgctgggattacaggcatgagccactgtgcccggcccataatgtgtgtttttaattataatttgtaagttaaaataagtaatacaaattaaatgcaaatcaaatgcctgaagaagaagcacgaatacctattttgaaatctgctgtagccgagacagcttctaaatctcccacttgggttctgtttctggaaggtgtgggtcctgtggtagctggagtgttggtggccat

SEQ ID NO: 37955 - DNA, 1049 bp, Homo sapiens
attgagaatatgtgtttatgatgctaattactcattttaatgtgtagattctcgtctttggggtattaggatgaaggaaaagaagaaagaagcagaaaggtgactgctctatgtaacagaaataagacctaatgtatgagttaagcataaagtcagtctactttatttgcagtcttaattgtaactgtcataattctttgcattggtacatttttaattattcttcctcttcctgttccttttttctgtccttttcagttatcctcaataaccactaggaacctctgcttctttctcctgaatttcttctttctcctacattgttccatatattaatcagttcagttagtgttgctcactttagatagtaaaagtatacacagaacagcaaaatgtcaggatatgtgaaatataaattgctttttgacagttttgccttatatccttgtataatgtgagacatcatatcctgaattctctgttttgttttgttgttttgaaacagagtctcgctctgtcgcccaggctggagtgcagtggcacgatctctgctcactgcagcctccacctccttggttcaaagtgattctcctgccttagcctcccaagtagctgggactacaggcatgtgccaccatgcctggctgattttgtatttttagtagagatggggtttcatcctgttggccagtctggtcttgaacttctgacctcaggtgatctgcccacctcagcctcccaaagtgctgggattacaggcataagtcactgcgcctggcctctgaattctgttttgaaagaataaatgtccacttgtgtatctccttaaagctgtactaacctaaaatcggtagttcccctgggcatttgccagggatggtggcttctagactttgagtgatgggagaataattgttagtgtaggtaagttgttggttttatccacctcaaacctgattgggacttcagaggaacctctttgggaagctaatgattcagggtattgaagacattagcatagaacattagtggttctttttgtttcagaa

SEQ ID NO: 37956 - DNA, 1015 bp, Homo sapiens
tactgttggccatatattaagaaggggagatggttctagtttaattaacccagttgagtgtagcagatggggcagaatgtctttcagcgataagacaattcagaaatggcaccagatgttggaagctgtccctggtggtgtttgagtgcagcccagatgttccagtcccacctggctagtttctaagcactgcggcctaagcagctgtgatgtaacctatataatgttcacataacactaaaagcaccatcattgaactgctgtagacttctaaggttgtgactgttaagaggtgaaatctttaaggacagacaaaaataaggacgactatttaaagtttcagatattggtctgtttcactaaagttgagaaaaaaaggaatattacaacttgaaataatgttataattgaaattataggtaaaagtaaatattcttacccatgtagtatttacaaataaaattttatgtcagaatgtaatgttacgcacacagagattgatttgcagacttataatttgggtcttacccttttaaaaacacctatctagaagtagcaaaaaagctatttttttcccatgcattaaaaatacaaaatacaagtatttactcttttatggagtaaacactacgggggaaaacccgtccaccaaaactattgtattgatatttctccctctctctgcttaaaataattgttttgttttgttttgttgtttgttgctttttgagacagcgtctcactgtgttgcccaatctggagcgcagcaatcttggctcactgcaacctctgcctcctgggctcgagcagtcctcccacctcagcctcccgagtagctggggctacagctgctcgccaccatgctcagtttaatattttaaggttttgtagagacgaagtctcactatattgcccaggctgatctctcaactcctgggctcaagcgatcctgctacctcatcctcccaaagtgctgggatttacaggcatgagccaccacaccagactctaaaat

SEQ ID NO: 37957 - DNA, 1050 bp, Homo sapiens
cttatttttgaagttgatcctgtgtatttttattcaagctagtagtctttccttggatttttttccccagtaaaaacttgtatagattattttgcatttggaccttagatgatccagggacctaagatactgagggataatgaagtttatatattaagtttaattaaacataagtcaaaggatttgaaatttaatgcttccttgacatttcattatgattctgtgccagtgtgtaccagaaaaacaatccaaatggattttgaaccagtttttgagaatagagctgtatttttataaactacattttctgatggtatttagttttacatggaacaatactttgagctttgcagcagtcacttttgttcttacttaccaatattattataaaccaatttttctgagaatgtaaagggtaatgcatatagcacttaatttacagagcaaattttactttttaaatttgacctttatcatttgtgcctcacaatatctctactagagtagaataagaattttgtctttgttgtttataagtaaaacctaaaacccagtcacactgtgtggacttgcctaaataacacagttagtgatggaaccaagccttcaagtgagttctcgtaactaaatgccatctctttttctttaccctgcgccaaaaatcctaatagttcagaattagggatcattaaaaagaggtccaaacaaaaatacaatctaattagtgtatttttaggatgttttcatatcttttaaatccctggaatgcctgttcaggaaataccaacagaataatggccataatttcaataatgttttccaaaccaagccaaaacttacacaggccacaaaaacattaatgagggaaacagctctgtatatttgaagtgggcaccatttccctcccaatgtttagtatttataattatcatatgcatcctttttcagtataaaaaagctagatatatacttgtaaaatagatttattcaaagtgctaaaaataagttctagctcttcaaagatcacattccagtttttcaaacagtctt

SEQ ID NO: 37958 - DNA, 1033 bp, Homo sapiens
gtagagacagagtttcaccatattggccaggctggtctcgaactcctgatctcaagtgatctgcctgcctcggcctctcaaagtgctgggattacaggtgtgagccaccgtgcccggccctttttagtttttatctatgcaggtggtgcactgatagaatacagactgctgagtcaggggagttaggggtgatccccagcaaaattaaatcagcccagggatacttctttagcaatttgagagaagttttactacaagtgctattttagttttcttttaaaaagtcagttttaaagttgtataaattaaaaatatttttaaatttttaaacagatgctcccccttcaacccactctagttattaccactctaacacagctgttttcatatggtttttttggttcttccgggctttgctcacatgtacatgtgtttttatatagttgttagcgttcatatacttttgtgttatgaggcttcttcttctatggccatggaaggaaaggaattttctagtggtgactgcctctgcctgctctgttgcttacattgttccaagtaccattgctgccacattttggaagctatttttcatcctacttcccttaacgtcacaatttttcacttttgctagccacaaaacagcccctccagcagtcttactgctgctagagtgcctctctggaaaataaaaacgccttagcattgtgggactagcctgtcttgagacagtttttctgtaagcctgtcatctgcccaggtcataatagcagcagcacctgtgctagagagggagtagaagggcttccatatacaacataataaataataacagaaaactgaatgctttacacatgtcatttcatttaatctccataatgataataatacataggtacctttcagatgaggaagcagagtcacacagtggttgatgtgtccagggatcaggtagtatatgccagagacaaaattcaggccctaataatctctaaaaaattattgatcaactaatatacaatattactttgca

SEQ ID NO: 37959 - DNA, 1095 bp, Homo sapiens
gtcccccaagtaagagggactacaggtgcttaccaccatgcccggctaattttttgtagagatagggtttcatcatgctccccaggctgggctcaaactcttgagctcaggcaatccgcccgcctcaagcctcccaaagtgctaggattataggcgtgagccactgtgcccagccagtaatatccttagtttgatgtatttggcttataagttcggtactgaatggggctttgaaggatggcctgtttctcactaagcatgtaaaatgtttagccctgtcatctgctgtccactcagcagcgagagggattctttaaaaatactaagtcaaatgggttcagaattctccagtggcttctcatctcattgcttaattgcctgtacagatctggctctttgttgccccgcctgtgatctcttctcccaccactgtccctcactttctctgttctgttcagtggacctcctgtattacatagtatgcactcacactcgtcactatttttttctgtgcttgccttcctctgttacatgtattcatctcctgcctctgatatgcaagttccttgagggcaggaactttgttttgtttactgctgtattactaactcttagaacaattatgacacatagtaggcgctcaaatatttttgaatgaatacattaaatttggtaagttgatatttattacagaggatatcctttaaatccagatatttctaataataaaagctaatagttattgagcatttgccatgtgccaagaacaaaggtgacaacattgttatgttcaattttcttatgaggaaattgggcacagaatgccaagagtgtgccacagatagcacatctagaagatagtctagatttaaatctagatgatatactttcagaatatgtatttagcagtttatgctaatcttttacaagacatcatgtaaacaaaaaaattgttatacaggcatacctcagagatattacaggtttagttccaaaccactgcaataaagtgaatattggaataaagcaagtcatacaaatttttagtttcccagttcatataaaagttatgtttccactatgtggtagtctatt

SEQ ID NO: 37960 - DNA, 1019 bp, Homo sapiens
tgaaaaatattatctatctttttactacccaatttaggatgtagacttgaaccaaattattcaagaacatagaagaatgttgtcaccaaagactttttaaggcttttgtgggtgtctgacacatattaagattagaacatgaggttgatttactgatgagtactcgggattttaattttcatcttttcactggcaagaagagaagaaattcttccccccaaatgtaagcatcttacagaaccgtggatctgttagactgtgcaccttataatgccataatagacgtgcatccatagaatggttggtctgattatcagaggtataaaatgatgaaggaacttgcaaatgaagaagcagtgacgtgattaagggctattcagatagatggatcaatagaatgagggcttctatgagagaaaggttaggggtttaactatctggttcatattctggcattacgtttttaattagctgtatgtatgatttgaggcagaatcacatgaatctccagactttgccttccttatctgtaaaatgaggggacctggctagagtaagactttttccacctttgatggctattggagaaatgcatttccatcaaggaaaaatagttggaactagtttttacaatagcagacaaattttggagccattatcctctgtagacaatttaggctgaaaagggaaattttcttaaaaagtggtaatcaataaatgttatacttaaatattttatgcaataaataagaccatgactcaggaagactaggacttttagtgtatattgatacccagtgaggttttacttcagaaaaagaaatgtactctgaaaaatgtgtttcctggagccactcttagattcagtatggtagcggctcttaagtgtaatgatgtatttcttttttttttttgagatggggtttcgctcttgttcccggggctgaagtgcagtggcgagatctcagctcactgcagcttacacttctggggttcaagcgagtctcctgcctcagcct

SEQ ID NO: 37961 - DNA, 1062 bp, Homo sapiens
ctcagagcccagttctcttgacatccagcttcacccccattcagcttttggttataccagattttctcatgaaatttccatgggcttttaacatacttccagaaatttaccaaaccttcctaaattttatacataattgccctaacactctgaagacttatctataccaccttttatgtgagatacagctccactaaaataaaaaagaaaattaagacggagaaagacattatgtcaaatattacctctttcaaaatgtcatgatagaaatgtaatacaatgtaaatagttgtgtccatttattttacatatattgaggcttacatgtataaatttaattcaaagttgattaaatgtgtggatttaaaataactcctagttgcctatttttttctaaatatgtttcatgtcctatatttaacctgtgcttattgaccatctattatatagaagttgctttgtgcaaaattataaactttatttgttaacaaatttaaaagcagtctggattagttgcattaaactttgaatatgactttgaagaacaactttcaagcccaagtaattttatgagaaatcatttctaaatgagccagcatattaaaaaaaaaacagataaaaatggtctaatggcctttttaatatagttacatagttacagccatgctcactttattcctaagaagccttagtctatattgttatttttgatgactgaggcacttgaaatctattttctatgttgataattatgaaatagttaaaaaaagactttaagatgacattttcagctcattatttacagcgtgttcaggaggtacacgtgtctgtaacttgaaaataggaaccacagaagtgtgatgaatttctaattttcatatgaatcaatgacagaattcacacctggctgcagtcatgtgacttttatgaagaaaatgaatatttatggatatctagatagtgctgtattcctttcttgctgattgctgatcactaggttggctccctgataccctgaactaaataaagccttctaccttatacaacctttactggctttct

SEQ ID NO: 37962 - DNA, 1035 bp, Homo sapiens
acttctctctctctctcttttttttttagatggagtttcgctcttgttgcccattctggagtgcagtggtgcaatctcggctcactacaacccctgcctcccggattcaagcgattctcttgcctcagactcccaagtagctgggattacaggtgcccgccaccactcccggctgatttttgtatttttagtagagatggggtttcaccatgttggccaggctggtcttgaactcctgacctcgtgatccgccctcctcggcctcccaaagtgctgggattacaggcgtgagccactgcgcccggcccaattacttctctgtaatttttttcccctgaggattggtggggaaaaaaaatgcttggcacataacactccatgttaagtttcaggattatttcttctttttacattattttagttttttgttcatatgtactcagggctcacactttgcttggctccgtaagtcctagagaaaaatggtatgagaaatgaattcacatgaagcattagtgccttagtctcttactgtttttacctttcccgtgaatatttgtgcttacaaaatggtgtccagaaaggcagtgcctcagcgagataaatatgtttctaatcttagcatcttgggcagagtgaggctggcatctgaggtcagggaggccacagggccacgctactgaccgcattggtaacagactccattaggttgacagaaaggttaaggttcctggaatctgtctctaaattctccgtaccccctcattaggttagaagccaatgccaatacaagtaaccaataccaaaccctctcttgcttacagaggcattattaagttgggggcaccctaagaacaattcattgcaaataattgttggcacatttattctcatggcacaactttcaaaagcaaattaattataaactggttgcaatttaattcagtttgtctggattatgtgtttgcaaggcctagagtacatttggcaccgttgctggcacatttggattttaatgtctttgacaagccacag

SEQ ID NO: 37963 - DNA, 1039 bp, Homo sapiens
ctcttgaagcagaaatgatcacaatgtaatataatgagaataattaataaggagtgtgccagtgaccttgaatattaatattgtttccttttcctgtaaacaaactgggttattttattattattttagtgtgtaatttggcataaacactccttttcacatgatttccccaggtgacttttgtctccttggcaatttccggctttaataaagaaaacctaattaagaaggagctgttgattggtttgctagtgtaattaacacaggtgatgctaatgagtttctatgaaaccggtggtttatgggaaaaataaacagaccgttgttgcatatggcccaactgatatctgcactctggaagaaatgatgatttccaagtctcctgtgagtggtttgtgggcatggaataggcagataaaatattttataagattcattagtggaacttgaccaaattgagagcaaaaaaagtctcagtgttaggtgatattaaaaaatctgatccctggctgtagtacgggttaggtttgtcatttttcatgtgcctaaaaaggggcagatttcttttgtttggggtgtgtttccaattttcattgtaggcatttgaagtttgcaaaacttccagcagccttttttttttttttctttctttctttctttctttctttctttctttctttctttctttctttctttctttctttctttctttctttctctttctttcttttctgtctttctttcctttctttctctctctctctttcttctttttctctttctttctttccagagtctcactctatcacccaagctcgaatgcagtggcacgattacagctcactgcaggcttaacctccagggctcaagtgatcctcccacctcagccactggagtagctgggactacaggtgcctgccaccatgttcaactaatttttgcttttttttttttttttttgtagagatggggtttcaccatgttgcctaggctgatctcaaactcctgggctcaagtgatcctcctgcctcggcctccc

SEQ ID NO: 37964 - DNA, 1127 bp, Homo sapiens
ggagacagtctattggacaggctctgggaggcaggttatttcaggtgcaagaaaggaaatcacctcgtttcattaactattagggacttaacttcctttggtgtaaagctgagtccaatcatcccagatctccaatgagaggatgggggcgtgcttgctgtcctaatcaaacccagctggtcattcggtcccaacaggtaaagtttttgaggaagccaagtagagatttgtgaattctacaatataaaaatgtgaaaaatgtgtcaatgtgagccccttccagctctgaccccccagttgtttatgtccaacagtgtttctcatgtggctgtggataagtttctccctctttccattttaaacttccatttgtaggttgcttgtgacattttgcttcaggccagcacttagcatataatattacagatgcctgaaatctttcagcctttctttttcttttcttttcttcctttcactctcactctttttttcctgcctctctctgtctttcatttcactcccaactccttttttccttacaacaccaaaaactctttcgtttaaaaaagttggaaaatatatgaagacaccacacagcattcacaactttagcactgatctgatctatttttctgctattcaacagacctggattttttccctgtgaaccagaaagtcttttgttttcttgtctcagtaaacacagcatacggtatgtactaagtattaggactcaggggtcttattcaaatattttttggggggagtggggtcaggactatggaaagagatacaggaggtgtaggagactgggttttaatgtgagatcattaatcatttcttttttcctgaatcaggcttgggacaaaagggataaagagggttttcccctcaaatattcaatttatcctatcagatttcccacagtgactttctctaccaaggttcttaatgcactactcttagaatgtctcatcagtgaccagagctgatggggtctttgaacattagacagtacccattagtcaaggtccctgggctaacatctctggatggcattttcttctaagtgtgccattagttagtataatggactggtgtctgtcagcctttggggcaggacagag

SEQ ID NO: 37965 - DNA, 1041 bp, Homo sapiens
tcatagaatctgatacagcctcttgattctcttttttctgaagccatttgcataaaatgagtctcacaaacttagcttttttttttttttagtgagaaaattctggcatctgatgtagaaaataaattaatacctgcttaagagttctgttttctgcagtgaagcacagctgttattactgttaatggccccaagctttcacgattcccaaaccagaaaaacaagcgcaagatctttgctatgttgaagggagaactgggaaggcaaggtctcaattcagggccatttggaaatattaatataatcatttaatttcataatttcttttagcatttggctcgatgactttacaatatttttttaaaagtcaaatgctaacaaagagaaaacttcgagtacttcttcttgcattttcttgcattgaaggctcttcttgcattttttcttttttttcctctctgtccatctgtccgtttgtctctctttgaatatgtctgagttgaggagtgactttgagaaacaagtggcgttgcattgcctaaatagcttgtgttcttatcccagcggctggttttcaaaaaaaagactcctttttcagtcccttttcttcttcattatatacaaactgcaaggcagaaagcccttttgcctgtcccctaattccttagcccatccttaattagtgtttttacggttaatccctaccatatatctttaagagttgcacatgcgttggctccccacaagttttattgcattcaaaatagaggcaagctggcagtgtgtgatggtgggaatatgtacagtcactgagaggagttggctgttacttgtaattgattgctcactgaagcctgcccgcgcactttaccccgaggcctgactttcctccatatgcctagtgtcagaacttggaagccagctggtcagtcagcgcacatcctgtgggaagcggcagacacaggcggccgggtagccatcagcctccccgagcacatttcctctgtgttttgataatagttctgtaagctttaattatgc

SEQ ID NO: 37966 - DNA, 1118 bp, Homo sapiens
gctggattcctttctgctcccaaatagtttgataccagaagccagaaaggataatcatgctaaacctattaaaaaatggtttcatgtagggttagtctctcctttagaaaccattgtttacattcacagaggtggtgaggacaagcagctgttgagttcattgacctcagacaggagaaacaaaggacccagcatgttaatttattcaataaatgttcgtgaagcatctactatataaaataagttgtacccccaatcccagattggggactgccccagaagcactttgtggtcctcccagggcactcacctattaaggaaattggatttggtgtagaatctctttctcttttccaaatcaccaccaaatccattgccattcatctttctcctgccattacctggccattcccagggtaaggtcccacctccaaaaagagatttaaagtaattcactactcatcagatttagtgtaggttaattccctactatgctaataattttcatcttcaaggtactaatagttctaatatgaacccaaatttgtgcatattcttctgttaaggagaaagcatgctttggttctgttaaaggctcgacacattaaattgctcattctgatatgggacttctcattcattatgaaatgagaaggaacctcatgtagaatgctgaactgggacacaggagacctggttttgagtactgcccctgctgttatttagatatgtgagcctctgtgtctgtgtgtctcttaacttctctggatttcagctttcttatttatagaacgagagaagtaaacacttaggatctttaaggttacctctctcaatgactttaatcctctctacccttataaatctggttacctctcatatctgacattggacagtacctattattaaacatgtgcttaagtagcatgtactataaggtaaatagcaacctcacagaggtcagaactgaataaccaacaatattctcaatcaactttcagttcttcttccttacctcatccaagggatcagccaggtaataagaagataaggcagcaggtacagcccatgtctattgctaaaatctaccttaaggcaggaagctagtgggtgagatc

SEQ ID NO: 37967 - DNA, 1034 bp, Homo sapiens
cactgaaatgaaatcaaagatgaagaagcattgattgtattcaaagattgaagcacgctcatactttgtatgtgctttagggaaggggtgggtgggcacttgggccttgcgggtgcattcatgtaatctgagactcttgaactttatgacggagtcttcagtattttgatgtatatgaaacttttgttaaatatgttgtatacttcgctggctgtgtgaagtaaactaaaactctgatgaacactttggagtctgctttagtgaaggagaccaaagtgggaagggctttagggcactgatagaggccctgggtgtacttttcaatcctgtgtaatgtttaattcttgcaactgaatcaaaacagtgttaaattatggcaatatttgcactttgggaatgagtacataactgtatgatcacactctgcaaatgccacttttaaagctgttaatagactttgcaccttttctttgacaaggatgtgtcatatttaaatttttacattcatcatggctacaggtagaactggggaggggggaatgtaattttttatgggaattttgatatgaaaagaaactagtcatttatttatacaataggcttggctcaaaaagtgtttttcagacctcggtattcctaatgtgggatgtgactttattttatttttagtagcaaatttggatgtagactgacagacatagctgaatgtcttaataaatttaaatttgaagataattatgttttgttcttgtggtttgttgtcattataaagtgctttttttgaagttctgttcttaggaggttctgtttttaatttagttggacttacatgttgatccttgtcagaaatgccctgtagatggcaaaactctttgattgaaaaggaccatttcttttgaaatcttctacacccagtgttagcaaacttacctgtgcttcagaagtgtttgggaagctttttattttaaaaaagtacacatttctgaaccttacttctgattcagattgaatcagccttttggggtgcctgagca

SEQ ID NO: 37968 - DNA, 1099 bp, Homo sapiens
aagaaatggaattggagaggttttttttgaatggttgcaacatttgggttaaaatactatgaaaaaatacatttccatgttaaagatgtatttgtattgtatgtattaatacattatgatgaatattgggcaccttccttccctagatttctttaagagattttcagaagcgtgctttttcccatttgaagtttagccctgttaaaatctgatttctatacagtatttgatgttaatatctggctcatttacagaatctggttggaaaacttctatttgtcttagaagttattatttttgccctcattgtgtggtaaagtaatagctattatgcctttgcacatgtagtgatatatatgactatttcattaatgttacaaagttaatatactgatcaggtttttagtctggattaagtcagaatagatttaaaaatatgtaacaagagtctaagcctttggattatttttctctttgaattaaatgagattcagattattttatgttttctgaaaatgtatgctttttttaggggcatgacagaaggagtaacgctgttaatcctggcagtgcagactgggctgatagaactgcaggttgttcatcgggcattcttgctcagtattatccttttcattgtcgtagcttctatcctacagtctatgttagaaattgcagatcctattgttttggcactgggagcatctagagacaagtaagaaacctcttaatattctttaaattaactcatgtaatattctttacatgcatttgttgtctaaatatttagggaatatttagagacagaaaatggatatgggtaattggtattagcttaggttaattcaacaagtttatgtttttatttttcctatatgagatgtctgacttacttgacttttgtttttttctctcaagattttttagttaaaaatgacatcaaaggccatgtaattataagttaactttttctgcttcagatgaagttaatactttttatatttgtccaattttaaaattaagaacatagagcataaaatttagtctagcataataaatgtaacaaataatatttaattttattctgtgtaaattaatt

SEQ ID NO: 37969 - DNA, 1003 bp, Homo sapiens
tcacagacgaccagtggagatttatgctgctctttccagatcagccctacagaattagtattcaaaattcacagaacatgtgaatatgtaattatagtcagatgaagtttaagtttgatttaaaatattatctacgagattttagttagacttcttcaaaagttgtgttattatccttatcaacagtgttttttgtttgtttttattttgtggatgccaaatactcaaaattaaatgtattctattccctattttaggtcagttggtggtgtgtactttatgctcctgtgtcatgaaaacaaagcagatttggctgttttcagctcacatgcttcctctgctagcacgactctgccttgttcctttggagacaattgttatcatcaataaatttgctatgatttttactggattggaagttctctattttcttgggtctaatcttttggtaccttataaccttgctaaatctgcatacagagaattggttcaggtaagactgctgacaaccacaaacaggtagataaaattctacataaatgttaagtacattaaagttatagttcatttttatttcacagttatggtaccattcatttttgcagtttcaaaacagctgctattttcagcccaattaggagcatctgaaagattcttgattatgttctattgagaaggcagtaaagtgaagtggttctcttaaagcagatttatctgagatcgaaccctgatgctgctgttcactagctgtgtaaccttgtgataattgcgttactttctgtaaaacggagctaataatgaaagctgtgctttcctcatagagttctgtgagatttaaatgagtttagtaccaggcagacaatgttccatatgtgttagctattgtaatgaagacaaaaataataaagaattgaatacctataagtcaaatcctgctttttccttctgattatagtcctactgtgactatagtttcttccctttgtgtgcctaatttaaacag

SEQ ID NO: 37970 - DNA, 1038 bp, Homo sapiens
aggcatagtttattatgctcctgagaaggagaatcagcacttataataattttaacaattaatttcgtacttaaaaaactggctatatccagccttattggaaacaagaaaaaaaaaattaaaaactagcttatagaaaaagacatttgcaaatattaattttctaagttgaaaatttcatgaacttttgaaaagttgggtttctgttttcctttatgtgtatttacataatgaaacttattatcctgaaatgactaaaaacttgtttagaatatgtctatagaatggatatagcttgcagtttggaagaattaaatgtcagagattcatgggttcagtcaatgtcatataaatatttaatattgatattctaattgaacttaacagaatttggtaaatgtcagtttaaaatttttaaaattactaaactcttccttggcgttttgagggatgtagggaatgtatttttctagtgctaatccgtatagaaaattgagactatccaaaactaagggggaaaaaagaaaaaccatacactgatactactattcctgtgagagtgtggtggtcattcctgtgagggtgtggtcacatccacagatggatgttttttctaaaatttctaaactccagtatttcttttttttttttttgagacagagtcttgctctgttgcccaggctggagtgcagtggcacgatttcggctcatggctcactgcaagctccgcctcctgggttcacgccattctcctgcctcagcctcccgagtagctgggactacaggcgcctgccaccatgcccagctaattttttgtattttttttttagtagagatggggtttcaccatgttagccaggatggtctcagtctcctgaccttgtgatccgcccgccttggccttccaaagtgctgggataacaggcatgagccactgtgcctggcccagtgttcttaaattccttgttttattgttagatttatgaaccaacatattggatttgtgtgtctgtgacttgaattaagagcccagtagaa

SEQ ID NO: 37971 - DNA, 1034 bp, Homo sapiens
caagtttcactcttattgcccaggctggagggcaatggtgtgatcttggcccactgcaacctctgcctcctggattcaagtgattctcctgcctcagtctcccaagtagctgggattacaggcgcatgccaccacgcccggctactttttgtatgtttagtagagactggattttgccatgttggccaggctggtctcgaactcctgacttcaggtgatcacctgccttggcctcccaaagtgctgggattacaggcatgagccccagtggccggccacgcatttttttttttttttttaatagttggttctttctatgttgcccaggatggcctcgaactcgggctcaagtgatgcttctgttttagcctcctaaatactttggactatgggcatgcctgtcttagatgcacatttttaaaagttttttgaaattgtaaaaaaaaaaataacaaaatgtattttaaccattaaggatacagttcaatagtgttaagtacattcacattgttgtgaaacagatctccggaagtttttcatcttgcaaaactaaaattcaatagtttttaaacaacagcttcccatttctgcttctccacctgctgtcaaccattctactttctgcttctgtgaatttgactactttagatacttttcatgtaagtggattcatacaatatctttttatgattggcttacttaatgtcttcaagactcattcatgttgtagcatgtgccatgatttcctttttttttgagacagagtctcactctatcaccctggctggagtgcagtggcgtgatctcttctcactgcaacctctgcctcctgggttcacacaatttttgtgcctcagcttccccagtagctgggattacaggcatgcaccaccatgcccactaatttttgtatttttagtagagacagggtttcaccatgttggccaggctggtcttgaactcctggcctcaagcagtctgcctgcttcaggctcccagagtgctgggattacaggtgtgagccaccacaccca

SEQ ID NO: 37972 - DNA, 1022 bp, Homo sapiens
gcctatggggtagccctgctctgtctatggagaagctactctagaaaaaaaagaaaaaaaaaataatcctgtaacaaattatggaattaaaaataaaacttaaaaatatattttatacactagatgtgttatacacaaactatgctaggcatgttttattggacttggggtttcctttttttttatttttgagatgggtctcgcttttgtcgcccaggccagagtgcaatggtgcaatcttggctcactggaacctccgcctttcgggttcaaacaattcttgtgcctcagccttcctagtagctgggatttcaggtgcctgccaccatatccggctaatttttgtatttttagtagagacagagtttcaccatattggccacgctgctcttggactcctggcctcggcctcccaaaatgctgggattacaggcatgagccaccgcgcctggcctggacttggggtttctgatgaggttttcaacctcttactgtaaataagactgtactttactgtgtactattttaaagtaaagctcttgttgaaacaaggtctaatcttcctaagatcaggttttctgtgggactactaaagagtttatatattatgtgcttatcttcactgtaatggctgagttaatttcatattgataaaaaatgaaagatgtgttagtagttatttttgtctataaagtgcatcattatttcctggtatttatttaccctgttttccctaaattcttgagtaaattcagacacacagtaccagaacagaagcttgttgtagtggcaggtattgcaagaaagtaattggagattaagttatattctaggtagatttaatatagaatgcctttactaaacacttttgggcagtggttgtcaaaagaaatgtgcatagatttctgagcttcattccatcattttgcattttaaacaaagtgattctgatacagaagattcttggaccatatttggagataactgatttttagggggtagtttgccaaagtatttaatag

SEQ ID NO: 37973 - DNA, 1290 bp, Homo sapiens
aaaaatgatcttgctgaattacgagctagtggccaaatcctaatggaatttgagacaatgaagcttgaggatttctggtgtgcccaattcacagcatttccaaacctggcaaagacagctctagaaatccttatgccatttgcaactacatacctttgtgagttgggattttcatcacttttacatttcaaaacaaagtccagaagctgctttaatctgagtgatgatatccgtgtggctatttcaaaaaaagttcctcgtttctcggacatcattgaacaaaagctacagctacagcagaagtcactgtaagctgatatacttttttaatgaataatttcaatcttaatatcattgtaaaattaagctgtaattctgtctctttcatatttatgatatactgaattctatgtctaaaaaacttaagaactttaattttgaatgaggcatgtgaaaatatgttttgagaataaaaacacagcagaaaagattaagtactactgcctagttgctatcatgagattttcccaattctaagtatctgtttaacctgttcgtgtggtatatgaaaaagatacctaagcactagaatatccagctaaatggtgcaataggctaggaattgagccaggagaaaagagaagatatcccagaagtcaaaaaggcaaaatgaaagattgagttcgcccgtctttgttatggagaggttaatgaaatcagaagaggattatgaaatataatgggaaaaggaatgatctggcttatgtaagacttacttttaaatatactctttggagttagtctcacaatgtccattcccctagctcctgtgctatgaatatcatattaataaatagcctaatatattaatcactgtttgtcatctttaaattacttcagaactccaagttatcaaggctgctgaaaaggagattcctgagccttaccctagagattgtgattagtaggcctgtgataaggtcaaggatcctcattcataaccagctttccagactgttctgatggattcttggattcttgggtcctctgggttcaatttttcctatacttatttttcctttaccctaattttgtcacttatattacatcttatatgtatttttctaagttcaaaatgtcagagtataaatcataaataaattgacatgaaatcaatggagtaattcaagaccatcaaaaaattccccatgggaatctaacttagcacactttttctggatgataatttggcaaaatattttttaatttaaataaattttcatttctatt

SEQ ID NO: 37974 - DNA, 1046 bp, Homo sapiens
ctaagtcaaactaaaacatgctgtctcatgtttcaaattttaacttgttcttagatgattagtaactatgacactcaactcaaattacatgtatttcccacagaactctgaggagtgtattataaatgagataactggggaagaatctgtgaaaaaacctcaaaccctcatggaggtaagttgataatcatttgtcctgaatttttaagtcctggagggagggctttaaaacctgcacctgagtttttttttttcttttgaaacagaatctcattctgtcgcccaggctcgagcgcagtgcacggtctgggcccactgcaacttccgcctcctgggttcaagtgattcttgtgcctcagccgcccaagtagtgcacctgagctttgttttcacattaataacactgcatttcaatcctccctttcagctgcatcaagaaaaactgaaagaggaaaagaagaagaagaaaaagaaaaagaagaagcatcgaaagagcagttcagatagtgatgatgaagaaaagaagcatgaaaaattgaaaaaggtaatttgtgaagtctaaatagtaaaagtgacaagtagcagtattctttgttttttgggttgtttttatttttttgagacagggtcttgctctgttgtccaggctggagtgcagtggcacgaccgcagctcactgcaagctccacctcataggctcaagcaattcttctgcctcagtgtcccaagtagccggtattacaggcacatgcccccatgtgcagctaatttctgtatttttttatagagccaggatttcaccatgttgcccagtctggtctcaaacttctgagctcaggtgaactgcccacctcatcctcccaaagtgctgggattgcaggcatgagccaccgttcttgccagtattatttgtcaaggcctttatttgtaatggcctgtgatctagtcctgtctccaaatgcatttttacaatgatgaaacaagcctagagtctgagtgatttgctcaagttatattaatggagatattgtgaggtgtaggtattg

SEQ ID NO: 37975 - DNA, 1043 bp, Homo sapiens
ctgatgagccttttggatgccaacagagagaacacaggaaagtgagtgaaatattttttctttccatcttaaagtagctttgcaaaatgacttccatataccagtcattaagaaatgcctgttacaaggttgaaaactaactattgaatactacactcactacctgggcgatgagatcaattgtactccaaatctcactattatgtgatacacccatgtaacaaacaggcacatcacgtatcccccgaatctaaaataaaagttgaaattatagatataaaagaaatggctattagaaatcctggatgactttttccccaaaaaactttatttgggaacattataagctccttcagtctataatcttgacctcccctcaatcttctgaaattgccttcttgaaatttcaagtggcatcttgatgctcaaatccaatcataatttctcaactcttaagttgtttctcttttttaacatttgatatattttactctactattcttcggattttcccccattggaattttgctaatattctgatattgaaaatctggttagtaccaagcactgttttactctctccatgataacctcatgaaggaagtacttatcatctccattattaaagacagggagctgtgtacaagctcattcagctggcacatagacgcaatacaatgaccaggatcttctctggcttcattactgtgtggtttagtcagcatgaccaactgactgaacttttattatctgccctgtcctaatcctaaaagtgataacaaccacagaacaaacagtcattccctttgttccatctcctcctttaaaattagttgttctttgatcgcatcccatggattttgaaaggaaaggtattcttactgatttttttcagcaattgagctttttaatttccttttgccttaaagaagtttagaagaatgcttttgactatccaatggggtgaatgtataataattttaacttttgatttctattgtttttttaaatgagattgtagtcacagaatatgatttatactc

SEQ ID NO: 37976 - DNA, 1070 bp, Homo sapiens
ccacttacatagaaaaatagtagaggtgagggggaaatgccgttttagtcattgtcctgagaatcgacatgctgtttctctgtaaccaaaccagaaaaaactgaagcataagtgctgatttcttgaatagccagtggagctcaattattaaaagaaacacaaaatctccaatgtaataaccagttttaattttagagggtataatagttgcctagaatcaagccaacgcttcagattggggagtgaagattttagaacccaccaatgtactaaacttgcacacggcaatgaatttaattaattgattaattttgtaataacgaagaaagcaaatcaagtgcactgagtccatattttctgattctaacataagacaagtaagagtcagctcctttattcctaatactaggtaaaaaattcattcttggtctctgctttagcttcttttgctcgtttttttcaataaatatttgttgagccttttttaagttgctggcacaatgcttggcatatagcagtgagtcagttagttaagcttccttgtcttatttagcttatgtagaacacagcactggtcattcacactgtgatgggcacaagtaaatgagccgccagggtgtaagataataagttgtttgggttcacgatgggtgatccaggatgcccctgcagaggaagtgactcataagccaataactgagggatgagaataagccagtcagttgaagagatgaggaagagcattccagggaggggaacagcaggtgcaaagattgagaggtaggaaagagcagctctgtctttggtgaacggcacagtaaggaaagcgtcaggaagagtagggaaacaaacaaaaaaacacaattctctatttattttgcaaatactttttaggaggcattttactaagcacttttagggatagaaagaagattaagatgtaatccttgccctcaacaacagaaaaagattattatttcgttagtatagattaattctataaatcaatggatatactgtagctttatatatgtggataatatatctctttttttttttttttttttttt

SEQ ID NO: 37977 - DNA, 1048 bp, Homo sapiens
tcagaagtctaatccatctcatatgttattctgttcccccactgagataggacaacaaacaatctcttgatatttatgtatgtacatatgtacatttttgctgtacttttacataaaaccttaattaagcctagatgtgaaacataattgctcacttgatttttttctccctacccattttatatcatagaaaatataaacaagtgtccatggaacacagatttggtccttcgattaaagctcatctttccagagcaagcatgtagtgatggggttgtcacctccaatctgtacaggttcctcaaccaaatgccatgcagtagttgagtaacagagaaaaaaaaatcattacattgcattatttcatctagtgatgtattctttaggcatatatcagtgcactagtaacttgtattagatattatttaagaaatggcaggccgggcacggtggctaacgcctgtaatcccagcactttgggaggcagaggcagacagatcacaaggtcaggagattgagaccatcctggctaacacggtgaagccctgtctctactaaaaacacaaaaaattagctgggcgtggtggcaggtgcctgtagtcccagctactcgggaggctgaggcaggagaatggcgtgaacccgggaggcagagcttgcagcaagccgagatggcgccactgcactccagcctgggcgacagagtgagactctgtctcaaaagaaaaaaaaaaaaaaagaaaagaaaaagaaatggcaaaaataataactattattattgtcagactgttgtctccctgagggcaggagcaaagttctattgttttatttatatccccaacacaagcaccacttctggagtatggcagatgttctatgtatgcttatgtttattcaatctttgagtaaaatctttacttttattttgcagtacgttggaacaggctctctgtgaaatcattttgaaaataagatatgcttccataattttttttttctcagaaacttggagaataccttacagaaaagactactaaggggaggtatt

SEQ ID NO: 37978 - DNA, 1064 bp, Homo sapiens
ttttgaaagtggccaggagcagtagctcacacctacaatcccagcactttgggaaaccaaggcaggtggatcacttgaggccaggaattcgagaccagcctggccaatgtggcaaaaccccatctttactaaaattacaaaagttagctgggtgtggtggtgcacacctgtagttccagctactggggaggctgaggcatgagaattgcttgaacccaggaggtggaggttgcagtgagccaagatcgtgccactgctctccaacctgggcgacagagcgaaactctgtctcgaaaaaaataaattttgaaagcaggatgtctactttctatgatatagtccttaatgagtgtattgtgtactgaacaaactttaatatttctgcatttaaaaatctattgatcattttctatggtaatactataagttcctattttaagatattcctatacatctggttttggtgggtggagaggagtttaagatttgactttttccctaaagtaaacctggaaaacctgactagcttctggaactttacatccttttcatagaaaattggtactttctgatagtttttaatgttacccagaggttaacaataccccaaaagtgcagttgaccatatgtttaggtaagtaagtgcttatccccagccagggctttaaacataacctttacagtttctggaaacagtagcaaaaattaccaaaactatgaaggcatattctttttgatttaagcccattttcctcattttcttctagcaagagtttggagtccagccaacccagatttctttgaaaacaaaaaaacacaaaacattaaatgataccactaaaagaattcaagcacctggccaggcgcagtggctgactcctgtaatcccaacactttgggaggcccaggcgggtgaatcacgaagtcgggagatcaagaccgtcccggctaacacggtgaaaccctgtctctactgaaaatacaaaaaaattagccaggcgtggtggtgggcacctgtagtcccagctacttgggaggctgaggcaggagaatggcatgaaccc

SEQ ID NO: 37979 - DNA, 1782 bp, Homo sapiens
gcctaacctactgaacatcccagcttagcctagcctatcttaaatgtgttctgaacacttaacgttggcctttagctgggcaaaatcatctaatacaaaacctattttataatgaagtgtttaatatctcaaataagagtattgtaccacatatcgttatcccaggataatatcagagtacaaaatttgaagtacagtttttaactgaatgtgtattgcttttgccccattataaagttgaaaaaccataagtcaaaccattgttaagtcggactgtttgtgttacatatatttgggattttttagtggccctttttaaaaagctgtttcttatttctgatcattgtgagtggggatagatgtgggaagaaccatgtctctactaaaaatacaaaaaatagccaggcttgttggcacacacctatagtcccagctactcgggagaccgaggcaggagaatcacttgaaccgggaggcagagggcagatcatgccactgtattccagcctgggcaacagagtaagactctgtctcaaaaatgaatgaatgaatgaatgaacgaatgaatgtactatgagctgatactgggatttcaggtaccgcagtttgtgctgaatgatatgtttggggtaaatcagtttttttcttatagaatttcggcgtttttgctgcaactgccactaattttgcatttaaaagaacaaaagaggaatgtatttttcaaaggagtgaatgaggttaaaatcaagattttgaatggtataaatatgcaactaattcagttgtaggatattattaaattttttattgctaaatatgtttctttcatacgttgcagtgcttacagttccaacagctttccaagaaaacatttccatatttgtgttatttgtaaagtatacataaataatgtaaaataatttgggattatttcaactttacattgtatgtctgaatttcatcgatgttgtacctggctcagtcaatagttgtcacaggtattaagccattttggaatttgccacttttttctgggtaacctgttttagtttagtttacagcatttagaaacagaaggtaactttatagaagtaacaccaatatcctagtctgcttgccccgaatataactaatagtattaggatgtaagcaatattaagatggtttttattattttttatacactgtgtgcttttactttttatttaaactacagcaaaaaactgattttttaactaaaattgaatggcgtttatcttaatgaccagttattgaccaaagtgtactcagaagatgttattatgtcccaatctaaggaatcctttaatttggggattaattttacttacacatgccatttcagtttcagttgcctcattctattacatcattcttgtcaagtctaagctttatcatgtctgaattcttttaacactgaatctgtgatgtaaaaatgtatgatgtgccataaattttattcataataaactaagttatagcctattgtaatctgtaaaacatttcttgtaaattacctaatttattttttcatttatgtacagtatcttatgtaaatttgaaaaatgtttgccatggcgcattctgtaaacattcccgtattcttttccttaatgcttatttgcatgaaggtaacttgggttttgcttgtttgtattggataaccattaagccaacttcagtttctctgcctttttttctgtagtttaaccatttctaattttgttcatattctaaatagatgttagaatcatactttttatt

SEQ ID NO: 37980 - DNA, 1070 bp, Homo sapiens
actttacatatgataggtcttgaggcatggcgttttgttctgtcctcatgattgtttctttgttattaaaggatgagtatggtgggatgagctttgtctgtagtggggctatcttggtctttgtggccttctctgaagttggaccagactccgttccctggaatactgtggccacactcttcagtttgcaatagcagtggctggttgctccaactggacctccaactttctagttggattgctcttcctgaacaattattatctagtttaagtgtgttgttgctttagggtcatggcatgcttatgtatttctgttaccatctgaccatggtactatgccaagttctcttaggggacctgaatctttccagtagaccacatttgagagagtatgagtcaactgggcatagttcccaacaacccaaaatacatacgtacttcactgaagcagatctcatgattccattgacttcatttctaaaattggactttgagcagccaatttctaaggattaaaaagaaactttaatgcattgtagacctctgtacacagaaaaatctttgtaacttttgggcttaattttcattcttaaaaaatctggtaactttttcaaatgcaaccactgtcagtttgctgtgaggctaggcaaacaacacaaggtatagaatttcccatcaccaccaccctgaccccgcgagaagattgccttttaattagagacttgtagaactagtgccttttaagttctacactcatcttttccaaagactattagtaaacttgccatgtaatttgacatggcagttccttgctcagctactctaaataaagttggaaattaggtggtctcttagtttgggtaaagtcagtactattgccagtaatatacatggtaattgaaagcccttaaagtggttcagattatttgccaaatattagactctataaaaatttctgaggttttttttcttttacctttgagtgtacatgtgattgctataatgtaaataccagtcccttaaagactgtttctataagcagaatgatgcagcacaaagtggaaaggttt

SEQ ID NO: 37981 - DNA, 1701 bp, Homo sapiens
taactttacacgcttttcctcctaaataaccactctaataattcatacattcatatcttcaggtaaagaaaactgaattttaaacaattgaggctgggtgcagtggctcatgcctgtaatcgaatataaggacttgagtataaaatttgaaaactacatggggaaatgtctttatcatgcatctcttgatagtctactgaaaactattaagtaaacctgcggtctgtaaacaaaaaaacccatagtgatacttaccttgtgtaatgtaaacaattttttaagctctttaaagtacatctagatttactggtaatgtatagaagtcaattttatccccaagcatttctacttcctaaaccattagcaagagtctcaaaacaacttcactaaactattggacctccagtgttaacttgccaacataaaaatctgaaaaactttgtaatcactatcaaaaatacaaaagagagaataaattcccaggtaaaaggctttacaaattttggaactattatgcttttgtttactaaacactgatccttttagtaattctgcagtattgcctcagactcccacaaagtttcaaaatagctcatctattagattcctgtaacatttatttgggataaacgtggttttgttgccgttgttcataatagaataaaatatttagctttgatggttcagatgtaatacaaagaaataactaagtttgggcctgagataaatgtggtaaagcaagaatgcagagatgctgtaatgatgagtgagttttatagcattactgaggacctgaaaacttgctgccaaggacactttgaaggttttgttggctggaagaagtgtctctggaatcccactcctagctcttcttgaatatttgaaaagaattagataagggccatggggacccaggtcaccccacctcttcttttcagtttggctacaacattggagtcatcagtgctcctgagacagtcatacaggactttctcagttacactttgaaagagaggtcagaagactctccctctgaggttttgctcatgtccccctggcccttgtctgtggccatcttccccaatggtgatatgattggctcctttctgttgcactctttgtcaaccactttggcaggtgcagttcaatgcttatcataatttgttggctattactggttgccttatgggattctgcagacaagctgagttggttgaaatgctgatcctgggccactagattactggcttgtaatgcggactctgcacaagttttgtgcccatgtacattggagagatctcgcctactcccctttggggtacctttagtgctctcaaccagctggacgtcgttggtattctggagatccagatctttggtctggagttcatcttggggtctgaagagctatgcccagtgatactgggctttaccatccttccagctgtcctataaagtgtagcccttccattttgccctggaagtcgtaagtttttgctcattaacagaaaggaagagtactaatgagatccttcagcaattgtaggggactcaggatgtgtcccaggacatctaggagataagagtgctaggatgatacaagaaaagcaagtcactacactggcgctctttagagtacccagctaccaacaacccactgtcatttccatcatgctccagctctctcagtagctctctgga

SEQ ID NO: 37982 - DNA, 1860 bp, Homo sapiens
tggattgttatacagttgaatttatcagtcttttcttttatggcttctggatattgattcatagtaagtaagtcttctacattccaaatatataaaggaataaacccttattttcttctgatatgttaatggtggtatttttatacttaaatctttgatttacttatagtttatcttagggtattttgtgagttacagatcatgctttcatttttcaggttttttgtttttttttccagaaggccctaatgtctaataatccatctttatttcactgatttgagatggcttttttacatatgctggcttttcattctgttgatgtaccagcattatactttcagctttatagaggcataaaaagtatgttttaatctctagaagggctagtttcactcctttgcttgattttctgtatgaacttggcaaacattttctctattacaaaaatgtttttggaatctcagtaagtttacatattaacttagggacaaatgatatctttatagtaagtcttgctgttgaagaacttagcttgtctgtttgtttaaggctacttttgtgcctttcacacatttaaaaaggcctctccaaatatgtccatacatggctttttaaattgattcctaaatattttaaatttactgttctgttgtttatcagtcttgtctcccattatgcttcctaaccattgttgcttgtgcaccccaagttctttgtcagggaatccagtgccctttgatagtggactttgtctcactcttcagtaatatctcctgcctctcccttgcatagacgcttcactccgaccaaacatcttgtgatttcatagatgttttcatttctcatttctgtgtgcctttaacctttagttgcctctgcctaagatttttcttctcattttttctggctttttctggtccttttgctctgaaagccctgcctcataccttcttaacttttttctcttaccactgtaataaaagatatttttttgtttgtatttccaaggttagcctttgtttggggttagcctttgtttggattttttccctgttactgttagcgcttctcttgctgtcttttgtatgtaggcctgcattgtccattacagtagcctctagccacgtaaggcacttggcttatgagtgccacatgttgaattgatgatatttggatatattggcttaaatgaaatgtacaattaaaattaatttcacttgtttatttttacctttttaatgtggctaatagaacatatatgaaattatatattactcgtattttatttctattggacagtgctgcactagactaattcactgtttgagggactatctgtctccagcacaaagcttggtatgtcataaatgtttcttgtgactgaatgaaaaagaatttgaagttaaagctgagatacttttggaaacattttgtaattttggctaatttgttttgaatcaggtttaagtgaagatattttggtaatctttgctttcttataataactaactatgctttttttgagatgtcattttaaccttaattctttgaaaggtattactttactcttgcatagattttttttgttagtttgttttgatcttatccctatgtgtttctactttttggtcctaattttataaaaatatccaggttgtagatatatctgttaatacgtaaaatgttgctttttatcagcagatttgactttatttttcatttttctgcagttttgggaatatgatttataaggagaagcgagaatctgttagtaaagaagatctggcaagagctactttagttactatcaccaataacattggttctgtggcacgaatgtgtgctgttaatgaggta

SEQ ID NO: 37983 - DNA, 1083 bp, Homo sapiens
tgcataaatattttaaattttgatgtttcgtgttttaaaatagtctataaaatacacccacagagatgcttatagtaaagctcagttttccccattgcaaataaacttgatgtcaacttgtgccacccactgaaaatatttaaacgtcacgtaattagtaacatattagatgtctctgcttttagcctgaaaatgatcagagccctctcaaagactcttgtccccaccacttcagtttgctgagtagcaggactgtgatgggatatttactagtgtgtgtttagtcttttaaaaaaatcttttggctatctcccctcaccacatactttttttattctctttctcccactttggtttattctcttctttctatggcattttcttcttccctgcagattccattctttccacataaaattctgtacatgtagagtctcctgtttgatttctggtgttctcaaaaagaaaaggaatagaaaatgcttcacaaatccagtaaataaataatatactaatagcaaggacctttatgaaatgtctgcacgaaaaccaatgcaccacaaactgccatctctacacaccccagacttcccaatgtgatgatttagatccttttctacttaggcggatggtgccatttttgccgaattcagcatgttcattgaacagtttctcgaagccaaaagccaactccactgcatttctgcttggtaaggtttggtggccttggcgtggggtagaggttgttgattcaccggcctctaagctgatgataaatctagaagctgggcagcaggactagactgccttcatagaacctctgcagggagtcggcggccccaacactgcaagaaatctatgaaaaagaggcttagcaaacccgtgtgaataaaggctccagaagaattaggggtcgagaagatgtggtgagactccgtgtgagtgggcatcagtgagaactttgaacactagatacagaactcgccaactgaaaatgtgcttctgcttctcgagatgcctgtggactgtttattttcttagtctaaatatctaaatcttctatcatgagcatctattgagatg

SEQ ID NO: 37984 - DNA, 1024 bp, Homo sapiens
aatatatatatgtatatatatataaatgtgtgtgtgtgtatatatataatccatgacccgtgtcccaaagaaaattattgacattttgcctattttcttctatttatgctttttaaagaacattatataacatgctttttaatatgctttcattcaacatcataagcattttacctgtttcttttaaataattattaaataaataacagtttttcatttaaataatctttagttcacctaatcattctatggtacatttggtaagtttttaatgccttgagaaataatttttaaaataggatgcttccctccttatttattagattatttctgtaagttagattcccaaagtgggattactgggtcaaatgttataaacatttttaaggcttttgagccattttggggttgaggaaaaacccttcttgttagagctctacagaagccaagtaatgatgctaaatttcctaatttgccgtatgtcactgtttgctctctgaacttaagtgaactttgacttggccacaaaactacagttctgatttaattcattcattcactcacacaggtttaggtgtcaggtacagtgccagatgctaaagataagagaccaagcgaaaccagagcccctgctctcatgtccagaatagcatctgacccagaaagaccctgatttgcttgacaatagagttagataaacccatttgaaagcatctatttttaccagagacttgatgcttgaatgctgactatcttcttccggttttgttcttctaagttgctccgattttagacaaagatgaccactccacattctatttgaaaaccattcaacttgagttcagggcacaaaactaaaatattttgtctgtgcctgggcaaaccattttgtgtggagcctcatgggcctagcagctgctgcttccttttagtaattgggaagcactgggatttctgataaataattgaaagtgtactctggcaagttgctacagcagttttaagggcagtgcctattttacca

SEQ ID NO: 37985 - DNA, 1072 bp, Homo sapiens
gttatactgttgctggcaagtaatttggggtgtgctaattaccatctgaactgagcagcaattctctgatagggaccaatttgtggtaaggagactttccttgccagggatcccctctctaattttcggaaccatgaaaacttctaccattctccccagtttgacatctcaagggcccctggcctcagacctttttgcatggaaaggctgggagaaaccagctaatttattttcctgagttatgttattgaaacctgattccattatttatttcagaaaaaaatgtgtgttttcatacacttcatatgtagacaagccatgtaatgatatattactctggaagcagcctttgagagcttctagttgaggcatggcaaagagattatgtcctggatgcccactcggattagataaatggtgctcagggtaatatattgaacatgactctgaggtcagaaaagctcagaaaaggcatctggggatatattaggcctggatgccgtggacccaggacagggaacggagcacattccctaggtgctgtcactcccatggaactcatgctcttcatctagcaggttaggagccggcacctagagattggaggcaactaggatgctgctgttgcttacaacacctctgtgcgagttagaaaaaggtgatcccccccccactctgggctgaccctgctctgggatcacagggcttgggatgaatcctaagtgaatgcctcttaagcaggctccctagtgctttggtggagggagaggagcatagagctgagtggtccccagtctgttgtcccagcagggtctctggccactggccaatgccagcaatcaaggaacttctccataatttgccccaatttgcccccatttccccttgttcctcctgaaggatgcatgcagctcagacttcagccatcagccatcagagcatccctgacagtttgaggccttgaaggggatcaggtgtaactgagtggtttaaaagtatgaaaaccagacagatctgggtctgaatctcgactttgtcactttgggtccttggccaactgcttaatttccca

SEQ ID NO: 37986 - DNA, 1026 bp, Homo sapiens
ctagctttgccggtggttgggcccaataaaaactgacaccatgtcataggctttccctcacttgaccacagaggtcctgaggtcaagtgagagactttccaagatgctcaacagccaagtcctctgtccagccctcagggccagcttagaggacaggaacaagctagtgaatcatggggtctctctgggtcaaccacggtgatgtggccttttagggaaacacagtgccctcctggacagactaaggagcagctgagtggacccgcctccagtggaccggtatagcctccatggtgctgtgcaactctgaacggattacattacctctctgggcctcattttcatgaaagtagaattcttgtatagtcttagtggttttcttagtggttatagtccactgggggaactgtaagtatccgcctccctagtgtctagaacagtgcctggcacacagtaggtgttcagcagatgtgtatttaataaaggaataatgaacctcaaaactacaagtctgtctttagttcttaaaagtgaaagatgggccattatagatctgcattctggcatatgactaagggatcctcactagtaacctatgacatgagttattaagggtatctaaaatttggattttatgaactaatatttattgccttactagagttaccaaggactcctgttgagtgatctactctggagtctggttgccaggcattgcttagcaaccttgcaaaactcctactgtgcacatgcccatgaaaagaactggaaatcctgagcacttaaaccacagggctttctaatcaggaactcatcagcgtcatcctgagtgctctgtgggttttgattgctgctcttcttgtattaattgataagttctgcttttgttgatcatctggattttctattatttctgcatttttgccgttttgattgttatgttgttttctctccagtattgtttgttgtcacagagttctgtctcacctggaaagtgagaatgaacagtgggttgcagctgtagaa

SEQ ID NO: 37987 - DNA, 1041 bp, Homo sapiens
agaaatctcagaccccacaggcctggtggggtgtggtggggagattatgtaagagagtctaaagtccttgtaataatagctaccatatgctcagccctgcacttatagaatttatcatctcaaagcacaaccctctgcaagagaggaatcacatacccattctacagatgaagagatgtagatgtgaagtcacatagctaatgggtgactggaagaacctgggacccaccccaggcccctttcatttccagacagattccatgtctggtttgtctctaccatgtttcttcgtacccaggaaacataatgcctaaattatacagtatacaatataactatctgaatcagaatttaaactcagaactccacagcctgggcttttttcaatgatgctgtgatgacatctcctcttctactaggaagccttccatagtgaccagaaagctacaggaatagtcctcgctgtgcagaaggatttttaagtttgtctgtcagtgtctgtcatcataagagatcacctggagagtttttataaaagaatggtggtcctacccacaggtagtctgatttaattggactgtcatggattctgggctccagcttcaggttgagatgaccctctggggctctttctcatctccctttatggtcagcaggcagcttcagtattggatgactagagtctgatggggagaccacagcactccaagtgctgttctcggacaagagagttctttgagaagcagccacagtaaagaaggttttctgggggctttttggttacactggatcatgtgaactatagttttagatctactctgaaaattcatttcatgctgaaaaaccccaagagaatgcaattcacatctctcttcctcccatcctccagcaatttgttttctagcaggagatgactggttcctggaagtccatctctaggggctccggtagcagcaacttggtgagcctagttgcttcctgtggggagtcttgggggaggatgaggagtttaggaaaagggttggataggggaagaagata

SEQ ID NO: 37988 - DNA, 1036 bp, Homo sapiens
gcaggtgttcttgggcctatagcaatttgcctcttcaggagccatttctccattgactcttggtttattttagtggaggatggtatttagaaaccaagatctacttgctaagctgctcattctattgagttgttgcttctagatgcacttggtggacagagctagggaatacatgtatacacacacacacgcacacacacgcacacgcacacacgcacacacgcacacgcacacacgcacacacgcacattctaatctctatgcatctaatcatctctctttttctctgtcttcatgaattcacactgatttcttcaagccaatacaacaagttcatcctagttttctgccttttcgtatttgtaacacttcttggacagtaagaaacccagaacatatttactaatttgcttaatgctcctgcaagtaaccaatctgttattactgccactgctacctattctacggtcgtgtgaattacctcctgacccactcgtgctctgacctgacgtgctgggatgcatctctcttcctcctatatggatgccctcctcccctcagtgtggctccaacaccttgtgctggtccactgcagctgccactactcatggagacactctcctcacccactcagactctgaatccccatgctaggctgtcaccaacactgcctcccttcatgagtccccttcttaccctacctggtgagacaccttgggccaggctatccttgccacatccaccactctgtgtagacacgctccttacctgtctcaggttctagaactcccatcttcaccttctgcagactcctaccttgctcagccacacatgatggcttttagactcaatcaggaagggaaaaaaaggagaaagaacacaaatgatcaattttaacagctgtaaaacactgcgtgatgtggatgtaaccacctagttacaccacctccatgtttgcttaaccgcttcccagctgtattaagtagagttatttatgttttttccttttctagttaccattccaggaatcaaacta

SEQ ID NO: 37989 - DNA, 1050 bp, Homo sapiens
catagtattcatttggcttcgctgtcaaaaatcattattctgtgcagtcgtggccctgggaaggggaaataagaaggccctgttgacgggctgtcttggctctggaattcatgcatcctggccttgccaaggttctggcagggcctgctggtgtgttggagcctgcagggcaggtcaggctggttcagaggcccatgctgaggggtgggtgctctgaagtggagtgaagcctcaagcccatgaatgccaccccagtcatctctggtgtcagctgctgctgtggccccagcaggttctcaaagctcccaagtcctccctacgacacagcccaaatgtgtaaatggcactgttgccctgacagtgcatggaaaggacgttggcatccaattggcactccttctcccttattcaatattaggtttgatttgcccttcgccattgtttccaaagatcaaggaatgtcaataacattttaaaggaccaataaacagcctcctataaagtaaacctcttcccgtggaagcacactctactactaaagggaaggccctgggctctgatttgtcctttgcattgagaacggtgtggggatcagtgtgtgtgtatgtgatttgtttattgagttggctttgcttttttagtttttcttttaaaaataaaatccttccttcccatgttactaaattaatttatgtttttgagaggttgagtctcaaagtgtaaacaataaacctccattcataaggtggatgttgtaagcttgatggtggttgtgaaagtgatttagctttgaccacttttcatcctacagcttcaatatcaaactggttaggaaagcccagggggaagggagggggcaggggaggaggcaattctgaatgaatgaatggattttttgttgtttttgcatgtttaatatagaagttcccctcgttccttgggagatgatggcctttgaatatgcagacaacctttgaattgtgcctactaaattatagcaggggactttggcacccaaggagttctgactttctgggattataatagtaa

SEQ ID NO: 37990 - DNA, 1050 bp, Homo sapiens
ttttcatgacatgcagtaattaaatgaaatttaaattgcagtgttcataaataaacatttgtgctacacagccatgctcattcctttatgtattgtctgtggctgtttttgtgcttcagtggcagagcttagtagttgcaacagagaccttatggcctacaacatctgaaatatttaccatatggccctttcagaaaaagttggctgacttctggtcttgcccctgctccatctattagcggtaaaccaagggtctacatcaggaatggcaaataagtgttttcttcatgccaactcagtttggtcagtagtgactggtgggtgtgttgcctttggaaggattctgggaccccacgtggaccccaaaggactggttgtggttggttatgtctgccttgcaggagtgacctgtaagccacttacctatttgctattatgggtctcgagtgtgttcagactgttcctgatcataatcttctgccctgctgctttctttctggatagatgcttcataagtcagttgaaaaatccacgtggcagaattactgtaattattgaatggagctttaaaataggaattacagaggaaggagacaaggatctcttgagtgattgctcctccccctgacctcccctcccaataagcctaagaaaatatagggaaggaggaatggacccaagtaaaaactgcttaaagaggcatatggcaaaattcaagacatccatattatggttttctttttctggtgtattacaatagatgaactgacaacatctatatattacctaaaagtgccctgaacaagattcctttggttgagagatgaagcagtgatcaccaatgctgtttcttattggctgtggtagaaaggaaacttgtgttacttcctccaggccctccctcctacctaccttttttggaaacctcagaacaactgcctagttgtgatcaattataagtcaatggaaaaatcttatctgcttaagctggaggttccctgtatcccagcacaagcagtgagaccacaaatgtgtttgtctcttcaattt

SEQ ID NO: 37991 - DNA, 1052 bp, Homo sapiens
cctgtagtcccagctactcgggaggctgaggcaggagaatcgcttgaacccaggaggtggaggttgcagtgagctgagatcccaccactgcactccatactggcgacagagtgagaatctgtttccaaaaacaacaacaacaacaaaaaaaccacacccagattcctgggccttaccgtctagagattctgattttgtaggtcaggagaagattggggggatcttttctttttgctgttgttttgaaaatcagtaaccctgagttgagtcagatacaaccacacaggcttatagaccacccagataggttgaaggtttgggtgctgctttcccgtcacagatgatggggatgttgcagcctttgaggtttgaaaaggcgagtatctaatgcattctttttattttttattttttttaaaaaaagacagagtcttgcactgtaacccaggctagagtgcagtggcatgatctccacttactgcaaccgccacctcctaggttcaagtggttctcgcgcgcctcatcctgccaagtagctgggattacaggcgtgtgccaccatggctaatttttgtatatttagtagagatggagttttgccatgctgtccaggctggtctcaaactcctggactcaagcgatctgcccatcttggcctcccaaagttctaggattacaggtgtgagccaccatgcagcccctaatgcatccttgtcttgccatttgtttcacctttcagagagcagagggttctagagaggaattagtttgagatgtgtttataaccagttaggaggatttgggttaatgatgtgaagtttacattactttaaaagtggctatgttctcagcctgggcaacatagtgagatcctgtctctactaaaattttttttaaaaaaaattagcctggcatggtagtgcatacttgtagtctcagctactagggaggctgaggcaggaggatcacttgattctggaaggtcaaggctgtagtgagccatgatcatgtcactgtactccagcctgggcaacagagtgagatgctgtaat

SEQ ID NO: 37992 - DNA, 1025 bp, Homo sapiens
tcccaaagtgctgggattacaggcatgagccaccatgcctggccaaaatcttactttatatgctagttttagtggcttacattatagctcttaatggtgatgagttagaatttgttttaaatagttgcctgtaattgggcagttatttctaacttttccttgttatattgtggtggacattcttatgcttaaagcaacttagatgccccttattcttgccaatattcatcacagcaaagacttttcatctctgttttgaactcttattttttggatctgttaagactcaaatgtcttagtaaaagcaaaatttcaaaatccttgttcaatgcttccccctggtggtacctggtgtcagtgagcttttcctcacccaagatacaagggaagaaacattcctcgacagtggggcgctaggataaattgagtggaagatagatgccttcccatctcatacctctaaatatggacataagaacttcagacaagattttgtgtgaaggaaaactgaagactcctttggatatttataaaggatgttttctctgggatggatttagtccactttaagttaggggacatactgatagtgaaagctcttggttcattccatgtaagactcctgagataagttcctaacggaattaataggtatttgtaattcagctcttcagttcttagaattatcttttgtgttattttttctggtattatgtatgaggaggctgtcagaatagtggtcaatagatagcttgacaaatgtttgacaaaagtattgaggttattttgtttttagacagggaggttactgcacttcatagtagttgtggtttgagtctagtgattgagattatttttaatgttactgtccagatgcagtgtatgtagtttcagttttaaaaaatatgtactgattttatgtaaggacttgtaggaagatttgatgagaaatgcattgttagtataagagtctgtgagttgtccataaaccacctacgtaagatgcagagcttttcaggtataca

SEQ ID NO: 37993 - DNA, 1080 bp, Homo sapiens
ccccttcctgtgtctccagtgttctcattgttcaattcctacctatgagtgagaacatgcagtgtttgtttttttgtccttgcgatagtttgctgagaatgatggtttccagcttcatccatgtccctacaaaggacatgaactcatccttctttatggctgcatagtattccgtggtgtgtatgtgccacattttcttaatctagtctatcattgatggacatttgggttggttccaagtctttgctgttgtgaataatgccacagtgaaaagtagcatcttcaaatcggagagtgaagtaatgttttttggaatacccattatgcactaagcattgtgtagggcagtctccatccccacaacaactctgtgtgtttgtatttgttcccatggtaaaagaacttgctcaggctcacacacacacacacacacacacacacacacacacacagaatgagtgaccaaatcaggaatccaacttctctttggcttcaaagcctttgactttcctactccatcatactgcattcctgatcagagccagttttgtgacctgtagagcagctagtgttcagtggtgattcttacatcattacctacattggtattttcaaatggattgtttggaaatactgtataaatagtccaaacattttaggacttgtagaacataaaggaaaaatagggaaaatttgagagaggcttattccctaaagacaacaaacaggatcttgtaaaacactgataccttaaatagatctataatatccttttgaataatactatgagacaaatgttgtttaaattttataccccagtcttataattttaggttttggaaggaatttagagagactgctatccataaatgagttgttactcttttcagagcacaactagcccacttccccttctcattaagtttccatttagccattaggtgggagcttcaaaagggaaaatccaatcatgtataatctctagttaatgggcatctattgagcgactggatcaccagaaagaataattacacagtacctctttgtgcagtaagcacaaaaatcaaaagctaatgcatt

SEQ ID NO: 37994 - DNA, 1051 bp, Homo sapiens
ggatgtgtatagcatttctctaatttctaaacctaattagactcttggatgcttttttctccagacatcttttgcattgcctggaatcctctggatcctctggtcagtgtaacttgagagcagcattttccctttggtgtcttctgaaacctttataaaagaagtggaaaagtatgtaggatgggagaactattgcagcccccatggttttattaaaaacaattttattaaattgtatgtctagccttctttatgaagccttaaggcaatagctgctattttcttcagggggttgtttccttatcaaccatataagtaaacatcatttctctgttttggaataaatgaagagtgaaattttctcactgtgaagagttgtttcatgtatagtgtacagggaagtctgacatttcttgtgtttccatcttaagtaaagaaaatattaaggtggtttaggtcacaatagctctggaggattctggctcctatatttcaaaagcttttagtttaaaacatatatacatctcttggctgggtgcagtggctcatgcctgtaatcccaacactgtgggaggctgaggcgggcagatcacgagttcaagagatcgagaccatcctggccaacatggtgaaaccctgtctctactaaaaatacaaaaattagctgggcatggtggtgtgtgcccgtagtcccagctacttgggaggctgaggcgggagaatcgcttgaagccgggaggtggaagttgcagtgatttgagatcacaccgttgcactccagcctggcgacagagcaagactccgtatttaaaaaacaaaacaaaacaaaaaaaccccacaaaaaacagaaaacaaaacaaaaccatatatacatccctcatatgtttcctctgcagtacctggagacatggggtggggactgacttcccatctctcttccacttaattcctcattcctttccgtgctccacctttcatgtttccagccatttgttctccttaccactcttagaacccagacattgtggccttgcaagacggctttgtaact

SEQ ID NO: 37995 - DNA, 1050 bp, Homo sapiens
ctccagcctgggtgacagagcaagaaccttgtctctaaaacaggggtgtccaatcttttgtcttccctggaccacattggaagaagaattgtcttggactacacataaaattacactaacactaacgatagctgatgagctaaaaaaaaaaattgcgaaagaaaaaaaatctcataatattttaagaaagtttacgaatttgtgttgggcctcattcaaagccgtcctgggggcctgcaggccacgggtttgctctaaaaaatatataaataggctgggcgcggtggctcacgccagtaatcccagcaatttgggaggccgaggtgggcggatcacttgaggtcaggtcaagaccagcctggccaacatggtgaaaccctgtctctactaaaaatacaaaaagtagctgggcatgatgatgggcgcctgtaatcctagctacttgggaggctgaggcaggagaattgcttgaacccaggaggtggcggctgcagtgagccgagattgtaccactgcactccagcctgggtgacagagggagactccgtctcaaaaaaaaaaaaaaaaaaaaaaatatatatatatatatatatatatatgtatgtacacacaacacacacacacatatacacacacatatatgtgtatgtatatatggttaaaaaaaaccacatctttcctctttataagaaaatttacgaaatagactttgaaaaagaagaaaacgtccattggtagcgtgagcatctaccacccagagagaacatttgttgctattttagggccttacttcctcctgtctgttcggtagggaggaatccatcaaattgtgcagtgttattctgctgctgctgattttaacagtggtatttttaatgccctgtggaaccccagcttgactttggagtcactagagggataaaggaggggctagcacagtgtgcctcctacttcgatctcacttagaatggctctggatttatctattctacttaatggggctcttaggaagatttcattttaaaaactttctccttatagaaatagcta

SEQ ID NO: 37996 - DNA, 1049 bp, Homo sapiens
ggcctctattggttatctctcaaccaagctgaactgagtcagtgtttcatttgcctcagatgtcctgattcaaccagttgattgttatagcaaataatcaggaattcagaccatgtggattattgatttgcccagattcctgtggcatgagaatcataccaatgttaataatagtatgtatcatttattttccacgttctttctatgtgttggactctaggaattggattatctcatttgatcttttatggaaaagttatctaccttgccatttttgtatatgaaattatagaggtgaattgacctgcctaaggttacacatttatttaagtggcagaactgggttaggaacataatctggatgactgcaaagccagtgctctagtcaccagtctgtagtgacaactgccattttaacttgcaactgccatttttaggttgaaacaaattccccttaatttttggagttaaaaatttaaagccaacacagcagcatgatgtaatagactggcaagttgtcttgggaatgtcatttgcagcctcagctgggggagagtgttagtgataagccttttgctggggtaggactgattgcttggaatgacagtgaggatcacgtgaattgagtttgagtgcctccttccaagctctagtgcatatagtgctgggcagtaagtagcacaacttcttgacagctgcctttcttgtttctttttttacttttaataggtgtagtgagccacagtggtctgagaatgccacagaacttatcatagcttttgatataagagaatattttttagaggagggagatagcttggtagaaagaaccctggctttggtgcagacaaacctctattctagtcctgttcctactacttaatgactttgtgatactgggcaagttactttattttcccgaacccctgtttcctcatctttaaaaatcataaagggtttttatgaggtagagaaagataattgccacctcttactgattcttactcttggggggtatgaaatccattttttaaatttacttgctcctg

SEQ ID NO: 37997 - DNA, 1065 bp, Homo sapiens
aaagtcttaaggggaaagaggcttagtgtgtattgttggcttaataagcaggtcaataagtatttgttaaaattggtaaatacccatggtatcaggggtattcttcagacatattttagcaatatgaaagaacactgctcacttaaaaaaaaaggacaatcgtctgtactgtgaatttagctaatatgaagaaatcttttcattattctaactgaatagttaagcaatcatggataatagttattctcgaatgatcaacatgggtttccagccatgtccctaaattaaaaatttgaagcttcaagaatcacttacggccaggagccatggctcatgcctttaatgccagcactttgggaggccaaggcaggcagatcacctgaggtcaggagttcaagaccagcctggccaacatggtgaaaccccgtctctactaaaaatacaaaaataagccgggcatggtggcaggtgcctgtaatcccagttactcgggaggctgaggcaggagaattgcttgaacctgagagatggaggtttcagtgagccaagatcatgccaccgcactccagcctgggtgacagagcgaggctccatctcaaaagaaaaaaaaaatcaattactgttgtggtcctagctgtaatttaatgctcttaggttgatgaatgtggaacttttatttttatccattattttcaaattggatcaatgtcctcctgatctattagatctaagacctaagaggaacctaccttgttttggctagcgggtacagactttcttactaaaaggtgggtgtatttcctagaatagcattttctgttgagtagagatgattttcagcaatgtggctggtcacttagcttcaaagtaattattgagtgtgaaagtaagcagttgtaatactttttaaccactgtctgtgttcttaccaaatggaaaacaacactcgtcttgaaactggaagttcccagtcctgggatgatctgagagttgagacttctgattagtagatattggcagttgcatcacacaccagcttgggtgctgcctaggatcaagctgtct

SEQ ID NO: 37998 - DNA, 1078 bp, Homo sapiens
ttttctagcactgagcatttaaacacattttaaactgtggatgtttaagatggactcaaaattaattcctggtaaaagaatatgtttttatttaaattgtgtattagtccgttctcatactgctgtaaagaactatctgagactgggtaattcataaagaagaggtttaattgactcacagttctgcaggcttaacaggaagcatgattgggaggccttaggaaacttacaatcatggctgaaggcaaaggggaaacaagcatgtcttaccacgctgatgcaggagagagggtgagaagggggaagttccacacatgttcaaacaatgagattctgtgagaactcactatcgcgagaacagcaagggggacgtctacccccatgagtcaaccacctcctaccaggcccctcccctgacacgtggggattacaattcgagatatgatttgggtggggacacagagccaaactacatgaatatgttgtgaactgccccattaaaaaaaaattgtcaagttactctttataattaaacaaaataagtcatcacttaaaattatacttggtattattaaggtattaatatgagtactaggtggtcattggagaaaaatcggaaaatatggatgaataaaaatttgaaaagaacattacccttcatctctctaccagagagattacagtgaagatccattttagttttaatgcttttgggtactgatatctttttttttttttttttatttttaaagacaagagtctcactctgttgcccaggctggagtacaatggcatgatctcagctccctgtaacctctgcctcctgggttcaagcaattctcgtgcctcagcctcctgagtagctgggatcataggtgcgtgccacctgcctggctaattttttgtaatttttagtagagacaggctttcactatgttggccaggctggtctcaaactcctgacatcaagtaatctcctgccttggcctcccacagtgctgggattataggcatgagccatcttgcctggatgggttctaatatcttaccttagaataattcaagatgaaaattgttt

SEQ ID NO: 37999 - DNA, 1048 bp, Homo sapiens
acttttggaaatgctattctttatgatttttgttcgccctaatcccttttattcaccaagagtttctcttgtcatcctgccaaaataaggagggaggagagaactagtatttgttaaatacctactgtttgccagatttacaccccctgtttcttttaacctttactgtaaccttgaaaggtagacttgttttccacattttagcatgggaagaagtaggaactggaggtgattaatttttgcccaaggtcacgtagatagcaaagtgatagattttatttacttacattttacttattcatttttactgtaatgcctgtgctctttctcacaccagcatggggtaagaaaaactcttctgattgttctagaggccccacctctgtaataaccacatcttagccagcagcactcgagagagcctgaggctcaggagcagcaggatctccaggctgtggctggccagcagcagattctctgcatttgggtagattgagaagaaaagggggaagccttgactgcctctgcctaaactgcctctgtaaactctcatgttccttcccttccttgttctcccagctccattcttttctagtggcatatggcttctttgttggagttttaggttgatttttatttagtaatttcacagctattgtttattggatgtctcttttaatatagcaggtcttgtacctctccagccatttaaacagctgactcttaggttatataacttgcttgaggtcacatagtattgccaggcgtggtggctcacgcctgtaatcccagcactttgggaggccgaggcgggtgggtcacttgaggtcaggagttcgagactagcctgaccaacacagtgaaaccctgtctctactaaaaatacaaaattaaccgggcgtggtggcgcgtgcctgtagtcctagccacttggaaggttgaggcaggagaatcacttgaacctgggaggttgaggttgcagtgagccgagaaagtgccgttgcactccagcctgggcaacaagatcgaaattctcaaaagaggtcac

SEQ ID NO: 38000 - DNA, 1064 bp, Homo sapiens
gtttcccaggctggaatgcagtagcatgattgtggctcataccttgacctcccaggctcaagtgatccacctcagttgactgagtagctgggactacaggcatgcaacaccatgactggctaatttttgaagttttgtagagacaaaatatagggtttttgtagagacaaaatggggtctccctatgttgcacaggatggtctctaactttttttaagagcatgagtatttcatatagccaaaggttttacccactgttcttaacctttatgaacatgatgtgacatgacagactatattctctgcatgaaacatgctttcttcatgtttatgccattttagggttttaataaatcaaaaaatctcagtttaattaaagatttaaagatttaagttactagtgacattggatgtatttttctaatgtttgtggctattcgtatttcttttgtgaagaaagagaagtgttaaaattagctgtagttctgctctgctgcttctaggtgcatgggggagtgtagcggaaggaaatcactagggtgaggaacttctgattttgtcgtgactggggcactgctgctgcccttttgtgattgaaatggccatttttgttaaaagccagctgtggaagtgtttgcctcactctgcatactgtccatggcaaatggaaattgggtcccttctctgcgtagactctggctctggatgctctctgtgagacactttaggatcagttgctgttggcttcactgacagcttcaaggactctcactcctactactagcctttgctgctttgaggtggggttctgttgggaattccttccccttctcaggtgggcttttatttcttaatatgcactgaaccctatttctcgtccagttttttcctgtattatgtttatagaaataccttgaaaaaacttatatatgtggagggcaccactggacaggtttcaagtgccaatgtagtttgtcttttactttgatattcctttgatgattttggttgcatcagtcagtaaccccaactttgacacctctgttttcctcctgagtcttgtc

SEQ ID NO: 38001 - DNA, 1617 bp, Homo sapiens
gtaatcccagctgctcgggaggctgaggcaaagagaatcgcttgaacccgggaggtggaggttgcagtgagctgagattgtgccactgcactccagcctgggcagtagagtggcactccgcctcaaaaaaacaaacaaacaaaaaaaacccaaaaaaacttaccctttgaggctcgagcagaagttagacgtaaacatggatgtattgggatagtggagcttcatagcaaagggaaccaagtgaacaacggtttgcagacagtggtgtttgttgtctatctgggagacaagtaagtaattctgtgtattgccggagtattgcttgtgtggaagggagtatgggtgatgaatttgaaaaggcaggttataactaaatcttgaactttatcccgttaggtcattggtctccaacctttttggcaccagggaccagtttcctagaagacagtttttccacagaccaggcacggggagtggggatggaactgttccaccttagacatcaggcattagctggattctcttaaagagcatgcaacgtagatccctcacatgcgcagttcacagtagggttcctgcttctgtgagaatctaatgcctgggctgatcatctgacaggaggcagagctcaggtggtaatgcgagtgttaggggacagctgtaaatacagataaagctttgcctcctgctcatctcctgctgtgaggcccagttcttaataggtcacagactgataccagtccacagcctggggttggggatccctgctttatgtcataagatgcaagctaataacctgtggataggtagagcttcacaaacatattttatgtggtccacacggattttttttttcttttttttttgagacggagtctcactctgttgcccaggctggagtgcggtggcgccatctcggctcactgcaacccttacttcctaggttcaagcgattctcctatctcagcctcctaagtagctgggactacaggcgcacaccaccatgcctggctaatttttgtatttttagcagagatggggctttgccatgttggccaggctggtcttgaactcctgacctcagatgatccatcctccttggcctcccaaagtgttgggattacaggggtgagccaccacacctggcctggtccacacggattttatttatttatttattatttgtttttgagacagagtctcactctgtcacccaggctggagtacaatggtgtgatctcactgcaacctccacctcccaggttcaagtgattcttaggcctcagccttctgagtagctgcaactacaggtgcataccaccatgcccggctaatttttgtatttttagtagagatggggtttcaccatgttggccaggctggtctcaaactcctggcctcaagtgatccacctgccttggcctcccaaagtgctggtattatagatgtgagccaccgctcctggccagattttaaaaattgggacatttcatatgaaaacactaatttgtggttttgtttgaaaattggagctcagtagtagctgtccttttgagtcagagcttgtactttcctgtacgtaactcctatgagaccaatttcactttatctaattgg

SEQ ID NO: 38002 - DNA, 1073 bp, Homo sapiens
gtgttagaattattgagatgctgtgttggtctcaagtatggcatatccttaagggatttttgaggcatatttttgtcgtatgctattttcaccttacatattcacttcagaccctaattcctaggcctcctgcgactccactgtaactaagttttgatagtgaaagcatggagacatgaagagttcattatagctacagtcaatcaatactcgacaaattttttgaatgaattactatatctgtgatacaaaattaaggtacaaaaggggctgggtgccatggctcactcctttaatcccagcactttgggaggctgaggcaggtggatcacctgaggttaggagttcaagaccagcctgaccaacatgatgaaaccccgtctctactaaaaatacgaaaattagccaagcgtggtggcatgcgcctgtaatcccagctacttgggaggctgaggtaggagaatcgcttgaacccaggaggtggggggttgcagtgagtcaagattgtgtcattgtactccagcccaggcaatagagcaagactcaaaaagtgcaaaagggagtaaccagcgaaaaaaaaaagtttctcattccttctagccacccaactacattcttgtgtaacctttctatacatacgtgtatcctgtacacattatttttgcacctttttttaagtaaaatatgactcagttatctttcatatcagttcccaaagagctgtcatattttttgaggagataatttaatttaaaagatacatgctgatttattgtacaaatatgccataatttgggtaaccagtttggactgatgcatgtgtagatgatttctagtcttttgctgttacagttaatgctataaagaagaactgtgcatatggaaggtatcttcaggacaggatcttgggcatactgactaggtgcttttataaatctgatagacattgccacattgccctccagtcacattgcagcaatttatactctcacagatcttgagtaacagtgctcttatttcctgacagtctcatggtattacatgaattttaaactgtttgctttttaaattgt

SEQ ID NO: 38003 - DNA, 1052 bp, Homo sapiens
cctgtagctgtttttcccctgcagtttcttctctcctgcctgcgtgtgatcaatgtgaattccaagtctgataatagcacccttccccccacagccctgtgccttaaaacccttcagtggctcccacattgtccctaagataagcgccgcctctttgctgtgccctggccggcctccccagccttcttttcatcctttgccggaatgctcctattttcccccacgagggggtctttgtgtgttctgcttcctcagcccccaaagcaaagaatttttgagtccatatttagaaatgctttgtatattacctgcttcagcattcatagcttactatggtaggagctgttcattttcccattcgcagaagaggaaacaaaggctgagagaggtaacattgctgagttcacattcagggagggggtcgaggcctcaagcttgtgttctctccgggacaccctatgacctgtctgtcccattacagcacgattaggaagagaacgcaggactggtgagggcggggcacacaggccctcatccacgcagagggacagcagattggcctggaggaggcagttgcatggagagctttgaagatgtacacatcctttggcttggattttctgcttctagaaatcctgagggaatctgaaaatcctgaaggagttatcacagaggttcacaaatacttagctaccagaatatgaagtagcgctatttaaaatagataaaacctagagacaccctgttgtttattggataaataacatccatagcatgaaatattttcagccattcaaacacatgtgatagaagatcacattatttatttatctgagacggagtttcaaaactgggagtttcatcccagttttttttttttcttttttgagatggagtctcactctgttgcccaggctggagtgcggtggcacgatctcagctcactgcaacctctgcctcctgggttcaagcaattctcctgcctcagcctcccaagtagctgggactacaggtgcctgccatcacgcctagctaatttttgtatttttaat

SEQ ID NO: 38004 - DNA, 1035 bp, Homo sapiens
cggtgaaagaatcaccatcttctcgcttttgccacgagtggaccttgcatcacagtgctttgcgtttgtcatttaatcctcaggaaaacctgcgcaatggttctgtgctatcacccccgtgtcacagatggggaaactgaggctcagaggctttgtaactgccctgcccgtctcctgccttatctgcttccacccccggccccctccttccggccaggctgtgtcctgtccccgctggtccctccagcctgctgtttcctgcctcccagtctgtttgcagttttctctgcctggaaatacctcccccagatcctgagtttgtgtctaaagtagctccccaccctgcaccccagcactgtgttcttctccctgccttctcagccctgggcccttctcgctgccaggcattccgggggttttgccaggtgcctgtcgccaccacgggaataacatgtggcatgtcaggcaggacttggttgctttcatctctgtgcctagaacagtgtcgggcacataatagatgtgcagttagtgtatgctgaataaaactgtccttcctccaaagcccccagccctccctccatgaccgtcccctcgaggtcacaccccctactgtgcactcttgagtagccccggtcctgtcttcccaacactttccatgttaggagtagatgtttgtttatttgcttactctctgctcccccaactaaactgtggattccccgagggtcctcattgtattctctgatcccggctagtgtctcgctcctgatggagcctggtgagcacctgaatgaatgggtgagtggacagtgaagcagaagagcagaggctggaaccaagttctcccgtattcaggcccagcctcttggcattgtgctgcctccttgtttcacgttgcaagtctgaaaggagctcctggatacagctcatttcaagaccaggcactggtgcccggggtggcctgaagttgtcataatgctgcagcttcttgggatgaatcgtccaaaggcagccatcatctagcaggggaca

SEQ ID NO: 38005 - DNA, 1061 bp, Homo sapiens
gttgtgtaagggacagtttcactgaaagatgcaggaactgcctgggtttggtcacttctcatactgactcttaagaatagctgatgacaggccaggcgcgggggctcacgcctgtaatcccagcactttgggaggctgaggcaggcagatcgcgaggtcaggagatcgagaccatcctggctaacacggtgaaaccctgcctctaccaaaaaatacaaaaaattagccggatgtggtggcgggcgcctgtagtcccagctactcgggaggctgaggcaggagaatggcgtgaacctgggaggcggagcttgcagtgagccaagatcgcgccactgcactccagcctgggcaacagagtgagactctgtcaaaaaaaaaaaaaaaaaaaaacagctgatggcatgtccataacttttagttctcaaaaataaataaatacataaagaaattgtagttctgggaagacatttctttgttttgttttgttttccctaggaatcagactgagaggaaggcatatttttgtaggaatcctaagtgacgtgatctaagcatgaaacttactggtgatttcatttggtagagatttaacaaacacatattaactgtgtggcttttgtgctgttctttcatgtaaggaatctcatttaactttctcaatgaagttggaggcaagagatgattaggccattttacagatggggaaatggaggctcagggagattgacttatccagggtcatgtagtcaattaagtggcacaccaggactcgaccccaggtttacaatcttttcctctgtgttggcaccttgttggagaagcgggaagtgtctgaccttgttacatatccacggtgtattaggactgggtttttcggttttttttttttttggagacagagtcttgctctgtcacccagactggaatgctgtggtgtgatctccgctcactgcagcctccgcctcctgggttcaagtgattctcctgcctccgcctcccaagtagctgggattacaggtgcccgccaccacacctggctactttttgtatttttagtggag

SEQ ID NO: 38006 - DNA, 1067 bp, Homo sapiens
tcccaaggggtaagttgaaggagattacatgaaagtgttctctctgctcttagaatatcagcatgtggtcatttggggtcaccttctggttttatagttgataaagggagcagagacattcttgcttcctaaagtgtctcacttagaagcgggggagggggaacctacagtggtcctgtaatacagagtttcattatcatagcttgtacgttttctgatagtcacccatttctgtcttgggcagttacctggataataattttaacttgatggtgattcaagagcttttaaggctttgatcattgttgtattgctaaacattaacacatagggcctattcaacaaaccctggctttcactgctctgggtttgtgatggctgcatcatgtcacagagatgctcttcctaaatgaatcggagtagttcatattctctttaaattctcataattttgaagttaaaagttgagatgtgccacaacatataacaagtaggacatagtgaaaaggaactttagaaacaataaaatgatacccagtacttctggaatggacatcgagtgagacacttaacctgtaacaagagctctgagaatgggaagaattgcttatctgttattgaatgaaatgacatgtaatagtcttggaagcaaggagactatctttctgcattgtatcagttgtagggtaggaataggttattgtgggtgtttgtatttttgttttttatattttaatactaaatttgctgactaaaacctatgatatacctgcataaggcaagcacgtaagtgaaaaaataactttttttctataacaagcaatccttaagcattttaagaagggaataatcaataggaacagaacttatacttcagtggtaaagataggtttttcagctggggacaaggatggatactaacagtcttatctataggaagtttcataattgctcgaagagggaggaaagaagttttcagataaaacattaagagagagtaaggaaaattaagatgtattaatagaataaaattcagtttccaccaagaaatacttctgatttaatag

SEQ ID NO: 38007 - DNA, 1086 bp, Homo sapiens
aatacaaaaaattagccggggtggtgggcgcctgtagtcccagctactcgggaggctgaggcaggagaatggcgtgaacccagggggcggagcttgcagtgagccaagatcgtgccactgcactccaccagcctgggtgacagagcaagactccgtctcaaaaaaaagtttactactcggctttaattatttcgtttcggttttgggtgaaattattttattactgactggttccttagttgtacagaagcctattatctttagagagactcttcatggtaattaactcagattcttatttgcctggtgaaaggaggcagtgatctaatttgcttgttaagagcttcctacttattttgtgtttgtgtattttattctgtcatccttagcaaacctattggtgacttgacttgctttggaggtgaacagagtattaattgcatgtatagcctattcagcccagtggacttaggttgcccttgggctgatctgtgcttatgttgaatgaagcagaaattcaggcttcatgtgcagcctatactgagtactgtatgaataggaagtaatgacaacaacttttaagaattctctgaattttttttgttttgttttcatttgtttgtgtttttttttgagatggggtccccctctgtctcccaggctggagtgcagtggcacaaccacagctcactgcagccttgacctcctgggctcaagccatcttctcacctcagccttctgagtggctgggactataggcgcatgccactatgcctggttaatttttttattttttgtagaaatgggagtctcaccatgttgcccagtttggtctcttaactcctgggctcaggtgatcctcttgtcttggcctcccaaagtggattacaggcatgagccacggtgtgtgcctagccccttgggttgttttgtttttttttttttttaattttttaatttttttttttgagacggaatctcgctctgttgcccaggctggagtgcagtggcactatctcggctcactgcaacctctgcttcctgggttcaagtgattctcctgtctcagcctcccaggtagctggg

SEQ ID NO: 38008 - DNA, 1050 bp, Homo sapiens
acctggctgatctctaaattttttttgtatagatggtgtcttgttttgttgcccaggctgatcttgaaatcctggcttcaagtgatctgccctgcctgggcctcccaaagtgttgggatcacaggcatgagctactgcagccggccaacttttggctgcttaatgtactgtaagtgaagttgtttgtttatgatgtgaaccttacctcttagcccatttgaagctggaaatgcaacttagcactattaggcctactctccctatctctcacctgacattacttttctcattcctctcttgggcataaaatattacatctcttcacctccaattggaacagacttatgtttaaccgtaggaaattcagacaggaagtacttcatggaaaaggggccggtggatgagatgtgtttgacagtttggctgtggcttgtgaagtaggaaccagaatagatggcatgccaagaaggacctggtaggtaaagtctggtgcctgctctgctgtgtttttaaaaatctgactgttgcttatgaagaatggattagattcagatgaaaccagtgggataccgatgcagtctttacatccagtgactcacacacagcttcttcccatcttagggctttcgtgctgtttcctttgcttggaatctaaacaatgtgtggtgctggccaggtgcggtggctcacacctgtaatcccagcactttcggaggccgaggcgagtggatcagctgaggtcaggagttcaagaccagcctggctaacacggtgaaacctcatctctactaaaacaaaaattagccgggtgtggtggcacacacctgtaatcccagctactcgggaggctgaggcaggagaattgcttgaacccgggaggcagaggttgcaatgagctgagatcatgccactgcactccagcctgggtgacagagcaagactctgtctcaaaaaagaaaaacaaaaaaaaaaacaatgggtggtgttttttattacagttcttaaaactagcatgcccctcccacttgctttaaaaaagttgcttttaga

SEQ ID NO: 38009 - DNA, 1015 bp, Homo sapiens
ataggaccatatagtataatgaaaagatctgggagtcagaagaacccttgagtgttccactcatcttccgtttctttatgaccttaaataagtcagttgacttcccagctttcgtttttaagtatgttagatgaaatcagtagattcagacattaacatggaatcttctttttttttaaatctgacattgaacactaacatagcctcagcatttgatttctttatattttattttgatggtgtggaatcagtaaagtcctggtacacaaatttttaaacatgatttagagtctcataaagttctgtaggagattttaagtttgaatcaccaacatcatcagctgtactcagaagttaaacacgtcatgtcaagcagtgttatgacttaagttatattttctccgagtattgtttatttacttcgtgttgatgagagcgtatactgagcagatgcatctgagcttgctgtgacatttagtggaacctagacatccatgtactgtgttaatgtgctcacttgtacagttttacgggactggatgtatacatgcctgtattaacaaaagacaccatgcagacctgtggttttcccagtcagtaacacatttgcaggaagtttcctaaatttcatatatgcgtaaagatggcaagaaaagcttcattccaatgcctttacaatcattttgacctggtggcgtaagctaacatgtctcatgatggtcttcatattagaaacttaacatttgtggaactttttattatagttcttaaaaatagcaaaaataggttttacagagtaatctcagttgtgtttatggatctctgaagcaggtgtttcttttgttctcttgggttctttggaaccagtttttaaaatcatacggtaagattctaggaaaaaactttttttttttttttttttttaaagagaggctctctgttacctagtggagtgcagtggtgtgatcagagttcactgcagtctcaaactcctgggcggtcaagcaatcccctg

SEQ ID NO: 38010 - DNA, 1039 bp, Homo sapiens
tttgcaccaacctttaataacttgctcatcatcacatagcttataactggcagtcagagcttaaacccagggctgctataaagaatgctagttttctgtttttccgtagtttactttttttaaattgtgacaaaattggccaggcccagtggcttacgcctgcattcgcaccacattgggaggccaagacaggtagagcacttgaggtcaggagttcaagaccagcctggccaacatggagaaaccccatctctactgaaaatacaaaaattagccgggtgtggtggtggcgagtgcctgtaatcccagctattcaggaggctgaggcaggagaatcgcttgaacatgggaggcagaggttgcagtgagccaggatcacgccattgcactccagcctgggtgacagagtgagactcggtctcaaaataaataaataaaaataaaattgtggcaaaacatataacaattaccgtctcaaccatttttaaatgtgtaattcagtggcattgattatattcacaacgttgtgtggtcctatatgtagaatcataaaatatttgcccttttgtttgtggtttatttacttaccataaagtctcccgtgttcatcctgttgtagcatgtatttgtactctatcctttttatggctaaataatattccattgtatgtatataccgcttttttttttttttcccctgaggcagagtctcactctgcctaggctggaatgcaatggtgtgatctcagctcgctgcaacctctacctcccaggttcaagcgattctcctgtctcagccctccgagtagctgggattataggtacgcaccaccacgcctggctaattttttgtatttttagtagagacggggtttcaccatgttggccaggctggtctccaactcctgcccatgtatataccacttttttttttatccattcatctgttggacatttgggctgcttccagattttggtgtgaatgatgcagctctgaactttggtgtacaagtgtctgttttcaatctctgtttccagt

SEQ ID NO: 38011 - DNA, 1036 bp, Homo sapiens
gcctgggcctcctaaagtactaggattacaggcatgagccacggcgcccggcctgctatcaaactctttaacctctgttttcccaatctgtaatacggcccagtaatattctcttgtgactcagctgctccctattctgtccctcaagcatgagcgcccctccggagtggctctggagcgctccggaggggcgctcgtgcttgagcgcccacaaaagtgggctgcctcaccaaagtgacaccctgggcgcgcatcagacaacgctttactctaggccatcagagctttggagcagtggcctctgttctaagcccatctagccctgctccactaacctggggcaagctgcttcccctttcggggcctcgtaccctcatgtgtaagaagaacctgcggtgaacctcatctattctcctctcccacccatctgccagtgctaagtcccttccatacccaaacttgggagggtcctggaatccccagggttcctgaaggctggttcagggagacaaagtgggaaggaaatagacactttctgggaagaggcagtgagggatcctggaccttcagaaggtcggttggtgttatggagatgtgactggttcttgcagggatgggttcccctacaagggccggggggggactgcatacttctgacccctgggccctccttccctcccagcctgcacagccctctgcagtggagcacactgcaaagatgggatttaaaagtttcaccaagattgacaccaatcattcactcatccaataaacatattttaagtacccatggtttgtaaaacactcagtagatgtgaaaatcataccaccaaaggaaattttgagattctgttccaaatacctgggacaaaactgataggtccaactagttagtgtctgtatgactttgagtggattatttctcctctcaaaccctcagttttgacatctctaaaaagggagttggaccctcgtgtggggtggggcggaggagtggcgagcaccccccccccgctctgctggcctctgcgcgcaa

SEQ ID NO: 38012 - DNA, 1030 bp, Homo sapiens
gccaggaggaggagacacgcgcccttgggccgagggctgggctgcggcggggggttcagaatgtaagatgcctggtgttgtcgccaggctcccgcgccccgcgtccaatcggaggttcagaggaaatgccggattgaaaggatcagaagcaagagaccaaaaaacgtttccccccggcctaacaaagccccgggcggcttcggctctgctcctgggtctggtaggaagttgagaaatcggtttatggtagacagaacagagagacaagcagataatctctgtttttaaatctcctttggatttacgaatctttttaaagatctgatgagaaccgctaaacagaaattgaaatgttgctcaccagacagcttttgcgtacaatcggaggagggtcctggaccttctttctgcagcccacccacgacccgggtttctggtgcctttctttctttgcgccaggaaagtggagtctgggatcgagggccttgattttaaaatgggatactgcggaccctcaggaatctgacttcactttattttttcagcacaacttgccggcgcggccagggcggagaggttccctcgtggaaaagttaggaaatgctgcgctaccgcgggcacaagggagtggacgagatgagtgcgggatcatcccgcaggccatcccaggatcggggagggaggccggccccgctgcagaaaggggccttctgggagaccccccagcccaaggcaggagcccgggcgattcccgggaggccgcaggcgctgggcgaagcgctgggcgaagggccgctgccagccgggagagaattcataggtttgttgaggagcagaggcctgggaacaaattcgggcgggcacggcggctagaactgatcgctaccaattcgaggaagccagcaaggcaggttccgaggccgcctgcccacccgcagcttcttggacactgcgcaaaccctgctgcggccaggctggagcctccgatcaccaaaccaacactccctggccttctgtttcttgattcctt

SEQ ID NO: 38013 - DNA, 1074 bp, Homo sapiens
tctctctctctctctctctctctctctttgctttcaatctttagaccctacgtggacctcgtgaacttgctgctgacctgtggggaggaggtgaaggaggccatcacccacagcgtgcaggttcagtgtgagcagaactggggaagcctgtgctccatcttgagcttctgcacctcggccatccagaagcctcccacggcgccccccgagcgccagccccaggtggacagaaccaagctctccagggcccaccacggggaagcaggacatcacctcccagagcccagcagtagggagactggccgaggtgccaagggtgagcgaggtagcaagagccacccaaacgcccatgcccgaggcagagtcgggggccttggggctcagggaccttccggaagcagcgagtgggaagacgaacagtctgagtattctgatatccggaggtgaaatgaaaggcctggccacgaaatctttcctccacgccgtccattttcttatctatggacattccaaaacatttaccattagagaggggggatgtcacacgcaggattctgtggggactgtggacttcatcgaggtgtgtgttcgcggaacggacaggtgagatggagacccctggggccgtggggtctcaggggtgcctggtgaattctgcacttacacgtactcaagggagcgcgcccgcgttatcctcgtacctttgtcttctttccatctgtggagtcagtgggtgtcggccgctctgttgtgggggaggtgaaccagggaggggcagggcaaggcagggcccccagagctgggccacacagtgggtgctgggcctcgccccgaagcttctggtgcagcagcctctggtgctgtctccgcggaagtcagggcggctggattccaggacaggagtgaatgtaaaaataaatatcgcttagaatgcaggagaagggtggagaggaggcaggggccgagggggtgcttggtgccaaactgaaattcagtttcttgtgtggggccttgcggttcagagctcttggcgagggtggagggaggagtgtcatttctatgtgtaatttctga

SEQ ID NO: 38014 - DNA, 1032 bp, Homo sapiens
aactgtacaatatttgttttttccatcttgtacattgggctcctgacaagattttatgttttcctcaaaagtttaagaatctccaggaaagtgagctgcactcccttggtagtttgtttcccctgatcaggggttttggtcagttggggatgctttaacaaggcgccgtagactaggtggcttgtaaacaatggaaatttacttctcaccattctggaggctagaagtccaagaccaagatgccagcatggtcaggttcaggggaaggccttcttgcaggcagcagactgccaactgcttgttcttctcatgtggtggaaagagagctcgctaacttcctggggtcccttttgtaagggcataaattgcattcgcggaggctctgcccccatgacccgatcgcctcccaaaggccctacctccaaaggccatcacattaaggattagatttcaacataggaagtctgggggacacaggcatttagttgataatatcaagcttttacatctggtaaaggaccctgtgaatccgactcaggaagtggtttggtaaagttggaaaggtattggcttgtgactgaggagaggtggctttcctttgttagcatcccatagccggatgctaactttgctgtatttaacgatgctcatcactaagggccgatactgtctaatgcctggtctacctgaaaatgtgcccttcagtgctctagtggtggtgtatttacatctaggcttcctgtcgataagctgttagttaccattgaatccagggagcactttacacactaatcatctttcccagttcacagcctgtttcttatcttctttgtcatgatgtacatttactcatgtctttcctttgctgtaccctgacagaccatttgcccacttgctgcccagcctatttttacccgaaggcttaaatggcctctgaagtctcaagtctacgggaaaataagtaaaacctgcccacatgcttgtgatggtattggaatatttcagtcctttgagaagaacacttcactttga

SEQ ID NO: 38015 - DNA, 1001 bp, Homo sapiens
atacatgaagagaggttagcccagtgccgggaatattttaagtttttaataaatgttctgtggtatttttattatcggcaagcaggctcagatccacagactgattttattcttacatgaaccttaagaggttgaaattaggactttcccccagttatgattcttagaagaatcttaattgagattcaggcagatgaagtgacttgcctgagggcaaacttcttagaagtggcaggtttgggtcttgaactttgattttgatgccacgtctcacaggttttctgttccactgtgacctcatgccctggagaggaacacaaatgtggggggcagacagcatgcaaatggaggcagcctgtagtccttacctggaaacttcacgggaaacctcacccagcctggacaaggacgggattgacagattgacagctctttctcgattctgtgggtggtggtgcatggccattcttagttggtggagtgatttgtctggttaattctgataaggaaccagaccctgacatggtgactggttacacgatccctgagcagtcggcatcccccaacttcttagaaggacaagtggtgttcagtgacccaagattgggcaataacaggtctgtgacgctcatagatatctggggctgcacgtgcactacaccaactggctcagtgtgtgcctcccctacaccagcaggcgctggtaaactcttgaaccctattcgtgatggggattggggattgcaattattccccatgaccgaggaattcctagtaagtgcaggtcataagcttgcattgattaaatccctgtttgccttgataagtccggctcaaactggacttgaggtctgactttggtgagactcactctgacatcccaggtaggagactataccttctagtctctttccagaaacagggcatcaaaagtcttactttactcctgaaggtttgcagtaaaaattaaatattcagctatgataagtggctatagagat

SEQ ID NO: 38016 - DNA, 1071 bp, Homo sapiens
gagagtccatctcaaaacaaataaataaataaaagaattactgaagtcagaatctcaacatcgtaagggactcggattcctcctgttcttccactctcatcctcagcacacttccattctcaaagtcacctcaatatctcatataattgccgaagcttccgtcatcatgtttgtattccaggcgtcaggaaggaggaaggaaagaaggacatacttcctcctttgaagaagaagacttccaggtagtcccatgtaacacttctaccggccagaacttggtggcatggctatacctaactgtcaaagaggctggggaatgagactccactgaaaccccagactgtggtttgaatccagccagcctgcagatatattgtgattggccttgacaattttgaatttttaaaaacattagacacttaaatgttatgagactacataaaaataagtgtagatttctggctgctctggaaaactcagacctgacaaccccacattccacatggcagtttttggctgaaactcagtagttgtccctttaggtggggccttgctctccatcctctccactccctcaggttgtctgcaggaaccctgtggatgtctagtccattaccctcactccagccccttttttaaaaaaattctttcattattattattattattattattattattattattattattatttttagacagagtctcactctgcctcccaggctggagcatagtgatgtaatcacggctcacagcagcctggaactcctgggctcggtgatcctcttgacatagccccaggagcggctgggattacaggcatgcatcaccatgcctggctcagcctttttaagggagtctctgatgtgcccagatcacctgctttcagaagagctgacctcaggttgctaacccctcctggctccatcagtgctggccactggtgaggcggtgagggggatcacagagcagctctccatattgggctatctattacaggttatcattaatctgcattggcaccttcaggactctaggaagacagagtcagccaccagaagccttgag

SEQ ID NO: 38017 - DNA, 1050 bp, Homo sapiens
ccttgttttctgccacaaaccaacattacccaatatgcccaaatgaccacacttcagccctctgcccatgaaaggaattcttttctcacggccttctccccacacttcagccctctgcccatgaaaggaattcttttctcacggccttctcctggttttctggaagtaagcacagagggtttgcctggcccaggatctgctttgaaagagactgaggggcagtgcgaatggcagggatgtcccttcaaggcagggctcacttcatcctgcgctaacaggcagcgtgagcaggttgctgagcaggccggggagactcccagcaagggctttgcaaacactctgggttcgcttttgcacccaatgaggtgaaatgaaccccgtgggacttacttgagatcaacagttgtcagtcacaggccttaaccccttttacattttttccatgacaaagggaaagtgtgggtctgggagctttaggcccataaagggaattttgataagggagctcctgggacacatatccctgaacactcatgagctatagcctcggacctgaccgggaggctgcgagacggagggggttggctttgactctagcaggatccctggatttgctggtgaatgaataagcgactggcaagaagtagcatttactaagtgctcgtgttctggggcctgagctgggtgttttgcatctttttttctgtttaactgtctcaatggcacgataaagcgagaacaagtgtgtgcgtttaacagaccatgaacgtgaggctccacgcaggtaagagctgccccaggtcacacagtagcaacgctcaaatctgaacccagggctatccaacttcaaagcatgattctctcccactgtgacatgctgcttcctgtggggcagactaaatggattaggcgaaacggcacagacggataatacgagggatacggagatgatctgggcagggctgctggtctccagcaacttaagggtgataaaatgtttgggttaattgctgcagtgtaaaaacaaaactgcatgtgtgcataacgtga

SEQ ID NO: 38018 - DNA, 1032 bp, Homo sapiens
cctagcacttcgggaggccaaggcaggccgatcacttgagctcaggagtttgagaccagactgggcaacatggcaaaacctgggcaacatggtgaaaccttgtctttacaaaaaaaatacaaaaattagccgggcctggtggcatgcacctatagtcccagctacttgggaggctgaagcaggaggatcgcttgaacctgggaggctgaggctgcagtgagctgagattgtgccactgcactccagcctgggggacaaagtgagaccctgtctcaaaaaaaaaaaaaagtctactctgggcacactacctgtaggggtaggtagtcctgctccataagaagcagttaaaaaacaaacacacaaacaaacaaaagattgggcataagttgataactatttacatctgtgtgaggggttcagggagccttactatgtatatgtttaaaatgtgccataattttttaaaaaaaggtatttcattgtatgaatagacttcaatttatttatgcatttatctgttgaaggacatctggattgtttcgagttttttaccattacaagaaatgctgcttaggacttcactggacctgtcccccggtgtataggtatttgagtgctagttgaattctctatccttttccactggtctatttgtctattcttgcagcattaccaccaaggacttaattgctatatcttattttttcctgtttggaaaagacttggctattcctgagcctattctcaaccatacagattttagaatcagcttgtccatttctatgagaacactgtttggattaatgggaattgttctgaacatacagattaatttggcaaggagaaacatctttataatattgagtcttttcctccaggatctatgagtcatttgaattaatgttagggtataacaagggtattgcacataagatcagtatacaaaattcagttgcacatatggagtccaattctctatgtatcagaaagaggtagcaagaaaatgcaatttataaaaggataccacactta

SEQ ID NO: 38019 - DNA, 1034 bp, Homo sapiens
aagtaatatcaccattttattgttgctaaagtaaattcacaatttttatgtaaagaattgcatttgtaaaggaaactaaaatactgtcatagacagaaaactagtgatgcttgccagaaatagaaggtacattataaaaatatatacaataaaacaagcactcattctgttctagagggataccattacccgatgagctcaaggtctgctctgtttgttctcaaggagtgaggagagcattaaagacttgccaggaccaagctgaggcttcccctttgataaaatgagaaggaactaatgagagtgggaaagagccctgctttctatgcttttcaatgtcatttggggcttctcacctgaactcattccatgtagcattctttgagaaacgttaactgcaccctgaacagttagctactgcggcattacacacacaccactgactcgggagcatacaacaataacccctcattcctagagagctgcaggtcagctgatgctctgctgatccaggctggaattgattgggtgactcttctgtctagggtagaacagggttggcaaactttttctgtaaaaggtcagaaagtaaacattaggcattgtagaccacacagtctctgtcacaatgactcaaccctgctgttgtagtgtgaaagctgacacagacagaccagacataaatgaataatcatggctgaattttgataaaactttatttatgaacccttaaatttgaataaaacataatttttgcatgtcatgaaatagtattcttccttagattttcttccaaccatttaaaaatgtaaaaaccattctttgctttagggccacacaaaagcaggcagtagacaaaactgcacttgaagaccatagtttgctgacccttggtctaaaataaaagctgtcatttcctctaccagggctggctttatgggtgtgggacgtgtgtagtcgctcagagtcttgcacaaagaaggacccacacttggttgaatgctgtgcagtagctctcttgaaatttttaataa

SEQ ID NO: 38020 - DNA, 1047 bp, Homo sapiens
tttaatttcagttattgtttgtgtttgtttgtgtgtttttaagagacagagcctcgctctgtctcccaggctggagtgcagcggcgcgatctcggctcactgcaagctccgcctcccagattcataccattctcctgcctcagcctcccgagtagctgggacgacgggcgcctgccaccacgcccggctaatttttgtatttttagcagagacagggtttcaccgtgttagccagaatggtctcaatctcctgaccttgtgaaccacccgcctcggcctcccaaagtgctgggattataggcgtgagccaccgcgcccggcccagttactgtattttttaattctaaaacttccatcggattcttctttatatttttctatctctttgctgaggctttctatttctttactcaactttctatttttcatttgcttcaaacatgattatgactgcttgttgaagcatttttatgacagttgctttaaaattctttcagataattctaacaactgtgtggtgttagtgttgacaactgttgaccctcttttctcattcggtttcagatcttcctggttcatgttataacaagcaatttgattgaaagtggacattttgggtattatgttgcaagactctgcatcttatttactttatttattgatttatttattatttatttatttatttttgagacagagtctcaatctgttgcccaggctggagtgcggtggcacaatcttggctcactgcaacctctgcttcctgggttcaggtgattctcctgcctcagcctcccatgcccagctaatttttgtatttttagtagagacggggtttcaccacgttggccaggctggtctcaaactcctgacctcaagtgatctgcacacattggcctccaaagtgccgggattacaggcttgggccaccacacccagcctctgcttcttatttaaaccttctgttttagtaggcttcttcttgtaactgctctggtaaaggaagaagggtgctgccatgttagtgctagatggggtgaaaatcat

SEQ ID NO: 38021 - DNA, 1055 bp, Homo sapiens
tccaaagaagtaatggatgaaaaggaactgttcaaaagtgtgcatgaaaacttatgttcataaaaaaaccggaacacagatgtttatagcagctttattcatgattttgcaaaaacttggaagcagccaagatgtccttcagtaggtgaatggataaataaactgtggaacatccagacaatgaacattattcagtgccgaaaggaaatgagatgtcaagccatgaatagacatgaaggaaacttaagtgcatgctaagtgaaagaagccagtctgaaaaggctatatattgtgtaattccaactatatgacattctggaaaaggcaaaactatggagacagtaaaaagatcagtggttgccaggggttggggtagagaggaatgaatcagtggaacacaggggatttttagggcagtgaaactactctgtatgatactacaatggtgtatacttgtcatcatacatttgtctaaatccacagaatgtgcaacactgagtaaacccaaatgtaaactataggctttgggtgataatgatgtgtcaatgtaggctcatcaaatgcaacaaatataccctctggtggggaatattgataagttggtaggcaatgcttgtgtgggtgcagagggtatgtgggatatctctgcatctccactcaattttgctgtgaacctaaaactgctctaaaaattaaagtatatatatgtatattttaaagagttgtgcaaacatgcattattatgaccattttgaggtcagttaaatattttaatgtgttctctatccaggaaacatgtggagcttgcagtttggggtcaatttctagccttctaacactcatttcccctttcctaagagtatcttgcatttctcatccatgtaggttagctattattgactccattcccagagggtacacccaattagcttaaaccaaccagtatctctcatcctcctgaccacagagattacatatggattaaccaatgacatatcatccaaatcagccaaccaagacaataagactcaactctgacacttttattgagtcac

SEQ ID NO: 38022 - DNA, 1045 bp, Homo sapiens
accaactgtcatacattgccatcttcttgagaacaaagaagggtatttcttgccccccttccttttccaccttccagcctctttgagctagagaagaaaatgggatcttaagtttatgagttcaaagatctcggttctggtctctgcaccatggaactttgggccattttctccccattttttaccccctcttcctcatttgtaaaatgtggctattgggcttgatgatttccaaatcaatgatttccataatgctaagctttctagccttaggaactcacgattcagattactttgaaagagaagctcttgctttttctctgtagagtttgatttgtctttagtaattggtctaaagcccactgtaggtagtggacatgaacaattctggcatggtaaaacctgttgagtgttgatgcatcccttgtttatttctgaaacagtttcttttaatgcatgtggctcatcactatagtgtggcttctcaaaacattctgcaaaggacagaaatgttcagaatgaattgaggtagaaaggtcatgatttgagttagtgacttccaaggctgtccagtatctgcatggcagaagttgtactgatgttaaaatccctctgtatgaaatgatgtgatgtcttgggtttgcttccaaataagtcagtgtgagtgtgtgcgcatgtgatgagagtggatgtgggtgtgtgtgatgagagtgggtgtgggtataaatgaaacaaaattggccaactgttgaagctgaatgatgggtatgtggggggttattatactattctttctatttttctaaatatgtttgaaggattccatccataaaaggctctttggagaccggctccagcctttctctccactctcatctttcagtccacatcctgaggaccctctggcacagtgacattgccttggtggctgggacttcacatctcttggccttgacacacagctctgtctgcctggggtcattttcctggtctttccttacagttcgtgactcctgcttctgagatcccacagcccagttgcctt

SEQ ID NO: 38023 - DNA, 1027 bp, Homo sapiens
ccatgtgtcttcccagtgaactcgaggaggaaggcacaatcaggaagcggggccgtttgctaaaggagctgagagctgggatcatcagggaagagtgtggggtttgcagtcaggcttcaccctgatctctgtaaccttgagcaggtcatgcctactcccctggtttccttttctttaggaggagataataatagcatctttgctgtatgattagagcactggttcactcacagggacatgtaaaatgtctagtacacagtaggtgctcagtaagtgtcaatagtgggagtcattgaggaaatgattaccacctgctgttttcggttgaaatgtggccttatggcccccatcctgctggcacccacagctctgggcagcctgctgtgccactgctttgctgtctcctcctctgggctcccaccataccagcagtgtgtcctccttcatggccctccatgctggacagtcattatctgcttagatctctgtcttcgctgcaattcttagcccctggaagggagggcctatgggaggaatgcttgtggctgattgaatggtgtctgtctgtctgctgcattgagcagcgagtgctaggagagtggggtccaagaaaaggtaatcaacatctattcagttcttattggatgtttacactttatctcatttcttactaaaaccttacaaggtgagtatcataccctcattttgccgagaaatttgaggcttatagaaaagaagacttgtccaaggtcactcccacccaggcaggaggagagctgggattcccattcagtctctgcttctaaccactgtgccaatctgatctaaggcaaagaagggagacatggccctcctacacatctgagagccacttgagaggatgcctctgtgtgagaggcactcatgtgtccctgctggtaagggaccttgatcctctgagcctgcagtgtggaagagacttggggggtccctggaatctaggtctcagacatagggttcttgctagcagcaggagtgcatgttttag

SEQ ID NO: 38024 - DNA, 1053 bp, Homo sapiens
taatacattgtgaaaaaacttcatttctaagaacaggaaatgaacaatttaataatcaagtgatttcagaaactcttgggttcctactctgtgtttacatagagctcaaggaattaccaggtggcagtgggagatgcagggctctaatttgagatgttccaaattggtaggcagggcacccgggctttagttgcagcctcatccctaacttgctgggtgattctgacacgtctctctcctggatcagatgatcttccaggccctttctcccatgcctctgttgaagcagtctgcagcatttgaactgctgacaaccccactgtaccctcaaacctccttctctcttggttctgtgactcagttctttcctatccctgcttccccttactgtttcctctcctctcctcttttcttctcttcctttgccttttctgactcctcttcttcctcctgtctcttccccataactctgacctcagcccctgcctctttttactttctaatctttccctgggagaactcatccattctaggggttttaatgaccactgacactgatgacacctagacctctatattcactcatccagcaagtattaattgagcacctactatatgccagtcaatgtgttaggcactggggatttataggaaacaggacagacaaagccttgccttcatgcagattacattctgaggtatgtatgtgtgtatgtgagtgtgggggtatatgcacacatgcgtaggaaaataagcaataaataagtaaaaaaacacatttaccttctcctggataccctttcctggatgtctgtgggcacccctcaaacttaacatgccatttctgtatcaccaaactatcaccttctccggccacctctgcttgccagcatgcattcatcagacattgtttaccactgccacccctccaccagtttgcaaagtacctctactcaccactgagtcttctcaatgcttacatccctgtggctctaagtagctcttcttcagcctgctgggattctttatctgaaattcccgagtctgcccaaa

SEQ ID NO: 38025 - DNA, 1038 bp, Homo sapiens
aggttacatcagtagtcagctagtgtgtgctagaactggatgcaccttgaattatggctaattcgtactccctttttttttgtttttcgagacagagttttgctcttgttgcccaggctgcagtgcaatggtgtgatcttggctcaccgcaacctctgcctccgaggttaagcgattctcctgcctcagcctcccaagtagctgggattagaggcatgtgccaccacacctggctaattttgtattttttgtagtttagggtttctccatgttggtcaggctggtctccaactcccgacctcaggtgattagcccgacctctggctaattcgtactcttaaagtttcaactgaaatatcactttgccttcagggaagctcccccgctaccccaaggttagaggtaggttagaggcgtattttatatactttctgtaggaagcacttttctttctatattgtaattgcatgtttatttgcctgtgtctcctgttagactgtgaattccttgatggtagggatggtgtttgccttgtttagtgttgagtccctaatgtctagtcctgtacctgctccacgtagtaggatcttagtaaatatttgttctgtaaatgaatgaaactgtggagctgaaattcaggtctgttcaattctagccttccactatcccaggtgaacaatgcaagaccaagtgagataggttctgtgagtgggaggccaggagtttgctgtgaaattccacggaaagaacagacatactatatggggggttgaaggagggagcttgtgagcttgatcttgaaagatgagcagaattttaagaataagcaaaagggaaccacataactgacaaagcaggtgtgagtgagcatgacttacttggagagtggttaggtcagggttgttgggggagtggtggcagataagggaaataagagagggcatgataatgggaagatgaagtctaatttgggaccagattataaaaggcctttattttatgcttagtatcttgggttttattttgtaggcaatgggg

SEQ ID NO: 38026 - DNA, 1049 bp, Homo sapiens
cacccagagataccgcctgcagcagccactgcccccgccgcccccacccccacccccaccaccctactaccccagcttcctgccctacttcctgtaagtatccgcacatccgccccaggtccctgatgccctgttctcctggaacctccagtggttagacctaaacacagctccaggggccccagggcctctgaagccacctggcgttccccccttaacctgacaggcacgccagctgggctcccttccccgctgcaacgttctgggctctgtttgcaaggagggagtcaggagagcggctctgtgtgccccactcctgaccttgaccctgggcccccacacttgtctctctctagctcgatgctgccaatgtcaccaacagcaatggggcccaccatcagcctggacctggacgtggatgatgtggagatggagaactatgaggtcccatggagccccatgctgggaggtggggtttgggagacctgcagccctgggcgccgctgaccccgtctcctgcccgcatgcaggccctcctgaacctggccgagcggctgggagatgccaagccccggggtctcaccaaagcagacatagagcagctcccgtcgtaccgctttaacccggacagccatcagtcggagcagacgctgtgagtaccctgccccacctcccacccctctgaacacagctggctgccgtgggacgcccctctcaggggagtcacactccactgagccttcccatggccctcagcgtggaggtgacgctccgcgcccctccacaggtgtgtggtctgcttcagtgacttcgaggcgcggcagctgctccgagtcctcccctgcaaccatgagttccacaccaagtgtgttgacaagtggttgaaggtaacactgcccaggtctgctcctgggtattcctcatgcagtgacggggggatgggctggcctgggctgtttccctccttgtccttgtcatcatctcggaagttctggctccagcggaccaagtccccccaggtggctgcacagatgtggtgggttggggct

SEQ ID NO: 38027 - DNA, 1047 bp, Homo sapiens
gatttacagaaaagtataccatgaaaagtatgcctccttcctcttccagtcttcaagtattcctgtcatcctccgcagaggcaaacactattactagttgcttgtgtgtgatcttgttttattacgcatatctctttacaccttgggttgtagttatttgagtgtgtatgctgtctccattagtaaactgcactctccttaagagcaaggacagtgcctcataatttcctatatctccccaaattacttgcacattgaagattgtcaataagtgtttgcttaattatttaaaggaaagttggaccagagagaagacaggcttctctggtaacatgtcacagttttgtccttggccatatcctttacaaccatttttccctagtgacttggataaagatgtagaaagtatggttgtcatatatgcagaggacacatagctgagaaggagagctaataacatcagatgacagttaagactgcagatgatctcaacaaataggagtgttcagctgaaaagaacaggaacaaatacaaaatcctgcatttaaggggagaaaaaaaaaatacccagcaacttagttaccaaagtacagaattaagagacttgtcttggtaacattgtatggtatggtatggtgtggtgtggtgtggtatggtatggtatggtatggtatggtatggtgtatggtatggtatggtgtatggtatggtatgctatggtatggtatggtatggtattaattttttgagacgatctagctctgtcacctaggctagagtgcagtggtgctatctcagctcactgcagcctcaaccctcctggctcaggcgatcctcccacctcagcttcctgagtagctgggactacaggcaagcaccaccatgctggctaacttttatattttttgtagagacgggggtttcaccctgttgcccaggctgttctcgaactcctggtctcaagtgatctgcccgcctcagcctcctaaagtgttgggattacaggcgtgagccgctgcacccagtgataacattttatttgaagat

SEQ ID NO: 38028 - DNA, 1050 bp, Homo sapiens
aaatgaattcattgtttgcttacttctcccagttatgatacatagctggtaccactttagatgcaggggacagaaattgacttataacatttggtgggtgccttagggcattaggcttactcctctcttggaaccccactggagaaaggctgagatggtaggagccataggaattaataaacaagaggtcagggaactgagaggctggagtactggatggatcatatcttgggttgaagttacaaaaactgcaacttcatatggttcagtctaatatgtagatattgaaatcaccaagaatggtggcaaatggggatgagaatccagttgaagaggtatgccagaggaggcttggatttcttttggtgctcaaggtagacagaattgaggcataataggattggtcctggttaatctcatgaaagaacagcactatccaatgggaacttgtgcaatgatagaagtgctctatagctgtgctgtcaaatatggtagccacatatggctattgagcatttgaaatgtggctcatgggactgaggaattcaattttttttattattttttgagacagagttttgctgttgttgcccagactggagtgcaatgacatgatctcggcttactactgcctctgccttccaggttcaagcaattctcctgcctcagcctccgaagtagctgaggttataggcatgcgccaccatacccagctaattttgtatttttactagagatggggtttcaccatattggtcaggctggtcacgaactcctgacctcaggtgatccacccacctcggcctcccgaagcgctgggattataggcgtgagccaccgctccttgcccaattttaaattatatttaattctaattaagatttaaatttaagtagccacatgtctcagaaactgatagataatttgtttttttgtttttgtttttgttttgtttgagacagagtctcattctgtcgcccaggctggagtgcagtggtgtaatcttggctcactgcaacctccgtctcccgggttcaagcagttctcctg

SEQ ID NO: 38029 - DNA, 1119 bp, Homo sapiens
actcaaacatcttacgtgattatgttggtagttcctaaatagaaatctttacaaccctaaaaagataagcattgctgggtccatttacagatgagcaaacaaaggcttaggggcttgaagcctataaatacctgctctggcataggattcaaaggcagttagactccaaagacagtactgcaatgccagactgccttctttgctgcaaaaaagccacagaggccccctgcctactcaaaatgtagcgattttctttcaagcttagagataagcctgttctcttaagaggtgcacttttactgatctacttccttactagtacttgtctataatatttatagcttaatctttaacagctgaaatttttgtttaagcaatttgataatatatacgtagaacttaaaagtaattcatatcttctgacccatgaattaaagtttgaaaatctactctaaaaacgtcatcagaatttagatgaaattgtatagacaaagatggtttatcaaagcattatttataacaatgaacaacttaacccaatgttcaaaaacaagacgaagtattatataaggattcaaaataaagactgaaagaaaatacagtattctgaaatattaaccataatttggaggagactaaaagcagagagacagatgataaagcagtgttagtagaagtggacggacttgagaatcttttggtgagagaagcaaaccttgtgactggtcaagatgagagaaggcaatcttaactcaggtttctggctaagccaattgtagggtactcaacttagaaagcccctctgagtaattcagaagatcactgtgttgtttaactattgcttgtacttccttactgacaacccagttggtatttatttagcagcaactataacgcagatactgttctgcaagctgagggtacagtactaaacacaagtcagtgttcttataaagcttacctttttgtgagggaaacagataataaatacaatttaagaaaaacaaggcaagaagaggggatggagagtgactagaacagaggaaaaagggggctcgattaaagagaaagatcaagggagacttcttgaggtgatatttgaatagagtcattctaggt

SEQ ID NO: 38030 - DNA, 1852 bp, Homo sapiens
atggagcttattttctagtagtgggaggcagacaagaaaacagtaaatatacaatatttcaagtggtgataagtactttagagaaaaaagtaaagcagagggagaggggaatagggaataccgaggtctcaggaggtagcaatataaaataggtgatcagggaaggtctccttgagaagatgacatttgaacaggggcctagagtaagtgagggaataaactaagaagattgtgaggtggggagagtgctacaggtagaaggaacaataaatgcaaaaaccctgaggtgtgaacaggttgaatgtggctggattagagtaagtaagggagagataaacagtgaaaccagagaggtaacggggaggagtgcagatggacagagcacagggttcttaggccataataaggactttggcttttccttgagcaagggaggaaccactggagggacttgagcaaagaataatatttaagcaaaggatcactccactctggttgctactatgtggacagtagattactgggttgtgggacaagggtgaaagctgggaaaatagagtcaatattttgtttttggcactatgataaagtagaagaaatgtcagttttagaactaggcagctcagctgtaatatttcctaactggctaatatttgacaagttatctctttcaggatcaggttcctcatttgtaaaattagtatgaggattgccatgagaatcacagacactttgtaaagtaccaggcattgtgactagcatgtaataggtatgcaataaatggtggctgctattattattgactgtgctttcctatctgtgtagtctttctgaggtctgtgtttctgtgtgatggtgagacataaaagataagccactagttgggtagaactaaggaaaagaagaaaggcaaagcataagagtcaaaggggtaagaataagttagggagaaatagattataggagagttagggaagctgaaggcattaactgtatacactttgagtctagatagagggtgtggcttagagtcaggatactgctaggagtggactttctcttcggggatatctcctggaaaaataatggtggatgggtgggtaggtaggaggaggtaggaattcttattatagatatgcctgagagttaacagagaaggaccaaggcctaaaataggcttgacttgtgactaagcaaaaatgtgtaagacctcagtatctctaagtaaaacttatttcttaaattagacaaagttgggacttgttctgttctatatatgcctacctaaatgtaatttgtaccctgtccagtcttctcacttatattaatgtggcctttgtggtacccaggataattaagtatattgctgcattgctactggtacgtagctactgagatattgacaattgtgaaatagcctaggtttcatagaagtaataaggattttggggacagactgacctgtggggatatatacaaatcaaatatgggccctgatctcactgacatttcagttcaattaggtagataagacatgaacatgcataactgtaatgcaaggtcagaactactaagggacatacaaataaaaatactgtagtgtttcagaggaaatacaattagagattgagaggggagggtattaatgtaagagaacggtaggctaaaatcacataaatagaaaaatgtgaagagtgtgtaggaaagaacaagcaattcagtgtagttatagtgtgggcattatgaaaggaaatggtgggcagttggagaatgacaaatgtaacttgaatcatgtgggttaacatttgtatgaattatgtgggtctacattatggaacagcatttttttcaa

SEQ ID NO: 38031 - DNA, 2041 bp, Homo sapiens
tttgtattttagtagagatgggattttaccctgatggccaggctggtctcaaactcctgacctcaggtgatccactaggcctcccaaagtgctgggattacaggcgtgagccactgtgcccggcctgggatttttaaaaaagtttttacaatagaagttagatcctctccctggtctctgcgctgcaggtaactgggtaaatattctgccttcatgaatcatgcacactgcctggttctctggaacctgatctgtcacaattgaccaagattccctaatgccagtggtggtaggaaagatgatgacactccctgctgcagagtgactgacgacagatcctgctccataatgtcaaaatggcctctggattgttttctcaggaagaaacagaatcttctaaatgggaatgagggaatagaatattattaccatagtcatcctaacatacagaagaagcccttagttaaggctgatttcatacccatccatgactgcagacgagactgttctttgggtcaaagagcatgaaccctgtttagaatttatggtgtacacgtctgtgctactatatatcaaatagatggaatcataatagcctttctcacattgaatgtcctctttttggtgttgctgtttgctgatatctgtggatgtctctaaacagtcttagaagtttgcattaaaagggtgcagcacaccaacatggcacatgtatacatatgtaacaaacctgcacattgtgcacatgtaccctaaaacttaaagtataataataataaaatttaaaaaaataaataaataaatttttttaaaaaggggaaaactggagttttaactactagaccaagattacacattaaaagaatgactacataaataaatatagtaggaaaatattttaaaaaaaagtttccattaaaagaagttagatatactgtagattttaaatcatgtactagttacaagtcacttattagacagaatggaacattttatgtgcacaaagatagtataaagggtgtggactcttgccattgggatctgtgtaggtcatttgtcctaaaatttcttgtttactggaaggtgatatggtgtagtacaaggagctcgagcattgcaattagaagacatggctttaaatcccagctccaccatgttttgaatgttgtgcaaattaatcactttactcattcactaggcagctatttatagtttgtatactttgtgccagtcattgttttagactcttgggatacaaagataaataagaaaaacagtccctgcactcagagggttctggtaagggaggagacagacatataaacagataattataatgtggtctgacaaaggtaatgatggattcctagggcattaaggaagcacagaagagaaatgcttttctgaatttcagtttttcatatgtaaaatggaggcagaaatacctattttactctgttggtttgcaggtgaaattagataaagaatataaaacgtggtagagatttgtcacaagtagaagtatcatgtggaaagtcatattattttactgctttgtaatatattactgtttattagtttactaatgacagagaattgctcaatagtatttgaggtatttggaagtacccatggcataactgtatgtagtccctcttgatttctgacaatagtcaactttctttggaaatagtgtttctgaatatcttgcctgagagtttcccttagttggagtcttagataaatatcctattctcagaggagctaatagaagttattcagagtcctccagagctagtttagtcagttaagtttttcagtaaactatgttaagagtcgtgtggtgagaaggggaagatccagaacaaggaggtttctaagctacacataattgggtgggggagggatggagagtttgatttgcaggacatgcttttgttttcactgggttcatttctcttgaagtgaggtgtatttttttttttttgaagtctgaagttaaggaccaacaacctttaagatgtcgagattcagtatctaa

SEQ ID NO: 38032 - DNA, 1025 bp, Homo sapiens
tttttttttttgagacggagtctcgctctgtcgcccaggctggagtgcagtggcgggatctcggctcactgcaagctccgcctcccgggttcacgccattctcctgcctcagcctcccaagtagctgggactacaggcgcctgccactacgcccggctaattttttgtatttttagtagagacggggtttcaccgttttagctgggatggtctcgatctcctgacctcgtgatctgcctgcctcggcctcccaaagtgctgggattacaggcgtgagccaccgcgcccggccaataatttttttaaacaattacactgagaaggtttgagatatgctttagcctaaggcagagatggaggtgccttataactaacttactagtgctttgattgcatctaaagaccaaggctagtcattataaaattctgttaaatggacactaggtgtcagcattctctttctctttctttctctttctgagagttcaataaaaaccttgtcacccctgagttcaaaggaagagacaggttaagtatttattgctgttgtattttagtcctttggtagtttggttaagtcttgtttttcataatgactatattccctattattgtacaactttccttttgactgaaaactcaactattcctgatttttaaatgtatttcatcatttacctgaatggtagcgagattcataaagagatgcctaacttgtttaggttattcatatcttattaggaaaccttgaaaacttcagctggtagctttatgtctagtggaagaagcctcacagcccaggcacttcctcagaagtctgcctaaggcagcagtagctgctttttctgtgatcttctgtgcatgtatgtttaatgagttggtatttgcgtcaactctaccattaatcaatgaaaataatttttgaatcaatgaaaataatctttccttatgtagtccctattcattacatttctgaaaagataatcctgtagccagatataaaaaccatagtggcagatttgtag

SEQ ID NO: 38033 - DNA, 1028 bp, Homo sapiens
aaagtcttaacttttctccctatcacctagccagccagttcccctctctggactcaaatttgtgttactagttctagtgtatccttccaagatactttatctggtacaagcagaatacattttcttttccctgccttcttttacacaaatgatttacacattattttctacttttttcatttaatatcctaatgagatcattacataacagtatataaagaatttcttcatctttttttttttttggatgtgaaaaataccatgtgtggattagtcagagtttactgttacagatagtaaaatgtccagaagacatttcatccacatggaagatatttgtattatatgataattttctgtagctgtaattggtggaccaaaaaatgtatttataatttcattagctgttgccaaattgccctccatagagatcatatacatttacattcccactggcagtgtatgaatactagtttctccatacctacagtaatgcagtattgtcagacttcttgatctttgccagtctgagagatgaaaaatggcgtctcagtgtagtcttaatttgcgtatctcttactatttgtgaggctgaacttttttctcacatgtctaagacccatttgtatttccttttctgtctgttagatcttatgatcattttttcttttgataatctattggtttgtggatacactttatatagtagagaaagtagtcctttgtgatatgaagtatggatagtttccgagttattttttcccattacataatggtgtatatttattattttgcttgtagtggttttgaataatttattgaaaccaatcttcatcttggtacatttagtttgctttttctgaagtagctagattatattgtgtatgaaagcttatatcttatttttccctttgaatattataaagcaataatataaactctttatatataaattgtaattttaaagagtattctgttttatgactatactgttttttcttgctatttctgttaccagactttgactt

SEQ ID NO: 38034 - DNA, 1030 bp, Homo sapiens
ttagtaaagacggggtttcactgtgttggccaggctggtctcaaatccttgtcctcaagcaatctgcctatctcgacctcccaaagtgctgggattacaagtgtgagccaccatgcccagcccacaagttgtcatttcatctgttgatggaatctgggttgtctttggtgtttgacattatggaaagagctgctatgaacatacatatacaagtttttgggtggtaatgttttcatttctactgagtaattaatagtagtggaattgaagcaaagttaaaaagagaaaaacaagttttcctgtacttggctgactcactccaaggccagcaataggcagggccctggcagagccttgataacactatctgaaaagccagagcccaaaggaatgagctccagatactctcccagcacactgccccccacaccccgccccagagtgaggataagaaaagaaaacaaattcctttctcataactatttctacaaatacctgtgtttcacaagttttgtaagttcctgttttccctactgtgcagctgcatgatcacaagctatgcctgcgttgcgagacctgtcgcaatttaattaactgcctttgttctgcttctgtaagcctgcttgcctgccccatgagtttcgcactgtcacattcccaccgcaccattcaaactagccaactccctttcagaagtgtgtataaaagtcaagccctgtctttgttgagggctcagcctttggatgttaatctgctgggctggtggccacctaaagaaaatcctcctgttccacgcattggtctctccagtctccagattcctgcaacagaatgactggcttacatgacagttatactttttttttttttttttttttaaagaaactgccagttttccaaagtggttatgccattttacattcccattagcagtatatgagaggttcattatattctgcattcctgcccacatttgtattgtcactattttcaattttagccattctaatggatatacagtgttaggcca

SEQ ID NO: 38035 - DNA, 1079 bp, Homo sapiens
ctttggaccaggtcgaggctgattgccctactgcactccagcctgggtgacagagcaagaccttgtctccaaataaagaaagtgctaggtacctatttaggggtaaaagtcaatcatttataaaggattgttcttaaggtccctgtgcccccaagctttcaaagcaattttgacaagtttggtacccagactgtcaagattttaaattaccttgtcagtgatttttcttcagatagatcaagacgatggatgtgctgaaataaaatggcaaataatatctgaaattgaggattttcaaggacactgcccaaaatgttacctgtgaaataaataagtctcattactggggcacctgtcctgcttctgcatctttctggagacattttgttccttaattgtcattaagaagctgctgttggcatccagacttgattcctccttcattggcagttagtggtaattcattttagctttagttcaataagtgaagatagaccattattttagtgagttcttcatctttgaagggtagtaacttaaaaaaaaatagtagttgaactgtatacaggcttgcttgtttaaatgaactgatcagggacctttcttatttacgtttttagaattactgtggaaaacagtaatttaatgtggctaaatctcatgaagcactggaaattttggaatttgtatctgtggggagcctgtacttaatgcttcttattgatccatcatctgctgtgattctttgaaaacccaccttgagcctgcagtggttctatgctgggtttttatttatttacatgccttttagaaattagacatattttgtggtatagctttgtttgctatcaaatttgagcatattggtttaagtatatggtacatgtaatcccagcactttgggaggctgaggtgggcaattgcttgcacccaggagctcaagaccagcttggataacgtggtgaaacccagtctctacaaaaaatacaaaaaattagctgggcttgttggcacatgtctgtagtcccagctgcccaggaggctctggtgggagaattgcctgatcctgggaagtcgag

SEQ ID NO: 38036 - DNA, 1058 bp, Homo sapiens
ggctgaggcaggagaatcgcttgaacccaggaggcagaggttgcagtaagctgagatcgcgccattgcgctccagcctgggcgacagagtgagactccgtctccaggaaaaaaaaaaaaggccagagggaaagatgacaaggagaaagctgataggtagtcacctggggcaattgtgccacaatctaatcaagataatgactgacacccactgcggacccaaggccatgtggacatgagccggtgaaatggtcaggggctgcaggagagactttactgggacacctttttgtggaacccaagctctgtgattccaaaatctatttgtgaagtcccaatgggagcgagagttcgactgggagaatatgggaatgtgatacctgatggaatggaaacggtgagggttgagcaggctttatgcaaagcgactgcagctcctttacctgaatgtactatgggggtggatattgggtctggctgaggtgtttctcttacctagcatgctaaagcggaaggcatgtgaatctccccacctgccaatattgattggatgtacttgatggaaaccagtaagattgcccaagcctgtgcaagttgttcatttgttgtaccgtagccccgctgaggagcagactggacctgagggcaaaagccggagtgccacctagtggcaaccactgggattttggaccaggaaatttccatttgactaacttgctattggatttaattaaagtccaattgcccctatgacttaaggacataaaataaccttgaaacctgaaatacttataatttcttgggtgatgttggggaaatactctgataggagggcagtgcccagaagggtccatcatcatttggaaatgatttttctggaaacatgctatctggggaatgcaagaaggccgtcccaagtgggtgcctcttcccccacaggcaacttcagagccacctaaggagtttcacgggccacatgggcagtgagtgccctatgaacagctctctattgaccaacaagagccgcctggtttatggatgacaggcggctttcaaggt

SEQ ID NO: 38037 - DNA, 1054 bp, Homo sapiens
cttcgcgaatccgccccattagagcgaccgacaaaaactacaaattccagcatgccccgagtcgcggacggccctcgcgctcccgccggctccaaccatccctctgctcctcattggctcgcaagcctaacgtgctgttccgtgactggttacagctcttgtcgctcgaaagaacccattgctggggctggccggcgtgtgccttggagcctctaaggagatgaaactgcactcaaccaggatgagaggctgcccggccaatgcagctgccgccccgtctgctgcggaggctttgctttttgactccctggcgacagtaaagttgaagagcttccggccggaggccaatagatgggacccccggaaggcggaagttctagggcggaagtggccgagaggagaggagaatggcggcggaaggctggatttggcgttggggctggggccggcggtgcctgggaaggcctgggcttctcggccccggccctggccccactacacctctctttcttcttttgttgttggggtctgtgactgcggatataactgacggcaacagtgaacatctcaagcgggagcattcgctcattaagccctaccaaggtgaagcccttggggcgggaatgagtgaagagtgagggcgaggctgaacagggctaggggaaggcgtgccctttctcctgagcagagcatctctgtgggtttcctgcctctggtgaggccagtcctggcgtggcctcttagcacctgtctcttcccacaggggtcggttccagctctatgcccctctgggacttccagggcagcactatgctcacgagccagtacgtacgtctgacccctgacgagcgcagcaaagagggctctatctggaaccaccaggtgagtggttctcaagaggataggcgtactgtgcggttggctgctagtccctgcctcccgagcagctgagaccccagcttcgtttataggtttgcacctccgtccctggccttttcctcatctcggtcacacccaccaataataagaggcgatgggtattgggtacttacta

SEQ ID NO: 38038 - DNA, 1178 bp, Homo sapiens
tcccgccactgcactccagcctgggcgacagagcgagactccgtctcaaaaaaaaaaaaaaaaaaaaaagaaggccagaaggccgggcactggtggctcatgactgtaatccatcccaacactttgggaggccaaggcaggaggatcccttcagcccagaagtttgagaccagcctgggcaacatagggagaccccatctctaccaaaaaattaaaattagccgggcatggtggtgcacacctgtagtcccagctactcgggaggctgaggtgggaggattgcttgagcccaggaggcagaggctgcagtgagccgtgattgtaccactgctccccagcctgggtggtagggcgagaacctgtcttaaaaacaaaatcaataaataaaatacagtaaaaaagaaggccaaaagcccctgtggggggtaggtgcaccagacactgtccctttggtttctagggtgaccatcgggatgaggaggaagagacccacatgaagaagtcagagtcggaggtggaggtgagagctgggggcaccagccaggtgaggcagacagggctatctcagcttgcctggcccagccccaaccttttcctcgtgccctcaggaggcagcagctattattgcccagcggcctgacaacccaagggagttcttcaagcagcaggaaagagtcgcatcggcctctgcgggcagctgtgatgtaccctcgcccttcaaccatcgaccaggtagtcctaggccccaccccccgtccggccccactcctcaggttgcggccctgagcctctctgggactctctcagaagggaggccttgcccaagcaacccttggagaaggcgagacccttcatccagcgtgcatccgcccaccacttcccaggtggcaggaccccaagaagggccagggatggtggtgaagtcgcttgtggctgaacagtggggagtgctagggcctgtggggcagctctggcatgggctgaggcacagcgctggccacggggagcagctcggctggggtgaattaggtctggcctggaaggccggaatgcatgcgtgctgggctcttgccccgggcctgagggagcctcccggagcttgcacccaggtgtccccgttccgcttctcagtgtgctgcttccgcctctcctgaagctcttccctgccctgtctgctg

SEQ ID NO: 38039 - DNA, 1031 bp, Homo sapiens
ggttagtgtgtgtttggcacccgtgggctctgcctgcgtggcctggtgcccgagtctggcctgcccggtccctcttagctctcaccctttaggtgtcgggggttcctggggcattcagcctgcttatgctgggtccttcgacactgcagggcaccacctaccagaagacggatgcagctgtggaaatgaagcggattaaccgagagcagttctgggagcaggccaaggtatggaaccctgagcccggcctggctgagccacccctcatggaccccatggggcaggtctgagtccctcactgcagtggcatggcccatgccacgtgccccgcccccagcgctgggttagggaggggctggaggggcagggtccaggcgcctaggctcggggcctacccttgttcgcaccggggcttgcagaaggaagaagagctgcggaaggaggaggagcggaagaaggccctggatgagaggctcaggttcgagcaggagcggatggagcaggagcggcaggagcaagaggagcgcgagcggcgctaccgggagcgggagcagcagatcgaggagcacaggtgagcctgcccgcccggagcgctccaggggcccccgggcgcaccctgacgggtgctggctgcttatcgttccaggaggaaacagcagactttagaagcggaagaggccaagaggcggttgaaggagcagtctatctttgtaagttctttgccaaggctcccggtctctgggtcagggaagtgagaatggtccctgtgttcctgggccttgtggggagatcagtggctcagggacagtggtggctgttctggggagctgcatgggcacagggtgccatggagcatgaggcctggcacctcatcacgtggggctctggcctctggccgtggaaaaagactactttggagaagcttgtgctctagattggaagagaaactccatctagacccagaccctcactgaccaggctccccctcccctgccctggggtttctcggcgattagacactgttctgcact

SEQ ID NO: 38040 - DNA, 1024 bp, Homo sapiens
agtttcaggcaagaggccagtgtgcagaggcaaggtgagaacgcaagggagagcagtggcggagacggttgggaacgaggtcagacctgctggcctccagcctctgcatggggcttggctcttgctgggagcaatgggaagcagtacacagtttcatgcagggggagaaggcctgtcttgggttgcaggggcacgctgtggcagctgggatcagagagaggagcttgtaggccagttgttatgtggtcccacgggccagatggccatggcttacctcacttcagggaggctgtgagaagcactcagaatctggatgtgccttgggggtgggccccactggatttcctggtggacctggtgtggggtgtgagaggagggtgtgtttggctgcagcagacaggagaatggagttgccatccgcgtgatggggatggctgtgggaggagaggtttggggtgagggaatcaggaactgagtgctggacatggcaagtctgaaggcgcagtggtcgtccactcagagaccttggagttggagatggaggtgtgggagtcctgaacagttagatgtagtgtttaccgcgagaaggaacagggcttgcggccagccctcctgtgttcccgtgacccagggcagggcaggaggggcctgagcctgccgagtgactgggacctccttccaggagatcatgcacgccctgaagatgacctggcacgtgcactgctttacctgtgctgcctgcaagacgcccatccggaacagggccttctacatggaggagggcgtgccctattgcgagcgaggtacccactggccagtgagggtgaggagggatggtgcatggggcaggcatgaatccaggtcctctttctctctgcccccattctcagactatgagaagatgtttggcacgaaatgccatggctgtgacttcaagatcgacgctggggaccgcttcctggaggccctgggcttcagctggcatgacacctgcttcgtctgtgcggtgagagccccgcccctc

SEQ ID NO: 38041 - DNA, 1019 bp, Homo sapiens
aagtataattataatgctagaaagtaaaaagagtggaatcatgtaaaattctcagttaaaccagaaaagacagaaaaagaagggaaggtaagaaaaacaaggacaagtgcacctgctagaaaacagcggcagacatggtagatattaatccaactatctcaataatcactttaaatgtgaatggcgctaaatataccaactaaaacacaaagactgccagtagattaaaaaaaaaagacccaatgatatgttgtctgtaaaaaaacccattttaaatataaagacacaaatagcataaaaataaaggtataaagaaagatataccatgttaatactaatcaaaagaaaactggagtagcagtattgatatcagataaggcaaacttcagagggagaaaaatgatcagggataaagaggggcattatataataagagggtcaatactccaagaagacattgttaaatccttaatgtgtatgcacctaacaacagagcatcaacgtatgtgaagcaaaaactaatagaactgcaagagaaatagacaagtccactattatagttggagacttcaacactcttctatcagtaattgacacatttagcaggcaaaaaaatcagtaaggatatagctgaactggacaatactgtcaagccactgaatctaattgacatttacagtatacttcattcaacagagtacatattcttctcaagctcacaggaaacatccaccaagatagactacatacttggccttaagatacaccttacaaatttcaaagaatacaaaccatataaagtgtgctctcagaggaaattaaacaaaatcaaaaacagaaacgtagatgggaaatctcaaaataactggagattaaacaaaacacttctagataccagatgggtcaaagaagaagtctgaacagaaattttaaaatgttttgaactaaataaaaatgaaaatacaatgtatcaaaatttataggaagcagtgaaagtagtggttggagataaattataa

SEQ ID NO: 38042 - DNA, 1068 bp, Homo sapiens
ctgtcacccaggctggagctcactagcacaattatagcttactgaaaccttgaactcctgggctcaagctatcctccagcctcagcctctcaagtagctgggaaaacaagcatgcgtcaccatactcagctaatttttttattattttttgtagaggtgggaatctagctaagttgcccaggctggtcttgaactcttggcctcaagtgatcctcccacctttgcctcccagagtgctaggattacagacatgagccactgcacccagccacagagttgggtttttgaaaagatcaaaactaacaaactcttaactagattaaaaaagagagaagattcaaattactaaaaacagcattgatagctcagtgatagaatttttaaaaattactaaaatctgaaatgaaagagggggcattacaaccagtgccacagaaataaaaaggattaaaagagaatactaccaacaattatacccccaataaactggataacctagaataaatggagtaattcctagaaacctaccaagattgactcgtgaagaaataaaaaatctgaacagaacaatagctagtaaggagatagaatcagtaatcaaaaacctttcaacaaaaaagcctagaacaaggtggcttcactagtaaatttggccaaacatttaaataaaaattaacaccaatcctcctcagacttttccaaaaaacagaggagagataacttatttcagcttattctgtgaggccagcattaccctgtgatatggtttggccgtgtgcctacccaaatctcatcttgcattgtagctcccataattctcacgtgttatgggagggacctggtgggaggtaattgaatcactggggcgggttttcctgtgatgttctcataatagtaaataaatctcatgagatctgatggttttataaaggggagttcccctacacaggcctcttgcctactgccatgtaagacgtgactttgctcctcattcgccttttgccatgattgtgaggcctccccagccatgtggaactgtaagtcaactaaacctttttcctttataaa

SEQ ID NO: 38043 - DNA, 1308 bp, Homo sapiens
caggcgcggtggctcatgcctgtaatcccagcactttgggaggccaagacgggcagatcacctgaggtcgggaatttgagaccagcctgcccaacatggagaaactccgtctctacgaaaaaatacaaaattagctgggtgtggtggcacatgcctgtaatcccagctactcgggaggctgaggcaggagaatcacttgaacccgggaggtggaggttgcagtgagcccagatcatgccattgcactccagcctgggcagcaagagtgaaactctgtctcaaaaaaacaaacaaacaaacaaaaaaacattgaatgaaccgtctgtaataaacaaaacaaagacagctagtgcagagttggtgctacacaggaagaaggtcttccacattctgacctttaaggatccccaagtttaattgccaactttttgtctgctcacctaaagcaattggctaaaacaaattacttagaattctgtacttagccaaactatcagttaagtgtgaggatagaattaagacatttccagctatgcaggaatttgaaaatatatccccataccctgtttcttaggaggttacctgaggtagtatatcaaaggaatgaggaagtaatcaaaaaaaggggggaggcatgggattcaggcaacatcagatttaatccaggagagtattgaagtcccaagattacaatgaatagcacacctaggaagcagttagtccagataggagtgaaataacagagggctttaagtaggaacaatctgggagacatcagcaaaatggtagactaggaagctccaggcccttgttaccccatggagacaccgaattaacaaccatatacagaccagaatatcactgtgagaactctagagccgaattaagaagcttcagtgcccaggccaatgcctaaccaagaacataatctatcaaaagtgctaggaaagtttgtggcattttgcgcgccaacatccctctccctcccctgcaaagcatagttcaactaggagaaaacctcccataccttggctcttcccttgggccagaaacaaagagtggaccatgcatgcaatgtactgacttgtctggggggtgcctggccgcccacctcggcctcccaaggtgctgggattacaggcgtgagccaccacacctgtcctggagtgggaggctgagatgggaatatcacctgaggtcgtcgggagttcgaggccagctcagccaacatggtgaaaccctatctctactaaaaatataaacattagctgggtgtggtggtgcacgcctgcagtctcagctactcgg

SEQ ID NO: 38044 - DNA, 1115 bp, Homo sapiens
tgagaagaatgcatattctgttgatttggggtggagagctctgtagatgtctattaggtccacttgttccagacctgagttcaagtcctgaatatccttgttaattttctgtcttgttgatctgtctaatattgacagtgggtgttaaaatctcccactgttattgtgtgggagtctaagtctctttgtaggtctgtaagaacttgctttatgaatctggatgctcctgtattgggtgcatatatatttaggatagttagcgcttcttgttgcattaatccctttaccattatgtaatgcccttctttgtcttttttgatctttgttggtttaaagtctgttttatcagagactagcattgcaaccctttttttttgctttccatttgcttggtaatttattcctccatccctttattttgagcctatgtgtgtctttgcacaagatgggtctcctgaatacagcacaccaatgggtcttgactctttatccaatttgccagtctgagtcttttaattggggcatttagcccgtttacatttaagattcatattatgtgtgaatttgatcttgtcattatgatgctagctggttgttttgcccattagttgatgcagtttcttcatagtgttgatggtctttacaatttggtatgtttggccaggcacggtggctcacccctataatctcagcactttgggaggccgaggtgggcagatcacaaggtcaggagatcgagaccatcctgggcaacatggtgaaaccctgtctctactaaaaatacacagattagctaggtgtgatggcacactcctgtagtcccagctactcgggaggctgaggcaggagaatggcttgaacctgggaggcggagattatagcaagccaagatcatgccactgcactccagcctggcgacagagcaagcgagactccacctcaaaaacaaaacaaaacaaaaacaatttggtatgtttttccagtggctggtaccggtttttcctttccatatttagtgcttccttcaggagctcttgtaaggcaggcctggtgatgacaaaatctctcagcatttgcctgtctgtaaaggattttatttctccttcacttatgaa

SEQ ID NO: 38045 - DNA, 1047 bp, Homo sapiens
ctctctctcccttagctcggccagaagccaggtcacctatcctcggtcactcaggggccaggacctctctccctgcccctcagtcaaggccctctcagtccgggaggcgcttcacacctgggcagggtgggactgggcgcgcctcacttcacgctttcgtcggttggaagcaggtggggaagtccccgcggcctcggcgtctcgcacgcctggccccaacacctgccgaagccggctgcgactccatttttctttttttcttcctcctgggaaacggaggacccgcgccgccacgaagcacagcgaccctggccctgacctcagccgcccgccgccggtgggcggggcttggcggcccggcggggcggggctcggggcggggccggcggggcggtggcccgggttgtagccgccgccgctgccgccgcccccgccgccgccacctcagaagcaggaaccgaagtcgtcgccgccgccgccactgcctgggtcttcggtcggggcccgcagccatggaggattacatcgtgatctcggacgacagcggctctgagagctccgggggcgcccgcccgggccggtcgcggaggctgcgccgggccctgtcgcgaacctccggcgcgctgccccgccggaccgtggtgagtgagcgtcgcctcgtttgggggcgcgcgtcttcgcgaccctcggctgggcccgccgcccgcttcccgcccctggcgcctcacagctgcagccacttcccgccttgcctccttccgggcctctcgggccccggggagcgcggcgggccggggcaggggccagggcagggaccggggaggccgggcctcccaggctcagcgctgaagcccgagaggactgcggctggaaagcggccgagcacatggacgagctcctggcgcgcctgctgcaggggctggggtctcaggccggggccgcgggcgtcctcggagcctcggcgggacgtgggggctcgggtgtactggccgggccgatgcaggaaagcgggagcgcgtaattcttcggcctgtggtggacacagat

SEQ ID NO: 38046 - DNA, 1051 bp, Homo sapiens
gagaggtgctattgcccaaaacggctctcctggggaggagaaagctaggacatgacctgatccctagctacccctgagcctctctcctctgtccacaccaaagatctctcccagcccagttattccctgaaactattctcaccaccttctgaaggtgcctcctgcactcagccccctcaggaggcacaggtaggagcccagaggctgaggccagcaccctggcccctcaggcctggcctcctgagatgtcgtcaccttcccttgcaggggtgttgggctcttcattggtgtggatctgatcaaagatgaggccacaaggacaccagcaactgaagaggctgcctacttggtatcaaggtattttcttcttgaaacaagttgcttcctggagtaggagacaccacaggtacctctttgcagggccagtggaaaggagcctcatctgtacccccagcactctgggccacagacttgattgaaagagggctggggctggcgggtgggggcagttgttgggggacagctgatcctatcagctgaggacagagataagtggtgttagcagttctgtacccagtgcctgactacaaaggctgcagatgagacacaggctattcccagaccagagcagcacctctgcctagaatgcccaagctagcagggcactcagacccaggaacccctaatgccaccttggcctggagaagggaaacaccttctctattcataccagggagctgtggcagcactagactcagggttcccatgccgcacgacaggtggttgggatggacaagactcctgctcctaagctgggtcgggggtgtctcagaactcagactccaccggtcccaatgccctggtttgcttgtcctttcacttggaccccaagtcctcaggacttcttctccttctagttgaattgttattcccttttatctccattccccaggcctaccccttcccccacgcccaccatggaaagctcttctggtatttgacgtgtccttattcaaattgtgagacacgcgtggtattgatgtaaatctct

SEQ ID NO: 38047 - DNA, 1044 bp, Homo sapiens
agtacacacatgtgccaccacgcctggctatttttattttttgtagagatggggtttcaccatgctgcccaggctggtctcgaactcctcaccttaggcaactcacccatcttggcctcccaaagtgctgggattacaggcatgggccactgcacccagctaacatgtttgtaacatctgatttaaagtctttatccagtaaggtcagtgtcagcttcctcgggcgcagtttgcattgattgctttttttcctcccgtgtctgggccatgcttctttgcatgtttcagaattttgttaaaagctggacattttaagtaacataatgtggcaactgtggaaatcatattctcctccctccccatggtggttcctttttcttgtttaatgtcttttctgaactaattatgtaaagttgtgttctttgtcatgtgtggccactatagtctctgcttgattagcttagtggtcctctaaccattagatctccttaattgcctggaacccgtaagtcactcagccaagagtttataactgccttagactttacttcctcattctgcagaggctcaaggtagccagtggtgagagcttagggctttctagatcttacctgagcatgcacacagcactgggcataagcacatccctatgcatatgaatggccttctagactcccaggagtacgtcacagcctttcaaagccccctgtagccatctcatagtaacagaaagcagatcagtggatgcctgggtccagtagtagcgggacggttgcacaggaagtgatgaaaatgttctgcaacttcactgcgagggaggttacacaggtacatacatttgtcacctcacgttgaactttatactttaaacacagtttatatataaattatacctcaacaaagctgatgtttttaaagatgtagtttaaaaacgaaacaaaaaacgtggtttgcaggagacaccttgctcgtgatcctctaaaacacaggtctccactcagatacctgcaggatgaggacagggtgggcgagggaaaggagcca

SEQ ID NO: 38048 - DNA, 1401 bp, Homo sapiens
ccatgtgacacatagagcctcagaggagctcactgtcggggaaagacaggctcacagacacatggtcatgacagcgtggaggatgagtggaagtagtgtgttcacggtgctgtgagagcacaaaggacatcccaggcaagaggtgggtgaagagctgtgggacaagcagtagaggcttcatagagaaggcaagaccagatctcagtctggaaggctgagcaggaaatcaagtgggttgtgtaaggggaacaacaaaggcccagtggagcagcatcctgacttttgtttatttctttgttttacttgaccctcaagtgtacataattagatagaatccttggttcatggaagactctcaacatctgtctgtgcatagccctcttctagttattcagttaacctttattaatgttctaagcacctgggaagccagcatccctaatgaaagcttagaccttgataatatcatgtatctctccagatgttccccccaattccctcttgttgccttctccacccatcactctgaataaccatggtaaccatcactctcaatcccatattatttagttgttatttgagtttatatgaagtctatcatgctgtatatactctggggatttttttttctactaacatatcactaagaatcctccctattgcctgtcactgaagttcatttgctttgactgctttataatctttgtataaatgtaccacagttcagtcatccattactattgctgtgctttgaggtcgttccatgttttttttgttttttttttttttttgcaattatgaacagtgctgctttgaatagttttcataagtctctgttgtacatgtagcaagagtttttcttaggactgtacctgagggtggaattgctggcccatatggtatgtgtttacccttcattttaaaagataatgacatttgttttctaaagtagttcacaagttaacaccccaccagtagtgtatatagtgtatatccttttttgtttttgtttttttgagacaagagtttcactcttgttgcccaggctggagtgctgtggcgcgatctcggctcactgcaacctctgcctcctgggttcaagcaactctcctgcctcaacctccccagtagctgggattacaggcatgcgccacacctgggtaattttgtatttttagtagagatggggtttctccatgttggtcaggctgctcttgaactcctgacctcaggtaatccgcccgcctcagcctcccaaagcactgggattacaggcatgagccactgcatccggcattctttttttttttttttttttgaaacggggtctcactctgtcacccaggctggagtgcagtgacgcgatctcagctcactgcagcctttacttccagagctcaa

SEQ ID NO: 38049 - DNA, 1042 bp, Homo sapiens
ggtgtccctggtgtctctttgtgtgtccagattttctcttataaggacactggtgagattggatgaggggccccctgacggcctcatcttaatgtaatcacctctcttatctccatatccattcacatacgggccattgcgagctaccggggattaggggttcaacacataaattgggggtgggggggtgcagctcagcccataaacatgccccctctggctcgctctcccagggcatccatcgtagcacttagaaaaatgatcacttcttcttttttggctttgtggtggcgtgtgtgtgtgtgtatttgtatatacacacatatatatataaatacacagacacacatatatacaaacacacgcattcattttcgtccacagttcctggctcataactcccacagcccttgttacactcttttgttacaacattgggtgtgtcaggcctcaggagacaatcactctaacctcctgcccttccttttacctgcccaagacaggactctaatcttccctacctttctgatggtgggtcataaaactcattccagagacggtcccaccccatatcctgctagaaggaatgctgctgtcatgaagcttccataaaaaccaaggggactggattcagagagcttccagataactgaacatacagaggttctagaagggtggtgcgcccagggagggcacaggaagctccatgcccttccttcatacctcaccctatgcatctctttatctgtatcttttataatatcctttataataaaccagtaaatgtatttcccttagttttgtgagccactccagcaaattgaacctacagagggaattgtgggaacctcaacttgaagccagtcggtcagaagttccaaaggtcacccgggcgcggtggttcacgcctgtaatcccagcactttgggaggccgaggcgggtggatcaggagtttgagaccagcctagccaacatggtgaaaccctgtctttactgaaaatacgaaaaattagctgggcatcgtggtgggcgcctgtaatc

SEQ ID NO: 38050 - DNA, 1249 bp, Homo sapiens
gggaggaccacttgagcccaggagtgtgaggatgcagtgaatgccatgatcacaccatacactccagcctgggtgacagagtaaggccctgttaaaaaaaaaaaaaaaagtcctccttaaagacatgggctttctagacagggttcttctgctgaagcggctttccttctgccagaatctcaggaactcctggatctgcctttccagaaccagcttctctctccctgctctgccttcagactgccctctttctacctctccctctagaactacatctcttctggctgggtttatagcttggggctgggggaggcccagtgggactggctgagtggagccagccgtgtgacggaggcggccctcttccagttgggcactgccaccctctcgtggtccaagcagcacatgagcagaaccaggtgctcaacaccaacagccggtacctgcatgacaacatcgtggactatgcgcagaggctgtcagagaccctgccggagcagctctgtgtgttctatttcctgaattctgggtaagtggactgtggccagcccccgggaagagggtgagacggtaacaaagacagtcactcacatgggcccagtgtagtgtagctgaccgagtgtggactcggagaggcagcccccactgcaccaggctcctgagattcccggctgtaggccctgatgctttctctgttggatccagtttccttgtctcttattgaaggatgttattacctcctttctaggatcattgctggagcttagtgaggtaatatgttcctttatttctgccttaaggatacagccaaaatccctgcctgtgggttgctcagtaaggaaggaaaacatcaagtgattcttcaaagaaatacagaattgcaaggagggctctggaggaagtgtacagggtatcatgaggcctagaaaaagtgaggggacctgacctgggggttcagggaaaccttccctgaggaagggctgttaagctcagagctgactaggagataactagaagaggaggaaggaagggtgctgccactgcatcagaagtctcgtcaaggctgggcacgatggctcatgcctgtaatcccagcacttcgggagatcgaggtgggcggatcacctgaggtcgggagtttgagaccagcccggccaacagggcgaaaccccgtctctactaaaaatacacaaaatttagctgggcgtggtggtgggtgcctgtaatcccaactactcaggaggctggg

SEQ ID NO: 38051 - DNA, 1081 bp, Homo sapiens
tgtaataaagtcatgtgccccataaccacatttcagtcaacgatgtaccacatatatgatggtggtcccgtaagattataataccatatttatatgtttaggtatgtttagatatataaatactttcaccactgtgttgcaatcatctatggtattcaggacagtgacaagctgtgctggttttgtagcctgggggcaataggctacaccacgtagcccagtgtgtagtaggctctgccacctaggtttgtgtaagtacatgctatgaagttcacacaatgacaaaatcacctaaggacacatttgtcagaatacaaccctgttgtttagtgacacaggactgtgacttcctctaaattattcctataaattctttgtttcctaataccgtctggacaactgaatggaatgaaattaaactaacattgatggattgtttgctataaaccaggctgtatgctggggtcgtgcacagagtgttatctcattgaatcctcaccagcatggtaggaagtggatcgcctgacctcattttacagatggaaacacttaagcttcacttaaggagaagggatttgctcaaggtcacatagctaatatgtggctgggctgaaattggaaccctggtccacctcacttctgaacacatgtgctcccctcctgtctgctttgtctcattgatcatggatggggcaacctggttcatggctttgtcacattgagagatgtttcacaggtgctttcttcccaaacacatcgacagagccctgagccctggtccaaaatggcctagcttttgtcctttggccttagtagcttccgtatcagttcttcagtgatgaggagaacatgtaggagtcgtatgaggtgttggtgcagttccgaaggggtcttggaggaactgatagatctgtctgcagtacagttggggaaccaatgactggctacctccaccgagcctctgctctggcagcaaagtcaaggactgtccaatcttactagtcacacactgattccttcccagtcttccctccttccttaccagccatccatccatccttcgatgcattcacccgtctga

SEQ ID NO: 38052 - DNA, 1986 bp, Homo sapiens
aacagacattttacaagtaaagatgaatcgtctcttgaccactatatcctttgccagtcctcctttccctcctagtacaaattaagtttgtaagtgaaactaataatgtgcttttgttctcttgtagttttacatcataataaattaacccatacagatctgaagcctgaaaatattttgtttgtgaagtctgactatgtagtcaaatataattctaaaatggtaagttaaagacttgttttaatttgggtggttgtctttaaaattaatttaacttgatgatctttggatgaggaatttcacttctgagccttattatatcctgttgtttaaccaaaaagaagtaatccttctttgcctttctcatgagcttactttgacaatcaagaagataattcatgtgctggccttttgagtagcgctataaaatgtatctattgagtttcatgtttactcaactgtgtctctctagaaacgtgatgaacgcacactgaaaaacacagatatcaaagttgttgactttggaagtgcaacgtatgatgatgaacatcacagtactttggtgtctacccggcactacagagctcccgaggtcattttgggtcagtagacaccaggctttctaatattataattgaagaagagatttttgttctttacagctttactggtggggtggggaagtatgatcttctcagcaggattcagaaaacgttttctattttcataaaaaatgtgtggacattgctataaatacttttcctgagtggtaaacatgtgatactgtctgggaaagatattccaggtggtggttatttttgaacaagtaaatcttaaatgatcataagagaacaggctgtgttagctaaatgcatcaaagaaatgtgattttgaagttatatgagtacctattttcatgccatcacaaaagcacatggctggtaaaaatactgaggaaactggttggcagatgtctagaatataggatggataaaggtcaagagaagaaagaggcttctctaagagctcctgtgataacccttgatgtgagaaagtctgggaaagaaaatgagttaaggtgcagagttttcaaataagaagggacttattaagggagtgttatgcctcaacattaaaagttatagatcaggtgtgttaataaatcagggaagtcagagattggcttgggagcttggagacattgggaaacattcagatcaggcatatcaagagagttgaatgtaataagctgattacttagcctaaagttaggtccaactgaggttagattgtaaagcatttttgtggaatcgtattttaatactttttactttttttgtgtgtccaacgggacttggtagttcagaataggagtgtaaaagcaaactcttgatacttacctagagtagagtagtaaaggagtgaggaaatcaagaatcctgtgcagctcttgcccacagaacttcccttgatgacggaaatgttccatttctgcactgtcccatatggtagccactagtcactgtgcgtgactgactaccttgtagtggggccagtgtgactgaggagaactgagttttgagtttacattaattttatttcagatttaaacagccacatgtggctagtggttaccatattgaacaagcacaactctagagcttgtcttttaaatgcgtaataatagggtttctgcgtagtacaaattgaaaggagctactgtgtaagggtaaaagaaagcaatatgggaagagatagtggacagagaggtattttcagagattagaaggcaatagattcctcattttaagaatcagatttttccccaaatatttggcattttttctttgttattggtatatcaaacagtggtgcatcgtacagtgtgctatcctagattgagtaaaatatagtatatagtaaccccccccttttttttttctttgagatggagtttcactttgtcacccaggctggagtgcagtg

SEQ ID NO: 38053 - DNA, 1062 bp, Homo sapiens
tgaggcccttgaccctgtatataagatttggcaatttcggattacagaggcaataaagcatgtctaatcttaaatgttaagagttagcttcctaaactataaagacattttattatctagggcctagagaataaagtttgtgatttgaccctttctgcctcattttaccgttttcctctaggacctctattttgtggcttgaaaacttttgtaagagaagctcttagaacttttgcgaaacttcacatttctaaaatgacaaaattttttatcataaattatttgggaaggatgtaatttccaacctgttgtaaatattaatattaaaaaataaaacttacctctctctaaatgcatttcagggaatctaaataccatagcagcttgatacctaccatcatccataaacaaactcttcttgaatacttagaaatgttttattattgaatttattgtcatttcactttccataaatactatcctaaattatccccacattttgcttttctgcaacaaatatgtgaatgtaaattgaactttaaagtattttgaaatattttcagacttacagaaaaattgataaaatagttcaaagaattcccatatattccaaatgttaacctattttccaaatgtttacattttataagatttgctttatcattatacatacatttgttttcaaattttgccaactaatctgcagactttattcagatttcaccagtcatcccattaatgtccttttagaatttcttgaaagtctaagtcttggtgtatttaatgaaatgtatcttaaaaaaaatttttttttaatgagatggagtctcactgtgttgctctggctggtgtggaactcctggcctcaagtgatccttctgcctcagcctcccatagtgctgggattacaggtgtgagcctgtagtcacgtgtggcacacacctgtaccacatctggcctggaatgtttcctttattggggcagttgaggcctctaaaaaaatgagtacatatagccatagataaatatctgactgtctagcattgtatgttttcttttttc

SEQ ID NO: 38054 - DNA, 1069 bp, Homo sapiens
gcttaaaggagacaagaagcatcagggaaaattgggtcagacagtgcttccctccactcagtctctcttcccagagatgggtcaggagcaattcccgctaagaggctcctaggccagagctagagacgccgcctacagcccaggtgccaaggagggcacatctggaggggggtgcctcttgcttttttaaccagctgcatgaccttttgaatgttggcatgggtgtctgagcctaccactcctttactgagaaatgagaatgaggtattctccatccagcattttccaaagcatgggaaatggaaggtgattcggtggtgcataaacatagctggggctgcactgcactgagcggtcccttcctagttccctttatgctttatggtgacctcaggaagaaagcctcacttgctaccagctttagcctgtctcacatttgctcatttcccttcagctcagagcttggcaggcaggagtctctctctagaatttgatgagttaaagtgtgactttgaaattgactttaaaaggactttaaactttttttttgtattcctattttagggttacctttgttcactgcagtagctttccatgagtggtaatagtataaggtcttctaaaacaaattttaagtgtaaaaaggagttaatttaaaggatatgactaagcaaataataatgcaggtgctgttcaggtgtagccaagatcgtgggagtagcctacagtgacttaagtttatgaaaactgtgtttactctcaatggttgattgtcattcactggaagacaataggtctcactacttgattgctactggaaatggccgaagaccaaatattgtaaaaccacagtgttcatcttggcggagaggcatcgccagtcattacctcaggtgcatcactcttctctgtggtccgtgatgatacttaaaaatgtacaaacctggggcatctttaagatcagttggtcatgatgactttgaaatttttctaggctattttgaaattttcctaggctatttgcatagtcaatctcttggccaggattttatttcaattttgtatttac

SEQ ID NO: 38055 - DNA, 1032 bp, Homo sapiens
cccagcccatctcagtgagccacaggcctgccgctggctgctacctggaagggtcacaccagcttttaagcaagaagaggaaaccccagccttttaaagtagaattaggatgatttctatagtttctgcccggccagctgctggtccagtcttctgagcccttgcagtgttgagggcagctggggcccggcaagcagggcctttgccatcctctctgcaggcagggtggccctccctcccctcctggttctcagggtggccctgggatctgggcttgtagtgcatccctgccacctgccccggttggggaggaaaggccctgtgaggctgccttggggattaaattttcaggactcagcactcactctgatttctgatttcctcccttctcgaaatagggctgatcaaattaagcctcgtcaacaccgtggtctgggtgctgtgtggggagtatgaggagccccttccctcctcaactgcagctgggatattctagggcaggaagcatcatgggacaggagtgtgtggggtccaccagggccaattgtcaccacccccaaactcaggcttctggacccacggagttcacacaggaagacaaatgggaggaacccccgtccctgcagggttggatggcctggcctctgggctcagagtggcggctgcactgggggcctctcggtgctgtctctgagtctgcaccttgggatttacccgtgggagaggcaggtctgagagaagatcccacagccaggcgtgaaggacaggagagaccagaaacaaaggttgggcaggcctgctcctcagccccatggggggctggagcagagggaaggaggacatgtggtttgggggcccagcagcctgaggggaaagggaggtccctgacactcactgggagagagggctgagggtctggcaagttccagggtcttgagctgaggggggcgtggtgagcattgcatcacctctgcggggggctcttctctgggcagatccagggagcctggctgctgcccgcccacatggggt

SEQ ID NO: 38056 - DNA, 1070 bp, Homo sapiens
tattgttacatttcatacatgtgtgtctattaatgtagatttataattattgctttatgcatctatagactaaatcatataggaaaaaagagaagagttacaaacgaagattttggggttccctttattagtattcttcatttcatcatatggctttgagttactgtcttctgtccttttatttcaacctgaaggactttctttaacacttattggagggcaggtcaactagaaaacaaactctctcagtttttgtttctctgaaagtgtcttaatttttcttgtatttttgaaggatagttttgttggaatttttagccgcaggacagtatttttttcagcaccttaaatatgtcatcccgttggtttctggcctttattgtttctgatgacaaatcagttgttaagctcattgagagcccttgtatatgtggcaagctgctcctctctcgtggatttcaagactctctttttgtctttgtcttttgacaatttgattacaatgtatcttgatgtaactctttgagttttcaaacttggagtcattgagctccttggatgtgtagaatcatgttctttttatcaaatttggggaatttggagccattgttttttcaaacattctttatgcccctttgtttctctattctctttcttgaactctcattttttgtattttggtgtacttgatctcttaggttctgttcctttttcctcattctttttccttctacttctcagattggatgattgctgataatgtaagtttgctgattctttgtttgcctgctcaaatctgctattgaactgatctattgaaatttttatttcagttattatgcttttcagctccaaaattgtttgtggttcctttttataatttctatttctttattgatattctctattttgtgatacattatgttcttgctttacttacgttatttgcccatggtttcttttagttctttgaacacatttaagacaatttatttaaaatctttgtctggcacatgaggtgtctaggcttcctcagggaaggtcttttttatttcctgtgagtggaccat

SEQ ID NO: 38057 - DNA, 1485 bp, Homo sapiens
tggtctaaagaatggtgattttggtattatagtcttaccctacaaaatccttttgcagaccaagttttacaggaaaactccagtgattttcaatcaaacattgcataggtaaatattttctcaaaaaatataaattcccaatagcaaatactgatatgttgtaataatgctttctatagcagtcaatggctctgacttaactccatggaggctgccatttgggcacagtgagttgcctttagtccagcttggttgtctcacttcctgcccaccatgaataggaaaagcaagagacttcccctgtgctcccttttctcaaatgccattcgagggacacattgtgaatgtttatgttaaattttttttaaaaatgccttgtttagctttaaaaatacgaagtaattttgcaatttttgaaaaacactagttttcctttaaacttaatttttcatgttgatcctgaagaatccgttaaaatggtagcacaagagtctggcaagttggtactgcagagaaaaggggttaattgaggcttgtttggagtcgggattcccctttcccaaacatgcgtctcgccacttggacagcagccatttgtactcgtatactttttaaactttttcttggaatactatattttatttgactggtagtctgatattactcctaacttgtcaaattgatctctttgcaggtaaccaaggagcagtgaacagcagctactacagtagtggaagccgtgcatctatgggcgtgaacggaatgggagggttgtctagcatgtccagtatgagtggtggatggggaatgtaattgatcgatcctgatcactgactcttggtcaaccttttttttttttttttttttttctttaagaaaacttcagtttaacagtttctgcaatacaagcttgtgatttatgcttactctaagtggaaatcaggattgttatgaagacttaaggcccagtatttttgaatacaatactcatctaggatgtaacagtgaagctgagtaaactataactgttaaacttaagttccagcttttctcaagttagttataggatgtacttaagcagtaagcgtatttaggtaaaagcagttgaattatgttaaatgttgccctttgccacgttaaattgaacactgttttggatgcatgttgaaagacatgcttttatttttttgtaaaacaatataggagctgtgtctactattaaaagtgaaacattttggcatgtttgttaattctagtttcatttaataacctgtaaggcacgtaagtttaagctttttttttttttaagttaatgggaaaaatttgagacgcaataccaatacttaggattttggtcttggtgtttgtatgaaattctgaggccttgatttaaatctttcattgtattgtgatttccttttaggtatattgcgctaagtgaaacttgtcaaataaatcctccttttaaaaactgcactctgtctt

SEQ ID NO: 38058 - DNA, 3184 bp, Homo sapiens
tagctgaaaaggctctaaagaaacacaaggaaagaatagggcacaggtggggatggatggttggttggatatgtcacttttcttatggtaaacaattaaatccatattctctctgcttaaaagaagaaattaatgttttgtagtcctaggtaattgatgttttgccatgatttccaaacttgtgtcagtcccacgttacacgcaaactaaattttaggtttgaaatttgtccctagttaattggtctgcttgacaattttgtgagtcttattaaccccaatcaatagagttgagagactatggctttaaaaaattaatgcaaacctggctttagctgtaataacacccacctagaataaattaatattaccataagaaaatgtgatactttctgatcttgtttttaaagttgaaatgcaacaaactttttcttgctgtatataaatattctgcatagtattaataagcatagctttcaagaaattgtcacaaaaggttttattctctttgcttgtgactatttttcattgaagcatgcgcttacctatgctgattcttactaaaagcataggctggggtatttattggcgaaaggaaatgtgtagtgtgggctggactgttggtggaggctggctttttagcccacttgctatacatgctgccaatggatttaagacttgaaatgttgaaagttgagtggaattatttccctcctaaaacatttatttacagtactcctctctacccctaaggttgggctctgcctcagaggagtgagttttttttttttttctataaagtttacattgtcttactatttattgagtgaatttctggtcattgcctatgcaaatataagaaatctggctttaaatattagtcagtttcatggctatgactagattgttttcttgtataactaaatacctgtataaaatgaactaatgttttctctcccctccctaccccttccttatgaacaatgctttaggtatattgaaatctttaagagcagtagagctgaagttagaactcattatgatccaccacgaaagcttatggccatgcagcggccaggtccttatgacagacctggggctggtagagggtataacagcattggcagaggagctggctttgagaggatgaggcgtggtgcttatggtggaggtacgtgaggattcgtaaggttcggcaagtcgtctgttcctttgtctaggtgttttatttgattgattgtactttgtctttcaggctatggaggctatgatgattacaatggctataatgatggctatggatttgggtcagatagatttggaagaggtaaggtaagaattgaatttctcagttgaaggatgcttacactcttgtccatctagacctcaattactgtttttcaggaatgtctgatcacagatacggggatggtggctctactttccagagcacaacaggacactgtgtacacatgcggggattaccttacagagctactgagaatgacatttataatgtaagtgtgagatgaactcacaagtcaatatttcagtatggcagtaagtcagccttattctataaatgtgagcactatgttagaaattttaggttttttttgtaacgttagaaagttggttgaattctttgaaatgccttgtgttgtagtttttttcaccgctcaaccctgtgagagtacacattgaaattggtcctgatggcagagtaactggtgaagcagatgtcgagttcgcaactcatgaagatgctgtggcagctatgtcaaaagacaaagcaaatatgcgtaagtgtgattgagcatttgtgggctcttaacaggtgattgtgtgactaacatttacaatagagaaatggaaaaataaggatatatgagaagtttcctctccagtaatagattaattcttgggggatgcgggggcagtgtgttgaaggtttgggttttaaaaattagtataacggatttgtgatatgcacatcttgaagtgtatatccttaattgacaatacagatgaatatgtaaaggctagattttggagttaaagtagatcacctaagagaagtagctagaatttctttgccaaagtatttgaagttcacagatctgcttgtttaaaaactttataaaagtgcttattctgttttgtttcaccaacaaacattttcaaactttttttttctcatttcagaacacagatatgtagaactcttcttgaattctacagcaggagcaagcggtggtgcttacggtagccaaatgctaggaggcatgggtttgtgtaaatatcactttagtgtcttttttttaagctaaccttgtatgccttttctctcatttcagaacacagatatgtagaactcttcttgaattctacagcaggagcaagcggtggtgcttatggtagccaaatgatgggaggcatgggcttgtgtaaatatcgttagtttttttaaaaaccaaaacgtttatatctgtataagtcaattataagttaagttaatctatttatttaataagtttagcataagaaacttaggcaaagcagtttcttgatatttgagttttgtatctggcttacttaaatccttgtgagttatgaagttccttaggatagataattcaaattaggtttaagtagtcttgggggaggggactacggagtgaaactacttaaattttctaagtataaagtttaaatcaatagcaaaacaggattaagataaatgtgggcataattaggtgtattgacatgcctttgatgtatcaaactgagggggaacccactaaatccagtcaagcagtttcataagatcttcacaaaatgcctctacttacggaatcatgttgattttagtcctgctgatgtgtgtaccgttagcactttggtttatcaatatttgactggctcaaatgatggatagaagggtggcctggttatagacagtaggcagaaggaggcagagggttacagtaatgtaagatcaagactggaaaatgatagctatagaattacaagcccggtaccaccaggtaccacatcacataagaaaaaaggttctaatgttttcttaacttaacagcaaaccagtccagctacgggggcccagccagccagcagctgagtgggggttacggaggcggctacggtggccagagcagcatgagtgg

SEQ ID NO: 38059 - DNA, 4193 bp, Homo sapiens
gccacggggaccttggcgagctgcaggctgccgtcgagagccgcgagtggttcgctgaatctcggcaccgccgctgaggcctgcaggccgcgccgactctattgtgtgagaagtcggaggaggcggagcggaagcggccgccgccatttcctttcctctacgctggctctcggcccgggcccccacggttcggggcgccgacagctgttgctcaggacagctttgggggtccggtcgccggacgaggaggtgttggagtcgccggggtgggtgcatccgcccggtttttgctccgtgggggggcggtgcgggcccgggcgcgcctcggaggcgaaggacagcttaattggcgctctcagttctggtcctccccgctttgcagtttgtttcgacgccggaccgcgtaagagacgatgatgttgggcacggaaggtggagagggattcgtggtgaaggtccggggcttgccctggtcttgctcggccgatgaagtgcagaggtttttttctggtgagttagaactaggacgcgggagttcgagttcgaggccggggcgggcgggctggcgggcggccgggctggggcggggcggggcggggcgggccgggccgggccgggccgggtgggacccggggcgccccctggcgaggcgcgggcgactacactcaccgctgtgctgctcgcgcccggcggcccgctgttacgcaatggaaatttcgaaagccccgcccgtcctcctggcccttgggggagtgcggcaggtttggcagactttgttttctttacctatctttgaacaccagcttttcttttatgggtgtctttttttctttttcttttgagttggagtctctgtcacccaagctggagtgcagtggcgcgttctcggctcactgcaacctccgcctcctgggttcaagcgattctcctgcctcagtctcccgagtgtctgggactagaggcgcgcaccgccacgcccggctaatttttgtatttttagtagagacggggtttcactattttggccaggctggtctcgaacatctgacctcaagtgatccgcccacctcggtttcccaaaatgctgggattacaggcgtgagccaccgcgcctggcccgggtgtcttttttcgaaaggataaattggcataggtgggatttcctcctcaatcttgagaaaatggccgagtgattagacaaataatagtaatgttttgcaatatcttgaagtgtaacctcttgtttccagttttggtgttttcttaaaaaggagcattcttcggaaagttaaaatgtcacgtcttaatttcagttttcctaatcaagatttgataattgaagagtgttttcttatctagttcttaatctggctcactatacagttgaagacactgaagcccagggaagtgtttttgcagtacataggtttcctgaatattttctatcagaatgtccttgttcctattattagactgggaaaaagaaattagactgattaaaattctatttggatgaaattaacagcttttggcaagacgtttgtagtattgacttactatctgaatttagcgttggtaacggaaagcgacctgtaaaacaagaaccaagtacgctggaagccgccttgcagggggcaacactgggtttggcttcagctgtgcaacttggagcattttagcttggtaacactgatcccctttcaggtgagtattgggcttgtaatttgaatttgaatgagaaaccgtaatgtggctactggtaaggtaaaacggataaatgccccagaccaaaacagctcgcaacgaagtatgtttgccgtaaagtcacacagtccaggcttgataatcttctgagaaattgataaaagatgtgtgatgtagacatgagtagcaaggactaaagagataaattcattctgaaactgctttgaatattgtatgttgttgatgggttggaaatatatcaccttaggaatgagtttgtttttttttaattggagttttaggagttggtaatatcgtggtcagtatatataggcttcacaagttatgtaatttgtagtggggacatggaatagacatttcatctgtgtcacccagaggtggttttaggttttaaattctgtattaacggttgttttctttccagactgcaaaattcaaaatggggctcaaggtattcgtttcatctacaccagagaaggcagaccaagtggcgaggcttttgttgaacttgaatcagaagatgaagtcaaattggccctgaaaaaagacagagaaactatgggacacagatatgttgaaggtttgatttacattgccctagttacagtaaataaagcattaaacaatagaggtctcaccccttctgaattttaggtatttgactgcatggaaatggtcatctaagggagtttgtggcagctcttcctagcttatctaaagacccaggaagtctgaactttgttatctaattttccaaaagtgactaattctaagcacctctttcagtattcaagtcaaacaacgttgaaatggattgggtgttgaagcatactggtccaaatagtcctgacacggccaatgatggctttgtacggcttagaggacttccctttggatgtagcaaggaagaaattgttcagttcttctcaggtatgtagtcatgtttgttgctgagcagtgagttttggctagcttatggcaaggtgatttaatagacgttaaagttgagtagcttaggtatttcagtaggttgtaaattgccaatgaattaatgttttcttcctagagaccttcaaataatttaagcccatcttaaaggtggaaatgaagtacttccaaaatgttaactttgcctatatttagtattatagttcagagtagatctttcattgaggattgccctcaacagcttaactactttcctcacattggtgtccagctaagtacctcaagttaaaggtaagatccctttaccagcagatcatcagtgcgatgaattaggttgttgtaaattatggcaagtgtctgtgttgcaagagacacgtatttgggtcatgtgaccagaagcatctaatggtctaattctctttaatgcaaaagtcggtttatgaaagacttggtttaacctgtgtggtataaacttactgaaaatcagatgtagtgagagtagtttgaatgcttgtagtctcagtatctgaaataagtgttttgaaattgttcctgggcctaaagtatttgaatgtttttatgctgaagagctgataagattgcatgtttaacaatgttagataagatatcgtatattttaagtattaatatttatgatgtgatacgctggaagcaggaaatcctttcatggtttagtgtagtatgttaaaaattgatatatgtatcgagtcctaatgtcagaatttttaaaatcaagtctgttttgttttgacactaaattggtgagaattgaatgctgtcaacgttaaatatgaacataatttcatatcttctaggaaagtgctttaagtcctttttgtaagcttgggaatgtatccacggaaaggatttttcatagacggaatttccagaagtgaatcataactactgttagagcataagcatgcatgattgtgctgtgtagatcagttttgttgaaagtttagattgttgtgtttgtcaattataatttaatgtttcagtttttatatgaaatgttgtaaatgtatacctttttaaaaacttgaagttccaataacttaaagcattgaaatataaaatgaggtaaaaggtgttttgaatttagtaaaactgttatttaatgcttaaaacttaattgaattgtataattctcaacattaagttgcatagatatgtgttcttaagttgttgaattcttaatgcatcctgtgttcagcaagttttttttaatatatactgtaccatgggtgtgttaagaatagttatactttataataatggaacttcatattattgcaatgcatatttaaagagtacttgttgaaagcataccattcacctaaagttaaaaattctggtttatttaaagctataagaagaatcatttctgggcttgtgatgttaatattgcccccctactggggttatttgtccttgggttgaagggttggaaatcgtgccaaatgggataacattgccggtggacttccaggggagga

SEQ ID NO: 38060 - DNA, 1029 bp, Homo sapiens
tggatcacgaggccaggagatcgagaccatcctgactaacacggtgaaaccccgtctctactgcaaatacaaaaaaattagccgggcgtgttggcgcatgcctgtagtcccagctatttgggaggctggggcaggagaatggcctgaacccgggaggtggaggtcgcagtgagccaaaatcatgccactgcactccagcctgggtgacagagcggtagccgggcatggtggcatgtctcaaaaaacaaacaaacaaacaaaaaaactgcaggccgggtgcagtggctcatgcctgtattcccagacctttgggaggccaaggcagacggattacctgaggtcaggagttcaagaccagcctgaccaatatggcaaaaccctgtctctactaaaaatacaaaattagccaggcatggtggcaggcacctgtagtcccagctactcaggaggctgaggcaggagaattgcttgaaccctggagccggaagttgcagtgggccgagactgtgcattgcaccccaacctgggcaacaagagcaaagctctgtctcaaagaaacaaacaaacaaaaactgcaatttgagcaggcatggtagctcacgcctgtaatcccagtactttgggaggctgaggcaggcacaacgcttgagcccaggagttcaagcccaggagttttgcaacatggcaaaagcccatctccactaaaaaatacaaaagttagcagggtgtagtggtgcctccctgcagtcccagctacatgggaggatcaccggagcctggggaggtcaaggctgtggtgagccatgatcacaccaccaatagactccagcctgggcaacagtgagaccgtgtctcaaaataacaacaagaaaaactgcaatcattaagacaaacagtccaatttttaaaataggcaaaaagacttgaaccactaaaaaaaaaaaaagatggccgggcttggtggctcacacctgtaatcccagcactttgggaggccgaggcaggcagatcacttgaagtcaggagttc

SEQ ID NO: 38061 - DNA, 2071 bp, Homo sapiens
gaggggcagagacccaaggtcacagaggtcccggaacgccagccacagccacctgggcaggagctggggcggcgtgagggacacaggcgcgagggcacccccccaccctgctgcctgctgccccgcgccggcctgggcgaccccggcgtgacacccggtcctgggactcccttcggcgcccagaacgcgtcggcagcatccggcctgtgggagggagggagggagggagggaggcgtcctgaggcagcccggcccctgctgccctgcgctcccgtgcggccccagcccgtcctccgcaccccgagcttcccgggctggcccccgccctccgcgtgcgcccagcgctcttgcaggcggagggtgcgggccgatccccccgcgccgccccgctggccggtcttggcgatggtggggccgagtagggcctgagccctcggaggcgctcttcccccggcctggaggttccgggagagtggcctcctgcctgcctgcctgctggaggcctaagcgggctgagtccagctgcccctcggcctccccgccacctgcttccctgtttccctgtcccggagcgccatcccagagaggctgcggaggagggcgagggaacctggacccttccggaccctccgagctccatctacccacgccgagctctgccagcacgcccgcctgccgcacttgttctgccagagcagaggcctgggctggccttggggctccagggccagagaggcatcacccagggactctgcggggagcctgcctgacacgggagggatggctgggcagaggccgtgctggcggggtatattatcaagggcaggcatggctggggcagaattctctgtaggtagggtgtgtcacctggggaaggacattctgggtccttggcagggtgactataaaagcacactggcatgaaggcctaggtggggccatatctgaagggctggggcatgctctttgagtcgtgggtagagccgtgagcccttgccctttgtcctgagccagtgtgtgcctcccgcagcagccacatgcccgcggattgatgtcaggagccacctctgcaagcctggcttaccacagggagccaggctccaggacagcagagtgagggagaggcactggctccatggcacccactgtgtctggggggcatccaggaggctggctctctgagggcctggggaacaggagagcaaagaaggggagcacttagattcacgagcccagcccctaggggatagaagcctaaggatcctgtgaggtatgagtatggggtgacataggcctcccttgtcgaggggctgtcactgtttctgtggtgacccagtagtaccaggtctttggaggcctcaagagaagctgggaatctgggctcttatgtgaacccatctcgttgtcacatgtagaaaatctgtcttaaacccctggtgaaaccagacgtagccagtcggaggccagattggaacctggcctccactttgcagccagcgggggtccaggaacttgagggaaggacccaggaagtggaatctgcagggaaggaaggaggtgggcagggaaccagagaggaagggcagcaggtgtgggcatcatcctggaaacgcaaggtcaagcccaggacggcctcttagaccaacgcaaaatggaccctggagaagggtttggggcccaatttcctatctagcccgtgcagcagctctgccagcgctcaaactgtggccctcggtcaagcacctgctgaggatctgcccagggaggcagacccttgggggcagcccggggtctcagccatgcagcgctcccagccttcaggctgtccgcctccccaggcctggacttcagcaatgatggacacccttactcctaggaggttgcagggtctggagaggaggcagacacctgccacacacatgcatggtgacagcagaccgttaacgggcctgatatctgcctatgcccctctgagcctgtcccttttccctgagtacaaggcacaaaggttgtgccccagcttggctctttaatctttccccaaccaagagggaagcagggggaactgtgg

SEQ ID NO: 38062 - DNA, 1084 bp, Homo sapiens
gccaggttgatctcgaactcctggcctcaggtgatctacctgccttggcctcccaaagtgctgggattacaggcgtgagccactgcgcccggccgacacccaactttcagagcatctttggttcctggggtgagagaagccagaccccagcaccagtcctatcccacagggagctcggtgctgccacctctgcagctgcagaacccggcaggctctggagagctgccccccggtgggaggtagcagaatggagccagcgcacccctttcccgatgtctcgaggcccttctgctcaaaattcttttgtaggcaccggtaacctgattctaaggtccccaggagatggatcacctgatgacatgagaatgtcttgtttttggaaagcctggtcatgcaatttagcagaaggtttgcggtgaggtggaaggcatttatttgctttgtcttgctaaccctcaaaatcaaagcctgtcccagcctgacagcttccagcagaaagtgtcagaaccagaggcccagccaaggcccaggcagggcaggcggtcctcctgggccctggcattgttcttacacatggagggcatggccatcttctctttcagggacaggctggcctgacatggaaggtgaaacaaggcagcagcccctgcctccaggagaactctgcagactgcagtgccggggagctgaggggtcctgggaaggagctatggagtcccatccagcaggttacagccacatcctctaaatgggcgcaatttgtcctgccacctagaaaaagttcacatgtggacagtgagcagccaaggtctcttcagagggaccccaggccagctggtccagcacaggctaagcaagggacccccagagcacaggcctcaagagaaggcctcagcaggcccactgccgctgtccagcttcctcgggccacacaccccgtcacatctgggtctgagaggccttgcgggaagacctcatgggacgcaaggactccctgggcagagggtgggcccctggtcctggaggcacagaatcctcgacccacacgactatgtgacctctttataactggggaagacttcga

SEQ ID NO: 38063 - DNA, 1028 bp, Homo sapiens
cactctgtctacccaggctggagtgcagtggcacagtcatagcctactgaagcctcaacctcccaggctcaagtgatcctcctgcctcagccgccaagtagctgggaccacagatgcacaccaccacactggctaatctttaaaaaatattttgtagaggccaggcgcagtggctcacacctgtaatctcagcactttgggaggccgaggtgggtggatcacttgaggtcaggagtctgagaccagcctggccaacatggtgaaaccccatctctactaaaaataattagctgggcgtggttgtgcacgcctataatcccagccactcgagaggctgaggcaggagaattgcttgaacctgagaggcataggttgcagtgagctgagattgcatcactgcgctccagcctgggcaacagaaaaaaaaaattttttagagacatggtctcactatgttgcccaggcttgtctcaaactcctgagctcaagcaatcttcccacttcccaaagtgctgggactataggtgtgggccactgcgcctggcccatttgtcttgttcttgaagcttccagtccagcaggccccaccgcatatccagtgctgcagagtgcagggtttgctctgcctgtcagaggagccagggcacagcaagggcactgcagttgggagtccactgggcgtcagtcactgcccccacccccacatcagccaaggtcggtctccgctggccttgcaccacgcacagagcactggctcatgccaagaagcagaattcaaactttgatgttgccgccaactagttttgtgatcctgggtaagtaagtggctttgaatctccaaatcctagaagaatgaccagagagtctgccacgggccagtccctgggctgcatgttgtaatggtatcattgtgtttcatgctccctcaagcctgttgctttgttttaaaggtgaggaactgaggcttgcagtttttgtgcagtcatggcaagttcagtggcaaagccaacgtcaagtttcagggccgc

SEQ ID NO: 38064 - DNA, 1025 bp, Homo sapiens
gccatttgattcttcattcagcaagtatttcttgagtactttctgtgtgccaagcacaaggggaacagtggaaagtaagcccattgtcattcttgccctcacagatgcacttgtgtggaaggggaagagaaactaatgcacacatgcatctgcataatttaaaactcggctgagcacaaggaaaggaaagcactggggactgtgagaagatgacagaggaatcagggcagccggggaagggcagaggccgttggtggaggtggaggtgtgggatagtgggctcaggaagtggaggcaggcaggggcaggctgtaaatgctctcatccagctgtttgcagctggcattcagtacgtcttttcagtccatccgtattgcccctcctgaactctaggaccccaaactgtcctgcatcctttgccttactgaacttgctcttttcctgctccagccccagtgccacctctcccttcacctctcatctttcctctccttctacagccatgtgctttctttctgaccttaaacccaaatttgctccctcttcaggcctttgtgctcactgtggagttcccctccctcttctcagtatcctatggaagttacatagtcatgtgtttatgcacggattgtccatctaaggctgtaagttccgtgagaacagaggctttttatttgctggtgtatccgcagcacctagcacagtgctcggtgtttgtggagtgagtaaggaactggcccaaccttgttgggcatttaggttgatttcccttttgactgttatgcacaactctaccgtgaagcttttcacaaaaacctctttatccacgtgaccagctgtttactgtttacttaggacaaagtcctaaaagttaaattgctgttttttggggttttttttttttttgacatggagtctctctctgtcatgcaggctggagtgcagtggcgcaatctcggctcactgcaaccttcgcctcccgggtttaagcagttttcctgcctcagcctcctgagtatctggga

SEQ ID NO: 38065 - DNA, 1352 bp, Homo sapiens
agctctgagcccagaggaagccgagtcagccctggaggcggcccattatttcacagaggacagctcctcagaaggtgagcggccactggaacacccgacatgcccagccagcactctgcagccaccgccgccttcctgtggggctcgggcagtggccagcagtcccacctgggctcagggagcaggccgcatggggttctccccaggggaccacgggctgggctctgccatgctggcgggggctggggccgccccctgtggatgtcctcactcctgtttctcttgtgtctctgtcttcctggaccttggctcctccccactctgcccctctgcctctcctctgctgtcccttccagcatctcctctggcctcagatctggatcttttcctgccctgggaggctcaaggtcagtccctggaaggcaggggcgccccctgtacctcctaacactcttcctgcactatcaggaagcctggaagctctttgtcccagggacctctctgggacttcatcctctggggcataagttctgagaaggacccagaagcaagccactcctctgcaccgcctccgtgtctgctgtaggtgggcggtaaataaggcccccacactaggcgccaagcaggcccagggcaaggcctccacagccacatgttagagacattctgtcttcctgtgagtaggaaacaaatacaaaatgctgtcattggagcgtgtgaaagacacagtgtggctgagtgggggctggaaagaatagtggatgctttcctaggaaaaatcttcatgttccacgtcacgttttttgttaaggaaaaacacgcatgttgagtgcctgttagaactcatccctgtgctatgtttaaagcctgttgggagcatctgatcccaggtgatgggagcatgctaggccctgggctttcgcagtcgagctggtgacatgcagcacacttgcaaaaccgaccataatgccacctggtggtttcacatgggggataatgcacaccaaggaaccgactcaaaagagaaccaaaaatagtgtgtaccaagatgcccatggcagtcctggtgacagtggcagaggctgacttgagcttgaggaccttgatttcaaggacagaaactacagaagcaggtacaccttctgttgtacatggaaccagcaggccactctaggcttgtcccgcatgcttctgggagcggcatgttggtgcagagccctggcctcagaccgcatgtggcccccaggaagcagggcctccattccagggtgagttgcctgagcccagagaggtgtgcccttcactgccaccagacagccagcgagagcagctcagaactggggtgctgccga

SEQ ID NO: 38066 - DNA, 1908 bp, Homo sapiens
ccgaagacattgagcagatgcggtttaaacagaggctgaaagtgatccagtccttggaggacacggccaagaggagtgtggtatgggtgccagcagggctgggcaggggctgggctgggggggcagcagtgccttccccacagagcagggtgggtacagggctccaccgcacccagtctcctacactgctttggtatgtacatcatggtaggattcatgggaccgggatccaggggtgtaggtgggaatgtggggagaggttccagtcacttttctctgctggtggatgtgtcaccgggaagcttctcagatggctcccaccctgaaagccacatgcccagccctctgggccgagcccgcccagcctggcttcccatgtgttccctgccccactcccaggtagcaacatgccgccatcctccgcacaccccaaatggcatgtgtctgccacaagctgctgttctcatctctagaggggccaggccctccctgccaccctgtgctgcaagacctgtttgtggtctctgcccccaaaggcagggacttcctccattgtttccacattcccagccctcctgcaggcttgtaggacactgtaaggacattgggtcgcagcaccacagactgactgctttggccaattaaagtacaggagcattggctggcaggttctcggcctccttccacagagctggcaccagggtctctgcagggatccagatgacgggagccaaatgagtatccctcactctgcgacctcagctgcacgttgaggacagaggctcccccacgcccatcctgggaaggggcccggagtgtgagagagaggctcccccacgcccatcctgggaaggggcccggagtgtgagagagaggctcccccacgcccatcctgggaaggggcccggagtgtgagagagaggctcccccacgcccatcctgggaaggggcccggagtgtgagagagaggctcccccacgcccatcctgggaaggggcccggagtgtgagagagaggctcccccacgcccatcctgggaaggggcccggagtgtgagagagagactcccccacgcccatcctgggaaggggcccggagtgtgagagagaggctcccccaagcccatcctgggaaggggcccggagtgtgagagagaggctcccccacgcccatcctgggaaggggcccggagtgtgagagagagactcccccacgcccatcctggaaaggagcccggagtgtgagctgagtggtaggtggggggccagggatgggctgtgggcctcgctctctcccgaagggtccgcccttgagtgctgggccactgagagggcggttcacacccttgcccttgtctgccgaggatgctctcacagagtgccgtacttctgtgccaggagcttgtgatccagctatataccctgtttctccttccttctaggtccgagctatacctgtggacattggtttctccattgaagagctggaggacctttacatggtgtttaaggtgacagctcagagccagggcaggacccgttcctagcttcctagcttcctgccagaaaagaaatggatctaagagtatcctcttagaagtagatagaaatagggaatagaatagaaaaacagaaacagatctaagtgcatcctcagatgcagttgccatgaacctcctgtggtagaatcgaatccctcttggagtttaggcaggacctcttaaatggcagcaaatccattcaagtcatcttacacagaagagggaatacattgcccctgtattgctagactgaaaagtctagcaatgcacagcttcaggcatggctggatccaggtgctgaaatgtgccgtcaggcttccccatctctgatgtcctctgcactgctcttcctacaccatgccaggact

SEQ ID NO: 38067 - DNA, 1054 bp, Homo sapiens
tatgctgagctggtggagaagtccaccgggaagtacagcctggccacagaggagatcgagcgagacctgcaccgctccatgcccgagcaccctgccttccagaacgagctggggattgctgccctccggcgggtgctgactgcctatgccttccgaaaccccaccatcggctactgccaggtaaggggcctgacaggggcccagagacagcatctgccaccagaggttcacaggagcaggtccctgtggtcccaggcctgtgtggtgaccctgccttgtgtcccaaggaaggagcccagcagaaaaagatgtaatttaaaaacagtattaattgctcatcgcatccccatgccgaatagaagtcgtcgtctttgtacttttgtctgagtcccagcagcatttgattgttgtatgtgtttggtgaaacaggcacatacagaacataaaatgtcccatcttcactgtttttaagcgtgcagctcagtgctctaagcacattcacactgttgcacgcccgtcaccgccatccatccccagacctctcttcatcttgcaaaaccacagctctgtgcccattaaacatgccccgatcaccattagcaaccactgttctactttccattgctatgaatttgactactgtgtctcatataagtgaaataacacagtatttgccttactgtgcctggcttatttcacttagcaagatatcctcaagggtcatccatgtcatatgaatgtgtcagaatttctttctcaggctccatcatattacatagaccacattttcttttcttttcttttctttttttttttttttttttgagatagaatctcactcttgtttcccaggctggagtgcagtggtgcagtctcagctcactgcaacctctaccacccaggttcaagcgattctcctgcctcagcctcttgagtagctgggattacaggcatgtgccaccatgcccagttaatgttttgtatttttagtagagacggggtctcgccatgttggctaggctggtcttgaactcctgacatcaggtaatccacc

SEQ ID NO: 38068 - DNA, 1029 bp, Homo sapiens
tctccaggcaggcagtcagtctgcgctggggccgtgcccactggattcaggcagcttgtcgtcaacatttgtttaagtggacccaaaatccatttctaacatcacaggggccagaggggtagactgtgggtgtgaacctagcagagttctctctttttttttttcctttttccttttatattaataacaactttattgaggtaaaattgatacgcaatacactgtacatatttaaggaatacaatttggtacgttttaacaggtatacgcccatgaagccatcaccacagtcaagatcagggttctctcaaaaaaacacagaatgtgaagtgttttaggagggcgcccagcaccctggcagctgccccagccctgggtggagtgggaccgtggccacgggaccagagccagtgggagggtgtgaggggtagagagcccagcccaggccagagcccaccatggggaatcgaccacctgcccagccaagaagttcaggcagtcagctggccctggtcgagctgggctctcccccactggactttgctttctgccaagacagcatcactctcaggccggtgtggcaccatgatggcagcagcaggccttgcatgctccctgggttatcccaacactcctgcagaagggccactcatttccttggtagcaaccgggtgacgcagtcgccctaaacccaccctgagcccagcccaacatcacaggccatcacccagccctctgtgcagcccaggaagcatgggcccgagggtgggcaggggtgtgcctccacgttaggatagggcctctcctgtcctttgcactgacccccctcagaaaagggccccacagggtgagcccagaacccgctccctgagactgactcgctggtgagagtggggttaattactgaggactcggtgtccagcagccagagaggagctgagggctgagctgcagccacagcctcctgcccagccagacaggctcttctccgtgcaccgtttgcccccatggcccttcttgcaccgggcc

SEQ ID NO: 38069 - DNA, 1023 bp, Homo sapiens
atacacaggtgtgcatttctgttagcagccgcatgctttagtttaagctccacacctccctgtggggagctcctcacctaggtttcaaggtgaaacctggggttaggcctgcccagggtggaagagctgcccggggccctccatctgagtgggatccagggcaggtgctctgggctctgcttgcccatcagtaccgagggatgggttgcacattgcccaggccagcatctaggtgtgtccttttcaaagcagtctcaggacacattgcttgctggccacttctccgctggttatgtgactgtctcaccttctgcctgctcactcagcatgcatcttttattgaactctgaggtccctgagcatgacttgctcaagggaccaccccagggatcctgaatctgatgtggaaacaggcctggggaggccccaaggcttccttgagagtgtgctggtcctgaccttgtcccctttcctcctgtcctcctaccttgtttccccagagacctggacgcccgagccaagaatgagtgctaccgagccacgttccggctgcccagggatgagcggctagacggccacacaagctgcaccctgtggacgccgttcaacaagctgcacatccctggccagatgttcatctccaacaactacatctgcttcgccagcaaggaggaggacgcttgccacctcatcatacccctgagggaggtcagcatcccctagttgagaggccaaggcctttccagccccgaggtgtcagtgggctcagggaccagcctgtcctgctctgccctgtctcactggggggtacctgggaggatgccctagcccaggcagtcacatgtcactcagtgatgggacaggtggagggtgtaggacaagtgagcccctccacaggcacctgccctgttggggaggcaggtaacatggtgggggcacactgcttgccctctcaggtcacttgcctagtggagacagggtctcccacgcgtgagtttccatcaggcctgccttctgggccct

SEQ ID NO: 38070 - DNA, 1023 bp, Homo sapiens
cacctccgcacgttcgttcctttccccttcagccactggtgggggagacactcaccgtgtgtggttggtctggaaggcagtggacacctcagtggcctggtccctccacatggagggcgtgacacagcccagacaggcctgggcacacaggaagtgctgcccccagagagcagttccctgggatgggtctggggtacagatgggcatcaggagcctcgccctgccaggccctaacttgcggtgtgtctatctctgtgggcacagtgagcctcgtggtgcagtgggtggacataacgcgtctggagaagaacgccaccctgctcttccccgagagcatccgtgtggacacccgcgaccaggagctcttcttctccatgttcctcaacatcggcgagaccttcaagctcatggagcagttggccaacctggccatgcggcagctgctggacagcgagggcttcctggaggacaaggccctgcctaggcccatccggccacacaggaacatctcagccctgaagcggtgcgttgccctccagggctggggtgggctcatgtgagccaggttcgctgaccttggctgggacctgcctggtccaagtgtgtagacctggagaaggtgtccacattcacccctcatgggctccccacttgggaaggaagccaggtaaacagatcattgcagtcccgtgtggagaggcagcaggagatagcagtgatgtcctgaggataccactaatggggaggaagctcttcacactttattcctcttggccctatgatgggaaggggctcttaccatccctaggtatcagacaaggaagctgaggcacagagaggttaagtaacttgcctgaagtccctcggttagtgagcagtggagccaggatgtagccacctcagccagggtgttctgacacccccagaaaggctttggtaaatctgggctcaagtgcacggcctccgtcccaccgtgattgacagctctcctgtataccctgagactccttggccagaggcctc

SEQ ID NO: 38071 - DNA, 1047 bp, Homo sapiens
cccacacgactgtgattcagcctggacgtttaattttttgtttttttaccaggaccatttattactttgttatgcacatatccatcagcttaagagggaaaagcagcttgaagattctggtcacttagatttagcaaatgaggtcacccactttcatctcgcttctttgaatgtgcgtttaaggcctggggaattcatgatttttcttttactttaccaaacctcttctaggttcttcccgcaaagagatcacaaaacactgggaatggctggaaaataacttgctccagacactgtccatcttcgacagtgaggaagatatcaccaccttcgtcaagggcaagatacacgtaaggtttacccgccactctctgttctcacccttccctggccagcagtgttctcgtgtattatcctatttcatcttcacgatgtagggtgcgtccccattttacaaaggtggagactgaagtgtcagcgctccttctcttggagttgaaaggggcagaggaactcgtgacccaggaaaaccccttcttaccctgggtgggcactggaggctgctgaagcctagtgcggggcttccattcctacccaagtgccttggaaggcgtacgcagatagacggttctgtttgccagaagagatgctggaaacaattggatattttgagttgttttttataataaaactaacgttattttaaaagacacatgccctttacccaaaaattccattcttggcgtttaccctacagtgtattcatatatgcagaatatacagtttaaagggccaggtgtggtggcccacacctataatcccagcactatgggaggccgaggtgggtggatcatctgaggtcaggagttcaagagcagcctggccaacgtggcaaaaccccatctctactaaaaatacaaaaattagccaggcatggtggcacgcgcctgtaatcccagctactcaagaggctgagacaggagaattgcttgaacccaggaggccgaggttgcagtgagctgagatcgtgccactgcacaccagcct

SEQ ID NO: 38072 - DNA, 1040 bp, Homo sapiens
ctcagaaatcaggacaggattgtatttccttaatggtaaacaaatagatgcatggtacaatagtgtccgcacatagacccacatatttatggacaactggtttttgacagatttagaaaggtaattctgtggagaatggacaaccttttcaacaaatgattctagaacaattgtatgtccatatgcaaaaaaaaaaaaaaaaaaaagttcatctgtacctgacagaatacacaaaatgagtcagaaccctaaatacaaagtacgaaactataaaatttctagaagagaaaacggggaagtctttgtaaccttgaaataggcaaagcttccttaatatgatactagagcacagtctaccaatgaaaaaatgattaatcgacttcatcaaattaaaaactgccataaagtgaggggaaatacatgcaaaaggatttttatctggaatatataatgttctctcaaaagtcaataatacaaaacaactcagaaatataggcaaaacacatgaacagacacttcaccacagacaatgtacacatataggcaaaacacatgaacagacacttcaccacagacaatgtacacatggccaataagtacatgaaaagatggtcaacatcattacaatagggaaatgcaaattaaaactgtaaggaggctgcgtgccgtggctcacacctgtaatctcagcattttgggaagccaaagtgagaggattgcttgagccaagaagtttcggaccagcctgggcaacatagtgagacctcgtctctacaaaaataaaaataaaaaatcagttggtcatggtggtgcacccctgtagttcctgctattccagaggctgaagctggagaatcacttgagtgagccccagaggtcaaggctacagtgagccgtgtttgcaccactgtactccagtttgggaagcagagcaagaccttgtcttaaaaacaaaacaaaacaaaacaaaacacaaaatctcaccataccaagtgttggtgagaatgtggaggaactataattttcatgtattgctgttg

SEQ ID NO: 38073 - DNA, 1598 bp, Homo sapiens
aaaaaaactactttaaagttcatatggaaccaaaaaagagcccgcataagccaaaagaacaaaactggaggcgtcatgctacctgacttcaaactatactacaaggctacagtaaccagaacagcatggtactggtaccaaaacagagatatagaccaatggaacagaacagagccctcagaaataataccacacatctacaactatcggatctttgacaaagctgacaaaaacaagaaatggggaaaggattccctatttaagaaatgacgctgggaaaactggctagccatatgtagaaagctgaaactggatcccttccttacaccttatacaaaaattaattcaagatggattaaagacttaaatgttagacttaaaaccataaaaaccctaaaagaaaacctaggcaataccattcaggacataggcatgggcaaggacttcatgtctaaaacaccaaaagcaatggccacaaaagccaaaattgacaaatgggatctaattaaactaaagagcttctgcacagctaaagaaactaccaatagagtgaacaggcaacctacagaatgggagaaaatttttgcaatctacccatctgacaaagggctaatatccagaatctacaaagaacttaaacaaatttgcaagaaaaaaatcaaacaaccccatcaaaaagtgggcaaaggatacagacagacacttctcaaaagaagacatttatgcagccaacagacacatgaaaaaatgctcatcatcactggccatcagagaaatgcaaatcaaaaccacaatgagataccatctcacaccagttagaatggtgattgttaaaaagttaggaaacaacaggtgctggagaggatgtggagaaataggaacacttctacactgttggtgggactgtaaactagttcaaccattgtggaagacagtgtggtgattcctcaaggatctagaactagaaataccatttgacccagccatcccattactgggtatataccaaaggactataaatcgtgctgctataaagacacatgcacacgtatgtttattgcgtcactattcacagtagcaaagacttggaaccaacccaaatgtccaacaacgatagactggattaagaaaatgtggcacatatacaccatggaatactatgcagccataaaaaaggatgtgttcatgtcctttttagggacatggatgaagctggaaaccatcattctcagcaaactattgcaaggacagaaaaccaaacaccacatgttctcactcataggtgggaattgaacaatgagaacacttggacacaggatggggaacatcacacactggggcctgtcatgggttggggggaagagggagggatagcattaggagatatacctaatgtaaatgatgagttaatgggtgcagcacaccaacatggcacatgtatacatatgtaacaaacctgcacgttgtgcacatgtaccctagaacttaaagtataataataataaataaaccataaaaaataaaaaataatcccacttcaactaaaatttaaaaataaggacaagcaactatttgtgcagatgtgaagaagtcaatat

SEQ ID NO: 38074 - DNA, 1054 bp, Homo sapiens
cagacgtttgagatagccacatagagatgggaaggaaacactgggcctccactgtcccatcctctaaccaggatcagctgggaaccaggaagagctcactgtggtgaggaggtaagtgagaggatcccagcagccccttcaacactgtggatacctacagacctcaccaccagggttcccaccagtcctcacaggcactaagcccagctgagtccacccggctatgcaccccacagagaaggagctgacactgtgcctcaatccctgtggcccacacagctgctgtgctataccatcttggaattggagctgtgactgaagtgtgtcttgctccaggggtgagtagtcatggctcccctttgtccctaaggctaagctgccaccaaaccaccccagcacagtggccccacatctccaggctgagctgggagcaactgttggctctgttcctcgggggccagcagagatggagctgctccacctgttcttcccccagctgctttggactggagctgaagcagtatcctgccttttgggaaaacagtaccttgaacactcagagcaatcatgcctccccagtgtctcagttgaagcagcgccacgcctcccaggaagtggtgcattggccatccagagtgatcacacatcccagtacctaagctgaagcagctcccagcatcacagggaaatggtgcctggcccacccaaaagagtatgctccctgggcctgagctgaagcagcacattatcctttggggagttggtgccttggccagactgagcagttgtgcatgccagggatgagctgatatagtacaccatgtcccagagaaatagagcggtgactgagctgagacaccttgcccttacaggccgtagaactctagtaccctgcttgcttgaacctgtactagtcttcaagaagctcagctgcttagataaccttcctcttggagagtggaattatcactgtgctatcctcccctcccatgctgggtccacacaacagctctgctcccctaagctaggatacttgctgtcattgcactggact

SEQ ID NO: 38075 - DNA, 1109 bp, Homo sapiens
aagcttcttgccataacatgtgtatataatattctttgactttataagtatctcagggttgctgaaatgaaatacactcttattgcccattttcatcatgaaaggtcagtagctaattggagaatgcatttgcctgtcagaatgtggaaatatatggaacattcctgtgtcagagaaaggttaaaactttgcatgagtacagttaatctttgaaaactggtgggttcaaaaggtttttttttttcttccacattggaagagaggaagtattgtatatactgccaagatttgtcctacagaaaaggattatatggccccaaaacagacttcttttgtcattttagatggcagagtgaattttgttcattatgtttcttaaggattaacaattccagaagaactggaaaggggaaatagatgtttgagctgagaagttattatcttaccagttttaaaaaaatactgcaaatactctgataccttgtttttcatgtcctgccattttgtaaataaataacacttttcatatacagagactgtattatataccttctaaatattacatgtcaggggcttaagatctgatttttttaaagcacaaaatatgctcttaagatcatagtgtttgcaagataattcatttctatatccttggggtttagcatggggcctggcacatcacactgcctcagtaaatatttcaatgaattcaagaatgagcttaccttctgttgcaatgacagatgcagtcaaaatactgtgtggtataggagttattctttgggggcagagtgatattactctcagggagtcaaggacacttcacagagaaggtaggttgtgaccttggagctgaattttaaaggatgaattaagacttcatcagatggagatgaaggagagtcaggcaaatggatcattttccacagagagatgaaagagttgaatgactgaaacatcaggaatagtgggcaggagacttgtgagtgttgagctgatattagatgaataaattgtcactagactatgaagggcatgaatcacataagaaagttaggctttattctataatcaatatggtttctgttggtgttgttgttgttgttttt

SEQ ID NO: 38076 - DNA, 1027 bp, Homo sapiens
ctccgcctcctgggttcaagcaattctcctgcctcagcttcccgagtagctgggattacaggtgcgtgccaccatgcccagctaatttttgtattttcactagagttggggtttcgccatactggccgggctggtctcaaacccctgacctcaggtgatccacccacctcagcctcccaaagtgctaggagtacaggcgtgagccaccgtgcccagccctaaatttaattactaatagcttgctgttgaccaaaagcctcactgataacatagtcgattaatacatactttgttatatatgttatatgctgttatataagaaaatgttattaaggaaatcataaggaagagaaaatatatttactgtttattaagtggaagttggtcacatcaccataatggttttcatccttatcttcttcccattgagtaggcttagggggtaggaggaagaggacggttggtcttgttatttcagggatggccaaggaggaagaaaatttgcctgtaagtggatctggacagttcacactggtggtattctcagctgtaaatggaattaactcttgacacatggataaacctcaaaagcattatgctaaacgaaagaagccagacacaaaaggctactattatatgattccatttatatgaaatgtctaagaaagtcaaacatacagagacagaaagcacattagtggctgtgtagggtagagctgggcatgaagattaattgcagtgagcatgagggagctggcatgttggcaagcatcagtaatcccagctacatcggagactgaggcaggagcacccttgaccccaggaggtcaagtctaagcctgggcaacacagcaaaacccccatcttttaaaaaacaaaaataaaacaccaaaaagggaacatgtatttttaaaaacggcgtgagtgaattttctggggggtgatggaaatgacccaaaactggatgtgatgatggttgcacatccctgtaattttactcattgtacacttacaaagatgagtcttg

SEQ ID NO: 38077 - DNA, 1124 bp, Homo sapiens
ttgtttttcttcttagaaatcattgctttataggtaagcattctgcctctgctgaagccatgtaatttccaacataatcctattagtattgccatttgtttgttgggatgcatgttttttccccatagttgaatttcttcttttttgtaagtaatggtgatagcagtctgtaaagcttggacttattaaataactggctgtgattaaatccttagttgttttgcatttctacattttgcttaataactttgacaaataatgtatttgatttggaatcattcgcccaggttatgtcatggattctcaaggattgcctgtctgggaaggattctgttttcatcaggataaatgttgaaattgacttagtaattaatataatttcagtagtaacaatgcttctttatttcttctggaagcatttaggatatttctgattgtttaataacaatagttgcagtttattgagcacttactatataaatgccaggcgctgtgcgatgagtttttaaatatattttttagacagtctttacaataaccatgcatgatgtatgttctctcccatcttacagactaggaaggggactgaaagaggtaagggccaacagaagagggctcacaccctagttttgttgatgttctgttagtttcaccactctgtctccttaagttgaaatccagataaaatttagttttgcattcatgagaattttagagtttggcttatttaaagaactaacttttcatcgtgtaatttttacataattatttttagcaagtttcttgcaaagacttgcccaccttaattgagagtcgttggtacttccccacacatcttgatagaatggtgcagatggatttcaactttagtgccctctgacttgttttcttcctttcaaactaagccttttagaagtaagatatactttaggaggccaaggtgggaggatcacctgaggtcaggagtttgaaaccaccctggccgacatgctgaaacccctgtctctactaaaaataaaaaaattagctgggcacggtggagggtacctgtaatcccagctactgaggctgagacaggaaaattgtttgagcccaggaggtggaggttgcagtgagctgagatc

SEQ ID NO: 38078 - DNA, 1073 bp, Homo sapiens
aataagacaacactgagacaggaattgttttctctccacgtacctcctgttacctcctcccgtatcttgatttttagcctaggcctctctaggttcatgcgcttggcttcctattggtatctttacttcagtgtcacaaagacatctccaaattgataagctccagatggagctttgattcattttttcacctccctatctgctaccactgctctccagtctttcccatctcaataaatgacatcgccatccacccttgttatttacacaaattaggaccatccttgcttctttggctcacattccacatctaatccatccttcatgatttacctctagaatggatcgtacgtatctgttgtttgacattttcacggctgccgccttagttcaggcaactatcatttcctactctctttttcttggtctctctgccttttttcttaacttctttcaatcttttcttctatagtagccaaaataatcttaaaggttcacccagtcatgttactgcttgcttaaacccctgcagtggctcgtcatcatccttagaacggacatcagaagtctctgtgcagtatgaggtgttcactacctggtctagctccagccccttcctcctccccacccccaggtcatttcacccttactcaccttctgaaaccattctgatattctttcagttcccagggcttctatgtcttctttacagtgtgtgccctctggttggcatcccacagtgtttgctatattagtggaactttacaaaaattcttgggttctgtaaaatggccagttaacgggacagattgagaatcttagaatgtaatggccattagtagtcaacaagtcaagtcccccatctgaggcttcagcattccagtcagatacttgtacaggttaagattgaacaaatgtgacagaagtctaccacattcatctctggcaaacccaatgttagaaagtctttttcatctggaaaaaaatggttcaggtatttatagacactttccttgtctgattcaagtcctctaacctttaggcttcatatccctatttattttgaccattct

SEQ ID NO: 38079 - DNA, 1026 bp, Homo sapiens
taataatacatcagcagaaataaaagatttagaagataaaattgaaatgctttcagaaagtagagcacgaagattttgtaatggaaagtaggagagaaaatattttttaaattggaggacaagtccagggggtccaaaaatgagtgctaagaattctagacagagaaaatgaaggagaggaaaccatctgtgaaatgatttaagaaagttttccagcactgaagggcacgagattccagcccgtgagactggaaagtgctccacacgagggacatagaaaggcccgtgtcaaggtgcgtccttgtgaaatttcaaaagacttgggactagggtgaccaactggctttgtttacctgggactgaggggtttttcttgggatacgggattttcagtactaaaactaggacagtcccaggcaaaccagcatgacaggtcaccctacgggaacaaagaaaattctacaaagttaagagagaagccagaaaacaatgccttcaaaattgtgaagacaaacgagcacagatctagaattctatgccttgctgaactataaactacactagcaagtgtgagtaaaatgagaacgtttacaggcatgtgagatcttaaacatttacttcctaagcacctcttctcaaaaagctactagagtatgtgctccattaaaatgaaagaccaacccaagaaagaagactttaaatacaggagacgggagcccaacacataaaggagaaggaatctcttggaggatggtgaaaggtgatctcagtgtaacagcttcgtaccacatccagagggcaactgagccccactgcagcagcgtgagctaggaagtagatgatcatcaccaagacccccactcccttcaagccatcttttaaaaaaatgggctttattttttagagcagttttaggttcgcagcgaaactgagcagaaagtagagatttcccacatccccctgcctccacacatgcagagcctcccccattatcgacgtcacccaccagaatggtatgtttgttac

SEQ ID NO: 38080 - DNA, 1075 bp, Homo sapiens
gagaaaatgagaggctgggaattagagacacaagtgtagacagctcttttttctttccttttttttttttttttttcctttgagacagagtctcactccattgcccaggctggagggcagcgatgcgatctcagctcactgcaacctctacctcctgggttcaagcgattcttctgcctcagcctcccgagtagctgggattacaggcgcccgccaccacgcctggctaatttttgtatttttagtagggccagggtttcaccgtcttggccaggctggtcttgaacacctgaccttgtgatccacctgcctcggcctcccaaagtgccgggattacaggtgtgagccactgagcccgaccgacagctctttatggaagtttttgctgcaaataggaataagaaataaagcgataggtagggccaaaggaaagcagctactgtgttaacataggagaaaacaccatcatttaccaacgtggtggaatgtattggtagagtgcaaaatgtcgatgatgttggagaaggaagagttgagggagcttgtccttgagtcaggggggttagggtctagagctgagcaggcttagtgtagccgggagcccagatggttgctgtgtggcaaatggcacacagatgctgggtgggtgcatcctgggaagtctgtgggagtgagcaggcagaagaggtatcaaaagtataaggtgggctgggcgcagtggctcacacctataatcccagcactttgggaggccgaggcaggcagatcacttgaggccaggaattccagaccagcctggccaacatggcgaaaccccatctctactaaaaataacaaaaattagccgaccgttatggcaggtgcctgtagtcccagctacttgggaggctgaggcacgagaattacttgagcccgggaggtggaggttgcagtcagccgagatcatgccactgcactccagcctgggcgacagagcgagactctgtctttatttatatatgtatatatggcagaaggaaaaggtgtgagacagttttcacattttggctaaataggtaaataaaatgtgggcata

SEQ ID NO: 38081 - DNA, 1036 bp, Homo sapiens
taagctataaagtattggactctttggcactaaaaccccagattgctacaaaccgaaggctaaaatagaggtcagcaatcattcatattgtgtaaaatgtcacccttagctagcaatttatttttccatatttgtgtgtttagtgcactgttagaattccttttcctcacttttgttttgttcatggcacttcataattttatcatttcattttattttcagttgatatctggtcagtgggttgcatcatgggagagctggtgaaaggttgtgtgatattccaaggcactgaccgtatccttccccgcgaccttggccccgccatgctttcttaatgcctcaggcagcatgaccacctgcttacacgagcgctcacgaggacaaagtcgtaaaatccactccagactgtgttctaaggggggctttactgtatttgttaattagtgtcacaagccaagtggttcaatttcattctttatttttaacttgactacctgtgatgactttgagacttagagttcagttaaaccgattatattagctcttaattttgccaaaaatagctggacacatagaagaaattatttactctttgataagtatattctgatatttaaatgaaaatactgtattatttagtttattccgttaatttaactaggaaagatgctatctaaatttaataggctagtgtgcttgtgtgctttaattaagtactattttgttagttactggtatgcattgaaatattttcccccaaagtaagaactgaagcacattacaaaggacctaagtgaaagagattaaaatgaaaattttgtgaggaacaatatgttaaactttcttgtttgttactgtgctgacattttgtagaattttttttaaaaatctgtctagtgggttattttgtgacacactggggaagtcaaaataaatgtaaaatgaaagagataaactcatactgtagtcagcaagtcatgttagagatacagcagaaaggagaataactactctaattgttacaatagccttcttt

SEQ ID NO: 38082 - DNA, 1084 bp, Homo sapiens
tttaaacattatatgtttatcatttaaatcttacagaatctaggaagcctagaaacaggtcacttagcagcatggcagtgtaattgtacctgttgtcaatgtcgaaatggcttcctgcttgccctgatgacagccccacagccttcactgaggcatgccgcctgcaaccccccttgtggcccatcagttggggtgtcttacaggcaggtgctaggcagtgctactgaacctgcaacttcctgggtaaagtatcctcatgccttacgccatgtcagtggcttggcagtttgacattgcaggtgcactactcttgtgaaaagaatgggtgtgggttgtttacaagtcacagtttctcaagtgagtttgcaggccgaagtccccaggcaaaagtcaaattcctaaggcctgaggaaggggctagggtggaggatcagcaggaagaaaatcccttagttatgagggaaaaggttgcagaagttgtgttaaggctttgcaagtcaggtggaatatgatgcatgtcttcattctgcagacacttcccaagtgtctgctcgcgccaggcgtgcttctgagtgctgagagctcacacagagtcagcactggggagggaagagaggtggcaaccagaacatgagcaggtgagtttttgtgccacgtacagatggagacagcagcaccagtgctggcgtgtctttgtggcgaaggtgagaagattggaggtggatgatcatggaattgctcttccaaggagagaaagagccatgggaagattccaggatcagacgattctagacctgtgctgtccagtatggcagccactaaccacaggaggctgtggagcactcaggatgtggccgtgctgcagttgtaaaatacatactggacttcaaaggctcagtactaaaaagagaatgtaaaatatctcagtatttttcttatgttgattacattttgaaatgataatattatggatatattgggttaaaaaaatatactgtatgattaaaattaatttcacctatttctgcatgctgttgagcatggctagtagaaaatgtaaattatacacatcgttcgcattata

SEQ ID NO: 38083 - DNA, 1038 bp, Homo sapiens
atgacccacatatccatttctcttatcctaaaattctgccgtgccagcttccctgcatcactggtgggagtggccagaccctgcaccgcaagggttcagagcaggcctgtgggctcagcagaggccgggatttgaataacagtgtgactgtactgtcaggaaaaacatttaataagctagggagcgataatataattaatataattctctctaagctgattttacaattttttgttattattacttgtacggctgtgtaagcagactatcatgatagatttttttttttcacaatttgataccaatacttcagtagcaaagaaaatgaaataaacttcttcctgccaaaaaacagtacatttttcataaaaaagaaagatggaattgatgtaataggtgaagaacaattaaaacttgtcaaataaggccagtaagaaaaccccaacagttaacaaaatctgttttcaatgacatattacagaacaattaaaaagctacataaaaatcagtgttacctacttattagaaatacattttaattcacctgtagatccaaaaacatttagacatacagacaaaattttgtattaactgacaaaaaaacccacactacctattggattcatgttgcttaaagggtatctacagaattctcacctcaatattttcgtgttaaataaggtggaaatcaacagtccagagatggtcattagaaatgagccactgacaaacacaatatatttataacttgtataacatttcattcatgtgcatgttttgagcattgtggaatatttaatttgcatcaggctttccaaattccttaaatttataagatttgttctcagtgggagttctcagatgacttttgaaataattattaaaatgaaaatttatttgcaaactactagggtttagatacagaataccttcttgtatttaaagatccatctccagtttgcatacatcatgtctttcaatgtgccggagagaaacaaaggcatccccacgttctttacatttatagggttttttaga

SEQ ID NO: 38084 - DNA, 1035 bp, Homo sapiens
agaaacagtggactagccctgaaacagagtcatgcatgtgtgggcttctgacttatggcagtggtggcctgtggagcaatgaggaaaggctagccttttaaataaatggacataggaatgttcatgtagaaaaaagtgaaatttgaccccaacctcatattatacacaaaagtgaatgtcagttgaattgctgtaaatatataaggcaagccagtaaagctatttgaacataatataggagaatgtcttcatgatctttggggtagggaaggactcctttaaacacaacataaaaaaacatttatctgctggatgtggtggctcatgcctataattccagcactttgggaggccaaggtgggaggatcgcttgaggccaggagttcaagaccagcctggccaacataatgagactccccccatctccactttaagaaaaaaaaaaattatcatagaagattgatcaattttgtattaaaattaagaaatgttgtttattttaaaaaaccaagatcaagaaactgaaaagataagcatagatgtgagaagatatatgactgaaaaaaaatctcttgttcagaatatgtaaagaacaacagtcaagaagattataaagatagacaaacaaatagtcaataggttgtcacaggaggatacccaaataacctataaacaggaaaagtgctcaatgccgttattcatcaagatagtgcaatttaaaactgcgacgaaataccattccacactcagcagaatggttagaaactaagctgttggtgataccaagtgctggtgaggatgtggaaccacccagaggcagctctcagatgtgacccctcgtgtactggaaccacgcagaggcagctctcagatgtgacccctcgtgcactgctggcagctgtacaaatttgtagaaacgctctggcaaagagtttgacattatctactgaaatacaatggatacgttcccactcttagttgtctactcatcagaaacacatgcataggggatccggagctgcgtacaggaatggt

SEQ ID NO: 38085 - DNA, 1120 bp, Homo sapiens
tgtgtggcaaacttcttttacttgtgttgggaccaataaaaggctgcttcctagaagtaaaggtaactcagagattggcccttataggcactgccactcagcttcagattatcatctcatttgctgaacttgtatgggggtaaacaaaaattgctagtgcccccaggtacctagtagaaataaatttaaattctttgtggaagaagacagcatcatattagataaaattatttctagatagcaaacagttttatacgtgcaaggcccagtctaggcacacaaggagatatgacaacatgaataaaatcctgcagaaacagcagacaaaagaaacagatccataggagatattggcattattagatccacatttttaaatagctatgatattacgttcaaggtgataaaggcaagattaaaagttttggtggagaaatgaaaacttcttttaagaggaataaatcaaaattctagaagtaaaaactatagtaattgaattatgaatttaatatgtgtaacagcatgctagatataactgaagagagatttagtgacctggaggagaggtcagcaaaaagtatccagaatgaaagctgcagaggcaaaaatggtagaagagcccaaaacagagaaggtgttagttttctattgctgcataacacattaacacaaacttagttgtttaaaacaacacctattgattatctcatagttctatagtcagaaacctgggtgggtttgcctgggttctttgcccagcatctcacaaagctgaagtcaagatttcgactgggctgggctcagctcacagatggaggttctggaagggtatctgcttccaagctccttcagcctgttggcagagtctagttccttacagctttaggtctgtggttcccaatctcttgatctctttcagtcaggcgctgctgtctgctcccagaggctgcatgttttccttctcaagtgacctcctccatcttcaaggcagcagtggcatgcccagtccttcccatactcacatctccctgattttccaccctttccatgagccagagcaaactctgcctttaaagggctctcgtgataagaataggcccacctggataatctgcgtttt

SEQ ID NO: 38086 - DNA, 1081 bp, Homo sapiens
aaccatttacacctagcttgcccacagggggcaagctgatgagacgcacagagtgatgtagtcttttcatagccagtagtaatgcatacattcttttctccaaaggtggttattttctagtccagccccttaaagtgtggtcttgctgggcctcaaaattccttcctttcataatggtctggtaccactgaaatgtctgcatttttttgtgtcttgcttaagttcagaacttggtcagattgactttatcaacttacagccacattgtcttacataccaataagttcagaactctcttacgtgagctgcgtatgtacttccggtaagaatgcacgttcattctgtttttctttgaagggatctgaaacttgcccacccttcgggatattgcaggacgctgcatcatgagcgacagtaaatgtgacagtcagttttatagtgtgcaagtggcagactcaaccttcactgtcctaaaacgttaccagcagctgaaaccaattggctctggggcccaagggattgtttggtaagtatggtctgttttaatagcgtggattgagtttttgctgtaataaaaagtaaaactaaagtgtcaggatttagaaacattgatgattaaaaaaaaaactctgttataggtttatgagctaaattgaatcaactgcttgctctagttctgtgtagtcaggctgtagggtacaaacccatattcttagaatgctgcaggaatttaaataggtagcaagttttcttttttgtttgtttctttttcctttcattttttttttcatttctcctgtcattatgatatcagagtagtaggtatgacagtgagttgtaacagaaatttggagttttattcatttcttcatcatggccaccttttcccccctccccttttattcccgatcactcctgttcatttccaggcgccatcattgcagtgccttgccattcattggcaggatgaggccagtcagtgtcattgtcactccatggattaaccaggaagggatgctgtgtgaggggttgggctggccatctcttccttggtgtctcacttcaactgtgtgtccagccc

SEQ ID NO: 38087 - DNA, 1027 bp, Homo sapiens
agagacggagtttcaccatgttagccaggatggtctccgtctcctgacctcgtgatccacacgccacagcctcccaaagtgctgggattacaggtgtgagccaccgcacccggccagatttttactattattattattattattgtttaatatagagttgaagcctcaccatgttgcccaggctggtctggaactcttgggcttaagtgatcctcccaccttcggcctcccacagtgctgggattacaagtgtgagccatcttgcccagctggaaaacagaacaatttaatgaaaaaaatgtcggcagcaagcattgagacagagggtgattgtgagaatctgcttttaatcacaatagttagttgatttaaatatcgcatgtcctgggtactctgaagctttagtgtgatgaaaggttcacttgagtctgtggatcactgaatcgttgtcatcgttagaggaaaaagtgttttggtaggttttggtagggggagtcagcaaggtgaaatgtgcaggactgtgtgctggtcctggccagcccatgtgcaaatagcttcactttctaaagggatatcagaatggtgctttgggaggaacttgaatattgtggtgaaacactcctaaattcaaatctgagccatgctgggaatttggacaacttccttactggacaacttcctctaagcctcagtttcctcatttgcagagcggggatagtaatatgcttctcactagttgttataagggtgttgataaatgtgtacctcagagccaggcccactctcatgcctctagccttatctgcctgaagcccgtcttccatacaagtgtcaaatgatcattctgcagcttttcatttaacatgtgttgtttaatcagtttttaaatgtgaaatatgtacatttgaaaaacagaatagaaagttataatgggaagaaagtttctcatttcccactatttctctacttgccagcattgtgtatgtgcgtgtgtatgcgtgtgtgtgtgtttacgtagctgggcatt

SEQ ID NO: 38088 - DNA, 1059 bp, Homo sapiens
ccttagggtggtacaagtataattctagaacattcccagcccaggatgccaggaaagttcagtgtaaaagactctaacagattttattgagttgttccctccctcgcttaactgtggtctttacattgaccacaatttgaccatgtccccacagggaactttctggttgttgtttttttctttctttctttcttcctttttttttctttttgagatggagtctccctctgtcacccaagctggagtgcagtggcgtgatctcagctcactgcaacctctgcctcccgagttcaagagattctcctgcctcagcctcctgagtagctgggattacaggcacgcaccaccatacccagctaatttttctattttttaagttcagacagggtttcaccatgttggctaggctggtcttgagctcctgacctcatgatctgtccagcttggcctcccaaagcgctaggattacaggcgtgagccactgcgctggcctctggttgtttttagaagagttaatgttatgaaaagtttcacctaggctgggcactgtggcttatgcctgtaatcccagcactttgggaggccaaggctgtggggatagcttgggcctgggagttcgaggttgcagtgagccgagatcacaacactgcactccagcctaggcaacagagcgagaccctgtctcaaaaaaaaaaaaaaaaaaaacatttcacctaaacatgaatggtgataattgcacaactctgaatatactaaaccactgaatcgcatgctttagatggcaggctgctacggtacatgacttatgtctccagaaagctgttaaaattttttaattgacattaaaagatgtattagtccattttcatgctgctgataaagacgtgcccaagactgggcaatttacgaaagaaagagggttaatggactcatagttccacatggctggggaggcctcacagtcatggtggaaggtgaaaggcacatctcacgtggcggcagacaagagaagagagtgtgtgcagggaagctcccctttataaaaccatccgatctcat

SEQ ID NO: 38089 - DNA, 1063 bp, Homo sapiens
atacgggcagggacagcttcaaggctttcgccaaggctctgggtgtcatggatgaccttaagtcgggggttccgagagctggctaccggggtattgtcaccttccagttccggggccgccgtgtccacctggcgcccccactgacgtgggagggctatgatcctagctggaattagcacctgcctgtccttcctgggcccctccttgccacatcatgagctgaggtgggaccacagtccccaggctgcatcggcctgcctgtgtttccctcttaggtgcatttatctttttgatttttccgagtggcatttaagtgcacaaatgataacaagaggattattctcccgttctcaagggagtcagatcaggggaactattctagggtatgttgcggggtattaagcaggaaaccactgtgtggtggggggcactgggcttgttggggccagaaatgtccacgtcctgagctttctcctggagcatgtgcagagagtttggcaacgttcgctctcttgaccagaccccttctccctgacctggctcttccagccagggcacgagccctccttctatacctgctccccttcccccagtggggactgagttatgggagaaggggacatatttgtggccaaaatgatactaaccaaaggggcttccttgtcagggcctggtggagttggtgggtcatcggggctcactgcctcctgcccttctctcctgtctgacccccacttagcccttctctccttgcagcctagcagtttatagttctgagatggaaagttgaagggggcaagcaagacctctcctcagcccatgcccagctgtcaggagagaggtgcagggaggaaggccttgtgctgggacaacctctctcttgccttacctcagagagggactatgccctgacccctcctttctgaaaatcagtgccctccctgttgctctaggaggctcctgctggcttggtagaagacagaattcgatctgcctgtccctttttcccctggggtttgacacacaggctcctctcagcatgaggtggagcagtgaccaggtg

SEQ ID NO: 38090 - DNA, 1050 bp, Homo sapiens
catggctgcctcctaatcccatagtccagaggaggcatccctaggactgcgggcaagggagccgggcaagcccagggcagccttgaaccgtcccctggcctgccctccccggtgggggccaggatgctgaagaagcagtctgcagggcttgtgctgtggggcgctatcctctttgtggcctggaatgccctgctgctcctcttcttctggacgcgcccagcacctggcaggccaccctcagtcagcgctctcgatggcgaccccgccagcctcacccgggaagtgattcgcctggcccaagacgccgaggtggagctggagcggcagcgtgggctgctgcagcagatcggggatgccctgtcgagccagcgggggagggtgcccaccgcggcccctcccgcccagccgcgtgtgcctgtgacccccgcgccggcggtgattcccatcctggtcatcgcctgtgaccgcagcactgttcggcgctgcctggacaagctgctgcattatcggccctcggctgagctcttccccatcatcgttagccaggactgcgggcacgaggagacggcccaggccatcgcctcctacggcagcgcggtcacgcacatccggcagcccgacctgagcagcattgcggtgccgccggaccaccgcaagttccagggctactacaagatcgcgcgccactaccgctgggcgctgggccaggtcttccggcagtttcgcttccccgcggccgtggtggtggaggatgacctggaggtggccccggacttcttcgagtactttcgggccacctatccgctgctgaaggccgacccctccctgtggtgcgtctcggcctggaatgacaacggcaaggagcagatggtggacgccagcaggcctgagctgctctaccgcaccgactttttccctggcctgggctggctgctgttggccgagctctgggctgagctggagcccaagtggccaaaggccttctgggacgactggatgcggcggccggagcagcggcaggggcgggcctgcatacgccctgagatctca

SEQ ID NO: 38091 - DNA, 1061 bp, Homo sapiens
agggtagaccagaggcaggacagtcaaggagttatggtctggagtggcagctggctgggaattggggagtgtttcagatcctttcaagtaatgtggtctggtagagcttggaggattggtgggaccatgcctttttctcactggtttgtgtcctggttccttcccagagcctggcagagagcaggtgtgtgatacacgtcgtcaggtgactgaccgaggaattcagggcaaacagatcatctcaatttgccttgctgatgtgccagctgggattacgctgatggatgaagctcttcagagctatgggcaatatctacatatttgattgtcaagaaacttcgtgtggaaatagcttcaaacttacacaaattgcaagaataaaaaatagtataaggatattcgtacacactctctttactcagattcacctgttaatattttgctccatttgctctctatgtgtgcagagtatgtttttgttctgaaccatttgagaagttgcatctatcctggtcctctacttctcaatacttcagtgtgtattacctaagaattggaattaatcagttatcactgatactttaacctactgtccatattccacctttgtcattttacccaataacgtctttttaaaaaaagttttttgaggtttcattgacatacaattgatatcaatatgtgcaaagaactgcatataaagtgtacaatttgataagttttgacatatatgtgtgtgtgtgtatatatatatatatatatatacctgtaaaagtatcaccacaatcaagataataaacatatccacccttctagaagcttcctaatgcccctgtgtagtaactaccctactgcccttctctgcctccatccccaggcaacaactgatctgctttctgtaatatagattagtttctattttcggcagttttatgtcaatggaatcacagtgtatgtgctcttttttgtttttcccaaaaagacccatattgtgtaattatttggagattgtgttgtgtatgtcagtggtttattcagttttattgctgaatattattcca

SEQ ID NO: 38092 - DNA, 1565 bp, Homo sapiens
ctagaacatcttcatggaacacgccctcatgatgcaatggccttgtggcacttactgtggaggcctccacctggggatcctcagctcgcctctctggccttcctgacattctttctttaggcagtcccacaactagtatgttaggtgggctgggggctggtggaaagggaccacaagcatatacccattgtaaggttagttcttcattaattaaccagggattcaaaatcttaccagaagcaaaatggtgggtggggcagagaaaaaacaaattcagcacatcactgtgaagctgtccttggcgctgggagttcttaagggggtaggaggcaagcagatctggaacacttatttcctgtcaggacacaaccattttattttttatttattgtaacttttaggttcaggagtacatgtgcaggtttgttatgtaggtaaactgtgtcacagggatttggtgttcaaattgtttcatcacccaggtaataagcatagtacccaataggaattttttctgatactcttcctcctcctgcccttcaccctcaagtaggcctcagtgtctgtttttcccctctttgtatccatgtgttctcattgtttagctcccacttgtaagtgaaaacatgcggtatttggtttttccgttgcagcattagttctcttaggataatggcctccagctccactcatgttgctgcaaaggatgtgatctccttttttatggctgcatagtattccatgaacacaaccattttaaactaagggattaggtgactgttatgaaagaaactaagtaatttgtgctttaaggaattcatacaaacaggctgtcatggttcctgaaccagcctcagtatcaccagggcagcatgtgagaggaagttgaggcagtatcttggcactgtttttagccactgctctataccaggcctttatatgagtgcttttgcttctaaacatacgcttttggtttttaacaaaaggaacctgactgtatatacatgatattggcacatttgcatttagacagtagctcacctttctgtaaaagtccacatacatctttctgcattctttctaagggtttcctagtacactcattgtatagttataccatactttacttaaccccctcatgataaatgttttggtggtttccagtttttgttagtatcaacagtgttgcagtaaaatacatttttctctcctgtatgttatcctacaaatacatttctaaaggcagaattgctgagttaagatttgcttttaaatttttgctacatactggaaaattgctctccaaaaatattgtaacaatttatacttttgacaatagtgtatgaaactttgtttctccacaccttcacaaacactaggtattatcaacatttttcaccttttaccaaactgatggttaacaaatgctctttttaaaaaaattttattttgaaacaatctaaacttgccaaagaagtatagtataaaactttttccttcctgaaccatttgagaataagcttctgatatgatgccccatcacctcagaatacttttgagtgtgt

SEQ ID NO: 38093 - DNA, 1047 bp, Homo sapiens
gtcatattcattgttgtatccctagtacttaaaaaccggtacatggcacatggtacctgtcacacagtatgttgtcagtaaatgtttgtcaagtgaatgttgttcattgttattccagtttgtttttgtttttttttaagagagtgaataggtgtccttttcattttcttggtttagtgtcacatttgaagacgagcactgaggatgaggaaccaactgaagaatatgaaaatgttggaaatgcagcatctaagtggccaaaagtggaggatcctatgcctgaatctaaggttggtgacacatgtgtttgggatagcaaggtagagaatcaacagaaaaagcctgtggaaaacaggatgaaggaggacaaaagcagcatcagggaagcaatcagcaaagccaagagtacagcaaatataaagacagaacaggaaggtgaggcatctgagaagagcttgcatctgagcccacagcatatcacacaccagactatgcctataggacagagaggcagtgagcaaggcaaacgtgtggagaacattaatggaacctcctaccctagtctacagcagaaaaccaatgctgttaagaaattacataaatgtgatgaatgtgggaaatccttcaaatataattcccgccttgttcaacataaaattatgcacactggggaaaagcgctatgaatgtgatgactgtggagggactttccggagcagctcgagccttcgggtccacaaacggatccacactggggagaagccgtacaagtgtgaggaatgtgggaaagcctacatgtcctactccagccttataaaccacaaaagcacccattctggggagaagaactgtaaatgtgatgaatgtggaaaatccttcaattatagctctgttctggaccagcataaaaggatccacactggggagaagccctatgaatgtggtgagtgtgggaaggccttcaggaacagctctgggctcagagtccacaaaaggatccacacgggggagaagccctatgaatgcgacatctgtgggaaaaccttca

SEQ ID NO: 38094 - DNA, 1056 bp, Homo sapiens
tcttcccttctgagacttgtccctatatttagtgttacactagcctaatagactaattgtgtcaatgactccaagccagtccctgccgggtttgattcagaaaatcagcctcccttttagtatcgcctttgctcacctcctcccctacgacaactagaaatctcttctccactacttggcatgagaatgttctatttcagttttttactttaaggaaaaatcacctttcattcttatttctatatttaagcaatagaaccaactcacgttaatcatatacattcctaatattcataagacaaatgcaacagtagctagaacacaaaccatattctcttctcatctgcatatcacttctctgttccttagtcccatctttcctttgtacattttgcccctcctaggtactctttgttctgggttggtaagcattttgtcactttctcttgtcttgtttcctttctttgctcatctccaaatcaaagacagtatccaaggatttaaggtgtagaatccacgcgtgaaccttgaggtggtagattgtcttgtggaatatggttggactctgcaaattgaaagtcgttccgggctagttgcagtctgttaataggaaggggttttcggccagagcaggccacggctcctctctaacgagttgtctcggctcttgaaaagtggctcctgagtctcggaggcagagacagcaagaatgtagggccggttcttaactgtttgcattcacttttctaggccttggcgataaagcatgaacaagaagctcggaagagtgcccagaggttgttggtcgtatgtagtttggaaggagtgggtggcgttctatgtctgacgcttttggctgatgtaaccaggctattagactcatgctgcgtgttgaaaactggttagaaagggcttgtccattcagcctttagaacttttaagaaattcaggagtttctgggtctttatatggaagagttgtgttttgggggtaattccttacttgtgtcatcagggacacatgacttagctaccaaatcagtcttgattggattat

SEQ ID NO: 38095 - DNA, 1001 bp, Homo sapiens
catgaaaagattcagcgagcaactagacagccggctcgttggtctaggggtatgattctcgctttgggtgcgagaggtcccgggttcaaatcccggacgagcccactttttcatttttttttttccatttcaactgaagttcttcttgttcaaatcctggatgagccagctttttaaatttcaactaaattttgtgttaccttgacagttttgatcccgaaagatgtccagcggaggcatcaccaagatttccgggagtgctggggattggaaagaatcgtggataggagactaagcgagccgtcccggaagcaacagttgctgtgaagactttgggcacagacctgcacgtgagagtatgctcttgagggttgtgggggctctccttttacagctagggatcacttgtcgaacgtacccggagagtagctgctagcagacaatattatggcgacagaggtaggtgtgggtttccgtagtgtagtggtcatcacgttcgcctaacacgcgaaaggtccccggttcgaaaccgggcggaaacatgccacagtgttttttttttttttcccccccctttcttttgagatggggtttcgctcttgttgcccaggctggagtgcaatggagtgatctcggctcacagcaacctccgcctcccaggttcaagccattctcctgcctcaggctccggagtagctgggattacaggcatgcgccaccacgcccggctaattttgtatttttagtagagacggagtttctccatgttggtcaggctggtctcgaactccggacctcaggtgatccgcccacctcggcctcccaaagcgctgggattacaggcgtgagccaccgcgcgcggccccgaagcggttattatctcattacacgctcttattacactggagactaacctagaagatcccactagtatgtccacctggtggtcacagcggcacaaagagaagagggcatctacgcttttgctttccattcccaac

SEQ ID NO: 38096 - DNA, 1057 bp, Homo sapiens
cggggatcgaacccggggcctcatacatgcaaagcatgcgctctaccactgagctacatccccacctactctcagcagctctcccagatggtccctattggtcgcttaactcaggacaccgggagtggaaggcaaccggtacgcgctgggtctcagccgctgcaaaaacccggcatcgcagggcaagagttgttccagcgtcctccgctgactccaaaccagcgggtcttgaccaagggattccaagagagaggattaggcccggctaagcacctgggagcagctgtggaaaaaggagagacaatcatcaggcacgatgccaaaaatgaactgtgacctgaaaaagagaagaaaggaaaattgtgcaggatgctacgttttgttttttaaaagtgggggttgaggcaataaaatacggaatatttgattaacgtaatccagaattgtaaagttgattgctcgggaggaagaaaggactgggacacaggcgatgggcctactttccaccgtgaactgcggctcctcttttgaatttcgaaccaagtttaatccaagaaaaccttactgagcttgccaagaactgctctaaaaacaggattcagccgtgaacaaacctagtacagtccatctgaaagctgacattccagaggagatagagtgcgggcacagagccggccctgagaagggagcgcgctaagagacgactttacacagtgtgcgcgttcggggcgggcttcgtgggcagagacgtttgaaacaagacctgaatgaggtgggagggagcatgcaggtggtgggagaaaagaggtccacgcaaggggaacagccagcgcagaggccacggggttcaggaacagcaagaagatcggggacactgggtcctggaaggccctgagaagggaagtcgggaaggagggagcatccgggggcagatgaggtgaggcgaggtcttcgcctttgggtgagaattgctgaagttcccggtgacattggcaagggcggtttctgaggagggtgcgggcgaaagcttgatccaagtggcctccagagtgagcga

SEQ ID NO: 38097 - DNA, 2707 bp, Homo sapiens
agaggttgtggtgctagtttctctaagccatccagtgccatcctcgtcgctgcagcgacacacgctctcgccgccgccatgactgagcagatgacccttcgtggcaccctcaagggccacaacggctgggtaacccagatcgctactaccccgcagttcccggacatgatcctctccgcctctcgaggtacggactaaggtagatttcaggacccgagattgcagggctgggggattccgcgtgtcgtgtagggaattccgcgtgtggtgtggcaggccggtggcgcgcgagttggcggggactgacagacttctctgccccattgtgaattggggcgtgcggacccgagcctaggcctcaacccgggcgaaccacattgcagatgagaacctacgtgtacatcagctcgcagctgctaggagggttggagagttggaaacttttaaaatatcttttgccttctccttcgtagtgtggccgggggcctacgggccgggcggggcggtgatgaccccaacatgccatctgagtgtcggtgctgaaatccagaggctgtttctgagctgccgcccggcccaaggctcgtggggaggcaggtggactccagaggacctcgtggctcaagtgtcggcctactttttctgcccctggttctccccgtccctatccctgtgttcctgactgcgtttagacgcttcttgtgcttccgctttgctgctacactgttaagaattgtctgacttttgaatcatgtctggctgttaatcgtaaaatttgttgagtgggacaggtttcagtaaaagcatccaatcctgtagcgcctgaagtggcttttccagcattcattactacatttctgtcggccctcagaggtaggcataggaggccccagctactctacagccacaaactgctgtgcatttggttgcagagaagacacaaagtggctgttgagttcgtctgagtttcaggaaagggtgtctgtatttctggcacctaaattaagttctcaggatacaggctgggcgcggtggctcacgcctataatcccagcactttggaaggcagaggcgagtggatcacttgagatcaggagttagagactagcctggccaatggtgaaaccgcatctctagttaaaaaattagccagacgtgctggcaggtgccagctggccaagtaatcccagctacttgggaggctgaggcgggagaattgcttgaacacgggaggtggagtttggagtgagccgagatcatgccactgcactccagcctgggcgacagagcgagactccatctcaagaaaaaaaaaagttatcagggtacagtttacctctacgtgcgtttttagtctggaatagagccactcagtcctggtctgtaactgctcttgtctgttgtttccatccctccttaagcgtccttagttgttgttaacccactcatgaccttgacacttagtgaattatccagtgtgttaaacgggctgcgggttcctcactgatttttcttctgttttacctcctttagataagaccatcatcatgtggaaactgaccagggatgagaccaactatggaattccacagcgtgctctgcggggtcactcccactttgttagtgatgtggttatctcctcagatggccagtttgccctctcaggctcctgggatggaaccctgcgcctctgggatctcacaacgcaagtagctgctcacttagctctggggccttgggaagaatctgggcagaagtgaggtggatgcaattggctggtttcccaggggagatccagtccatttgggaactggaaagcagagcacacctacagaagatgtttggcctccctcactttaaataagttactcagcattgctgaggagtgtggctgaacatttttgccaggtgcaaaagttctgagtgggcagcagtttgaacatgttttaccttgaaagctcaggtaattggcaggtggaattagagggtcctggtgatgacagatggcattgtcagccaatccccaagtgggagtgaggacatgtcctgcaattctgaagggattctctgtcacttggctcttctctttcatatactcagtcacttgactctgtgatcagagccaaatccagggttgtatgagtgatgcaatgagacagagacaaagcccaggaaatgagtctgaccgttgaatgagagtgtttgctaagtctgagaatgacaaactcctccctctcaggggcaccaccacgaggcgatttgtgggccataccaaggatgtgctgagtgtggccttctcctctgacaaccggcagattgtctctggatctcgagataaaaccatcaagctatggaataccctgggtgtgtgcaaatacactgtccaggtaaagtgagccatctccaaggatctcttccaccctcttaaactttgctttttttttttttttttggcgacagtctcactcttgcccaagctggagtgcagtggcgcagtctcggctcactgcaacctctgcctcccgggctcaagggattctggtgcctcagtctcccgagtagctggtactacaggtgcgcagccaccacgcctagctaattttttgtgttttagtagagacagggtttcaccatgttgcccagggtggtctcaaactcctgggctcaggcgatttgcctgcctcgccctcccaaagtgttgggatta

SEQ ID NO: 38098 - DNA, 1050 bp, Homo sapiens
gctcattgttttaaacttaagtacagattttaaaaatgaatgccagctttgatgtaatttaacactctatatcttaaatttttccccacaaatccctgcacgaacaggaattctggcaagttatgcttagtaagagatgtgtgacctttgagactagctgttgtcacttgacattcagttgctgcagactgcccggaaaggtcagttttctgtcttggcctctatcctctcaaatctccctctctgatcttccaggaacttaaaatgcagaaacctagtttgagataacattaacatgttagaatttcagctcagttccccaaccagctagccttgccaagtcaggaaatgtaaaagttcaagttctcagagttgtaataaccccacagacctactgtggtgtgttttgcatgattttgtcatgattagaggcgtcctagagtttgtatcaaatgcacacactgcgtgttccccaagtggccagcgtggtatgggttagtgaattaagggctttggaaatactcacttgcttttgctttctctctgggatttcttagaaaagtcattttaacctctcttctctcatctgtaaaatgcctatctcacagggttttttatagtattaggtgagatgatataagtgaaagtgttttttatgaacactaggcatttctggaaatatgattatattttctgtctattcaagtaaagagtattaatatgttttgaaagtgaatggttagatgcatattaacttatatttactcatcttgctttaatatatattacattggcattttgtactttgacatcatgaagcaagtaattacagattttttttttctttttctgtgaagtccaagggcatttgatctctgccaggctatggagtcggtatacatcattgcagtagcgcctttgtgacattcagtggttttagaatctagcaggtctgtaaatttcttgaggtttttgtggggagaagaagctttagcaatacagagagcctatattgaaaacatcggtaaaacgtccttgccttattctatc

SEQ ID NO: 38099 - DNA, 1049 bp, Homo sapiens
tagctctgtttctgtcattagcaagatttggggagattaccttagtcctggggcattgtgcagtgagcgtgagtggtcaggacctgaagctgggtagccaaggctctgtccatacctgccgtgtctccgggctggggtgctgctggtgcagcagatgaggcacatgtgagagcagggctgctgctcctgagaggctgcctttcctgggccccaggcagacccctgctgcacacctgttctctctgcccatggtgattattattttgtgtgtctgacagagtctcactctgttgcccaggccagagtgcagtggtgcagtctcggttcactgcgacctctgtctcccgggttcaagtgactctcctgcctcagcttcccaagtaactaggactacaggcgtgtgctaccacgcctggctaatttttatatttttaatagagacggggtttcgccatgttggcgaggctggtctcgaacgcctaaccgcaaatgatccacccacctcagcctcccagaatgctgggattacaggtgtgagcgactgtgcctggcctgcacaaggtgattcttttctcagatcaccttccttaaacttgagtgtttccagatctcctcagcaccatttgtgcttttccctggattcctgctagtggctgtttttgtttattgggtgccagctctttctagtttcagtctcagcagagaattctgtttccaacttctggagctgccttatgttatttggacacaagacagccgtaaattctgctgaccagggtgtgcatgtgtgggcaatgtgtattttatcattttagttttatttcagagaacaccttagcttccaggagagttacatgtgcaacatctcggagagtgctgagctcaggttcctggccattcaggtagctcaagcagcaggcacctgaaagcactccgaggaatggccaagccctcatcgcacagccagagctggtcacagtgctgctctgcacaccagcctctagtcataaaaataaggaacacactaagaatcacacccctgtgatccc

SEQ ID NO: 38100 - DNA, 1025 bp, Homo sapiens
cacagtgagagcaaggttggcaccacacagattgccatgagggaaaggaatatttaatctgggcagcctctgttcggaggaggtggggagagaaggcagtcactctggaatattccatgaacagagtggagcctcgaagcctggagcgcaggcagggaggtgcaccgggcggagaggcccacaggggctgctcggtgggggggggtaccctgggcgaggaggggggtctgggaagaggggtgagggcaccggggcatgaatggcctgcaggtaaaggcccagaactggcatggccttggcatcacacttgcaaacgctgaggacctatcctggggagaccagagactagaaggcaagaagggctggtttccaggtgcctgcccaggaagctcctgtgctgtgggctgtgggcggctgtggaaggccctggggcttgatttaggcctggggatgctgggctggcggctgcgagggaagagcagtcaggagcaggaaccactgcctggactggacgcctcagggacctctccatggaagaattgaacaaatgaggtgacaatgtgggggccatcgccatcatctccttgtgactggctgcggtggcttgggttctccagaagcagaagcagcattaggggtgcagacggcacactggggggtttacacctgtgacaagaggaggaggccgctgggtcctccaactacagctcggtcccacctcctctccaccagccccatgggcgctgccagcagggactgcccttctgaggagccagggttggggaagggtgcagagatgcccggccctgtgccccaacctcacctgggtgtgaccagagtagcacgtacctccagaagaggctggagctcaggggcacccaccatgctcccaaactacctctacaaaaacgaacaaaaaactgcagtgcacctctgttgagcgatatgatctgattgaaatatttgtcacgcagcacgccctctttctgtgccaagaatcgccacgtgcatgtcccttttttact

SEQ ID NO: 38101 - DNA, 1071 bp, Homo sapiens
ccaagggatgatcctcagaagtgtgttctgctgggttcctccaaagctctcagtgagacccagctccagttgcccatagtggcaacccagctcaaccatgccctcctaacaccttttctttcttccctgacctttctgcctgcactcaagtcttttctcagtttgcaaaaccaggatacacaatatttagtatctcccaaacgtaaaataagtggagtgcaaaattcaaagaaaattcaggatgcatagtagtgtttagagaacaacatggggctgtcatgatatattagacacttgctttcccttccatgaaaaaaaaaaaaggaaaacaattgctctgtgttctaaagaagattcattatctgctgtctctttacttactgcatacatacacctcagacttctgcaatttggcttcagaccccactttccactgaaactcctaatcagtagcctctaaatcttcttctccatgaggatggactttttttccatttgtttgtgtcatctctgatttctttgaagagtgctttgcattctcattgcaggggtctttcacctctctggctggctgtgttcctaagtattttattctttttgtggcagttgtgaatggtattgccttcctgatttggctctgagcttggctgttgttggtgtacagaaatgctactgatttttgtccattgattttgtatactgaaactttgctgaagttgtttattagctgaaggagcttttgggctgagacggtggggtttcctagatgtagaatcatgttgtctgcaaacagaggtaatttgacttcctttcttcctattaggatgccctttatttctttctcttgtctgattgcgctggccaggactttcagtactgtgttgaataggagtggtgagagaggtcatccttgccttgtgccagttttcaaggggaatgcttctagcttttgcccattcggtatgatactggctgtgggtttgtcatagatggctcttattatattgagggcaacctaggcaataccattcaggacataggaactggcaaagatttcattacggagatgcc

SEQ ID NO: 38102 - DNA, 1030 bp, Homo sapiens
ctaatgggtgaactttctcattgaattatatacactaaatgggtgaactttatggcatatggattgtatctcaataaagctgttgaaaactttaaaggagacttctggtttacttgtttccagtcagttccatgtgccattaactacatccaaaggctgtttcaagaaaattcctcaagttgtttaatttctctactttcttgtcccattgcccctagcttccccggtctgtctgtctgtctgtctgtctgttgtctgtctctccttcttgctctggctctggccagcactctgtttcatcgctggcctgctggcaatcactgtgaaagccacatacctcccatctgttctttgcccttagtgattttaccaaagtgaaaggttttatgtgcttttgctcacaaagccgcttttagtcccatctgttaaaccttggaatctagaaacagttcatgtttccagtactttaagacttggaagttttggactttctctgttcatttttatggctgcttgtttcacactgaatgactctttcctgagaccacttcttccttgaaataccttgagcagtgcagccaacacatccaagtaacatccagtggcacccagttctcctatgtcctgccctagagctacgaggacaggtggcacttggcctgccttccgtgtattataagcagtagctttcccaaacctcttcctgcagagtatggtagaagtttgcctttcctgcctcctctaacagattccttgccatgggctactcaaagccacatattttagatcgaggttagggcagctcccctcttttacgtctcatttctgcattaatcagggcaattactgcagctggtacataaaccctgagatctcagcagcttaacacaacaaagctttctccctcaccccaaatcctgcctgggctgcccagggctcacattccggcagtgactcggggattctgactctactttcatgttatcagagctgtggcctcccaggtccctcgggtggggggaagcgagga

SEQ ID NO: 38103 - DNA, 1433 bp, Homo sapiens
ttcagtaatcagggtgtgaaaaaagcagacaagttgtgtgtgtgtgtgtgtgtctaagaaaacttgtgtgcttttcaaaaaggcagtgctaagcacaagatttcaagaaagcctcttcttgttgcctagctgagtgggagagtcattttccccagacactacatttggatacaggtgccaaagaacattattaaggaattatttagaaacaatgtgtctagtttaagaaagtggttttcagtattgtgacaatacaacgtttttacaaggttgttttctaccaccatattttaaagatatttttatgaccgtgtatactcacactttgcttgtattttaaaaggaggatatatttgcacttatgtatacttttacagtttgccaaaatattttgttgtaaaattttttttcaataaaatgtatataacaaatagttgttttaggggctgattttctcttcgggcaccctgagagcaatggatgccagtttctcctccccggcaggcagctgtgcaactctacccacaccccctccagtggtgtaactgacatggtgtggggtctgtgccttgagtaacacaggccaggttctgattgtgagtcttctcaggagaaaaacagtggaagaaacgttttctgttatttctttctttacttcaccccagctttttctggcaaaacaaaaaccagaaggtgaaaggaactagaaagaaaaccaggcaagataccgaccagggtttgattttgaggaaaccaattttgtgccccttctgttttctttcctgtgcccggggagtgttctgccctttgccctctctccctcccgactggcatgggttgacagatgtggggcacagtggtaagcccccctccagggttggatgcccaaagaacagcaccctgcttcttccctttgcacgttgcaattttgttatgggtggcggtcacatgctgtcagaaatggggttcagatctgaagaatgcagggggatccctgagctgcagggggcaggctcccagcagggggtttaacttccttggggagtttaatacagaagctggactccccacacgttgctctgtggctgcggcctgtcccaccctccaattcagagcctggctggccctgctcagcatcggcacatagcaagccggttcagcccttccttcctcccggcctcctctccccactcctcccttttaaccagggatttaacaagggaacccctcagcccctttttctgttcctgctagatttcccagtcaccagtgttacaggcagagctggtgacgctcccgatggaagagcaaaatgggccaactaggcaggaggactgaccttctgtcccagcagcccttcaccatcacgagccatgttggggacaatgggtctgagagaagcagagaaattatctgctccaatcatgctgtgc

SEQ ID NO: 38104 - DNA, 1049 bp, Homo sapiens
tcctctttccttcgatgtcaatgtccattatgaaacagtaatttttaaatattcaggtgacacggagatgcgcctgctacacgtcagcgtccttcacatgtaacagccgaagctgcaatttgaattttcctgccaacgtgaggaagccgggattcgaaccggggagacaaaaggggtcccgaacatgtccttggatttaatagatggtcggaaatcaggggcagcggagctgttaaatgcgtcacgcacgcttcttcgcagtctcctgagctcgccacttcccccagcttctagtgaacgacttgggattcagcctccgggagggtctctcctcaagtcgctaaaatgcagaatcgccgtgccgggggagggaggcctggctctttcccgctccttcgtttctttccctcatttctcttcttcctgtcccattccaaccacccagcgacggcgaatctcaggcgtgtgcacaacgagcgggggcccttccgtgcgtgtccccccagaatccttgaaccgccctctaggtgcgaccctggacgttcccccagacacacccgttgtctctgcgagccggcagccccgcgcatgtggagatggagactggcctggggaagcgttaagctcttagacatatttatttgcttcttgtcatcacacctgctaatgtcaccgagcccgcagcctgacccctcatctgagccgaaacgggcctgacgggatcagagggggcggcggcgcggcgagccggtgggaccctcgcgggcgggcaggggagcgcggggcagcagccgggctccggcagccctcgccgcccgcaccctcaggccgccaagggccggccccccggggaggggggcgagaagcagggcggcccgcagcggggcgggctcatccttcgcgggtgaacggccgtcggaaactcccagcagggccccgcaccccttgccttcatttcggctggggaggggtcatggaggggggccagatgggcgacgaaccttcttccccaccgcgagcagggcctggctgtgaccgagccctcaaaa

SEQ ID NO: 38105 - DNA, 1019 bp, Homo sapiens
ccagcgaacagaatatccctccaaaaattcagctcaccagcaccagcacgaagaaaactctattttcttaaccgattaattcagagccacctccactttgccttgtctaaataaacaaacccgtaaactgttttatacagagacagcaaaatcttggtttattaaaggacagtgttactccagataacacgtaagtttcttcttgcttttcagagacctgctttcccctcctcccgtctcccctctcttgccttcttccttgcctctcacctgtaagatattattttatcctatgttgaagggagggggaaagtccccgtttatgaaagtcgctttctttttattcatggacttgttttaaaatgtaaattgcaacatagtaatttatttttaatttgtagttggatgtcgtggaccaaacgccagaaagtgttcccaaaacctgacgttaaattgcctgaaactttaaattgtgctttttttctcattataaaaagggaaactgtattaatcttattctatcctcttttctttctttttgttgaacatattcattgtttgtttattaataaattaccattcagtttgaatgagacctatatgtctggatactttaatagagctttaattattacgaaaaaagatttcagagataaaacactagaagttacctattctccacctaaatctctgaaaaatggagaaaccctctgactagtccatgtcaaattttactaaaagtctttttgtttagatttattttcctgcagcatcttctgcaaaatgtactatatagtcagcttgctttgaggctagtaaaaagatatttttctaaacagattggagttggcatataaacaaatacgttttctcactaatgacagtccatgattcggaaattttaagcccatgaatcagccgcggtcttaccacggtgatgcctgtgtgccgagagatgggactgtgcggccagatatgcacagataaatatttggcttgtgtattccatataaaattgc

SEQ ID NO: 38106 - DNA, 1515 bp, Homo sapiens
ggtttattatgctgggcctagctcgctcgcaattccttaaagacaaagggcagcagagagagcccgcgacggggcctggcctacccgggttccacgcacctcctgcacaaactcgggcaagattgctttgccatggtatgtgagtttaactgaaggtttaactttctcagtttttccttaaaaatatcaaggtggaagatgttttgtaacatttgaaaccaacagccaaagtctggcagagcaggaaaaaataagtttactgaaatttaattgagatttaagatagaagaaaccctgtaataagaattgtcttgaaggatgtccaaatgaatttctctcatagcacagaaatagataaaaaatgccgaagtaaatcgattctccttttctccttttaaaccacatacaccaggaagccaaatgaactcccgctccttccattactcagggtgcaggagcagtgagaaggttgcaaccaaaaatactttttagtttccttcaaacatggatgctgccatccgtttggagaagtagaattcaacatcatggctcaactggagctgcataaacccctgcctagaatctctcctgattctaggtgtccaaacaagcaacactgaattaaacagggccatggcaagcctgagggcccctggaatagtctctcctgggtgtgggaagggaggttccggtggtcagaggagagggggtgcctgcccatcagggtcaaggctaagaggaatgtgactctttgtgagatttgttggaggatgtgtgtgacagtgggtttgggagttgggtttgcaagtgtttgtgagaatgtgtgactgtgagatggcatgtttgtggagtgtatgtgcacttgtgaatggatgtgcatggatgtttgtgttcgagccaatgtgtgagtatgtatctgtgtgtgtgcccactatcccgcccaggctgaggcccggcctcccagcaaccatgtgtttccaattagcagcatcccgcctgggagtgcagagaaggcgagtcctgggacagcttctgaggagcgggtgggctagctcaggccccccagttctgctccatcgagggcgaggccgcccggccagcaagctttcacagcaactgggcagccacacaaagagccctctctcctgcgccagtcgttggagactcggtcctcccccagatcataaacctgcctgtgaagacgttcagaaatagtttacccgcactcacacacacatgtgcaaaggctggaattccatttgctataaagttttattttattttgcttggaaggggagtgagggggagaagtgtcctgacctaatttgttctagggcaaaatactgtatttcatgtggaggtatacacctgtacatgaatccttgcttgctgcctgtgggtgtcctgcacatgtgtgcgtcagcctacctgtagctgtacaccatacacagctcaggagcacacacctgtggtcttacccaggccacctaaatgatgcatgcaaacaaaccagat

SEQ ID NO: 38107 - DNA, 1031 bp, Homo sapiens
tttaatgaccttatttccaaatacagtcacattttgagctactaagagttaagacatcaatatattaattgggggagggacaaaattcaacccatgattgacagctagagggaaaaagaggttcttttttttaactgtttgtgggctcggagggaggaggttggtagtggaggttgttgtcattttcccagtagcattagggcaacttgaacaacgtcagcacagggtctggggcagcataagaagattacattaactagaagtaaagcgaccagcggtagtggaaagctctaagggtgatggctcagttgtgttttcctctaacacagttctcatccctgggtgattttgcccccaggggacatttgacaatgtctggaggcatttttgattgtcacaaatggagttgtgctataggtatctaatgagtagaggttaagtattttgctcaccatctgcagtgcacaggaagctcccacaacaaagatttttctagcccaaaatgtcaatagtgctgaggctgagtaacccttctccaggaggccagtgaaagatgttaacaagcgggtggttgaactgacagacactggctatactatacagtgacttcatggtatgtcagaagaagcaaatacatttggtagctaattgttgatgctgatacctttactcacaaacttggctaatctccagaaacatactagctgctgagggtatagcagtagaggagaaataatcttcaaggggctataatctgaaagggatatgatattgaatcattttatgacttttcataacattttcatatttgttttaatatgatacaaaatatagagaaaagagtgaggcctccaactccaagtcctctaattggataaaagtcaatcattctgtacaagactaaatatgtggaataacatttttcacttctttctttcccatctcttgccactgagtgcatgccagttattcaagaacgattctccagcattccctttaaaattctctctcctctccttttttaaacattt

SEQ ID NO: 38108 - DNA, 1095 bp, Homo sapiens
gctggaaggtccacctccaggctagctaacacacagttggcaagtcggtactcactgcctctgtgtgggagctcagccacagctcagagctaggcattctcacagcacaatggctggttcccaaggccaagtatcctgagagagagctaggtagatgttgtattgccttcagctgtactttgttagtcaaggcagttgcaaagtcatgtgcaggctgaaggggagggaacagagactccatgtgaggacacaagaagaaggcagccatctgcaagccagaaagtaaggcctcaccagaaaccaaattttccaacaccttaatcttggacctcttgccttcagaactgtgagaaaataaatcctgttgttcaagccatgcagcctgtggtacatagtcatagcagccagaacacattaagacaaaccccgttaggccttgaatgctaatgtcaggcaaagacctagcatattaaggccgtttttagacagagagcttttttgactaccacagtggtaaatggagcatgccagtcatgtaaagaggcccatagggtagaaatccctgccattctagtattcttacgacaagctgactatatgcaggcagaacaaagggacagatgccccactagtgattaaggaaacaatgtgccttggggagacgggaaggctctagaatggtatgagcaccttcagatggataggcttggattctagaaatccttatgtggatgggtagagcccaaatggccagcacctccactcatgcatgagaccagtgcataagagatacacatcatagagttttcatctgctactggggtctggctcttacacctgtatgaacatgtgtagagcctaggtaggaccatcctatgaatgaatgttcaggagtcacccatccccatgaatggaaactaggactgatggaactaggtatttcctgaacactcaaagtggatcaacctaatagtgaacaaaaccacatctgacaaggagaaggcatagggactacctagtgttaggaaacagtccccgatttctgactcatcctgctataagccaacttctttcccacaagacagtacaggacac

SEQ ID NO: 38109 - DNA, 1040 bp, Homo sapiens
ttctcctgcttcagcctcctgagtagctgatactacaggtgcctgccaccacgtccggctaatttttgtatttttagtagagatggggtttcaccatgttggccaggctggtctcgaactcctgacctcaggcaatctgcttgcctcagcctcccaaagtgctggaattacaggcatgagccaccacgcccggcctgacatgatattttgaaacacatatacatagtgaaatgattactaaagtcgtgcaaattaatacattcatctcttcacatagtcaccccattttttttgttttagagtgagagcacttgaagtctctcagcaaatttccggtatacaacacagtattattaactatggtcaccatgctgtacgttagatctctaaactccttcatcctacagaactgcaactttgtaccctttgaccaacgtcttcatgtttctccaactctctgcccctgggaagcactgttctactctctgtttctatgtatgacttttttagattccacatgtaagtgggatcatgaactggttttctttccacgcatggctgatttcacttagcataatgtccaccagcttcatccatgttgttgtaaatgacaggatctcctttttctttttttttttttttttttttttttttttttttgagatggtgtcttgctctttcacccaggctggagtgcagtggcgcaatctcgtctcactgcaagctccacctcccgggttcatgccattctcctgcctcagcctcccgagtagctgggactacaggcgcccgccactgcgcctggctaattttttgtatttttagtagagatggggtttcactgtgttagccagtatggtctcgatttcctgaccttgtgatccgcccacctcagcctcccaaagtgctgggattacaggcatgatctccttcttttttaaggctgcctaatattccattgggtgtgtgtatataagtgtgtatatgtacacatacatcacattctttctatccattcatccatcaacagatgcaggttg

SEQ ID NO: 38110 - DNA, 1094 bp, Homo sapiens
gaaaccccatctctactaaaaatacaaaatcagctgggcatggtggtgcatgcgtgtaatcccagctactcgagaggctgaagcagaagaatcacttgaacccgggaggcggaggttgctgtgagccaagatcgtgccattgtactccagcctgggtgacgagcgaaactccgtctcaaaaaaaaaaaaaaaaaaaaaaaaagccgggcatgatggtgagtgcctgcaatcccagctactcgggaggctgaggtcggagaatcgcttgaacccaggtggcaaaggttgcagtgaaccaaggtcatgccattaccatctatctagcctgggcaacagagtgagactccatctcaaaaacaaacaaacaaacaaaactcactaactttcaggtatgatggaatagttcagacagaataacgcttcttctaagatcagctagagaagttagaaaaatatatattttaaatatatgtttgaagtaatcaaagagctacagaggaaaatagtaattaacgggacaaaaccttggagaagggagaaccatatagagaattgagctgacattatgcagtctcttttttcctcaggacatttttaaattctaggtatagagcaataaaagaagaattcaagcaaagggatcaggaagaggattgctactaagaggcagagaaaccaatgaagccttttgccatctcacactggaaagacaaaaagtcatagaggcttgatttttataaggaaagagaagtgagaaactgacctcgatactttgttggacttgcctaaagacatttgctgaattctcgggctgtgctgggatggagattagaggccaaataaaaacctctggtaagtagtgcacaggttttggtaatcacttattgctgaaaagggaggtattagatgtcagacctccataagtcctcaggtgaaacacctagatgctatgaccgaagagtcaggattgatctagaagtaaactgaacctgtagtcatctcagtctcgaatgggaacaaagcattaatcgcctacttgatctgctagcaaaggaaatagtaatcactgaaggaagataagataaaatcatcca

SEQ ID NO: 38111 - DNA, 1035 bp, Homo sapiens
tacaaaaaattagccaggcatggtaaggcgcgcctgtagtcttagctactcaggaggctgaggtgggaggatggcttgagcctgggaggcagaggatgcagagaggcggaggttgcaggcagacagaggttgtattgagctgagatggcgccactgccctccagccttggtgacagagcaagaccctgtctcaaaaaaaataaaaatttaaaaaagaaacgaaggtggattttataatgccaattaatctctcttccctttggaaaaactggactgatacccggcttacagggttctgggccttacaggtgagaaaagaatgtcacttcctggcaggcccaggaccctaggatatcttgaggatctcaacaagagaagaattcatccaaatctgtaggtattgttattggaaaggggtactaatacagactccatttaatacagacacatttaacgcagtgtgtcgagggaactttatagcactaaatgcccacaagagaaagaaggaaggatctaaaattgacaccctaacatcacaattagaagaactagagaaacaagagcaaacaaattcaaaagctagcagaaggcaagaaataactaagatcagagcagaactgaaggagatagagacacaaaaaacccttcaaaaaatcactgaatccaggagctgtttttttaaaaagatcaacaaagttgacagactgctagtaagactaataagaaaagagaagaatcaaaaagacgcaataaaaaatgataaaggggatatctccactgatcccacagaaatacaaactaccatcagaaaatactataaacacctctatgcaaataaactagaaaatctagaagaaatagataaattcctggacacatacaccctcccaagactaaaccagcaagaagtggaatccctgaatagaccaataacaggctctgaaattgaggcaataattaatagcctaacaaccaaaaaagtccaggaccagacagattcacagccgaattctaccagaggtacaaagaggagct

SEQ ID NO: 38112 - DNA, 1056 bp, Homo sapiens
ccttttttttttttttcgttaggatacttctgaactggtgaggtgtgctcacaatgaggtttcctctaaaagttatttttttacttttttctgttagcaaagcagttgctgctacagattgaatgcatttgggccatctgcaggttactgggttaaggacttttgataggaaggcctcagtgctttcgggatacgcccttgtttacactgacaacaaagtggtattggagtgttatagggtaaggagaataccttcaattataggttcttaatttaccttggcttttaaaggaatagtatacactgttttttttcttaactgcttgcatatctctgtctttctttctttctctctttgattttctgtctctttttctctttgactttacttttgcatctgtctgtttctctctctgcctctctctttctctctctctctctctctctctctctgctggtctttccttgcctctgccaaccacctatgttgctgttctctcaaccactgtgtgtgtgtgtggagggtgggtctaaaaccagctataaccaagtgtctatatatgggaactggtctgggtggcttggcttacaggttactttgtgccatacctttgaaacaagggacctgtccaggcttccttctgatggccaacccacctctaatgctggccagtctatcttacacaaagttttaagttttcctggtgtcatagtactccatagtctcccttaaatcctttcttgaaatttctgaacatatttcctagtggggtgggcttactttgtgcctgacccatgcttctttgagacaaaacaccatgctcacaccacacgcacaccacaaagaacaggtaaaaagggcacacacacacttttacagtttacaccaaaccagaatcaaaaccaaaatcagagtatcaggaaatccaagccaggtcaaaaccaaaaccaaagtatcaagcaatccaagtcaagtcaaaaacaaaaaccaaagtgctggtacaggcacgtcgtgggtgatcaggccatgcttccactcaaatggaatgggcaagt

SEQ ID NO: 38113 - DNA, 1031 bp, Homo sapiens
ccagcactttgggaggccatggtgggtggatcacctgaggtcaggacttcgagaccagcctggccaacatggtgaaaccctgtctctactaaaaatgcaaaaattagccgagcatggtggcaggcgcctgtaatctcagctacttgggaggctgaggcaggagaattgcttgaacccaggaggcagaggttgcaatgagctgaaatcatgccactgcactccagcctgggtgagagtgagacaccatctcaaacaaaacaaaacaaaaacaaaaacaaaacaaaaacaaaaaacaaaacccaaaacattacaataatatttagcattgttttggtggtactagccactgcaatcagatgacagagaggtcatggattttagctatctcagacagactgtgggatacactggccctaatacctccaaagattcattatatgataaaagggaaatgaaatcaaggaagaatagatgggtcatataataaataatgctgggacaataggacaaacatctgaataaaattggattcagtcttaaatattagcaccatgtaaactgtagatcgaccaaagctttgagtgtaaacaaacaaaaaacctagaaagaaaccatgaaaacactttaagagagcatagaagaactttaaaaagattggaataggaaacatctctctaattatgttacaaaactcagaattcataaaataaaaattattaaattcaaatatataaaaaccattctgagagttcaaaagttaacggatgaagtatgaaaaatatttagaaattgtttcacaaagggctaatttccctaatatttaaattattccttataaaccagtagaaaagctttaacaacataacagaaaaatgggaaaagactatgaatagacgggacccagaaaagcacatacaaataagtggctattttactacacctttactttggaaaacttcaaacctgtactaaaatagaatagggcagtgaacctccctgcctgcacccatcactcagcgtcaacattgatc

SEQ ID NO: 38114 - DNA, 1050 bp, Homo sapiens
cccaggtgtcatcagggcaggtggagagtgtctcctgcatcgtggaataagtatgaagctttggctctggcaatgaccacaggacgtggcataaaaatgaatttttttgtggggtagaaatctttcctgtttgtgctaagagcatttgtcccttgttatacacataacacatatacaacctcccctacacccaacacacacacagcacatccaaatccaacacaccacacacacatacacatatgtacacatccaaaacacattgacaccacacagactccacacaccacacacactcaacccctccccacaaactctaaacctccactatatccccaacacatgcaccacaccacacacaaactcaacacaccaaacacacatacacatataaacacacatacccacacccaacacacacacacccagcacatatacacaccacacaccctctacacaccacacacaaacctccaaatatacccaacacacacaccaacccaatgcattacacacacatatacaaatatacacacactcagcacacacacccaacacacgctgacatcccacacactccacaacagactgcacacacaacccccccatatacacaactaacacgtacacacacaccataccacatgtatccaccacacatgtacacatgtgcacacacacaccacacgtgtgtgcccactcacagccggatggggaaaagcaggcacagccagtcaggggtgagcagctgaagaaccctgatgggagcaggtagcctggagggacgtggggttaactctttccaaataaggagctttccaaactgccatttccgtattctaaggcttgacagcttttgaaaggatgaaaagagcgtgtattttccagaaatccttcatgtgactatttgcttcatttcaatgcctcagaacaccaccaacaaaaaacccactcacacccttgctggtggttgctacagtgcaattggctgcaggcttttgtttagaagtttgcagcagtccgggaaggaggttttcttcctcccggagc

SEQ ID NO: 38115 - DNA, 1048 bp, Homo sapiens
tcttatctgcgcctgccagccacagaggattgatggccttcaattcaccctcaccagcacctgtgattaaattatttctctcctcattttgcatggatactttaagcagggcaggcagatagtcatttccctccctcttggaaagtgttccaaggggacggaggccactcagaaaaacaccagtaaatcctattggcttcaaatttggatttgcatcctgccttggggtgatgggttgggcagaggcctgggagaaggaggaaagtggaatgaagaaaaaggcttgcatccaaaccggaagttgcagtgtcttgcagttccttttatcctttctttcaggtaagatttcacttctttttatgcaaactcaggccaagcctgtggtcaaattctgcccctcaaagtgggggtgaggatagggggacatagtgacagtctgaaactctggcatttcctgatgtcattcttcatactacgaaggctggtttctcctgcttccttggctttcccggagtgcttacttcttctaaccagtgaaaactgaatctcacaagtaagcccccaaatttggtatcttgattggtgaggttcattcctggggtacttattgaggcacctgctgaggccccattcctgcccaagcatatttttttgtgcaaaataatagttacattgacccggccctccttccaacctagagtagagtacatgtctcatctctccccttggtgaaactgcagatcctatttctgagtcttctttgaagacaaattcttcatatgctatcttattcattacaaaagctgttcaccttatctactgaatatatatatatatatatacatatatgagcctgtattatgacttctttaagtagaggggctgatgttgtctgctaattgatcttttggcctactcatgagcttttggaaactgaatcaaaaatatttgttgatgataccacaaagaccctatgaaacggctttaactgtaacttcctgtaagagatttgctgaaaacttgcttatgacttcagggtgatttttac

SEQ ID NO: 38116 - DNA, 1078 bp, Homo sapiens
accttttaaaaattcacacacacacacacacacacacacacacacacgacagaaaacaaacttgacctgtgtgctttctacttttgaagtgtattgagatataatttttccctaataaatggccagtttggaggtatgctttttgcactgtaacatggatttctaagatccagggcaaataatattatgtacccctccaaattaaaaaaaaaaaagtcctaactaaataacttcatgcgaatctcgaggactgcatggatgaaagcaagtttctaaagggcacctgagcagatgtgtatggaagcggaggcatcaggagaagccctttagcttggcagaattccgctgctcaggaccatcctgctgttaccgcccatcgctgccctgggctgattgcaaacaccagggacttcttagcatcaaccagaggatgcatccctgtctcccagggtcactgtctaacgtccctttaggcatgatggctctgattttctattcccaagggatttttttctgatcagaaatagtccaaatcctatttgtcaattgtactgttttgttttttgctacctgcttttctgttgttatgctttcaatatcttttcagtgaaccactccccagtagcctcccccaactcccctgtacccactgtatccactcagaaaaaaaccaacaaattcattgtttacagaaactcagaggagtgcttaatttttgtctggagccaactaattatatctgcaaagtaaccagaaacttcctcacagtgtgtcaactccacagcaaggcagaggagacaaaactcaaccaggctgatgtatagcgattcagaccctcccaggagctgaataacaccccggtgtcaccgtcctagcagcatgttatgttagatagacacctcttctgactggatgtgactgggcttgagatgagcgaggaagaaatggctgacattagatccatttctgggggtgggttttaacagggcgtggagagggagcaagagggcatcttgtgcttggcaggaaaacttgtactgagtaaatatgtgcctgaagggaggccaggagacagcaa

SEQ ID NO: 38117 - DNA, 1117 bp, Homo sapiens
tcctgcatatgctaggcattggctgagggttgaaaagcttgttcctgtgccttcagagggagcgcagtatgatgaaggctaggggagcaggtccacttccagtgccacgcttatacgccaagtgcagtgggcgtagagaagcagcattcagaatatgtgaaatccagtatttcacctcctagatgaggggatgcggagttgagttttgaaggataagcagaatttaactgagtgaaatagaaagctcattgtctacgccatagttgctttggtttgtatggctaagcagtagtgttcaggtattttgctctcccaaaaatatttggatcacatgatacaaacagtgaagattctgtctgctctgggttaattttggaggccaggaaaaaaatgtccatgattcatgatacgaagaatgagcttgtgctgctgaaaatgaaaaagtaagctagcatttcgtcatcctgcactacttgctgctttgaaggaatatagattcctaggtcatagaatatatacatagtcaaaaacactcctaaagaatcaattatttgtgaaccagatagagtatacaagtctttggagatcaagagagtgaaatgagaagccataactgccctctgcctagctaggctgagttccgagaggtggttggaagacagaaagtggcgtctgtccctgggtaagggctgtggcgtaactgggtgtggggcttttctctaatcatctggagaggagagcccctgacaagctggcccccaaacaaggtggctatggattcttctttttataaaagtttaaagtgtcttaaataaccttttgtgccattgaatagaaagaaaggtagtggaactccagaatacaagggattggccagaataaatggttggtatagagtagatgtcaatctttttatttaaaaattttttaagtacattaatacagtacattaacatagctgttttaatacaagggtgcattaaaataatgccataaaagcaccagcagccagaaccacagatctcatggtccttggatgcacttcctgtggctgctgtaacaattgccacaaactgggtggctcagaacacagagctttatcctcacagttctgaaa

SEQ ID NO: 38118 - DNA, 1057 bp, Homo sapiens
gttactgatctcacccattacatcatgctcctgagaggggtcacccgtccatgcacatacagagcggatcttggaggggttcagtcctaggaatcccacttcctgagctccacgttgcagagctctgcacagtggggatcaccttgtctatagcttggagctggggggtggtggaggctgcctagtgccgctgcctagtgccagcgccttaagaaccccacatcctatacatcttcccagtatgagtgtgtttacacaccccaccccagtgcaacatgtctgccccacagtggatccgcagacacataaatatcattcagatcttggagaaagctgcttttacaggctttgctctataaatagggatagtggaagcattgccctggaaacctgttagcttatactcttgggcctttttataactccagtgagacaaagacccacccccagagttgtgattatttttgtatatgccacctagttcatagttacccactagtaggatccagtgatgtttctgcatcagagtgaaggaatttctaaatgagagcaaactctctgccatgcattgacatcggggttctatagaagtcgtcagatttcaggttataaagcagtgtgtaataaaagcaaacatggaaggtagcatagaataatactagtatctatcactgatgcaaaagaatctttttacagtgcctgctctgtgccaggcgtgtgttatttaatacagccctgtgaggtaagtggtctcgtttttcccattttacagatgagaaacctgaggcacagtgaggatcaggaacttgcccatggcccatgagcttgggggtccagcccaggctgtttggtcccagagcctgtgctcttgtccattatactggtggtattgcccctggcattgacaaagtgggaaaagatgactaacctgtgtagggggagtttaaatttgacataaagtggtgtgggtagtttcttccagcccccatgcccgtgagtttagccaggcctgttacctgctaccctcttccccgccttcctccaccctgcagaggag

SEQ ID NO: 38119 - DNA, 1048 bp, Homo sapiens
gagagggtgtctggagacccatcttcctcttccttacctgctgccacctcccaagcctctgagacgtctgccacgttgatgccttggcattccccactcgacttgccaggtcagttaccatttgcccgccatgtttccacctccagcatcatgttgccattatctcacttgttctcctcactttcaaggattgatggattttaaggattcctttactgtatttttggtggaggcttaggaggaaataaaatcacatgtgggtccaatccattatctttactagtatttcattaagaaatgtatagcccagttttttcttgatttttttttttttttttttggagacggaggcttgtgctcttttgcccaggctggagtgcaatgacgcgatctcggctcactgcaacctccacctcctgggttcaagcacttctcctgcctcagcctcctgagtagctgggactacaggcacacaccaccacgcctggctaatttttttgtattttagtaaagacaaggttttactgtcttgcccaggctggtctcgaactcctgagctcaggcaatccgcctgcctcagcctcccaaaatgctaggattacaggcatgagccactgtgcctggccaattttgattctttaaaaataacatttttacaggccaggcgtggtggctcacacctgtaatcccagcactttgggaggccaaggcaggtggatcacgaggtcaggagatcgagaccatcctggctaacaaggtgaaaccccgtctctactaaaaatacaaaaaattagccgggcgcggtggcgggcgcctgtagtcccagctactcgggaggctaaggcaggagaatggcgtgaacccgggaagcggagcttgcagtgagccgagattgcgccactgcagtccgcagtccagcctgggcgacagagcgagactccgtctcaaaaaaaaaaaaaaaaaaaaaatttttgttgggggatggagttacttccaaataagaagtgtgcttgtgatgtaaccggaggtgacattaactcctcaacaa

SEQ ID NO: 38120 - DNA, 1024 bp, Homo sapiens
cgcttgaacctgggaggtggaggttgcagtgagccgagatcgcgccactgcactccaggctaggtgacagagtgagactccatcttaaaaaataataataaataagtaaataaataaatatcacaagttatgtactgattctgaaaaagcaacataaccaccaaacacaatttattccttatgttccaagtgtatttggtagttttgttcaccctcataacagccaaacctgagtttaagaacagtaagaatagtgacttgcagagatttgttccaattgttacaacaagaatggatgttaactcatcttttccagatacaagtcatcaaacctggacaatgttatcaattaattccaaatgagagaaccggccttttgatactgatgttatattagaaaggatgattttcctatactttcatataaatgccatggatctcttactttttgatgaattaacctttgtgtagcgactacagtttgaaagcactactacacattcatagatgcagttccaggcagtttgagcccacaaaggcatttataacttaagcagaaaccaaacagaagtaaatatttttaatagagttaacaaatcttcataaaaaccaatcatttaaaactaaatgttttgaagctctaaagccagtcaggctccggggaggatgcagatgatcccctcaggccactgagaaacttttaatcagggatcacaagtattagagaggtataggggaggttcaggggaccaacacaaggtgagaagcaattccctggcaaggcctgagaggcaaggggtgggagcaggcagggagccctgggagagcaggaggtggccggcagccttcagacaggaactgcggccctgagtggaggcaaagaactcagcagctgctgcacctcttgagtagggaacctgggggtaggagaaggaaatgcatggtctgaatcctctctctcttgccctcatctcctgccagtccctcccactagcaggaccaaccagaagtttccctggttaaa

SEQ ID NO: 38121 - DNA, 1025 bp, Homo sapiens
gagcaacctgcaaagtcctgggtgtggtatttctttactctgcatgaagttactcaactgccatctgtatgactagccaactttgaagcagaaactatctgaattagaattccatatttcttccattctctaatttttttgaaattctgcccccatgatctataaaaaaaatgtgaagtcttcacctaaccatccacttcattaagtctctccttcctctgctcacatcacactgcataggttctgtctttttggctgtgggttataagccttctgagggcaagcatagtcatagtcatgttcattccacaatgtttggctcctagtagcttttcagcaagtaattgcttaactgactttccccgctacagaagacgatgcttttcaagaatagacaattccatgtcacagatagtgtaggtgtgaacgtccccaggctcagggcagtggattagtcatgagccgagatcatttttcatgctctggtttgcacagtggaatgactggagtagcttaggatgtggtatgaatttcctactagtgcactaaaaacaggattcacatcccttctgccttatgattgtttatgcaataacctcattgcaaatgtcgtgttgctgtaccttcccatgatgttttaatgaagtagaattttaaaatataattaacgtgcttaaggtcataaatcataaaacagatttggacaacttctggatcatagtatttcagcctctctaagcctcagtttccttatctcttaaaggaggatagattacaataatctctacaaactcatgcagtttaaaaatacattgttgttgctgaggcgggtggatcgtgaggtcaggagttcgagaccaacctgaccaacatggtgaaaccctgtctctactaaaaatacgaaaattagccagccatggtggcgtgcacctgtaatcccagctactcaggaggttgaggcaggagaattgcttgaacctgggaggcggagcttgcagtgagccaagattgtgccattgcacccc

SEQ ID NO: 38122 - DNA, 1048 bp, Homo sapiens
aattattaccagacattattgcggagttcacaaggtgtgtaacttccccaatgactcctgaagataacatcactattgtagaacctaagattggccttttaagatgtcttttcaggttttttgcatgtctgacactgatgaccccacctggacccaccaacccctcctgtggccccaaccagaagtgactcagcgccaggagaaccatttcccacagcccagtgatggcagccttgaccaatcagcaggaaacacccagcctagccaccactcctctcttaccccaaacaatctttgaaaaaccctaacctcccgactttcagggaggttgatttggggaataataaaaccttgacctcccattcagccagctctacgtgtgcaaaactctttctctgtttcaacttccttgccttaataaatcaactctgtctggacagcaggcaagaggaacccactgggcacttaaactccaaggctcaggaaggctgcccagagtagaagtctggaaagagtagaacagagggtctttggcctatgtggagattaaatgaacctgtacatataaataccaatgcagaaactcacttccttcttcctaacttgcttctcagaacattggcagccagatctttaatatctaggcaggaaattggaagtctcccctgggattctaatcagtgaaagaggaaaaacctagagaccctgagaatggtccatcctagaataagctgcaagctgacgatgaccgcctaggtgcacagagcttgtaatcagttgtctagtcccccactcttagccccaggaaaaccaattgtcagacgcccaagaaaaatgatatttcagaataccgagcgtaaagagaatgtgtttcaaatttccgaagaaaaagacaggtcacatacaaaggatcggggacttgcaaatgtcaacactggaaaaatagaaggcaatggagtattgccttcaaaacccaaaaggacaatgatttcccaagtagaattctaaccacaactatcgagcagatctgatggcagcacaaaacagg

SEQ ID NO: 38123 - DNA, 1043 bp, Homo sapiens
cttcacattttcagtgaggaccagccctaagtataaaaatgaaaaggcagttcattcctgagaggttctgagagccttccctttaaagcaaccagtagagtggtttcacctctctccctcctttgtcagagtggttttgagagaggctgttttttttttttttaatcgttctgtccagcacggtcttttttcaggttaccttgctgctgttcatgtacttttcattcattgattcattcattccttcattgatttacatttttggagcatgcactgccagttactgggcaggagtactgtgaggaagtgagaaaccgctctgccttctaacgcttctggcctgtgcctggaagagatcggtacagacccaagcatgaccccagcacgtgggagtgatgtgttggaggtgtgcaccaggctcttgaggcgctggctctgccagcctcagcatagcacctttcctgcccacaggcacaacgaggccctcttggaggaggcgaagatgatgaacagactgagacacagccgggtggtgaagctcctgggcgtcatcatagaggaagggaagtactccctggtgatggagtacatggagaagggcaacctgatgcacgtgctgaaagccgaggtagagagggcccctccgcacggggatccccagcgcttgggccctggctgtctgttatggctccccttggggtgtttgtttgcagctcgttagcatcaaatttgcaaattgcttggtagtttgaattttcttttcctttttttatagagacaaggtcttgctatgttgcccaggctgaactccaacacctggtctcaagtgatcctcccacctcagcctctcaagtagctgggattacaggctggatttcctgaagtcagtttctccttaaaacatctatgccttgattgggctccgtgggtcacttctgtaatctcagcacttttggcaggaggatcacttgagccttggtgctcaagaccagcctggataacacagtgaaatcccctctctacaaaaaataaaaggtgcatgt

SEQ ID NO: 38124 - DNA, 1026 bp, Homo sapiens
aaagaatgttagagctggaaggaatcccaggcacggtcaaatccaaaacacagtttttacggatagggaaactgagggccaaggaggggcagggctcgccgagtttcgcctcctctgaccgcgtagaatggttgcactaaagcagattcctcgtgctgtgtatccgtcaggtaacatctgccggcacctgctgccccgggtccagtgccccgccttgattgtgcacggtgagaaggatcctctggtcccacggtttcatgccgacttcattcataagcacgtgaaaggctcacggtaagtcctgtcaccgccttcacactccccccgagagcctcggagtcaatgggcaaagctactggaaggaaaataaccaagaggagttggagttttagagtgcacagccccccttttgccaatgccagtcagtagcaccgctttatttagggtaccacggaagagagaagccctgaactgtgggtgactgataaccagaaggaaaggcatgttcagatagacagctcttactttcatgagtggcaaacatgctcataggtgctaagccctgtcacttggtaatagtttagatttatttccatcagtattaaccgaaacagtttcacacaatttgggaattttcagtttagttttttatcattataaaagcactgaccacccaatttaaaaaaatctgttaaaccaaatttctgatgtctgctgacagccagccctactcagcacagttaatggtagtgttccctgtccctaaagcccccaggccagcagggaaagcaggcacagaaacagctccactgctcccttctcgctctgttctatgatgtatttaacaacagatttctcagagaatttttaaaggaggaaaaaaagtttcttttctataataaaatacaattaccataaacctttataattactatatccataatggatagtgctatatccatttagcattttttaagttaacaggcatctctttattccacacattcctcctataccacttcaacc

SEQ ID NO: 38125 - DNA, 1045 bp, Homo sapiens
cccacaggggctggagcagcatgctccctcacaggctgagatgaggagattaggcatcctgcctctgagccagctgctgtggggcacgaggcaccagtgcacaggtgccccgactgtgagtcactttcttcttgctgtagccttaatgatcttgtttgcttcccttttggttgtggtgttgcccttcagcatgctttggagtttgagacactaaaacgagcctttcgtgtgaaactggtcctagaacttagtagcactgtggttccagcttcatctttcccaactccgctgacctcatatgcgacatggggtccacctacttggttgttgacggacgccacccctctttccctcggcacctgtgcctgtcctctctgaacctgccactgccatcgtcgtgaagaatcagaagcccggaagccagaagtgtggctggcctgcggggggtggagaagctgcagtgtgccctttgcttttcttttaggactccatccccgtgtctacctccctccttggagacacttccgacacgacctctactggccttgcccagcgcctaggtatgtacccacagctggcgctgcatggccagccaggtggggcccactctttaatggaaccatgaagcaagtcccttcggaagtaaagcatctttatgctaagaaccatcacctcattgctgctgggaagcacagacctttgcacgttgggtcttatttaaggggcacattccatgctcgcctgtcatcaccaccgtcccagggctggcctgttcccaaaggactcccacctcgtccttgggtgtgtccttgagtccatgagctgatttagttgccttccgtaagtgcatcaccacctcctgggaggagagcatgagaagtgcccacagcccctgtgggtggtggctcaaggtagcctcccgggccttaggaggagtcagtgcagctggtggagcaggtgtcacctctgtgcaggaaggactgtcctcactcagtgtgataccgttcagggctcggagggaagactggcctggcctgtgagtgtg

SEQ ID NO: 38126 - DNA, 1027 bp, Homo sapiens
cttgatctcctaacctcgtgatccacccgccttggcctcccaaagtgttgggattacaggcgtgagccaccacgccactcttataactcaaaaagaagacagataatccagtaaaaagatgggcaggccagacacagtggctcatgcccaaagaggcttgggcaaaggtgacctgggcagggaggatgggagtcccagggttcccaggtggccctcataaaccagatatacacaggtctatgctaataaccccaggaagattcacagatttggagcctttttctcagaatgcaatggaagaatggtgattgtgtgtgtgtgtgtgtgttgggggcttttgtcctgtaacaaaataagagaagacactttgctctgccttttctccctctaatgtagaaatgactgcctctctgttggttgcagtccacccatctgcatccaccatgggcacagggcttgggggcacaagggcagccttgccaggcttgcagccctaggggacaaagactcgctggattcttccctttcccagctccttcctgtccagcccatgaccaagtcctcagggcctccactccaggccgcctgggtctgcgctcctccctggcgcatcttctgcaccccctagactttgtttcctcaccattgccaaaccgattttcctagaacacagagctaatcatatcacctggctgctcagagtcctccaatggctccctcctgcctgcaaggtgatgcacaggtcctgggggccccacctcttcctcctgtcctctgcctttcagtcccaatactcatggcaccggggtccctcagctctgtctggtgctcgctctgtgaggttggcctatgctggctcagccgagctcccacaggctacctgggtagggcgccgtctgtgcatttctcgaggaaggagatgccttctggtacagggtcttcgttaatgtttattccattagatgattgtcaagactggggcatcagccattagcctccaagccttgagtaaacccacataaaaaga

SEQ ID NO: 38127 - DNA, 1033 bp, Homo sapiens
ttcaagcacttctcctgcctcagcctccggagtagctgggattacaggcatccgccattatgcccggctagttttttgtatttttgtagagacagggtttcaccatgttggccaggctggtcttaaactcctgacctcaagtgatctgcctgcttgggcctcccaaagtgctgggtttacaggtgtgagccaccgtgcccggccttatgttattctatatatataattaacacaaacaatacttactgagcacctgctatagattagataatctaggccctcagagatagagcagtgaactaaaatgaaaattctgctcatatagtgcttacattatgatagggagagacaaacaagaattatattagtggtaacaattgctttggagaaaaatgttaagcacagaaggagaatatgtgtgcagtggagtggttttgcatttaaaatggattgatcaggaaaacttgtttgagaaagtgacgttttagcaaagacaaggtaggccaaggtagccaggaatgcatgtatctggggaaagcattcctggcaggagaaacaggtcccacgtacctgagatgtgagtatgcctattcaaggaacatggtgtggctggagcagggtgaccgtgggagaagagtgttaggtttagagtgtgggggatgttggggctgtaagtataggaccttttgctctgaataaggtagaaagcaataaaatttcacaaagagtagtgacataatctgacttttaaagcatcttaatcaaatggaagatcttttgactgacttgaaataacagccttctcactggtttgttgtatgtgtgaccttaggcaagtcccttgaaactcaaaattctcaactcaaatggagagacatttcttgaacacttagtgtgacagccttttatactatgaactcatttaattttcataagcctatgatttgtcagtactattaccccattttttacagttgaggaaaccgaggcacagaagagcaacttgcctaagggcacaatagctttgtcatgt

SEQ ID NO: 38128 - DNA, 1037 bp, Homo sapiens
ttttgtgcttttttttttctttctttctttctttctgttttttccaattggaccttctatattgttccacgtattaacattttattcatgttttctggaaatagtattttctgtctctcagacaatagcgaggttattgtgtgagatttttgttctttatagttttctttgctatattgtgtttcttcccagattccttttgctgcatgtttacttttcatttgaagacttttctcacacagctggatccttcattgctgcctattctgagttaatatttaggtactgagaaagctgaatgggatttttcttctattgtgacagtgtaggacttgtcagctagtggttatcacttcagagtaattagatatttttggatattagtgactgtagatgtattttcttgggctatgagttttccggaatcctttcatttcctcctgggaaatagacctggctaccagtagagttctcttccttcataatgtaaacttccttataatctgtctatctttggtatgtgcctctcagcatctggagtgaccaacccttctctagaaagcaaatcttaagtgttctgctagaatgtgaagggagtggttgacattttccactgagttggggaggggactgtaccgagtctggctgtttataaaggctttcaaccaattctgtcctcagctcttacctcacaccatcttgcagaggatagggagtctccaattcctgaggctttctgggggtgttgtgacatgttctgactgtttctgatttaccttgtgtgttcatgttggaccaatattcagctcaatttgatctgttactattctttactccaatttgcacattctaagattttattctcatctctgctatcatctctcttgacattctccttgcctgagggttttcctcccctccccaccccacccctcccttcccctccgatctttctcttttctctctctcctctcccctctcccttctcctcttttcttttctttcttgaggtaggatcttgctctgttacccaggct

SEQ ID NO: 38129 - DNA, 1034 bp, Homo sapiens
tattgcaattataaagtaatggaaacagttgttttttttttttttttttttttttttgagacggagtctcgctctgtcgcccaggctggagtgcagtggcgcaatctcggctcactgcaagctccgcctcccgggttcacgccattctcctgcctcagcctcccaagtagctgggactacaggcgcccgccactacgcccggctaattttttgtatttttaatagagacggggtttcaccgttttagccgggatggtctcgatctcctgacctcgtgatccgcccgcctcggcctcccacagtgctgggattacaggcgtgagccaccgcgcccggccaggaaacagttgtttttgactggattttaaaattatagccatatgtcatatgtactggaacaacaggctgattatttttaattcagtgcattttagtacctactgtatgcaccaataacaacttaaactccttccctctattgtctgtcttatgccgtcctttgctttatctgaagacgagttgagaaatgaaaggatcatgttgattagctgtcactatggtgacctgcaaaaaagtgaaaatttatcagagtgatgagaatctgtctttttttaatttgttcctgttttcctccaatagaaagttaattgccatatctgtgtgttttaataccacacactgagctggtattaaaatgaatttaatgtgtttgaaatgttggaaataagtgttaagtttagattgccctaggcttagaaaggaccttgttttgatgggaagccccaacttctgtatttagctgcttactataaaatgtagcttattgacaaattgtaacaagaatttcctcagataaccaagtgttaaaatttgataaggcatccattactatgttctgtttttttgttgttgtttgtttgtttgtttgttttgagacagggttttgctctgtcacccaggctggagtgcagtggcatggtggcatgatctcggctcactgtaacctctgcctcctgggttcaagggattttgct

SEQ ID NO: 38130 - DNA, 1079 bp, Homo sapiens
aatttgatatgctctcctttcaatataaaatgatttatcaaatgtgggggtggttcttacatatttttattttgcgcttgattttactttatgcttgcaaatgtttttgcctttttatatttccattttgcattttaactcctattttgttttctttttttaattttctcctaaaagcatgaacttacgagaggtgttaaaaaaatatggtaaagatgttggtcttcatattaaagctgtaagatcctatagtcagcagttgttcctggcattgaaactccttaaaagatgcaatatcctacatgcagatatcaagccagacaatatcctggtaagtcaaacagccaagctgcgctgtacatcttgaacatacatttcacttcttactagcagtaatattattactatgagaaacgacatcttagaagcatagttcagtatattaataacctatttcaaatgactaatacttttttatctttcttggaaatcggacagtgaaattttattgacaagtatgaagaaaaaggaaatgtacaattgtccctttttttctcttttgactgatagatttaaagtgtgcaccaatcctggaatgctttactgtagtaatgagtttcttctgttatctttagaaaaatgctgcacatgttgctgttttgaaataaggagtgtccgtactcttctgtttgctaattttatagctccctaagctgtggctcctgggggctcaaacacaataaagctcagttgtggttaggtattatatttaaaggcatcgcttttgaagtttattttattttatttttaaactttcaagttcaggggtacatgtgcaggcttgttacataggtaaacttgtgtcatggagggtttgtacccacttttcctgatcctctcccatctctcaccctccagcctctgacggaccccagtgtgtattgttcccctgtgtgtccatgtgttctcaccttttgaaaccttaattctcttcgactagtgacttctggtggtaacagcagatttcacaatgtatatgtttttaaaattttgaaatacatacatattatcatagtgat

SEQ ID NO: 38131 - DNA, 2653 bp, Homo sapiens
acacatttgccagtgtcacagaagaaactcttgtttttaaaacctaatgctaaactagtataggttttcacatacatttaagaaatgttttcccgtcttcctggggaaggaaaaaatagaccttaatgacggagctgatttttgttaatgaaaatccaaagcctttagctcgtaatttcaggtatcagtgtggtttaagtaccacattcctcatgacaggagcagaagttgtgtagcaaactgaagtgcatatgagtatggataccctgctattctttaaggcattttagccagcccaagagttccactgatggattctaattttaaaatggttcttaagttttctgtgggtattgaaactgcttaagtagctgaattcagcttacactttaaaaagttttaaaataacttttctattttaagatgcttttctgattcccaagatgaaaagaatagtaatcaatgtgggagttaaaaataatcatttctgttcctattaatagcttaactctggatatcatttataatagtccagtctccccatagagactgcctaaggctatagtgttatgctgctttggggtgggagcagtaggccaagttcaagtcccaactcggaatttgtgtgtgtctcttttgaaggggggaagggactctggaatatgaattatcttcacttgttaatcctgaacatgcctctgactcatgagtggcagcagtcatgggagcaactccagcctttctcagcagatgtcactattactgtgtatgttgaagtatttacaaaggaaaaaagaaacaaatgactaatatagagttcatgtttatcagttttgccagatatatttaacattttcttgactaataccttctttatatttgagggatttaatattttttagacttgaagtgattgctaaatttgggatcatatagcagcttcggatgaagaatattttgtttttgtccaagtttattctgaatcacccttctgctttcattgccattgtaattctctggcaactgaaagttaagtctgattccttagttataaaacttgactttattcaggtattcagggtctttttagaagatgctttgcttcatgaaattagatttttctctcagtaccccacccttttaaaaatgcagttgttaaaattaaatgtactttgtgatatccatttcctcactgaaaacagtttttactcattgtaatgaatatttgatacatattaacttttcatagttaggaaattgaattaaaaataaatagaaaaggaatttttaaatgaatgtctttgttctcagtattggaattaataaaacttttcaaagccaataatttttatttatttgtattaattattcctggcttgaattaaattcccttgaaaaaatgttttgcaggttaatgaatccaaaactattttaaagctttgcgattttgggtcggcttcacatgttgcggataatgacataacaccttatcttgtcagtagattttatcgtgctcctgaaatcagtaagtttcttaatgttctttgacctgggccatcatatgtggtggaaaccgcatacttaatgtctaagcactgttttccatcacacttcagcagctgcacgagttcattcatgaggaagggaaccatagcaagttcatcctcctcaggtggaatgaaggtagttgtgacaggagtcttgatcatgtcgggcaagagtagcaaaacagttgtggaaaatcctcgactttagaagactgctcttgattattcaaggtctgattatcacatttatggattgtatgggacctttgttttttcctgttgccttggttgaggctgattagcacctccaccaaaggcgaaatgagaaaagagaagaaatacatattttcttttgccctttaagttcctcccctacacctccattttttaaggtttttaagtttgagtctctattaagaattagtgggaaagaacacaaaactaattgtcaaactaaggcatgaagattgtggttatagtccaagctaaggtagccagcccctcattaatggaaataaaaattaatagtcgtcagttttctctatcctcgtatattaaaactttgattttgttttcagttataggtaaaagctatgactatggtatagatatgtggtctgtaggttgcaccttatacgaactctatactggaaaaattttattccctggcaaaaccaataaccatatgctgaagcttgcaatggatctcaaaggaaagatgccaaataaggtaagacattagcatgagcttctttaaggtcttagtttcttattaactgacaagactgctgacacttgctcaccactagtgagctataaaacaaaaatttcagaaaggtgggtagatggctatcatgatttcttagggtctttcccttttctggtgttttaaattagtggttctaatcagccaagcgctaaggataagagaacttgttcaatgatggacagagagcagcaatattttggggatacacccttatgggtaaaagtttcaaaatgtttggaagacagaatggaaaaagatgtaagttgaattaggtaaaatacaagaacatgcttagtggtcagagaatgaataggtgaatattagatattgtaagagg

SEQ ID NO: 38132 - DNA, 1055 bp, Homo sapiens
acatctctggtgttttaagatgttattttattggaacaactgacaaatgagggatgttagctttgtggcagaattccctgcatgtgtgataactgatcttgttttattttttggcattgcaactgtggcatagttacaatttctgtttgttcatcacatttaaaattggaagagaacgcgcttgatggatagagcgccttcagtgtactgtttcttattaactttactttttttaaatcaacttgctatagactttatatacattttgttaaatatagttcctagtgacatagaaacgatgcgtagttttcatttactaattacaaatgttgaggcctaattctgaaagtcctcatatttaaaggctagacaacgtaatgaaatttttaactatttgtatgtcattttgaaagtgtactgctttatggtaaaagtgtttttcatttgttcattgttttcattatttgtgatcatgttgtctttcaatacaggcataaaccttccactcttgaacaaagcagctgctttttaaaagcggtaattgcttctttaccttttatttcttttgtaaatgaagcttttctttaagaatgtgactttaaagtgttgtctattgcataaaacagttgacactcacttattgtaaagtgaagattgttctactgcatgtgaagtggaccatgcagatttctgtatgttctcagtatgcatcactagataataaagtcttttgtgaacaaggcatttgtagccatttttaaaagtttttgtcttcagtgctggtaagtcaggtaaaccataaatagttaaaagcaaccttttgtttttttcctgaaagtttttaattgaaagtattattagttaaagatgtaaacctagccaaaattaccagtttattaataattaggatcctaattatttcaaaaaatcctacaaatattgtcagctttcagtgtagtgagattattcctgtaggttatggggtataattcaggatttaactaatgtttctgctattttctcacttttccttttgatggtgcggaaagagaaaa

SEQ ID NO: 38133 - DNA, 1960 bp, Homo sapiens
tggatgttaaggattcttagaaaaacagcaaccaccagaatagcatatatctgaaagtagtcttcagctttaggcagatgcaaaagaatacaaactggaatattaagaatactgttcaactcctttagtatctgttccccaacttaccctgtagaaacctcgttattaaccagtgttccagtcttaaagtagacaaaatattcagagccattttttttaagggaaatgaaaaagatactctgggttttttatactccccaatttagcatatctagactacctatttgaaaggaaccctatcaactgtcttatgtacgttacatgattttcctacactctgtaattttgctgaggtgcaatttggaactctgcaagacctactagattgaatttatttagtgaatgctcctgaataaatgtgcattcctcttttagagtagctgtatgcttttcaaatgctatctgccgtgaattttttgcttttattatactttatggcaaaagtgatatcaagtgattgtcagacttgagggctcatagaagtgttaggtacggctctcaaagatgttacagttttttctagggttgggagaatagttgagatctggaaagcatagacattttttacactctggatagactttattcttgaagatcatcagaaatgaggttggaatttcgaggttttgagcagggggagcatcttatattcacccttaaatcgttattaatacatcctgttttcttcattccctgatagctatctcatttcactctactgtctcaaaattttgttttaaaataatagaaatgttttgccattattaagtaccactttattcctaacaaaaataagtactcaggacttttttttcaaaatgaaatatttatgtactgttttatggtatgtggtagagtaagtaaaatgtaatgttctcagttttgttccatatttgcattcctcttatgctttacctgtattttatcatttgtaagcagaactctagctatatggggtagaaataaaatctctgagatgaaacaaaggaatcaacatgataaaatttaggcgaagtagttaagaaatggcccttttgaatgttgaagataggaaagaaagccatatattcaaatatgtaattttcctcatttagttataatgacatctttaccaattgggcttcataaatgtgtttctttcttaatagtatcctagttccagcatatattcaacatgaattttatcattctcctcctaatggaatgtcttccttatagaaatgttcacgacaaattcatttgtgttttttacatgtcaataatgtatgctaaattaaaatgttttccagttattctgatagatgtcattatggcatccttaatttttcttctccttctgtatatagggtaagggactgttctgaagaacctttccatttagtgatcaagatatggaagctgatttctgaaaatgctcagtgtgtactctaattatttatggtaccatttgaattgtaacttgcattttagcagtgcatgtttctaattgacttactgggaaactgaataaaatatgcctcttattatcatattgtctcctggtttttttctttggttgagttcagattttcctcacaaacatcaaaacattttcaaagcattaggtgcacaacaccaaagagtgtattatattcgtgttcctgttacatacatttctgctttggttttcctagtaaaggaaacagataagtaatgagccaactcctgtttttataatgataaaaataaattggttcattgctcacatgatagcttgacaaatcttgggctcttatcctcagtatacccactctttattttcttcttttaaggaactgtttttggcttttcaaaacagtgagtaaaatagattcacagtgtagtttgtgaatcttagtgcatgcaaagcagataaggcagg

SEQ ID NO: 38134 - DNA, 1013 bp, Homo sapiens
tttagctgatgtgacaaatgagagaaacctggggacatgctgaagtttgaagctggtgctcactttcatcattgcctgagttttcccaagcagcttttgaagagtgaggaactaagttttcttagaagagtaaatgtctcacagaggggtcacccttataccttggatgttgaaactttgtacttctggaactaaagcagttaccacggtgctgggcattgggggtagggctaaggcgttctaacctcaggagggctaacagttcggggacactctttttatctttggcgaccccatttttttcaagcccaaaatgaggccaggtgatctggcaagttttgtgtttctaacattgtgacaaaccccagaatgatattgcatcacggaaaaaactcctaggcccaggcaactgggacccctgggctaggccccacactttggggggcccatctggccttttccagccacgtctacggccataccaccctgaacgcccccgatctcgtctgatctcggaagctaagcagggtcgggcctggttagtacttggatgggagaccgcctgggaataccgggtgctgtaggcttactttgtgtctgacccatgtttccctgagacaaaacaccaagctcacaccacactcacaccacaaaacaaagaacgggtaaaaaaggcacacacacactttttcagtttacaccaaaccagaatcaaaaccaaaatcagagtatccagaaatccaagccaggtcaaaaccaaaaccaaagtatcaagcaattcaagtcaagtcaaaaacaaaaaccaaagtgccagtacaggcacgccgtgggtgatcaggccacgcttccactcaaatggagtgggcaagttccaaagaccagtcttaccaagtttcagatgtccggactccaagtgccagttccttcccggtgttcagccactgcattgatcctccaccggggcctgccacgcgctgctctgacgaggtgtccaaccggggcaactgcctacc

SEQ ID NO: 38135 - DNA, 1053 bp, Homo sapiens
ttctcatgcctcagcctcctgagtggctgggattacagacgtgcaccacccccgcctacgcccccccccccccgcccccgcccccgccccggctaatgttttgtatttttagtagagacagggtttcaccttgtgggccaggctggtctcaaactcctggtctcaagtgatccgcccaccttggcctcccaaagtgctgggattacaggcatgagtcactgcacccggccttcccttgttcttagaagcttgttaagtaactcatcttgtacttgtcttaactatcctaaactttctcatcagtaaaataggaggatgataaccaaataattgaggcttaaatggcattagcgtgtaaaagcaattctacaaaacgttttccatttttaaagaggaaaaaaaacccatccaactctcaaaccatgaaaccaaacctgttttcccttcctcaagatttaggatttgaaagtattctataaactgattatatcaccagagaaagctgtgaggtcaagaggaccttaatttatttagcagtcaagtaaccaccatgagactttgttcacgtgggactgaataaggaacgtatgctgtagtaaaatggaataagtattctctttatttgtatgtcttaataattccttttttcctcagtagatgtggagttattcccttgagaactcctgtaatagttaattcaaatttcagtaagctctcaatgattagtcttgaccttctgagagaatatttatgttttcattttcaaaaatggaagtaagcttttaagaatgaaatcgtatctggtgtgtaaaaaattgttttaaagttgattagtttgacaggatgatcaggatttgcaggggaaggtaggtcttttgaatctttcttcctactttgcgataagattcctgctctctcctgtgcaccacaaggcttttacttacattgaccaaaagcagttgtgaataaagtctcaatctgtagttcaaatggaagtcacagagaccaggacacctttcatggatgttggccaagctaggtcagcgtatgttg

SEQ ID NO: 38136 - DNA, 1068 bp, Homo sapiens
cccttagagcaagtgaagggcatgcttatgaaagaaaaggcatatgttgcaaagagctatcaagaagagtttttaaaaagtgttgctatgtaagtgtaagcgaaaaaattaagtctacttttatggtaaacttaaacataaattttatggtcatttccacccaagttctccagacggcagaggagtcagcaggaattctcctaaggaggtggaggtgggagggaggaggaaatggcctttgcaagcctgacctgttgtttgaaatctcaagttaccttacatgttttatgatattaaccatgtagtccatacaatttttgggattcaatatgaaatattttaaacatatttaccaaggagctcttctccagagatccttgatttaggctgatgtttcaggaagctgagctgtggattagtggccctgtgtgcccttggtctcttgctgtgtgtgtgtactctggcttcagaagcagagacggactgtgttaccttccataatgatgccgggtaaaggaggcattagctgatctggtgaaatgtaaataagatttgaattaagtagttcaaaaaaaatttaaaaagtttgttttagtaattgtttttaaccaataaagattaaaaatacttgttttctgtctgcagtcatcttactgctaggggttcaagagaaggtgcactagtagtttttatctcgagtctcgctgtttattctctgtactttaaaaaagtgactgtgctgttgccttgagctggttgtgggagcatttgtagggtccctgttggaatgaggaccaatctgcttcataactcctctctgtctatgggctagaccaaagtacccttggagaactccatgtcttccaggaagtttccaccctttttctcctccctctttcctgagtgttattgtctgcatgtccagctgtgtccctctaacctgattttcagccatctgccaggtccctcgagttgaggcttcactcctcctgtcctgattcttgaccctggcttctgcacttgctggtggccctgcagagctctggcctgggaagtagaagaatggct

SEQ ID NO: 38137 - DNA, 1059 bp, Homo sapiens
tagctttggtatatctttttccagtctgttacttttagtttgtttctgtctttatatttaaaattgttctttagaaaccagaatatagtcagttcttgcctttttaaaataatcggatagtccatgctttttaattgaaattaatccatttacatttaaagtaattattaatatggttatattaggtctatcattttttgcttttcttagggaagggattttatttgcttttgttcctcctcttttgctgattttgtgttaaccaaaatttcttattaattttaattcttctgttggttttctagctatatgcatcttagctttttctttaatattgaatcactttggataagacatataattttttcaatgatgtgtttccagttccactacttatccttagtattattgtcacagttgttgcatttatatactttgtaaacccatcagtagtgttgtattttttgctttatgctgtcatcttttatagaaaactaagatattacatatatccacataattaccatttctggctgtcttcatttcttcctgtagctctaagttgccatctagtgtagtttccatttggactagagatctttctttagcatttcttgttatagatctaccaatgacaaatagtttatttgaaaatgcccttattttaccttcatttttaaaggaaacttcttctgaatactagaattcttggttgactggttttcttccttttccttcttcagtaatttgaatatgtggtcccagtgtcttcagacttaaaagtttctaaggagaagtctttgttcttatcgttattgttgccgttgttttcctgtttatgacgtcattttctctggctgctttcaagattttgtttatccttggctttctaccatttgactaaggtgtgtctagaagaagttttgtttgtgttattctgtttgaggtttattgagcttttgggagatatttcagttgttgtgtcttcagatgtcttttcctcctttcctctctctagagtccaattaaggtactgcttcctgttgtcacatttttggg

SEQ ID NO: 38138 - DNA, 1048 bp, Homo sapiens
atgtgttttagctgagacagtataaaattgtgtctagtatagatttgaggtgtactgaggttccacttgcccctcaagggacacccccaattctcatatacccaccttgaacacagttaacagtgtttgtgtcctgctttttataagtcatgagcatttcctgatatcatcaaaatgcttttagaaatacaactaataaatatattgtgtcttgcctgttgtattgttgcgaaatctagttattcctacaggcattgtatttttttggtggtatctttcttttgcagttgtgttgtatgtgaaagagtatgtcacctgtgaggtatggagcctcctaaagagacctgggagccagctaacttcagccggagcctaatactcatgcattgaactgtgtgctctttccctcaggcctttaattacaggtacacagttacaagtaatactgtgacctactcttcaatcaccctttcctttttaagagaattaaaaaaaaaaaaaactgtgaaattcctggatcagaagccatggcttttgtcagagccagctactcactcccaccggcagtacctgagtgaccatctgaacattcccttacgagccaccactagacagtacattcaaaacttagctcatttgatagaaaagtgttatcttttaatttgcatttcttagctcactagaaggtaagtgatgtgggaatttttgttaaagttagtatttttatcattttaaacttttaagtctgtaatttacatatctggactttattctgcccagtgttgtgtcttgagggcctaaatctcataatcaattagccaccgtttttgtattattcatgactcatcgtgacttccaaagtttaaacttctgtgtgtactagggtttgttttgggctggttgctgcgtcagaattagatgaatttgtctgtagtctcattgcttgagacaaaatatcttctaaagaaactgaaataacatctttttcatattaaaaacgtttaggcattggcacttcttgttttgtggctacaactaaagttgtatt

SEQ ID NO: 38139 - DNA, 2138 bp, Homo sapiens
tgcattgattgaggtgatcctgtggttttcctttctttgatttttctaatgcaatatattacattgattgattttctcatattaaaccacccttgtattcctgggataaatcccatttggttataatccttttagatgttagatttggtttgctcgaacagccaatcctcattattcatggattccatatttgcctatttgctaaaatttatttgtaacccaaaaattaataatgcagtggtttcatggtcatttatacatacacctagaatggcaaaaaaaaaaaaaaaaaagagagtcacctgacacacatcttcctagctgagactgcccataacaacacactgccttgtttcagctgtgagaccaccagcgggtggaagtgatgggggtaatgcagtgtagtaccaaaacctttggcctcagagccacttgaagtggtttaaatctcaactctggcacctgttagtgggacggtctcaggcaagtcacttaacatttttgagtttcattttctccattctgtaaaatagaatcgactaggatcagttgtttgtaggattataatctatgtgagatatgtgtgtgcatatttaccttatgagcaggtggtttagtatccattgattcaatggtcctcacctttatttctaattttagttatttgtgtcttttctttttttctctgtccagctaatggtttctcaatttttattgagttcttcaaataaccaactcttaatttcattgatttttcttttcttctattctctatgtatcttacccgtaatctttattattttcatccttctggtaccttcgggtttactttgctcttctttttctagctccttaaggtgtaaagttaggctgctgacatgagatctttttttcttttttaatgtaacctttacatctataaactttcctctgaccactgccttcactacattgcatactttttctgtgttgtgattttgttttcatgcatccctaagtgtcttctactttcccttgtgatttcttttttgacccatggttgttgaaggagggtgttgttttaatttccacatatttgtggattttcccatttttcttttggtgttaatttctagcttcattccacaagataactttgtaagatttcaatttcttaaaatgtgagacttgttatgaggtctgacatttggtctgttctggaaaatgattcatatgcacttaagaaggtatattctgctgtttggtgaagtgttaggtctagttggtttatagtgttgtgcaagtcctgttttgatcttctagataatctgtcctgtactgaaaatgtagtgtattgaattctccaactgttattgtaaagctatctttttcccttcagctttgtcaatatttgcttcatgtattttggagcactgttgtttggtgcttacatgtttataattgttatattttcttgttgaactggcctttatgtcaccatcttttgtgtcttgttacagtttttgacttaaagtctgttttgtctgatattagtgtagccacctccagctttctcttgcttactatttacatttaatatattttttactactttccctttcaacctttttgtttttgaatcttgagtttcctgtagataacatatagttatataatgtttttatatccattctgccagtctctgccttctgtcagaaaagtttaatttacatttcaagttactactgacaagcacttcttccatgttgctatttgttttctgccttatacttttgttcctcattgccttaattactaccatttgtgattagttgatcttttttctttttaataatggattgtttggattcccttctcatttccttttgaatatatagcttttagatattttctttgtggttatcatgggaattatatgtaatatccacaattgatgttgttgtttaagtcaatatcagcttcaatagcatacaaatgtctgtctatacagctccatctgctccctttatgttcttacaaagtacatattttatgcattgtgtgctcaataacatggattgataattatttttcatgcatttgtccttttttttcttttttgagacagagcctcactctgtcacccaggctggagcgca

SEQ ID NO: 38140 - DNA, 1047 bp, Homo sapiens
tggactagtccttttatcattatataatgcccctctttgtcttctttatctactgttgctttaacatttgttttttctgatataagaatagctactcctgcttgctttttgtgtcctcttgcacggaatgtctgtttcacccgtttaccttaagtttatgtgagtacttatgtgttaggtgagcctcttcacaacagatactaggtgaattcttatccattctgccattctgttctctttccagtggaggtatttcagttactattgagatgctaggtattattctattcattgtgctatgaatacacaacatgggaacgaatatgaaaacccttgtgggtttttttttccattatgttattgctatatagttcctgtgagatttatgctttaaggaggttctattttggtgtatgtcaaggatttgtttcaagatttatatctccttttagcagtttttgtttcaagatttatatctccttttagcagttattgtagcgctggcttggtattggcagattctctcagtatttgtcttaaaaagacggtatcttttcatcatttatgaagtttagttttgctggatataaaattcttggcttataattgttttgtttaaggaggctaaggatagccctccccaccccaacccctagtcccttctagcttgtagggtttctgctgagaaatctgctgttaatctgttaggttttcctttataggttacctggtgcttttgcctcacagctcttaagattcttttccttcatcttaactttagataacctgatgacagcgtgcctaagtgatgatctttttgcaataaatttcccaggtgttctttgagcttctcgtatttggatgtctagatctctgtctagcaaggccggggaagttttcctcaattattccctcaatatgtttttcaaacttttagatttctcttcttcctcagtaacaccatttattcttaggattggccatttaacataatccccaacttctcagaggctttttctttttttttttttttaattctttttttgt

SEQ ID NO: 38141 - DNA, 1022 bp, Homo sapiens
ctccagccagtaggtggcgctgtcaagagagcatcagctgtggtagtatagggaggatcaggtggtgtgggggccctagagctcccgggagattatgtcctttgtctttggagtttttcagctgtcccctggggcctgcagcagcaatctgcttccttcagagggtttgtggattctcttggctttcctggtacgttcctgccgtagttcttggagcaaaagttaaggaggtgagtccccacacgctgctctgtccgtccgagtgggagctgcaaattagtcctgcctttctgtctgccattttccttgtgactctgaagaatatttttcccccaacatgggtttgtttctgagattctcataaaagtacatacttcttaaaagttgcattttcagttagtacatttgagattgttgacatttggattttattcttctgtaagccatcattttattattgaaaaagtttatttgtgctgaggtaaggtagcttatgagttcagagcaactagtgctaaaggaaggctattttgttgtttttttaatgagatgtgaagtattatagctcaaatattttcataagaactgtctaaacctctatttagaatacctatattcaacaaataattttgcaagacaaaaaagttgtcaaataaattgcctttttcattcttttgaatcttttgctaaatttagatgctgtaaaatgttgtttttatccaatcaaaaatagaagggccatgaaattattctttctacaatttgagatactccaaagtgcacttactgaatttcaaaattattgtacattgctctatatattccatttttgtctgtcacttgatatttttagaggttaatttcactgcatgcttacttgcaaactttgatttcaacaattgcagtttgccaaaaggttcaaaagctgacttttcaaaagacagttgtttgttgaaagttttgatcaaaatttccagctgattttgaacaaaaggtaacccaatcttagaggtctcaccaaa

SEQ ID NO: 38142 - DNA, 1513 bp, Homo sapiens
aaagttcaagggacatagcaggaaacagtactaatgaactgccttcatgaagctcacatgtagaccacaaacacagaaagaaaacacagtgtgtttgatggtgagatggtgtgacgtgctcaggagaaaacaggaggcagggaaggggatagaattggggggaaagggtggggagggaggggggcagttccagccctaccactaactagagtggactagctgggtgacttcatttaactctggaacctgttttctcatgactggattggcaaaaatataatacatgttcaacatacttcatagagttttgtgggtaagaggaatattattagtagtaacaagggccttataattgcacataggataactgtatttgcttactgaatcttcatagtaatgcttcacgctaattgccagtatcacaattcattctctgattaattcagcaaatacttgttgagtgtctgctaggcacgagggatatagctagattttagatacacaaaactctgttctcattctggttgagctatgactgaagagatgtagtgtcttatacctttcaccgttgctgtgtattttatctttaaatgttcagtttggtgacttttgtcaattaactagaaaagtcgatgttttagcgaaaaagtttataattttaatagagcttgtggtagggaactcacagtggttttattttcctattacttactcttggggctatttaaactagtaattttgtttattctataagtttcttaattttaaaagtattcatagagttcttttccttgtaagaatgctactgtatagccctaaaatttataatggttcaggagaactttggatataatacattttgtgataacagtgtggatcaagaagtagaaatgaaatatgccatttgataattgaaagcatatagttagatcgtgaaagccacgcactagaatttgtctaagttgatgaaatgctgactgatgaataaggtgaatctttcttcatttgggccagtagaatggagagatccatataatttggatatttaacaaaaattttcaagtgttaaaaaattatttgaaaaaatgtataatttgcattagccagtacagaattcttaactaacaagcagaaaatccaggagtactgctcattttttaaaagtttttgattaccaggggaaatataatggcaccgaggcacatggcaatgactaattaaaactgagcactagggtctgtggctctcgactgactagtatttgtgatttaatcatactgccctaaagatttgggcgctcacttgggtgggcatagttattacagattggcctacacgttccctttcagagccagaggacatggacgtcttatttagtagaaagtagtaatctgggtcttccaactttgagctctgtgctagttctgtaacctgggccaaagttacctttggttttcccatctgtaaaatggacgtaacagcagggtggtgagaatcaaatgagttaattgat

SEQ ID NO: 38143 - DNA, 1051 bp, Homo sapiens
gatctgtgcccttaataaagaggcccaagagagcttctttgtcccttccaccacgtgagggcacataaaatgtgccatctgtgaggaatgggccctcgccagacactgaatctgctggcatcttgaccttggaattccctgcctccagaattgtgagcagtaaatttctattgtttatgaattacccagtctgaggtattttgttatagtggtccaaatagaccaagacagaagttggtactgagagtgggtgtttcatagatattatctccccatctatggcttgtttgtacatctttcaacattttttttcttatttattctgtcctcacaatctgtccccgtcaacattgtttttgatgagaagtttaaaatttttttaatgaaatctttttttaaatcaattttctttctttcctggttattgcttttttgtgacctgaggaacttttgccttccccaaagtcacaaggatgacgttggtttgctctaaaaacgtcatcgctttagcttttatacttaggcctgtaatgcatcttgaatgaacttctgtgtatatcgtagtttgtggttcacttggtaacatatggatatccagtatcccagctacatttttccaaaaaacttgaccaaatagatttcttggggatctttgtaatcaaaaatcagttgtgtaatttagaatcataaatgaaaatctatttctggtgctctcttgtttcattgatgtctttgtagatacttacacaggtactgcttttccttgaaatctgttgctttatgatgttatatcttgaaataggttgtaggagccctacttagtacttctttttcaagattgctttggattgcctttcaagtttgttgcctttccttgtaaatgttaaaatcatcttgttggtttccacataaaagcttgccaggattatttttgggaatgtgttgtatctatagatgcatttgggggaaattttatattaatatttgctcttttaatttgtaaacatggactgtctttacattcatttaggcttgtaatttctcagcagta

SEQ ID NO: 38144 - DNA, 1081 bp, Homo sapiens
tcatatgtttctttgatggcagtttcacaccacagaaggttctcagcgccttgtagctcattgctgtcaccactccaggctgttgcctgggtgcccgctgctggaaccctgggatgaccaggcacagctgcagatgcctcgagctgctccagccatgagtgtggaaaccaactcggtggtcaggcttcaacacagaaatagcagagagcccctttcagtcacaagaaacataagtcacctaatgcatatccacacgttctcagcataaaaatttagcatcttgtttgacttactttcagggaaattgtccacaacccaaatggcctattactattttattgaggttgcagaagagatcattttatcatctattgtggtttttgctatttttgatgtttcctaatgaaacttgcacttttccccccaaattttgatttttttaaaactatttttttccttttatgaacaggttgaaaggattgttgacaaaaggaaaaataaaaaagggaagacagagtatttggttcggtggaaaggctatgacagcgaggacgacacttgggagccggaacagcacctcgtgaactgtgaggaatacatccacgacttcaacagacgccacacggagaagcagaaggagagcacattgaccagaacaaacaggacctctcccaacaatgctaggaaacaaatctccagatccaccaacagcaacttttctaagacctctcctaaggcactcgtgattgggaaagaccacgaatccaaaaacagccagctgtttgctgccagccagaagttcaggaagaacacagctccatctctctccagccggaagaacatggacctagcgaagtcaggtatcaagatcctcgtgcctaaaagccccgttaagagcaggaccgcagtggacggctttcagagcgagagccctgagaaactggaccccgtcgagcagggtcaggaggacacagtggcacccgaagtggcagcggaaaagccggtcggagctttattgggccccggtgccgagagggccaggatggggagcaggcccaggatacacccactagtgcctcag

SEQ ID NO: 38145 - DNA, 1082 bp, Homo sapiens
tgcggccttgatctaaatcaggcttgcagattaacgaggaggaagtctttctggaagaaaagcaactgcaaagctggtggagcccctgacagcaggcctcctgtggatttgggagggtcagttctgtcgctgccctggtacctgtgcagagaagagctttgttatactctgctagatcgtaagctccaagaaagcattttgtttttccagactaaatcgaactgtgcccagaatggtgcctgccgtgtagtcggtgctctgcaagtacttgtggatggagtgattccagtagaatgggtgcgcatggaagacaagggttgttgtaaggagtcatttgtggcctgggtcttttgctcagagaggagggaaggagagcaggaggggagaaatgctattgaaataacaacatatatggccagaaacacagacattccagaaagccctcgttcgccctctggcacatgcttcctgaatgaggagaagccgcgctgaagctctgttaggctgttggtccacactcagacactttttaagccattgtttgtttttactttctagactaattttagagctacgtaaagaaactgatttgtttttctaaaactaattgaagtagatactggtggagtcattgggaaacgaaccatcattcaaaacattaatcatatactgaaggaatatttttgccaccaaaaaccacagatatttgaatatctgtgaacccaaagaatgaatgtttctggagtattttcacacacactcacttttatagaataaccatatatgtgtttgctttttaattattttaagtatgacgcaaaggcttaaatgaatatattatttcactcagaaatgtgagaaattctaaaatttaggtgatgcagctagctgtcttctttctctctatcaatgtttaatggtaatttcttgctcttttaattccctaatgaattaatcctacaaaagaagtaattgcttttaaaaactggattatcgtaactttgtcctttcatggattcaaacatataattcatcatcattccgtaagtatgaaatttcagaaaatgctattagcaaactta

SEQ ID NO: 38146 - DNA, 1045 bp, Homo sapiens
gggagtggctcccagtgccccagcatgatgttgaaaagatacgtggtcctttcacctgtttccaagttgggaatttttttttttcctgaccattaggaaaaatgttgacgttggttttggtgaatctgatttgacccattcttcctgggagtaataggataacacggccgcttctcatttgtgtagacaaccccagctcatcatcatctgcacgtggcctggagggtcactgttccctgcagtggctccttgggagaggagtagcaccctgttcatcaaaagcaggtagcaaggcgcacttacagttgctgactggcaggggcggaacgccgtagggctttgtagccagggtaagaagtttgggtttttttcagatggtgaagggattgaagtggaaacatgatgtgtgctgattgacatttgacatttgattgtcttctcagtccattttcagatatttgtgagagaatatctgaaactacgtaatttacaaagaaaaggaatttttctttcttgaagtgatagatgctgaggagtccaggatcaaggggccccctctggtggagcctctttgctggtgaggactctgctgagttcccaggcatcacatggcgagggggcagagcctgcttatgtgccagctcagctcactctccccctcttcttatgaagccaccagtcgcactcccgtgataacccattcatgagggcagagcccccatgacccaattgcctcttaaaggcccctcgtctcaatactgccacactgggggttacatttcaggatgtgtcttggaagggataaatgttcaaaccatagcagctgctgactgctctgaggagagtgacttgccggtgaggtggactagcagaagtcatcagagcctttctcagagtccaggccaggctgttaatgctggtggcttgcagatgtagaccagcattactaaactcttaaaagtttgtttccctgggatcaaagctaacttggcagagaccttattgtgtcttcagaattttcttcccagtgctcgaaattcgagcc

SEQ ID NO: 38147 - DNA, 1029 bp, Homo sapiens
cagcctcttgcaggtctttagaagctcagctgagtttcttactattatctgtctcttgtgttctgccgcagttgagacagtccacatggccccagctttccttgcagcggctcatctttcctcagattgcaggctgtgtggctgccttgcaacctcagccatcctgcaagttcaagaacagttgtaattgatagtttatccagctgtaaccagcgttttagctgtgcacgggcctattcttcattctgagctattaagctggttttcatttgactttggtttgcatagaacacagggtttgcagaatgggtttgtgactggggtgggttgtgacatggtttcttagaacggggcccacacatggcccacgcatagaggtgtttcagtacagcagtaacagcccggcacggtaccacagtgttcacagttgtgggaacagggtgaagagtagactgtcctccagctgggagagtaggcagggatgagtcggtgcaagtggacgagtccaggacagagctggcttctgagcctaggaggtcgggcacgtatccttgcctttattcactgtgccctgcctgtggtttgcatgtgagaacacacatctctgtcttgtgtgctggggctggcccaacctcgtagatcatgtttaactctgtgttgttaggcataaccacagtctactttaatgacagcagatgccccactgtttagtcacactgcaaagagcatcctttcgatcacctcccagtggaaatccatgatgatgaataaattcctagattcggatttgtcaaagatttgttttgttttgtttaatatttttgatacaagttgtcaaaccatcttccaaaacacattttaccactctgctctctagccagtgaacacattttgcttggccctgatattagggttgttttgggtgtttgataaacttatgtgttttgacattagaattgtaaaccaaaaatagcattctaagccctgcagcttggaatgtgaactgcctcttggccaaggggaccctaa

SEQ ID NO: 38148 - DNA, 1048 bp, Homo sapiens
tgattggtacagtatttttgcatctgtgggacctaccttttcgttcagtagtttgaactatatataaactgtacaatctgtaaagtttttatagaataaatattcagctgtgaaaactggttaaataaaactaatatttcttaacacatttgaaatgtttctctgattcttgtgagatttctcatgggatgttttctctttcgtgtgtgtgtgagatatacatgtgtgtataaagcatctgtacagttcaatggaatgaaaccctgtgtgactaacacctaggtaggacctaacaatttgaccagtatcctccctggtcaccttcacccgggtgaccatttcctcactttgtgtccatcatccacttctccttcaaagaacttattcctaaaataaattacttttagttctacatgtttttaacctttatatcatatcacaaataagcttctgtgactgactgacttcattcactgttaagttttctcttacgtagagttgtaacttactccttctttacccaaacctgtcgtggctgttttcactcctgttttacagatgaggaacctgaagaattaaacacttgcccaacgtcatgtaggtaatttgaacaggagtagcatgaagcttttacccaaggtcgatgtggcaaagcacatattctggcaaagacaccaagatgtcagtgttgtagaattcacaaatagggaactgagtaaaatctccaagttgtctgtctgcatcatccgagactttgaatcctctgggccttgtgagccacctcccctttttctgaagcaaaccttccaccttccaacttcttgcacaagaattgatcccaactagaagtagcactggcgacagcagtgaagtgcttctgttttgtgccctgcgtgggtgaggaggaagggaaatgcgactgctcaggtgggtgaaagtctcggtccaacttttgaagagaatttgacagtaactgtcaaatataaaaagcctggacccagcaactccatcaataaggattcatcttaaggaatgagtggtcatagga

SEQ ID NO: 38149 - DNA, 1064 bp, Homo sapiens
tcagcctcccagagtgccgggattacaggtgtgagtcactgcactgggccacaattagtatttgtgatgttagaaactaaaagtgctggtaagccttggaaagaaaaatcctgtggtctctgagagcttcaaatttaatcttggcctcattacctaatcacatcagaagaagagaatctgtgaaaaatggaagtgatcaaaggacgatgggttcccaggagaagggaatctcatggcttccaatctattcacagctttgacctgcagactttagatatgggaggaatagactaaaaacaaactttgtcattgttgttattgccttggagacggggtctcactctatcactcaggctggggtgcagtctcagttcactgcaacctctgctccccaggttcaagtgatccttcaacatcagcctcctgagtagctgggactacaggtgtgtgccaccacacctggctaatttttgtactttttgtagagactgggtctcgctatgtttcccaggctggtcttgaactcctggactcaagtgatcatccaccttggcctcccaaagtgctgggattacaggcatgagccactgcatctggaaaagcaaatttcttattttgcaatttggccttggggcctgagtggccaagctatgattgtctgtttcctctttggagtggggaaatgtgtgagctgaagcaccagtcacatacacacatgtctatatgcatttctgtacaacccaagagatccaactttagtaagagggaaaggaaatcagaacatagagggggcctgctgtttaccagtaacttgtaatcaacatgtcattgagtcccatctgcaatgggtgtgtgtatgagttagctattgctacataacaaaccatcccagaacttaattagctcataattgagctggttagcaatttaggctgggctcagctgggccattcttctggtctcaactcagctctatgtgtgtggtgtgtgtatgtgtgtatgtttagctctgcttctgggggtgagctggctgtcaactggggtaccttggttctcctgcttat

SEQ ID NO: 38150 - DNA, 1045 bp, Homo sapiens
gaatagatttgggtgtcagttaaatgctttgcttggtgtttcaagtttaatgagacagctgtagaataaactaaaatcattttctagaacatactaagcctttcccatctgactaccttgatacttcagtttctttatctggaaactgtctttttgaatggcttatctttttaatcttgatttaaagtttacttcctcagataggccttccccagccattctttttttttttaatcaaaaaataacgtctcctgtcctatttttaggtttctaatgattcctacttgagttgttaggccttcgcagcctcagaaagtatgtaggtttacagtaaattatacactgtgtataattcatttttcaatatattgtaggtatattttaaggtttagttaagaagtatgtaggggtagaagatcttatgtttttagtgacattttatgatttactattggcattgtattttccttccatttttaatttttgatttatattattttaattgtattctgtcagattggctggagctatcctggactttagtttgagggatgacactttggggagtaaagattgggtttactttgtactcgagtcttccacaatttcctttgtagggctaaccgttgtcagcaagtatttatgcaactgttgtcttatgactacatagcatgtattggtcatagagtctaaaagcttcttaaacaaagcatgggatttaagaaagaagaattagcagattaagccttaataatatataaatactttacaagtgaaggtaagacttaaaaagatttaatagcataaactttaataattcatgtattagaggcatcaggtttaaaataaactgctgttctttcacttattttgtcttatttccgtctttaaattagaaatgaaaagaacctgtagttgttttgtttttactgtgtcaaaaaaatgcttaaaagtcatgtttcatggtggatttttaaaattgtggtaaaatatatataacatgaaatttaccattttagccatttttaagtgtgcagttcagtgg

SEQ ID NO: 38151 - DNA, 1272 bp, Homo sapiens
cattttggccttttttttttttttttttttttttttttttgagacgaagtctagctctgtcgcctgggctggagtgcagtggtgggatctcagctcactgcaagctccgcctcccgggttcacaccattctcctgcctcagcctcctgagtagctgggactgcaggtgcccatcaccacgcccagctaattttttgtatttttagtagagatggggtttcactgtgttagccaggatggtctcgatctcctgacctcgtgatccgcccgccttggcctcccaaagtgctgggattacaggcgtgcgccactgtgcctggcctattttggccatttttaagcatacagttcgctagcattaagtacatttatggtctcatgtaaccatcaccactacccatctctagaactttatcatcttcccagattgaaacttcgtacccagtaaacacgaactccccatcccctctcccccaagcctctggcaaccaccattctactttctgtctctgaatttaaccactctaggaacttcgtatgagtggaatcatacagtatttgtccttttcatctgatttatttcagtgagcataacattttcatggttcatccatgtcgtatcatgtgccagaatttccttcctttttaaggccgagtagtattacattgtctggatagagcacactgtgtttctccattcattcatcagaggacacttgggttgcttctacctttcggctattatgaataagactgctgtgatcatgagtgtacagatatcttttcaagatcctgcttttagttcttctgggtacagacccaaacgtggaattgcttgatcatatgataattctatgtttaatttttcaggaacctccatactgttttccacagtggctgtaccattttacattcccaccagcagagcacaggggttccaatttcttcacataggagataggtaattatttgtccttcactgttacaacagcggaggaagggtagcacagagaggttaggtgagctcacatagctaacatgtgcagacctgaatctgaatttgactccagaagcttacctcctgtgacatacaggtaaggtgaggcacagagagtccaaggggcatgactgagggcccctgcctcatagcatcagtgattcagagcctgccttcagagttcatgttatgaaggattcgtagagttcgctctttttaaataaaaattctctttaaaaaaactaattttggcctggcgcagtggctcacgcctgt

SEQ ID NO: 38152 - DNA, 1034 bp, Homo sapiens
ttcatcatttcacagcgatagctcccatcttcagtccttaccaaaaacaattgttttatttgaaagctttcttttggaagcaactaatgcattattacttttatcaatttaataacaattaaatctgtgttttcaggttttaatcatttttttattaagcatccatacattttgaggggaaaattaattattttggaagtactcatcatatactcatagaaatagatattggatattatagggcatataatttattttttaaaagatgcaaagattctagatttttctctgatctgtaaaattttccctctcaaaaaagtttttctttgtttatgctccataatttatttattttaaagaccgactgggtcatttaaagtgagagagctttgttggacggaggataatagtgcataaacctgtcttttatgacaccttggacttaaccttctttgtacaatagagacactgagggttggccttaggaagcctgggttgtttttgtattatgactcgagagatgctgaaaaaacctcctactgctttccttgtacctcagattatacaattagagacttaggcttttaagtcttgacttttgattatgagtttctgttaaaatatgacaattaggatgtaaaggagctgccatccagaatcttaccaagatttctaccaccaactgagaggacagaatagaatgacccagtggcggaaggactcattcctgctgggcctgagggaagagctggagggaagctggcttcctcaaggactttccagagctgatcctggttctgtagttgacagagcaggagtattaccatcttggacaagcactgtcattttaaaattcaccttgatcagaaaccgcctaaatccaaagggtatcaccctaatggctaaggtcagcatgaccataaaccacaaataacatcttcaaccagaaacgttccaaactcctccctgaccagagacaattatagccccaagataacctccctccagccgggaagatgccagcccccaagata

SEQ ID NO: 38153 - DNA, 1040 bp, Homo sapiens
gtaatgaccagctagattataaaacatgaagtgggaaagttgtggttattttctgacttacttattttgagcaatgctatcatattaagtagatattttagatagtatggacatgtctgaggaacctcctaccttgccggacactgaggatttattcaccttgagcagaggcaggcaggtgtctttctgaattggtggtggctgagtataattgagtttcctacactttaaaaactgtactccggccactgttttgattctcttgtttgactggcctgtttgtattttgggcagtcgctagccaggtgttagacctataatttaccatgtaattctctattgacttgagctctgccgttgtgcactttgtacatcatctaccatctactgcatcatccctgtttgcttcaggctctcccagtgtgactcatcattaaatatccagttggaacctcaacctcttccaggaatgcctcctctggcatcctctacatgtgctgttcttcctcctaaacctccaagggacttgatgcctgtcctcttgttaatcatatgctcttttggaaatgtatttatgtttccctatgaatatggtggccctctggcttcatacatttaaaatgtttgtggtcagggatgatgatgatttaaacaacagtattttggaaagtaggactttttttaaaagtcctctcgcattatcacttagtgtacagcaactattgtagtaaaactacttggcagtgtagcggtaaaatagtttaatcacagtggtacaaagggtgcagggagtatggcactcgtacattgttgatgggagtcctaactggcgcactccctcttaggagatccatttggccctatctgttaaaatgtaaaacgcacaaaccatttgactagcaattcagctttcagaaatttattctaaaaatgcttgcttctgtatgaaaagacataagtatttcctttatagagttactgattttagcaaaatattggaaacaaatgttcatcagtaaggaaacagctaagtaaacatg

SEQ ID NO: 38154 - DNA, 1035 bp, Homo sapiens
gatatactttctctttgcttttcctatatcagcatgaatctatttccagtctgtccctgtctctggtagttgatctctatagcctctacacatacttaacatggttcactgttgttgatctcagttggtgaatctgtaatagcatggaccaaggctgtactggtaataaacatgccttttatataattagtgtcttttgtgtgcaaggcactgtgctggacagaggaaattaggaaaatggatgaaacacaccttctccctgtgaaaacttgtagttctgtgtagtagggcagataagattatatcgttagaacatagtcatgcatataaatgcattttgtgagaacgagctttgtgagatgagaaaagggaactatgtctgtcagttggatcagtagagacttcataaaggagatggtctttgaattgggccttaagtggtcattctcagatgtgtgactagtaattacttggagaggttatttaaaatgtctgttcatagagcatcagagtctggaggtctgggatggagatcaagatatgcatattaaacaaataccctagataattcttacgaatgactcacattcagaccatactttgaaaaccctatctatagcataggttgaatatttttcccaatttttttgggatataattgaagtgtaatgaactgcagatatttaaagtgtccagtttgatcagttattgacatacgtatacaccagtgaaaccatcaccacaatcaagatgataaatgttttcattcccaactgtttctcatgccctttttgtaatctgttcctccacccatccctgtcttcaggcaaccactgatctacctgctgtcattatagattagtttggattttctactattttatataaatggaattgtacagtgtgtattcattatacctggcttctttcactcagcatataatgattttgagatttatccatgttgtgtgtactgtgtatcaatttattcctttttatttggagtagtgttttattgtaaaattctttgtgtgg

SEQ ID NO: 38155 - DNA, 1023 bp, Homo sapiens
ggagatctaacttctagctgtattgccaactagctctgcgacattggacaggtgacttgatggctcttagactgtttcctcatttataaaatgggagcagtagtattagctattcacggagttgttttgaggattgaaagacatgatgcacagaaagcacccggaatgaatgaaggtctcttacatagtaggtgctcacaaacgtttaacaaattatttatgtttttctcataaagcactacagatgtaatgacagttcaatgactttataaagtacaacatgctgcacaaatattttactgtcatttgcttttattttgtctcttgtgttaatggcatacccctctatattatgaaaataccagtttggtttaaagacacagtggacagtgtcatgtgatacaatgacagtgagtgccagcgctatttcagcagcaagaattattggagttcctgtcagaagttcatcttgggccactattggggcctttcaatactccttacgttgtttttctctagctcttgttttctgtttcctccttttttttttctttttttttttttgtggtgtcaagtaggctttgtgaggatggtttaaaatgtagggtatatactcagagtttaaatagtcagtgactacttgtttgagtcaggtttggttttaaaaagtaaaattctatgttttagaaccataataccttcaaagaaagcagcagccctggtgatcataccatccacccatcctttagttcacaaagaaggcggagaacgctcaggaggcctgccaagctcctgtagccgcaggactggaatccgggtctgtactggctgcggcttcacactgcctcgcttctcagcgggctttgaaactctgcgtgtttaggtgtccttgataggttcttattctttttgtatctttctattgctagtaagagcaaattttctgtttgcactgtagagacttatttcctacattttgggaaggtggtcctcctgtggaagggcaaactccattattaggtt

SEQ ID NO: 38156 - DNA, 1030 bp, Homo sapiens
ttctcctgcccagcattccttggcgtggagctcgagggtgacactgggtttgcgtatgcagataagagaaagggaacaagttacaaggtttgattaaagcagcggcccctccgtctggtgaatggctcctagtttacaccacgtagctgatgaaaatgtcacaaagaaatctcgtgagcacactggggaagtgagttgttcctggtaggacacagttggtcctggtttttacaattccagtgcagctcggcagacaaggggcagactcgatgggcatagtgcaggaaaatgggttcttaagggtaaggcgagaggtcccagctacttgtgagtggcttacttttccaaggagtcgataatgatggagaaaaggatgtccagagggtggtccatctagcttggcgccagagcgggagagctgtggaagctcagcaggaaagactgagcgtggggactgtggtctctgcagaaagtgggtggtttctttatggggatacctgctggagtgtgctggtttttaaaaaacaggttactgggaagagcattatccacaacacaacatctatatataccaacacatagcatatgcacactcctctacatgtttatatatacacatcgtttctggtttattttcctcttactcaaaatacattatgtcgcccaattttgttttctcatttaatgtggagctctttatggtggtgttaactgtaattttagctctacattttgtgaggcccgccagtgttgggctggggattaaggagagtgtcatctggatagatggcaagaaggcagcaccgctagatttttataggacaaccaaaggctggggtttggaggggttttttgtttgtttgtttggttggttggttggtttttgctcccttttctatttaaacaaagattttgcctcatttcaaatttttttttagttcagtgattctgtggatatctgcagagtgaaacgttacattatttttcctcaggggtggcagatgagttagtcgaccccttagggaagact

SEQ ID NO: 38157 - DNA, 1111 bp, Homo sapiens
tcaaattctcaagacaactagtctgaatggaagctattcttagcatagtttaagtaaaggagatcaatatagatattcaagattgaaaaatcctaatagttaatagaaaaacaaaattcaaggtccctctaaccttcaaagccgagctgtttcaagtgcttctcaagaaacaaatgtctcttagagaatgtagccagggccctctaaggcaggtgtgctcctgcatcctgtctgtgtggagtccttcttccatgactggaattgtctgagatcttggataccactctgccccacaggcagcttcactcagccagtggctggaccaagtggaggtcggaaattgaaccctgtaccatgtgacccgctttatgcattttacatactgtaattatactgcttgactattttaaataatatttttacttaagtttcatgcttcttgcaataaaaggagaattttttttccttctcaagctataatgtaaaaatgtcagggcagttattatactcataggtgcaaatttgtttaattaaaattacactcaactgttctgacacatttttaagcaactgtgaaaaatagctattatgatctgttggtatgcttccttgagtggctaataattttgttagatcatgatttagttctttttcatcggtaaatatgaaaattaaagttagataaaacgagccataatttcaaactttgtatttgtttatcagttgggcttttgaattaagttttaaaaatcactttttcaccctatgccccaataaaaattcagaaactgtatctgttaaaatgtcccgtaggtgtattctgtggaaaaatagatccaaaaaattcatagcagattataggaggagaatctcttcacaggcgagacgtgctctacaggcgtttcaactctgaatccgaggtctcagattcaaggatatgctacaaatctattttaagttgttctccattcagttgctgacactctagaagggccattccaaactttttgtggtgagatgggaagagtgttcttttttctttttttttaaatgagatgaaattcacatgacataaagttagccattttgaagcgggcaattcagtgatact

SEQ ID NO: 38158 - DNA, 1120 bp, Homo sapiens
gaaagaaatgccaccaacctgcccctccactgccaggagttcaagtcaggagagcagccagcctgactatagaagaactacacagtgcctaaagttccaggaaaccttccagttgcaaggagagagagcagtgctattttaataaatagtacatgatagttttgctgtataccaggcctacacagtgctagacactggaggcaaagacagacaaacagacaaaataattaaaatgtggttaagatcatatccaaatgtaaattaggtccaccactgtggaaaacagtgtggcagttcctcaaagacctaaaaacagaactaacatttgacccagcaatcccattgctggatatacacccaaaggaatataaattgttctattataaagacacatgcacatgtgtattcgttgctattcaaaatagcaaagacatggaatcaacctaaaggatcatcaatggtagacgagataaagaaaatgtggtacatatgcaccgtggaatactatgcaaccatacaaaagaatgcgatcatgtcctttgcagaaacatggacagagctggaggacattatccttagcaaactaacacaggaagagaaaaccgaatattgaatgttctcacgtacaagtgggagctaaatgttgcaaacacatggacacatactggggcctatcggagggtggagggtgggaagagggagaagatcaggaaaaataactaatgggtactaggcttaatacctgggtgacaatataatctgaataccaaacccccatgacacaagtttccctatatgacaaacttgcatatgtacccctgaacttaaaataaaaattaaaaaataaaaataaagattaaatttggctgggcacagtggctcacgcctgtaatcccagccctttggggggccaaggtgggcagatcacaaggtcaggagttcgagaccagcctggccaatatggagaaaccccatcgctactaaaaatacgaaaattagcctggtgtggtggtgcatgcctaaagtcccagctgctcaggaggctgaggcaggagaatcgcttgaacccaggaggtggaggctgcaatgagccgagatcacgccactgcactccagcctg

SEQ ID NO: 38159 - DNA, 1067 bp, Homo sapiens
gcaagcatgcaacacctgttagatctcgttgttctcatctctgtagctcctctcccttctgacccgttcccccagctttcaatgtcagaccacacagattgtgttcagcaaatgaataaatgaccatgaatgaaatgaatgttgggcccatcaagagagaattagagaacttggaaagaagagtggacattctcaatgaggagggagaaaaacagcacagtgccaaggggcggagcccgggagcaagagccctgatccccggacacatcaagctttcctgccatgggtcagccggactccagccccagtcacgagctcctggacagctcctagtgagtctcctcttcgcttccctctttcttttttccaccagagataggtaggaccttttcatatccttcaaaaaaaaaaaaatcaggcatgattcaaatcctgttcttctattcactctgccttcacttcacatcacttccacagttgctgaattcttccttcatgccacatactgtgcaaggctctgaaaatgcaaccaccaggagacagtcctggccccaagcccccggctaggtggtgcccaacccaacctcaccttccacaccaccaccaatggccagacaggtgaagtgaggggttgagcttggattcccttttcccagaaagaggttttgtgtgattttaacttatttgcagataattaacctcagggtcaaaaaatcctacccttctgcctctgcggagattgaaattagatttttgaagagaagcaattgctgtatagaattaaaaacttcttgatgaatactgccatcatgacatggggaggaaatcacagtagcactttctactgtgtaattaaaaaaccaaaaaagcaaagatgaatggaatacccacaagtgaaaatgggatttcgttttcaacagaggaaattggagttctgtcagttacacatggagtgtgtcctgaatcatttcaaattacagcaggaggtcacgtgggccattttctttaatctatgcaataccacggaccaggaaagggaatttttgctctaaaaagatgtgattttt

SEQ ID NO: 38160 - DNA, 1032 bp, Homo sapiens
aagtgcttatctgctaactagagtttaggctcagatttggcagatacattcagatataatattctaacgtagttttatttatcaggaggctcatatattttcctcttcaatacagaaaatagttttttgttttctttttgagacagagtcttgcactatctcccaggctggagtgcaggggtggaatctcagctcactgcaacctccacatcttggattcaagcgattctcccacctcagcctcctgagtagctgggattacaggcgcatgccaccacacctggctaatttttgtatttttagtagaaacagagtttcactatgttggccaggctggtctcaaactcccaacctcatgtgatctgcccgccttggcctcccaaagtgctgggattacaggtgtgagccaccgctcccgcccagaaaataggttattttaaagtcagtttttcctttgctttaggaattttaaatgttttggaggataattttataaaactagtgaacatctcaaacaggttttctatggcttggttagttaaatctgtatgtatttggctaaagtgttctattaaaagtttaaaaccaagtatagtttaaaggaggcttaacttgcgtgtctctgaatttgatttgtatttaaatcatgaaaagaaggtttctgagaaccatttgttcaaaagcttaataaggcttcacaacctcctgtcctggagtgtgattcagtatgagatttagcgtccttttgaaaatagtcagtttttcaccaccaaatttgccaatcccatggtgttttttttaattttttttttttttttttttttttttttttagagacagggtttcaccatgttagccaggctggtctcaaactgctgacctcaggtggtgcactcacctcggcctcccaaagtgatgggattacaagcgtgagccactgcacctggcctcccatggtgttattatttttttaacatttacagatttttattgattcaatacatatttgaatatccactatgcaaggctact

SEQ ID NO: 38161 - DNA, 1057 bp, Homo sapiens
agaagcaatctggattaggaggccagcattctgggctccttttttcccatctgtggaataccaccatcagcaagcctgcatcaagaaccgtttcttgacacttgccctgggtaccagcctctggaaatgcaaggatgggtaaaacatggtccctgccctaaaactcgtcagtgcctcataaccagcaaggacaagtggaggggcctgcaagtgggaagtggttgggaaaagaagaggaagtgatgctctcaaatgtgcagggcttgtcatgtggaggaggatgatgtggggaaggaaaacgtccttctaggcaaaaagcagtttaagtacaggccctggagtatgaaaatatgaggcttagttgaggacagggtagggcaaaaagtggaatgtgactagaggatagggcttaggcgtgttgtattgagttggaatgatgagaagtgttggccctggaaaaatggacgggggctcggtggtggagtctgttgtgagccatcaaatgctttggagcaggactgtgatgtgagcagctctgtggttcagagaactgctaaccctttagaaaatttaagtcggagagaagacaaggtgtttagcaaactgcagtgtgaacttggaatttggtattctctttaacagaataacttcttccctttttttttacaagagatttttcaacccaggatatgtgggctgccttctgaagccttgttaaatgataggggaaaggtgggaacatttattttcagcaaatataattcaacaatgtttagacttccctaattgtgttgtactagttggtacttacttaaggtcattagagattggaattctttagaggagagggactcatttctcaaaaatattgaggatggacactgggagctgaactgggacaatgtattcctcgtaaccacgagtttggtgtgtcagttgggagtgactgcagggtgggataggtgtgagcagagggccagctaatttgctgtcttgatgactctgtgggtgatggctttaggggctggcagcgtctggtggaaatagaatctgttca

SEQ ID NO: 38162 - DNA, 1027 bp, Homo sapiens
agttttatgtgccatctgtatattttcaaaaacatttaacatgatctttatttcaagcttttatagccctttcaagttgctctaggggacttagcaaaacaggtagacagtaagtatggatcaactgagcacaggaaagaatgggatttgggaagatcacattgtttggattttctgctgatactaaagctggatttttactacacaggcagggagaaattactgtcctgtggtggacctggtgagagaggtggcatatgactaagcaagtcagctgacctcaattaaagggctgtgaccatctgtacaatgggaccagtacctcctccaactgttggtctcagctgagtgagattcccatgtctgaggaggtgatcaggggtgatgatgacttttgatggaactgacctcacacaggtttctgggggaaaaaacccaccaaactttattttaagaattctaaaacaattttacaattctgatttgagtagaagtttgatttgaaaagggacttcatctgcaccttctctcttgcctttgtttatagatgtcagtaatgcccgtattttaaaaagttgaaatgagttataaattatatcttaaggattttagtttgttttgaagaattgtttaattggctaggatttctccccccttcagtagcttcagatcccaatggctaggcaatatggagataatagtaaacaggattttgtaagagatgttatttatttatttatttttaaatagagataaggtcttgctatgttgcccaggccggtctcgaactcctgggctccagcaacccgctatcctcagcttcccaaaatgttgggattacaggcatgagccactaccctcagcctgagacattatttgaggaggaggtcatgaatatataattaacttaggagtacaaatgaaaagttttctcttgaacctacctttttgaacagaagaggtgatttttaggtataatggtgtgcaaagtaacaaataacagcctctaaagacatttaaaacaata

SEQ ID NO: 38163 - DNA, 1985 bp, Homo sapiens
ctgttccggtggctaaaggttgcctgctgccaggcgccttgctgagtgtgccctgccttagtctgagacagttcgtggggtcaggcttgacccccagcaggcccgcttcatgagctggcgcctctgcagccatgtgatgggcggagccacgtggggctagcttaccaagccagggcactgacttctgccccaaggccgggcagggaggaccccagcaccggccactctaggaccctagaatgagttcagtgactttacgtggcaccccctctttccactttgagacttacctcacttttgctgcaccacctttggtggtcgcttttctcttaatagtgattcttcattcttcatggggggataacttttctcttctacacatgctgggacccctctccaggaggttctggtggagcatgaaccagtggctggggcattggaagcttcccaggcgatgcaaatacaaagccctaataaagctttcaaaactgcgttagaaacaggtcacttttacatttgtgttggaaacttgtcttgagacaaatgaatacatttgagccactgggatttttggggaaaatacagctaaaagggttaggaaatgatacataaggaaattctcccatctgatgctggctggcttgcttgcttgctgcaaacccgagtgttttctattaagtgaggcattgtggttcctatgctagccctgatgggccttcagcactggcaggtgtaaatgcggctcattaattttttaagaagttggaactctgacagttttcagggatgctgagtagctggtaccagatgtttcttttgttaagggcatggagaggcagtgtcacaggtaatcaggctatggtcgttcactcccttggtctgagactatgcgttttgtggtgctgaatgttttcttaaaccaagaagggtgtggggaggtgcatgttctggtttctagttgggctttcccccgacactggctcttgcagtattatcttaggtagaggtgttgactcaattatcattagacccagctcctgttggaagagagtaaatggtgcttggggcctctttatctagaccgttttgccaccgctgaagtgacagcctgtgcttctaactgaattcagtccttttttttcactccctttctgtggaacaacagcaaagtcggctgctcatcattcgggtgcagactttacagcctctgaacagcctctgcttttgcagtttatgaatgcaccatttgttgttttgagcacaactgttagatacaactggcctctgcagcccactctgccggcgaccagtgtgcatcactgcagcctttttttctttctttttttttttttttttttgcataggccaaatttttgctttaaataccaccattttgtccacactagaatttctttgacccaacttacattttttcaaatgtaagtttcagaaataaggttttaatttgctcaaactgttggtctagggatcctgaataagtgcaagtattttactttattaaagggggaattgtttttgtggcttggttttgcacacttttttttttatattctcaaacatgtgacttccaaattttcctttaaattgggttgaagttagaaagttttattatttcctaagtcattatattttttctttttgagctttatgcacaaataatgttttcagtttagaacttaagatcttaaatgttctcataacaaaaaataaatatatgaggttatagatatgttagcttgatttaaccatttcacaatgtatacatgtatcaaaacctcacctgtacactgtacatatacaattttaatttgtcaactatattataatgtgaaacttaatttttaaaactgaatttaagggaaactgtcaaaaccaaactttacaatgtggtattgaagagtatttataagtaactgtttaatttctcattcttctgctcttgaaacatggtcttatccaaaggt

SEQ ID NO: 38164 - DNA, 1047 bp, Homo sapiens
attttgtgtatttcatgaattttgtagtcttaagttgttaattgaggtgttctggattgtaatgtgttttggtgtgtgtgtgtgacagtgaaggaggtattaatctttgtgagagggtttttttttttttttttttttgaggaaaatatttttaatgtttcattccacagtctggtaagttgtatactgttgacagctcattacctacatgttaaactgcaaaatgttcctagattagtagaactattatttttttttaaaaaaagtagctttgtggttaaattctgatgcccttaaagagatcactttctcctgttttggcaaaacaagttatcagtccacacgtgattacataaataaaattgaaaccctttactcttgctcctccctactcaattaaagtcaagggattccagtagtggtatacacacacacacacacacacacacacacacaaatcctccaatgtatttacttttcacatttttaatacattttagcggactgagctttctaaattattagcaactagtacataatcatgttgcagtaaataatttttttagttagtgagaaacagaccgaaaataggaggttaaaaacagttcatctgttttggtgaatagaagtgaatgagagtagggtagaaattctggctgattttataaaatatctcagatctgtttgataggttgggcttaagactgatgatgtgggcatcctctttataatgaagtcaggctaagcgaagctatgttgaagtatcaaacaaagcctgaaatcccagtggctcaacccataaagtgccgttgcttgttggtgtagaatcctctgcaggtctggcagctctctagtatagctcccttacaagtggtaacccagggatccaggctgctcttgtcttatagctactctgtcattacacatgcttccaggttgccaccacaaggaaagagctagtgggttacatactgactttgaaaggctgcagtctggaagtgatggctggtacttgtgctcacagctcattggccaggactagtcatg

SEQ ID NO: 38165 - DNA, 1033 bp, Homo sapiens
cctggggaagaagaagaggccatggcaacacagcagctgccctgaggtatctaaggcctgtccgtgggaaatgagagccttccactgatgtctctggactcacccaggaaggtcctagctggccgattatagctctatgttaatgagagttctctttgggtgagaggaacatcaattcatccaacttctgaggtcttttgtttgtttttaagaatgtctgactttgtatggacatattactatgtatttttgtggattttgtaaatagatatggggaccaaataacatgaaaatttattttagcaaaacacaagcaggcaagggaaaaagacaagcacaggaggatgtagggtgttactgattcaagggtagggcagttaggaatcatgtctagagtaaaagatttttaaaaggttagtgctggttcatgtggactgccaacacctctctaccccctactggatctgaaagtcaggagaggaggaaggagctgtagaagcagcagagaagggccctcagttttctaagtagacagtcattagcaagagaatgtcatccctcaacccttggcccaggagtttgaggctgcactgagctaggattgcaccactgcactctagcctgggtggtgcagcaagattctatttccaaaaagaaaagaatacatatccttcaggcattataattctagctcaatgcatcattaaggaagtatctgtaccaagaatgcagaagggtctttacccaggaccaagatagaaaaggaactgctctctccaaatactgccaaggaacctgaggtaggagagcagagatggtggtccagcctggagaaccatgaccccatgcctgggtttggagagaagctctgggctgatgagccgtggagattgagagtccaccaaagcgtttgcttataaggaacatgaaaatgaacccctggtactcctggacttcaaattaagattccttaacttctgataaaatttaactatccttatactggctcccttggaataccatgctacagtca

SEQ ID NO: 38166 - DNA, 1078 bp, Homo sapiens
gccagaggctctgcagtccttgagcaaaactggaggtgggaatgttctatgcctgagctgtgggctcctcaccctcttcactttggtagtaactgtgccaccttgggccacagtccaccagagaggaagtgtccaggttcaggttatatccttaagattccagctggtgatccagaacagagttaactgactggcgtggtcttgggagataggctgggtttgggggaagagcatgagctcagagttggtgcacataggtcggctcaagctctgaggctatgggcaggttggcctccctgcacctcagctgccacatctgcaaaatggaaataatgatctgtctaaggttcctactaggccctcaactaagtgttggccccagtccctcctttatgaaaacagcttctttcataaatcccaagaacaaaataattaccattttgtatttctataaatattgtgtcatatgattcaaaagatatagcttgaaatgggctcatgaactgtttacagttgtcaacctctaatttttaatattctcatatcaactgtagaaaagggcgtggattttgttaattaaaattaattttgagtaatttattgaaagggcaggtttgatgctagtttacatctcttatactttctcaactcttagatgctttctttaaaatgagcatttctaaaattggagtgtgaaaaacttgccagcctttcttttttgctcctaatgctgatattgagggatggtgtcctcaaatcataatcactttggaatagaggtgcttagaacaaagctacttgttcccattaactttcacaaggctttaggaggccaagaactaaataatggttgtctgtgattcttaattattattctatttctttcctttttttttttttttttttgagaccggttctcagtctgtctcccaggctagagtgaaatgacatggtcatagctgactgcagccatgacctcttgagagccaataccgtgccactgcactccagcctgggcgacagagcaagactccatctcaacaacaaaaaaggagagtacagctaaaaagagagcaga

SEQ ID NO: 38167 - DNA, 1011 bp, Homo sapiens
ctctttaaatttggtttgagtcttgcttcccacgtttcttaatcccactgtgtgaaaagcagatatttagaaacgtgaaggaactcgacacctttatgtaacagaacaacacatcactttctttagattgttgggggaaccctagggttctaaggaagtgagtttcctgatgtttgaaatttgccaatgcagcctttcaaaaatatgcttagcatagtttaaaaaaaagaaaattcacccttcttgctgattgtgaggaggtcagatatctgtccctcagctgtcacaatggtagacttgatggagttacatgacagagaagagagcccaaggaagcacctgagtggtttctcatctctgggccactctgttaaggcctgtttgttgactttgggattttcatcttattctggagagttaaggtcgccagatgaataaaatactactgttagtgagcactgggggagctaatcccaaaactgtttagccacaaggttaagaagttaaaaaaaaaaaagagacttttggtgtccttgttttccatttctgtaaatcacattgctgataaatttgcctttgggcatgcaccctgcccattttaggtactaggctcagttactggctacagattgcagattcccttttcagggctgatgcttttaacagtgatagttattcctgataagtaccttaactctgctgtgaggtatcaaaactgctggatctatttttggctgcctctttaccattactccctctagagaatgtccataccataacaacatatttacatatttatcacactgcatttctatcccagctcagaattgtgcaactttctttaaaaaaaaaaaaaaaaaaaaaaggatatcctgtcttcttccaaggacatttgctgtcagaagaacagatatctgtgccctgcctaaataggcagactgtgtagcacagacagccattaattcaatgctttttaaaattttagggcctcacggtggctcatgtctgtaa

SEQ ID NO: 38168 - DNA, 1050 bp, Homo sapiens
acattattgggctaattggtgaaatctgaacaagttctataaattagaaaatcatttgtgtcaattgtaaattttctgcttctcatcattgtattgtggttatatataagtgaatgtttttattcttaggaatgatatgctaagatatttgggggttaaaaagccatgttctcaaatgattcagaaaaaaataatatgtatacatagataaatatatgctgaaatatttgggggtagaagggcatggttattctcaagtggttcagaaaaaataatatatacacacagataaatacacacacatctatggagaggggagaagggggataaaagaaacacaacaaaatgttaacaattgggattccgggtaaagggtctcacaggagtggttttgtcccgtttttgcaacttttgcaagtttgaaattatttcagaattgaaataggttatttgatgtctggtttctctgtgtttgcctccttagtcaaaccggcacgatgtccaggcaccagaaccagaacaccatccaggagctgctgcagaactgctccgactgcttgatgcgagcagagctcatcgtgcagcctgtaagctttccctgttcccatcgcttctcccaaagccttggccacacccgactgtcctctggttagcttctgctggccggggcctattcactgacctctttcacgtagtgtttagagacacgctttttcagaacagactacagagagatgtgtgtcttcttaacctatttgtaatgttggtttaacaatgagaaccagctttcagacagttccccgtccccctcccaacaaatgtttacactacagattgccacctttttggaaataaagcaatttatgatttacgtgactttttgatactttcccttctgagaaatgcaacctggcatgtttctgttcctgggttgggatggatcttcatgtgcaccatcaatttagtatgattttttttttcagagaaaatgactatattgagataacaattctatctgagaaacagaaaaatggggaaaaataggcaatg

SEQ ID NO: 38169 - DNA, 1060 bp, Homo sapiens
gctattatagtgcagaaggaggcatagacactgtgtaaatgaatgagtgtgcctgtattccaataaaactttatttacaaatagaagtgggccacatgtggcccttgagctatagtttggtgaccgctgccctagactgccatctttgggccacgctcaaggctgacattagctggtaccactggtatggccatactgcttgttaaaaaacacagaaagttccatatcagttggtaagaatcactgtcttgagccccctaagccctttgcttggatgcctcgaacctccccatgattcagcaatcctccaggaacagggctcggtgtggcaaagggatgccactccagtgctagccccagtgacagttctgattggtcagtatctctgctatttgggtgatacatattttgactaagactcctcatggtgtctatttgtgaaagctgattttaaaatttagttttgaccataccaagagatatatggtgagaaattctctttccaacttttagaaaaatatctgcttgacttagaatgagataaaaactgcttactagctttcatgcaggctcacctatctcttggtgttcatgcatctgtacaactgagctaggctaagacagctgacattttcttgtttcaggcctatatggacactctgcagacgcagtggagttggattcttcagatcaccaagtgcattgatgttcatctgaaagaaaatgctgcctactttcaggtttttatatttagtgataattttgttgttatttaggtcttaatacctaatcttttgagtgtgttttataaagcactgaaaataatcttcaaaatgttgcataaatcctcttcattgattttgagtgcagagtagcatagatttgcaaccttgccatcagtcctacaaatagtttcccgctgccacatacctaaatactttctgcacgaattttttcctttagccacctgtcaaagagatgtttagggatgacaatccttgaaacagaactactagatgaaattgctcattgagttgctgttcattcactgatcactctc

SEQ ID NO: 38170 - DNA, 1038 bp, Homo sapiens
cctggctctagcatgttttccctttgtgcctcttaggattgagcagtactacgaagccatcttggctctgtggaaccagctctacatcaacatgaagagcctggtgtcctggcactactgcatgattgacatagagaagatcagggccatgacaatcgccaaggtatgtcctcagggccacttaggctgcctggagggagggcagcgctgccccccgcagtgcctgtgtccaacagttcaaccttcttgctgtgtagcagtgcttttgtgtctcgtcaagcaagtcagctcagccctccttagaggttctggtctgtccaatagagaacaggagggattagcatatggctgattatgagagaaagaagcaatactaattcaggtggcctgacaagcaagccagaagtgcctgtggaaaagtcatgcactcctgtaagattctggaccctatgctcctttgatgtaatggaaagttaggtcataaaggattaactgggtatcacaaaagtaaaaggtgggatagaattcttggaagagcacccaaagcattacttactctaaatcagttgttttcagatcatggtctgaagaatcctagcaggagagggagatcctttaggagtgacagggatggaagtgaggagaggggcacagaaagtaccttttggggtcccccgagccctttttctctttgtagttggagcagctttgctgggctctgctttacatttagggcttctgaataatatttcgttgaagaaaaatattctgtaggcaaaaaaaaaaaaaaaaaattagcaacccattcctgtggctcttgggaacaatgtctaaaacctaaaagaccttttatatcttaatgagcctgtgatgagtgttgctttgagtcccatctagtgggtggcattttttggccaactcttcttgattgcattgtggggcagtcataaatcccaaatcacttctgcctgtctcctttcagctgaaaacaatgcggcaggaagattacatgaagacgatagccgaccttgagttaca

SEQ ID NO: 38171 - DNA, 1462 bp, Homo sapiens
gcacaggtggcatcatccacccaaccacgggccagaagctgtcacttcaggacgcagtctcccagggtgtgattgaccaagacatggccaccaggctgaagcctgctcagaaagccttcataggcttcgagggtgtgaagggaaagaagaagatgtcagcagcagaggcagtgaaagaaaaatggctcccgtatgaggctggccagcgcttcctggagttccagtacctcacgggaggtcttgttgacccggaagtgcatgggaggataagcaccgaagaagccatccggaaggggttcatagatggccgcgccgcacagaggctgcaagacaccagcagctatgccaaaatcctgacctgccccaaaaccaaattaaaaatatcctataaggatgccataaatcgctccatggtagaagatatcactgggctgcgccttctggaagccgcctccgtgtcgtccaagggcttacccagcccttacaacatgtcttcggctccggggtcccgctccggctcccgctcgggatctcgctccggatctcgctccgggtcccgcagtgggtcccggagaggaagctttgacgccacagggaattcttcctactcttattcctactcatttagcagtagttctattgggcactagtagtcagttgggagtggttgctataccttgacttcatttatatgaatttccactttattaaataatagaaaagaaaatcccggtgcttgcagtagagtgataggacattctatgcttacagaaaatatagccatgattgaaatcaaatagtaaaggctgttctggctttttatcttcttagctcatcttaaataagcagtacacttggatgcagtgcgtctgaagtgctaatcagttgtaacaatagcacaaatcgaacttaggatttgtttcttctcttctgtgtttcgatttttgatcaattctttaattttggaagcctataatacagttttctattcttggagataaaaattaaatggatcactgatattttagtcattctgcttctcatctaaatatttccatattctgtattaggagaaaattaccctcccagcaccagcccccctctcaaacccccaacccaaaaccaagcattttggaatgagtctcctttagtttcagagtgtggattgtataacccatatactcttcgatgtacttgtttggtttggtattaatttgactgtgcatgacagcggcaatcttttctttggtcaaagttttctgtttattttgcttgtcatattcgatgtactttaaggtgtctttatgaagtttgctattctggcaataaacttttagacttttgaagtgtttgtgttttaatttaatatgtttataagcatgtataaacatttagcatatttttatcataggtctaaaaatatttgtttactaaatacctgtgaagaaataccattaaaaaa

SEQ ID NO: 38172 - DNA, 1050 bp, Homo sapiens
ttctgaattcttactagaaggtggtcttttgaagttagtcctttcggtacttctcagatgcctgtcatgtacccgatggagtccttggaaagaaggcctgtgtaaagaggccagcctggaggtcaataacctgttctagtttattctggacattgagtaccaagtagcattggcaaaagtcatcatcatagcattgaaaaaacatgaagttgctaagatgctttttgggtatcctcaaaatagatagtgtttcactttgtcccgtaagaggaaagaattgtcctggaacccatgaaaatgatttctgaagagttcttggctctctgttgaaggacaaggaagtataagcctattcctttggatcaaagagaaactactgaaattcacacatttgtcattagattaacatgacttcactgaatacccaccatgtctagtattgggttaggtactatgaagactgagtagaatttacaagcccccgacaacaaagcattggcaatatgggtggggacagaaacagataaagcaatcagtgggacaactttcaaatgtcagcagtatatattaatacaaattttatagtacagatagaaaataggaaaacatgctaattgtatagaacaaaaatcaagattagattaattattgggggcttttggtacttagggtgaaagtcacctccattctcattgcatgggctatttttcctccacagcactcttttcttccttatttcacctcttcttccttactccctctcctaatttggaggagttgaaattaattttatgcattaaatactgagttcgcgtgccatgcattgtgccagaagccatggagtctgtgctagaaatacatggtgaaaaagagccctcataatccaaaaggaagaagaaaatgtggtaaatgctgtattgggaaaaatgaaggaaattccttatgctagagctgggagactatattagtcacctcaccctgccataacaagatgccacagactgtgagcggcttaaacggaagtgtattttctcacagttctggaagcta

SEQ ID NO: 38173 - DNA, 1046 bp, Homo sapiens
ccttttttccccattaattcaaaaccctttgacgagtaaaaatggccatatattgttatgtatagccgtgttaaaccatggcctcagattcactgcagctctcctcttaatatgtagacaagtagtacctcttttttgttgtaatgcttagttcatagtatgctcttatttgaattctttttgcctctacctaggaacttaatgaggttagactttatcaaatataagtatctggaaagagctactgattttatgttgttctatgaaccagttactactttagaataagttagcaaacaataaaaggattcctttagtagctcatgttctttgtttgcattagtgagtaatgaagtctagaaagaattgttttaaattgctttttttacagttccaatcatttttttatttgagaaaatttgaatctcaaaacaaaaattttcttcaatgtttaatacatcatatcaaggtattgtatttactttttttcactaatgagcagattttagaaaattctgtaactaccggggggcactgctattaacttttttcaattaatttggttaagccactatgcttcctcctcaggaaattaaaatgagtttaatttaatctgtgctttcctggcgtgaggaggtgtgggatttctgctacttaattattttgtggcccctagctctaagtccttgcacaagtgggatatattttgaatattgaccatctagcttgatgtctcatacaaaaagatattttttacacagtttttaatatttccatagtttattttcaaagggactgtaatgcatattacttattaaaagcattttttcccccaactttgatggggaaaagcatatcaacagatacctacttttgtagatggctataaaaattgttacccaaaaggctttcttagagcaaattgtctcttatgattattcctgcctgcctccatgggatctgtctttatattgttggagagaatagcaaacatccataatacattttttttttttttgtggatataacattcaggatagaattgt

SEQ ID NO: 38174 - DNA, 1169 bp, Homo sapiens
accctccaaattccccttattccttgcttctctgacttttcgtgggctacagggacacactgcctctgagtcacactgcttaaagctggctgtcagctaatccttgctagggtgatggtttaacatagtatctccctagggatattgacatttttcgtaaaggattttgaaagatctaaaaaaatcccctaaaaatttttaagagaactcacccagtagtgcaattccaggccccaagacaggctgacacagaactgaaagagaattctaggatgggaattctatcccaagcccctcatattcctatcactgggctccttgtacaagttatagctactgtaggtccacttctggactctatactgatagtgtgaagagaaaaccttttgcgggtaagtagaatccaagcagcaagccatgccacctgccaatgaagcaattctatttcatcttaatccatgtagcaataggaaaggggtatttcatcatcagaggctagaatggggtaaaatctgattgccatgactctgaacataggaaggacagttcatttgaacaaagttattgcgtaccaatgttggattctctatatagggatactagagaattacagatttcctaattgctgtcaatgccatgttaactgccacattacctgactcatctattaaagaatctacagaaagataaacatgacagcgctgcgttttaaagtacgcttatacctactaggttaagtaaattacacactggaagtacaagggaaagtattacatagttgtaaacatccgacttccctgggactgggggaataatttactcatgaaatacatttgaaacaccccgagccttgtaagccagccggactatcaggaagtgtgaatcaacaggataaatttctctctcatagcgcaagtgctggtcatccaaccagctcattgttgtttatgttgactgtttcaaactctttctgggtgaataggctgggatgtgtcaccttctaaatgctaaccgtctgctgcctgggctgctggtgtgcagagtgcctgggtgagcgagctcgtgaacttgcattcactcagggccacagatgccattttctatttgttttctaatgctaaaaatgtcttggcagcctagtcagcatccctgccaatttggtgaccttg

SEQ ID NO: 38175 - DNA, 1049 bp, Homo sapiens
aaaattctgatttgtgtctcagcagagcatgagtgaaccatatcattggtaagagctgattaggccaggagatttcttataatattagccttgcttattctctgagaccagttattttccctccctccttttgaatctatgaattacatttaaatagtccaaagactgagttttgtaaactacaaaattaaggactaaaagtttttacttaattttgatttttattcagattttatttgtagactcccatatcggaataagttaacaacggagaagctgtacattttttagaaagagagggtttttttttaagatcagtttgaggttcacagcaaaactgagcaaaattttgcagagatttcccaggtaccccctgccccacaggtgcacagactcctccattatcacccagcagaatttggtatctttgttgcaattgatgaacttatatggacacatcattgtcacctaaagtctgtagttacatcccggttcactcgtagtgttgcagattctgtggatttggacaaatgtgtaatgatgttatccaccgctatagtatcatgccgaggagttgtgaaactactctgccctacaaatcctctgtggagaagctgtacattaaacaaggaaaaacaagtcaatgaaagtataaaaattcaaaatacgcagagttcggggaaagaattataaaatacctcagttgaagaatattttgtttctggggttttactaaagtggtccctaaggaagtaattttgatagtctatgacaatgtgggatttattttatagtgcttctatgtgttgacaacaaatccatcagaaatctttcttttttctttctttgtttttaagtctaggagtttaaaaatcttttttcctccgcatagtttgactgaggtgtctgtcaccatagtacctagacaatccctcaggcagagatatgagtgattaaatttctccctggcttgtgccctgtttgatccatgctaggcaggatttgggggagtaaaataaagaagcctgaagaatgaacaagaattatag

SEQ ID NO: 38176 - DNA, 1051 bp, Homo sapiens
cagacccaggcctctctgcccccacacccactcctgaaccttctcctgttgtcctcatagatcaggggagggaccctaggaggctgcgtttccagctgctctgctcttctgtggctccagctctctctggtccccatcttatgctagggaccccttggctctcctccctccttcataagagggaacgtggcttcctgcagttgccaatccatgggctgcctcaccacgacctgcttggccgtgtagccctcccgcttctgtgccaccagatccctgcattaaatcccctctgttgtaaactcttgcagaaggttctctgttccaggttggaccctcattgctaaaggctcttaattccctggaacacagttgagaaaccccaggctagataattcccaagacgattctttttaaattttttggtaatgcagcttaatttgacacattgacgtataaggaacagcttaaagtgtacagttcgataaacttagacataggtaggcatggctgcaaccatcatggcagggaagatggtgaacacattctgagctacactttaaagcatctcctgtgctagggaatgaaatcatcactcccaacacacaggaagtgctgtgcaaagtcccatctttcatcgacaccttggctcttcttgcttttctcttacgggctttgtacatccttaagaatggaatttgctgaagatcctcatggcttgttttcttggatcagagaaccatggggtcaaatcttcatagggtcaagcctgctcttggcaactgtgattgacctttaccctatgtctcactttccacattgattttgggaaataataataaaaataggcagacttcttttctaattttggaagcaagtgtctgggggtagttttgcgttgtggtgaccctgtcagcattttgtttctaaagactgtaatttagaagatttgatcctgccggaacacagcacaaagatgcttccctgtgtttctgttttaaatttgggcaatttgggtagggcacaaatccaagaactctaggaaagtagactc

SEQ ID NO: 38177 - DNA, 1025 bp, Homo sapiens
ttggtcattacttcttcaagtcactttttggctttcctctttcgtcacctccttctgggtttcaaattacccataggctggacttctttatatctcacgcttcagtgttttgttttgttttgtttcctctctgtgttgtctcatttgggcaagtttctattgctaagacatcaagttcactaatattttctttttcagtatctaaactgctgttaataccatctaatgcatttttcatttgactaaaagtttcatttacttattttgtgtgtctttcatgtatttccttctcatgctcatgcttttctttgtattcttgagcatatatttatgatttataataccaattgtaaggtcctttccttagtcattctatcacctctgttatttctgagtctgtttttatggattgatttttcttttagttatgagttattttcctacatcttcaaatgctcactaatttttgagcatgcaaagatgctgtgtgctggattttgttatattcctttttaaaaagtgagcacgcaaagatgctgtgtgctggattttgttatattcctttttaaaaagttagattttattcttctgtgcaacgaagtaacttgcagatcaatttgatccttttgaactttgctttcaagctttgttatggtggattcagacaggcctttattttaggattaatttatcccctcctaagacacattcttttaagaactctacctaatactccatatattatgaggtgactacattctggttctccagcacgcaaactttccccagccttgtgtaaactggtaattttttttcctgctgctttcccatagttctttccttgccttggaggttttctttgtacacaagcagttcagaactcagccaaaggttagagaagacccctctgtagatctttggagcgctctctctatgtagcactctcttttccagtatttagccctgaaaatttagatgccttggccttcccaaactccaatctctgtcttctaaactcaatgaga

SEQ ID NO: 38178 - DNA, 1037 bp, Homo sapiens
agactaatttctttcttcttcttttttttttttttttttttttttggagactgaatctcactctgttgcccaggctggagtgcggtggcacaatctcaactcactgcggcctctgcctcccaggttcaagcagttctcctgccttagcctcccaagtagctgggattacaggtgccagccaccatgcctggctaatttttgtatttttagtagagatggggtttcaccacattggccaggctagtctcagaactcctgacctcaggtgatctgcctaccttggcctcccaaagtgctgggattacaggtgtgagccactacacctggcctctttcttaattttatctaagaaagcagaatttcacatcttaatttttatttttcaactttttttttttttttttttttagatacaagatctcgctctgtcacccaggctggagtacagcgattatagcttactgcagcctcgaactcctggcttcaagtaatcctcccaccccagtctcccaaattgctgggattataggaatgagccagtgtacctgaccttcaagtatattttttgaggtggtatgatagactagtgaaattaaaacaggaactgtgaaattataatttatttgttccttttcctaaatacctttgtcagtctgcatgtgaattaaagtaattatttactttatatcagagtagagcaaggaacaccgtctttccaccttgactttgctgctctgggtgactttgggcaagtagtttagctctcttggaccatagttttacttatttatttatttatttgtttctttgagacagagtcttactctgtcacccaggctggagtgcagtggtgcagtctcagctctctgcaaccttcacctcccgggttccagcaattctccctgcctcagcctcccaagtagctgggattacagacgcctgccaccacacccagctaatttttgtatttttagtagagatggggtttcaccatgttagccaggctggtctcaaacttctgacctcaggtgatctgc

SEQ ID NO: 38179 - DNA, 1025 bp, Homo sapiens
tggcggaatagtataatttttaaagatgttttatgcttattgtgctttttataaaagatagcaacaatcttccaatgaggtcattcatttctgttggtacagttagaatgtgtgtctctgggttggtctctttgagtttcttttggcatagagcagtattctcaccctgcatgatcatcagagcacctgagatgcttcgtaaagtgtaggtctgagccccaccacggagatttggatacagtaggttatgaggggggagcgtcgagcttctcaggaaacctagttctcagctgtttttctccagatacaaatctgtaactttttgtatttatcttagggtgaagctttcatactgtgagctcattcaagccagagataatttcttatccaggaaccagttggcaaatcttttgtacctgcagttagtcctacttattttaatttcctgatttgataattccaacagccctgctacgtctgagtctgcttttggtgcttgctgtgtctcttgtgttttttgctcttagtgtgccttgtaatttttgttgagagctggacatgatatcctaggtgaaaggaactgctgtagctaggcctttggtgaagtggaggtaaggtgttgtggaggggaagccctctgtggtctatgattaggtctgggtctctaatgagcctgtgccctggtctcagcttttttctttaatgaccctgtgccctgggctcagtgggtctcaggtttttttctccccgcttgggtgggacaggatggctggagataggtattttccttctcttcctggggaggcaagagcgggcaggaagtgcgcatgtcccttcctccaggtggttttggctctggtttattagtttttcctgagggcaggccttgttaagaagaacggagtgctctggtgtattgcaaaccattccctttcctctcccactgtgaagtatgaaaggatttttctcccacattcacttggaggacctggtccagctcctggaagtaaaacttgtgaaagcat

SEQ ID NO: 38180 - DNA, 1100 bp, Homo sapiens
ggtgcctgtaatcccagctacttgggaggctgaggcagagagaattgcttgaacctgggaggtggaggttgcagtgagccgagattgtgcgattgcactccagcctgggcgacagagcaagcctgcctcaaaaaaaaaaaccaaaaaaacaaaaaaaaacaaacccaaaaaaacccttttagctttcatgcttcaacctcttagggtcatccttgggaaccccacactcccctccctctattttacagaccactctgctctcaatgtgcataaccaaactcattcaggtcctaagccaacagagtggcctccagttaacgagacaccctgtgtcttcttgtcattgttcacggaaaaggcatagtcctgttcgttacttttcttgctttctcacatacagaattatacctgttgggatcttttcgttggtgaattcagaacctgtcttaaaggcccacggcccaatctgtcagtaatgaatttatttatttatgatgaaattataaggactgagggggaccagaccactctagtcaaacagccagaacactctctccctgtagatggggccaaagcaagccaaatcccaaactcaatgccagtttgttgatttacagtgagaatgacaactgccaatgggaccgagtaccatgcctttctgccattgcatcctctccctcagggccagtgctatgggggtaaaattataaccaagagctggttaggcaaaaccagaaccaggatgcaagaatcaatgagacttccaaaatttggatttcttctcagaatccatgaggctaagtctcctctccccctggacaccgcttggggagaacatgtcctgtctttgtctctggacccttctatctaaggtcccatggctggcaggtgacagattcccctcccctagttggtgttcccattctcacatttcttctttagctattttactgaacatttgatctgattactttcatgcttgacaggactgggacccaatctatctccttgtggtgctttaatttgtcttaattgagttcattaggcgttgattttaaaatgcaattttctgagggcaattttctcttatttccagagtc

SEQ ID NO: 38181 - DNA, 1988 bp, Homo sapiens
catggaactcaatccatggcagggtttgggtggctccctcagcctggtggcagagaaaattctcaggttgcttgctctcattcctgctttctgccttccacccaagaaagcatagcaggctggctgtggtggctcacgccggtaatcccaacactctgggaggctgaggagggtggattacttgaggtcaggagtttgagaccatcctgaccaacatgtcgaagccccgtctctactaaaactacaaaaactagctgggcatggtgctgggcacctgtaatcccagctactcagaaggctgaggcaggagaatcacttgaacccctgggaggcagaggttgcagtgagccaagatcgcgccactgcactccagcctgggcgacagagggagactctgtctcaaaacaaaacaaaaattagccaggtgtggtggcacattccttagtcctagctactcgagaggttgaagccccacttgaagccaagaggcggaggttgtagtgagcccagatcgtgccactgcactccagcctggatgacagagtgagactccgtcaaaaaaaagatcaacacaatacattttcctggaccctcagctttccttccttattgaaacaaacatggatattgccttagttcttttttggttgctataacaatgccacaggcttggcaattataaagaaaagaaaattgtttgacttacaattctggaggctgggatgttcaagagcatggcaccatcatctgtttggcatctgatgagggccttcttgttgtattatttcatggcagaaggtggaatggcaagagaacactcaaaggagaaacagagaggaagggggctgaacttactcttttatcaaaaacctactcctgagttcactgacctactcccacaataatggcattaatccattcatgaaggcagatccctcgtgacctaatcacctcttaaaggtcccgcctctcaacagtgttgcgttggggattaagtctccaacacatgaactttgggggacaccttcaaaccatagcagctatattgaggaatacaatggaaattaagatgaatgtttgagataaggcacaaggtgttaacaaaattgtggacttttggctaagctggagatctctaggatatataaattctctctcctttgctccaaggatgatgaccttggtagtgaatgttgaaggtcacagagctgctgaagtggtcctgaatggctgtggagaccaagcttttattttggaaagatacagaacacccatggtgttcaccatgagcttgtgacttaaaaaagaatctcctgcatgctctcaaagcatcatgcagattttggtttttatccataatacatccctgtttattgtaatgtaagaataatgtttgtaattatctcctagtgattaaaataggaggaagatgtgctcattagtctgtgtgtccgcctgcctgttgtcaagtagtcaagggaccgggttcatgtccccagttgtagaatgtggtaaggtcagctctctgattctgttaccctatcccttgcttgcttcccaagtcaaaatttctttttcttccaggcgtctggggtcaggttagttcttcttgattgttggagataaatttgctgatgttcttcatcaactccaatgacttagttcagtatttataatctattttctgtgattccaaaactaaacatttggggtagcaacgaatataccattctctaccttctaagaagaaattatgtttgttttcaaataactttacttcgcactcattctacttacattagaatgaaacagcacttcctctacgtccataccaccctgaatgcacttgatctcgttagaatgaaacagcacttcaagtacactttctgtgcttttctttaattaaaacaactaaaacactagatgatgtttgttttataagcaagagagagagtagaaggtaaattttgcagcacttggaaattgtt

SEQ ID NO: 38182 - DNA, 1032 bp, Homo sapiens
tgcatgtaatcccagaactttggaaggccgaggcgggtggatcacctgaggtcaggagcccaagaccagcctggccaacatggtgaaaccccatctctactgaaaatacaaaaaattagccggatgtggtggctggcccctgtaatcccagctgctcgggaggctgaggcagaagaattgcttgaacccgggaggcggaggttgtagtgagccgagatcgcgccattgcactccagcctggacaacaagagtgaaattccatcgcaaaaaaaaaaagcaagggagactcttcaaacttaaatttcttttaatccttgacttaatatacattttttttatatgtcccccagacagcttctaacttagtaagggatcaatatatatttgttaaatgtgacacagacaattctatttttattttattgttattattatcattattattttgagacagtctcactctgttgcccagactggagtgcagtggtgcagtctcagctcactgcagtgttgatctcggggctcaagccatcctccccgttcagcctcccaagtagctgggactacaggcaccccctaccacacctggctaatttttgtattttttgtagagatggagtttcaacatgttgcccaggctggtctcaaactcctgagctcaagcaatcctcctgccttggcctcccaaagtgctgggattacaggcatgagccactgcgcccagctaacaactcttttttcaatctgtacctcttaacgacttcctagtccacacagtacagtgcatcgtgttgctgtcctttatttgccctaacactatcattaaagctatgtccatggttacttcttgttccctcttattgaatatttagtattcagtagccaagagactgtttatattctgcttaatcctcaccaaatttctgcaaaataagtagtatcgttacttttattaccactttacagataaggaagccaaggcacagaaagattgagtgatgtgctaaagttcacatggccagtaaatgacaa

SEQ ID NO: 38183 - DNA, 1037 bp, Homo sapiens
ttcctgtggggagcagcatcttcccctagcttctgtgccaccctatctctgtctgtcacctctacagtcactgcctctggccccttaaatgttagtgtttttcaggcactgtccttggccctctctgcttctccatcttcatggcaacctcacctcctcccagcgcttcagttggtccttgagctgctgccccttaacccagaattctgtctctggaacttttgactctcctaatggcgctctgaacatcactacctggaagtcccagaagcccctcaaattcagcatgtaggaaacttatttcattgtgacccccatgcctgccactctttctgtgttccctctccagcgaatgacgttgccatgtactcagcttcctaagccagcaaaaagggctttatcttagattccttcctacctgttgtcttatccccagtttcaatggccaaatcacatccattctacctcagtatattttatatccgtctacttatttttatcctttgccaccctttgcctcctacttaagaatcaaaaaccctgtaagacttccttgacctcataagaacaggttagattcttgtatcagtcagagaaacaggaccaattggatggatggatggatggatggatggatggatggatggatggatggaaacttattttaaggaattaatcttgaggctgacaattcaaaatccataactgcgggaggagggtgctaacaattctgaatctgtagggcaggctgtaaactcaggcgggaggtgatgccaaagtgtcgaggtggaatctcttcttacctgggaaacctccgtttttgctctgaaagccttcaactgggtggataacacccacattatcaagggtggtctcctttgcttaaagttaactgattgaggatattaacctcatctataaaacaccttcacagcaacacctagattagtgtttgattacataactggggaccgtacccttgctcagttgacacgtaaaactgaccctcacagttctccctctgggtggatattccc

SEQ ID NO: 38184 - DNA, 1034 bp, Homo sapiens
ctatttgatgggcttgcatcagggagggaggaagacagggcagtcacttgatgaggagggatgggtgctgccatcagcaacaacctatgcaccttctgagcaggtcactgaaaggagaggaaggtggcagtgtccttggatggactgagacttgtcctttgattgtcacctgacagtgaagggtttcctcatcccagagagacattcttaggcaattgccttctttccagatggtgagactgagtaggtctggggcccatctggccttctggcttagagctgaatatgcggtagggaaggagggggtcagacactcatttattcgttcaccgaatgctcatagaatgcctgctccctgcaggtgctgtgggatacaacagatgctaagagagatatggttgctatacagatgaacctttctttccaaggagggagacaaaagcaaatcaacctgggaagaaaaacacttgaagttgtgatgggtgctaggaaggaagcctgcagaggcttgaatgggaaaatagtagactcgggatggggttggccagggcaggtcccttcctcccagggaagagtggcgcaggcagagggagcagcgtacatccacctcaaggtagaaagaccgtgactggctcaagcttggctagagcatccgtggtcaagagcagtgggacaggttggggagggaggtgacggccagatcattgagagttttagcttccttgaaaaaaagtctgggtttggtccaactcaaatccactgaagggtttgagcatagctgtgatgtcatcctagacaccactaccacattaatggtctctgtgggttatgatacaacactcaaatcttaggggattccccactgccttctcgttggcatcagcttgtcttaatctttcatttcttcccatcctgcaccttaagctctaacctaatggcaacctctactccctacacattcacagtctacttcaagcctttgtccatgccactgtctccacctacagaaaactccccaccctgcaaggcctggt

SEQ ID NO: 38185 - DNA, 1040 bp, Homo sapiens
aaaatgctaaatgagaggaaaatgtgcaggaaacaataagggatttgttccagctggatctgacacactaaattggagcattataagagatggaaatgtctagagtgggatgagtgacccgtttagtagtaagcccaaatgtcaagctaaggaattctgatctctcaaggattatcccacactgtaaattgcaggcaaagccatcgggtaggaaattaaagcagaggttaaagtaacttttttttttttaaactctcacttaaaacttacatatttttaaaaattacctcctcttctcattagccatctggccatgcaaactggctttcacactcctttctttctttctttcctttgcttttttctttattattcagtagaggtgctggtttatacatagtgattgtcaggacagagttttcaggcagctctatgactattgggaccagtcgccaaagtccttcatttaaatgaccaatttcacattcagtctggacttcaatggggatgaagattttagaacccgaagacacatgggtaatgctggaagtctttttctctttccctatgaatggaaaattcattcattcatttagcaaacatctggtgtcttttacgtgccagtcacagtgctgggtttgaagaatacacagataaaaatatgctcggtcccttcacatagcttctattctaaacacaaggagagtttgttagtagattatttctacagtgtcatgtatagatgtatagactaccttctgtactggattggtttaaattagatgatttccatgatgggactagaggattttaagaatattttccaacgctttctacaactgatttttttttttcttagtgtattaaaaaacacagccattgcacagaaataatctcccactttccaaccaacctgatgcttgtaaactccctctcaggtcacaccagagggacgaaatcatttatagaaagcaaattactattaaatcctaagcaattttattgttgaaagtttaaccctatttatataatactgtcat

SEQ ID NO: 38186 - DNA, 1048 bp, Homo sapiens
ttttatattccatcaactattactgggattgattctgggatgaaattaagtaactttgaactagttttattctttgtggtctagcttttaagctttgttaggactgtgccagagaagtctttggtctagagtgaatttgacttcactcctaatgcaacaccttctttagtaattaacctaaagccctgtatactaggacatcttcccagattagcttctgggaaaatgaattattcccagacttttttgagcttcatagggttattcctcctactccttacaggtagctctttctttggccttgtgtatatcctcctatcagttcttagccacagtctttagggattcttcttaagatctctggagggagctctttcctcgtctagttccctctcatgttttacctaccctctcaaccccaaatttcagcacttctggtctcccatctgtctcctaggttttggggtcctgcttgggtttctctttcttgtgctgcaacttggaaattctcttcaggcagtaacctgggacaattgtagcactgacctcccgtgtttccctgccattcagtgttaaaaattgttgcatcaaacattttgtctggttttctagttatttaaggcagaaggtaaatgctctcattcttaatccatcctggttggaagtagaagtccttctttgcttcttgcattgtcacttttccccttttggtttcaatttcctccaattaacttctcatttcaattacctttcaattacttgtagtaggtttactgtttatcgatctatctatctatctatctatctatctatctatctatctatctttcctctaatgttttgcttgtgttttgccagagtgaactgttctgttttcagttgtctgataatatctttattaggttaccacttgagtgatattttaggtgagtatacattctagggtttcagttattttatttcatcacttgaaatcatttcattccctggcattataagcagacatctgcttatatgatgtctgctgtcagtctaactagtttttttc

SEQ ID NO: 38187 - DNA, 1048 bp, Homo sapiens
ttgtttaaatagctccacaactttggacatgcttacctctcccagccttttttttcccccattactatctcctaggtttgctgtgacgtaatttatgtagaccagtttgcacaatccttggaaaatgtcttaattatatatttatgacaaatttggatatgacatttgttatacatctgtatgcagggcagctttaaatataaaacttaagcttagtgaattgttaaaaattagtcatatttcacttatgatcatctcctcttggaagctgaagaaagaagatcaagtaataaggatgtttatattttctaagtactatttttaagaagttaaatgttagtttctggtgtcatgaatgaagaattggagcaaatgagaaattccagtatatggcttgcttcggagtgaatggccaaagtattgtgataaagtcgctaacctttgggaggatgtacagccgataagagtcaggccccatttccaatgagcaggccccattcctgatgacaagagttttaagaacatacagtaaaaagattgaactctgatcaaaggccacagctgctacgctccgcatgctgcttgctgggtatggagtcagccctggagctctaacctgattcttcagctttggcaacacaagcatttgaaatgtgggagaaggtggggcctagcatcatcaagtcatagtctgagaggtcttggtcactaccgtgacctccttcaccagctcaccagtctgagggagaagcccaggctgccacaaggccttgtcttacaggcaaataattaattaagatggaaacttatatgtctactgacctccagtgattaggcctctggttcaggagctgagttttgaggacttacttaaattaggaagactatgacagttgtccttcctttctcccaacctccgtcttccccccattgttcctctgggtagcttagaggtcacctgtggaacatttaatggcccttttatttgatattttggtacttatatatgtctatcttctcagataagcttttcctctgacagaaaaga

SEQ ID NO: 38188 - DNA, 1040 bp, Homo sapiens
attactctgaaggtcagaaataggagcaaaatactaatattgtaacccagaagggaaagaggttttaataaatataaaatgtttggcttatgctagttctttatttgtggtagtgagaggtgaagccagcgggacttcctgggtcgagtggggatttggagaacttttctgtctagctagaggattgtaaacacaccaatcggtgctctgggtctagttaggggattataaatgcaccaatcagcactttgtaaaaatgcaacaatcagcactctgtgtctagctaaaggattgtaaatgcaccaatcagcattctctaaaaacgcaccaatcagtgctctgtgtctagctaaaggattataaatgtgccaatcagcactctctaaaaacgcaccaatcagcactccttgtctaggtaaaggattgtaaatgccccagtcagcactctgtaaaaacgcaccaatcagcacactgtgtctagctaaaggattataaacgcatcaatcagcactctgtaaaatggaccaatcagcactctgtaaaatggaccaatcagtgctctgtaaaatggaccactcagtgctctgtaaaatggaccaatcagcaggacgtgggtggggacaaataagggaataaaagctggctagtagcctgcagtggcaactcggtcaggtcaccttctatgcttgtgggggctttgttcttttgctgttcatgataaattttgctgttggttactttttggggctgtgccacttttaagagctgtaacactcaccacgaagagctgtggcttccttcttgaagtcagcgagaccaagaacccgccagaaggaagaaactctagactgggtagtctctttgtttccttctcctaatgaaacactagattcattggagctgatctatcagcatggctctgatgcttatttttttttgttactgtaacagctaaaacacttccttgtaatttaccccaagtggcataataaaaacacagtattactcaaaaggttgaaataggactagatttagccata

SEQ ID NO: 38189 - DNA, 1023 bp, Homo sapiens
aaataaaagacagattcccttttctttaaaaaagaagacagagaaatataagaaaatcagcctgggaaaaaaccacctgggaagctgcttgaaatacaaatactaggcccctccccaggcctactgggcagagactccagcaacctatgttttaacaagcctccctgggagtccaaggcccacactgtaatgtgagagacgcctggtacagacactgctctaccctcttccccaaggcagatttcctccatctgaaagtactaccaagtccagagtaaaaactaacccagttgtagttctgaggtgcaggattcagtctcgcatctgcaaagctcagagtggtgccttcttagatcactagctgacccctttagggaaagcctgtgccagaataatcctctaagcattgttctgacctcctgctggcttcctgtggttttcctctattttgtgtctccaaagtctcatagatgaacttacttaaattatatggtatatagacttaattaatggtaaggaaagtagaattcactagtttaaagggaaagcaataggaatgaatttagtacatattttcagcaagaagcatggtggtgttaagtcagagacatcagtttgaacatattaaaggccattcttttgctctgtcaatctcatggctgttgactctaactttaatgcatagtatcttgaaaatatgtgactataatcaaaatggaaagaaatgaatctacatacatcaacatagatccttatttcctgaaatattcggaacctacatatacttacacacacacacacacacacacacacacaccccgcacccaagcacacaattatttttgtttgttagtatgtggtgttcttttacaaatatattaatgagctatttttaaggttttaaaaatggtttgctttgtaatgggtggcctaaaagtcttagttttacttctctggaaattctgacttttcccttattgctcagttgtggtttttcagcgaggaaagttttgctattttcca

SEQ ID NO: 38190 - DNA, 1026 bp, Homo sapiens
tggatgcacattacgatcatctggggcttctaaaaataactaagccagggcctgtttccctccttggggcaagacctaactattgatatttgtacagcttccaagtgattctcatgtacagccaggggtgtaaaccattgcaggtgcttgttttagatattggcatacaaagcttcataggcttagaattctctttaagtctgtgattttctcagagccagaaggggaagtatagtgatcaaaagaaattagggctcaggaaagtctggtggggaaagcacagagctgtttaaatagaattgtagtgtccagagtaagggaagtgaaagcctcacttctctcccatgtgcttggagtaggatgtagactcttcaggtctggccaccctactatacggggagacattgacacagcagttccaaagagagcagccagggaggtaaaaaggccaatccccacttttttttttttttttttttagagaagaccaagacaaagaaaaaggataattgatttggaaaagacttgaagagggatcggtgtctttacctaattaaaagatttgctcaggaaagagaaattagaccaactctgtcgttttggaagtagaatctagggccagcgggtgggagatgagaacacatggagctgggaataaaacgggcagcttcctcaatggtgagcaaagccaagggaagcagggctggggaagtgctgctgaggaaacctcaaggattggaccggatggcctccgagtcccttcccactctcagagtctgtgatcctaatcaggggactcaacagaaacttaagggaaaccccctgacttctcgactcgatgtatctattggagctggatttttacaccccgtgttagcagtaacagattggcaaagcaatagaaaacaaatgcaccaattcatgtttttcagaaacttaacaaaagttagcccctgaagtcatttctgtgttatgtgtgtggaggaacactgccggaggaccctgaccagctctgccaactctttt

SEQ ID NO: 38191 - DNA, 1057 bp, Homo sapiens
tcagaaaatgtagttgaagtagttgatttggcttcaacttgaattccctatgtaattgcagggaattcaagggactctgaattcaattcagggaattcaaacagacctctttgcctttgagctagttttccccctaggcttttcttagcctgcaaaaatcctggttatctttgaggacccagttgagttggtcttgctcctaaatcattgacaagcccctaccctcaggcagagcagtttgtcctttgtgctccaaatactttttgttgtcactgtagttagggtttgcggtttaatcatctattgctgctgccagaaagcagaatcttggagggtagggagctttatatctttgcgagcctcaaccaacacaaagcttggcgtcagattgaattcaaattcaccttacgttgctagtatgaaaccaattgtgttgttgctttcatacaaatccagcagttttctgctaatgagacctgcaatgtaaaatttaaaaagaaaaaagaaaaaatatccaacaggtttctaccgtccaagtcactgatagaatctacaacagatcgacagagttacagctgtttcctgccccagttttaggcaccataaagattttctagaaggcttgccaatcatcatcatcctgtaagttcttacactgctacgcactaaactaattgcctttccccctcttaaaggtaacaggtttattgaggtataatttacatagggtgaaatttatgacatataatttacataccataaaactcacccacttttgtgtacaatgtaatgatttttagtgcctttacagttatgcaaccatgatccccggctaatgtagaatcattttattactacacaaagaaacctcatgaccacttcccatttccacacccaacccctgcttttctggctctatggatttgccttttctggacatttcatattaaccaaatcatactatatgtgttctttcatgcgtagctccttttacttattgccatgtttttaaggttcatccgtgttatcgcgtgaatcagtacttcactttttatag

SEQ ID NO: 38192 - DNA, 1086 bp, Homo sapiens
gattcaatagccactcattctgcagagggtgatgaagaacggcaaggatttgagagtaggtccgactcgggttccagtcctgcccctcccctgaccggcatctgcctcagcctttgtaaactcacctgcagtggaagcagagctcgtggaagattaatgagaactaactcattgtgagggaagagaaatcccagcactgctcagagggccccgcaggcagcccagccctggttttcatgttgagttgagatgatgatgtgttgttagccatagtccttgtgctgtcttcttgtttgtgaccgtaaaagttatcctggggcagagagaggtgggactgatacagaatgaccacttaacaattttcagtctgttgagccaactagagtgggcagagcagaaataatgccctggttggaagttaatagctttgcctgcccaattatttactggaaggaaatgcctgttcaatataccatttgatatattcaaagataccaaacaaaacaaacctactgctagggccagccactcagaaggcatcacatgctagtctcagtctgttcatctaaaccactgtaaataagtcaggacaaatgatgtacatggttttggggttttgttttatgtatgtatttatttattttttattttttattttttgagatggagttttgctcttgttgcccaggctggagtgcaatggcgtgatctgggctcactgcaacctctgcctcctaggttcaagtgattctcctgcctcatcctccctcgtagctgggattacaggcatgcaccaccccacctggctaattttgtatttttagtagagacagggtttctccatgatggtcaggctggtctcgaactcccaacctcaggtgatctgccctccttggcctcccaaaatgctgggattaccggcatgaaccactgcacccggcctcatttatttatttttggatactgctgttttgaactataaatcatgctgccactcccatctgcagactgctttggctacatcatgttgaaagatttcttgagtttgttttgcattggcacttatcagagctccttattgtagga

SEQ ID NO: 38193 - DNA, 1053 bp, Homo sapiens
gactctgtttcttgttctttcttttgcaggccactatgtacatggtatttgtatctatggaaacggagacttaaagtggctggttaattcaccaagcctgtttgctaacaagtttgagcttaatacctacccccttactgtggaatgcctagaactgaggcatcgcgaaagaaccctcaatcagagtgaaactgcgatacaacccagctggtatttttgagctattcatgagctactcatgactgaagggaaactgcagctgggaagaggagcctgtttttgtgagagacttttgccttcgtaatgttaaccgtttcaggaccacgtttatagcttcaggacctggctacgtaattatacttaaaatatccactggacactgtgaaatacactaacaggatggctgggtagagcaatctgggcactttggccaattttagtcttgctgtttcttgatgctcacctctatattagtttattgttaggatcaatgataaatttaaatgacctcagatctttgcaccagatactcatcatatacaaatgttttagtaaaaaagagaattgtagataatactgtctaggaaaataagaattaggtttctttgaagaaggaatcttttataacaccttaacagtcaccactgtgctcaaccagacagatagtgaaacagctttctgggtaattcaccaatttcctttaaaacataagctacctgaatggagaatacatcttgtttctgagtttcaacactagcatttttggcttactcatggacaaagttctgtatatagtataaagtcattaacaagaaacaggatatgctttaagacagaattcactgtctgttgcttcagtaaaaggacctcggggaataaaacatttctctcttatatgccagaatgtaggctggtccctatgtcatgtcttccattaagaacactaaaaagtccttgcaagaatggagatatgcattcaagagaggtgctatcacatagatctagtctgaagtctggaacactttcctcttctatgacccctctctccccagt

SEQ ID NO: 38194 - DNA, 1044 bp, Homo sapiens
tattgtcacatggcaataagcacagagttcctgagatttcgttattggtgattctctagagcttacgttggtactcatggaaacatacctttactctgttggtttttctttataagacttgtccactgggcgcggtggctcatgcctgcaatcccagcactttgggagggcgaggcaggtggatcacctgaggtcaggggttcaagaccagcctggccaatgtggtgaaaccctgtctctaccaaaattagctgggcatgatggcaagtgcttgtaatcccagctactcaggaggcttaggtgggagaatcgcagttcattgctgtgtatcaactgcttggaatagtgccagacacatagtaggcactcattatttgaaagaataaattcaaataaaaatgtgaatatctgaaaaaataaattaagtctcacatataaagtaaatacactaaagagttaaagatttgtgtaggatctaaaagtcttccttagtccagtctccattactgtgttctagagtgatgatacccagtgttgcctgcccacctccttgctttaccttcctcatcaagtctcaagtcctttgtggtaaactacatgtcattttgtagtttaacatatcatttttccatttataggatccattgatagttttcatgaatcgtggaatgatttatcttttcagaaacagataaatggttccgtgattcatgaaaactaccagtggatagagttggtagaactgtggtgtgactggcattaattgtatgttttcatcttcagcagcaatggactcttgtggctgacttcactcaccatgctcacactgcctccttgtcagcagtagctgtaaatagtcgttttgtggtcactgggagcaaagatgaaacaattcacatttatgacatgaaaaagaagattgagcatggggctctagtgcatcacagtggtaagaaaattgtatcccttaagatgagaacatagaggttttctttacaatttgacttcagttgaacaatttgttgtatctattttatagcagat

SEQ ID NO: 38195 - DNA, 1049 bp, Homo sapiens
cttttttgagaaaggaaggaatatatcctgactgattgtaagtagcataacttccaagatttcctagtgacatatcataaagtttcacagtcagaaggtgaatattttaggcacagtagaataacattgaatactaccccattacttctaaatactatttttcagcatctactatgttttaggcactgagctgcacttgttacagatattcttattccatccatacaacagcccgcttagatcatattagtatccatatcgtgtggctctccaatgttgagtaacttgcctaacttctcacagttagtaagagactgagctggggtctgaactcaaggcccaggggtgttcagttcaccctgaacacgccaggctttctcacgaccccacttcttcacatgggggtgtatttcccactgcgaagcccctatctctgaagtgctctctgtgtctgtcttcattctgtaaaatggttgtaagtggacctattctcgtagggttgttgtagggattgatgagactcttcagagcacgtggcatagaatctgtacgcattaaacgtcagctagcataattgccatcattatcaacaccatcatcatcatcactattggtgaatgctcaatctggcgttagcatagggatgcattgatgaggaaaaatctaaagtctggagaccagtgaggaagtcactgctaagagctgaaatgagggaggatgagggtctgaaccacagcagtggcagagggtgaagaagaagggaactaagcaggttcacggggtggaggtggtagggaaagagggaaatataaactcctaagtttgcagctcaggtgactggggggtgcgttgtccatgaatagcaacataggaggagaatcaggattgggggaaagacatggtacccagaggacattcatgttgtggcaggcagagggcaagtgggcaggcgtggagattggtgatgatcagggtgtggtggttacagagttgtgggctgaaggagccagctcagaggcactgcgaatgtgcagagacctggagtagac

SEQ ID NO: 38196 - DNA, 1080 bp, Homo sapiens
gtgtctcagcctcccgagtagctgggattacaggcacccaccaccatgcttggctaatttttgtatttttagtagagaggggatttcaccatgttggccaggctgtctcaaactcctggcctcaagtgatccgttcaccttggcctcccaaagtgctgagattacaggtgtaagccaccacacccgacccaacatgacattttcatgtcacttgttttgagcgtatattcttggcccaacccttggtgtagcagggaaaacagacacgtgactaagaactcaggaaaacctttgaagttcggaggtatgaagctccacctgaaacgcttatttgtatatgagatacagtaaaatggaaacagtttatcccctgtgcgccagaaagaagtcattgcaaatgtacttggaaaaagaacagtttaaattacttatgattttctgaaatctgtgaaatgtccattcagccttgggccgtgatactagtggtcaaagggagttgtttcaacctgttcttaagagactgaaaacttcttgagcttgttttcttttcactgataattaaattagagtgaacttgagcagtctatgccttttggtcattcacggagagttttctttatctagtgtagaaatcatcactgaggactccactgatttaggaagtcagaactgtctccaggcagttgagcttttgctttccgcgagctggattccttagaaaggtttcatatgtatgagatatataataatatcccttattttgaaaccagaaatactgcacctcaaaagttacccattatcagttctctaaggaaacacttcatcaggcaagtaatttccctttctttataggatataacttccctaataaaacacctacaaatcgaactattataggcaactaccagctgggtgcggtggctcatgcctgtaatcccagcactttgggaggccgaggcgggcggatcacgaggtcaggagtttgagaccagcttggccaacatagtgaaaccccatctctactaaaaacacaaaaattagccaggcatgagacaggagaatcgcttgaacctgggaggc

SEQ ID NO: 38197 - DNA, 1032 bp, Homo sapiens
agtgaaatgtactggttttttttttttttttttttgagacagagtcttgttctgtttccaggctggagtgcagtagggcgatctcagctcactgcagcctccacctcccgggttcaagccattctcctgcctcagcctcctgagtagctgggattacaggcacacaccaccacgcccagctaatttttgtatttttagtagagacggaatttcaccatgttggccaggatggtctcaatctcttgatctcgtgatccacccgccttagcctcccaaagtgctgggattataggcgacagcacccggcaaaatgtaccaatttaaacaaacaaaaaaacaaaaaacacagtgaaaactatctctcatgaacctatgttttgaaaactttcttccatccttgcttttgcagtcagattaaaactctctcagaatttcttttttctttttctctctctctcatgatttcaacaccaaaatttacacacaggtgtctaaagattacaataacaaggatttctgctgctttcaaaagtgtgccccaaccctggtcttgatcccaactcctctcccaccttcctaagctcttcagtccctcactcatcccccttcacctcctgtgttactagttcctcctctgtaagggatcttgctcctctacacgcaaacctgctcggagcactgctgaaatgcttcattccatttctaagctcctcttcacagccatctaagatgaagcagccaaaatgaggcctgccatgtttacagtctgattatcaagaaatatgggcagatttctcattctgtgagtgtcatgatgtgacaacttcctatacaaaaatgttagaataacttattttctctcactttcaagaatcaaagcataatgtcacaaatagaacagttttcaaactgtaggtgaaactatagtcaggaaaatttgacctcgtgaggaagaaaatacagacttcaaggtcaaaagtagattttttttttttttttttttgagacagagtctcactctgtcacccaggc

SEQ ID NO: 38198 - DNA, 1024 bp, Homo sapiens
caggctggtctcaatctcctgaactcaggtgatccacctacctcagcctcccaaagtgctgggattacaggcattgagcctccgcacccagcccaaaatatcttattgcaccgtactgcaggtaaatgaaaccatggaaggtgaaactgcagattcaggggactactgtacccaatttctgtaagacaagaaccaacagaaagccagttttctgatttgtccctttatttagtaaccctatgccatgtaagagttgaaataactgagaggtgtgactttcttgcctagagtggaagaggacttgagtgggcttttcctccagttcatgtatttttaggaaagagtacctatggaatgtgaagacctggaaacggattgcataagagttatccaagcaaaaaaagaattatccaagcatatgtactccttagagattcctcgtgctccaaagtgaagacttccatactatgtcatgccaaatagctacttgtataagttttcctgactcataacacacttgttctttctattcttctgtttcaaagaggaaaacaaaaaaaaaagaaagtatctttccaaaatattcaccaaaacttaacccatcctaacttcaaagtcgaataatgtactaaggatgacctcacttataaaaagtaaaggaactgctagagatattaaacttccagaaaaggctcagaaaatgattgaaaaaagtttagaatagcgaggaggcagttagtgaaatcttaacaccatcagaagaagctgttaacttggcacgtggtgctctacttcctgcaacgaggcatgtcaatttcaaatgggaataatgattgtcattcacaagagcatcgtaaaaatggaacaagatcccctctgatacgttttggacatctgtcctctctaaatctcatgttgaaatgtaatccccagttttgaggtggggcctggcgggaggtgtttggaccatgggagcagatccctcacaaatggcttggtactatccttgcggtaacgagtgagt

SEQ ID NO: 38199 - DNA, 1714 bp, Homo sapiens
aaagttgtaaataatcaaaattataaaattaaaagcaaagtagcaagatagaaataatcaaaagttatagcaacttagggacaagagtacttacttttttgggagtccctaaaacttggcaaattttaaagatttcatcgacctcacttgtccctgggaaaagtggccttaacatatagagttcagccatgatacttccaacagcccacacatcaatgggagaactataaactgaagatctcagtaaaacttcaggggcacgatacctatgaaaatagagaacaaaagaggtaattttgattgcaatttcaaaggtggatgggcagtagcattctacgctgtgtggtcatgcatttccatcaaggaacaggtattcagaccctgttccatctgtgtgtcaggcatttgtacaatgttctggggataataggacacaacacatgttccctgatcacagacaatgagtggggctggagacaaatgtctatgaaatgtccatcaagcctaagacaggaactcaactgaatagatatggaaataagtgccatctgatatattaagaaaaaaagtagaaaaactatgttacaaagcattatattcagcatctattcacaaggaagcacagaaaacaaaagatgaacaggattatatcctgagtagtggagtttttttttatcagtttgaaagtactgatatcctcaactgactcctcttctgtagtcaactatatttattgagtggagttttgctcttgttgcccaggctggagtgcaatggcgcggtcccggctcactgcaacctccgcctcttgggttcaagtgattatcctgcctcagcctcccgagcagcggggattacaggggcacaccaccatgcccagctaatttttgtatttttagtagagacggggtttccccatgttggccaggctggtctcgaactcctgacctcaggtgatcagcctgccttagcctcccgaagtgctgagattacaggcatgagccactgcacccagcctaacaatatttttaattgagaaaaatactcaatttacaagagcaaagtgagctggtgagtccaacacaaagtctgctaaatggaagacactctcaattctctttttttccaaccaaaatgtgtaaatatttcagtccaaatgtttggcatactgtctttttgctttcattgagaatactgcaagccctcaaataaactagttttgttcactgttgtttttgctcaatgttgtttcattgtaatgttgatgagaaagaaaaaaaaagaaaggcatttctggctgggccaatgtgtggggtttgcacattctccccaagtctacaagttttctccaggactccagcttcctcccatatcctagatatgtgcatgtcaggtgaactggggtgcctgtgtggccccaggatgagtgtgtgcatgtgtgtgtcggggggggggtggggagggggcgtgctgccatgggaggctgtcccgtccatggttggtgctcaccttgcacccccagcttccaggacacgctgttgccacctgtgaccctgaactagaataacttggcgaataattatcttccttgtttttattaatgtttctcaaatgtatgtatagcttacatgtatttcaatgttcaatattagtgttttggtcactatttagaagtttggtggccaggcacagtggctcacacctgtaattgcag

SEQ ID NO: 38200 - DNA, 1050 bp, Homo sapiens
ttttgacagcaactattttattttatttatttattttttgagacagagtcttgctctgtcacccaggctggagtgcagtggcatgatctcagctcactgtaatctccgcctcccgggttcaagcaattctcctgcctcagcgtcccaagtagctgggattacaggcatgtgccatgatacccagctaatttttgtatttttggtagagataggttttcaccacgttggccaggctgctcttgaactcctcacctcaagtgatccgcctgccttggcctcccaaagtgctgggattgcaggcgtgagccaccacgcccggccaaacaactattttaaaatatctatttcttgaagtattacatctgagatgcttagcagcaagaattatgtggctttcgtaaaaacgtctaatcatccttataggctggtttcccaaattactatgtagccaactctacagtcaactgttgattattcatgttatttctttcagtcacaatttttaaatcgtaatcgaacttcctccttcaatcccttatgcttcagacgttgctgacagcataaatcaacccaggcaaatgtcaagtgttaccatgctgaccagagtttaaaacaattaaaaatcaggaatccattatgaataattaaaatagcagatgtcccttatttccatataattaatacattactgctgtttgccaataaagtgtagtatatcattacaggatttagacttttaaaagaccccaatagtttacatatggtgcaaataaaaagtttttttttaatgttcttaaaacattctaaacataccctttttataagtttaagaagtgttcttaaaatatttatatggaatcctgcatagcatttttggaaggcaaataattcctgtagcagttaagaaaataaaaaaaacaaaatataaactacaggaggaggatgggtgtgatggctcctgcctgtaatcccagcacttccggaggctgaggttggaggatcacttgagtccaggagttcaagaccagcctgggaaaaatggcgaaacct

SEQ ID NO: 38201 - DNA, 1048 bp, Homo sapiens
tgggaggccaaggtgggtggaggtcaggagttcgagagcagcctcgccaacatggtgaaacctcatctctactacaaatacaaaaattagctggcgtgatggcacatgcctgtaatcccagctactcaggaggctgaggcagaaaaatcgcttgaacccggagggtggaggttgcagtgagctgagattacaccacttcactccagcctgggtgaaagagcgagactccatctcaaaaaaaaaaaaaataaagaaagaaatatatatgagagccacttgtgtacttaacatcatttttctagcagccatgttaaaataaatcaaacaggtaaaattaatttttaacaatatatttaatttaacctaatatatgccaaatattatttcaacatgtaatcagtataaaaatgagctgactgtaccactgtactccagcttgggtgacacagcaagactatgcctctaaaacaatgtttttttaattatttatttttaaaattttacctttttaatttttattttttgaaaaagagatgcgggctgggtgcggtggctcccccctgtaatcccagcactctgggaggccaaggcaggtggatcccttgagttcaggagttcaagaccagcctgggaaacatggtgagaccctgtctctactaaaaatacaaaaattagccaggcatggtggcacgtgcctgcagtcccagctacttggggcaccgaggcaggggaattgctggagcccaagaggtcgaggctacagtgagccatgtttgcaccactgcactctggccctccagccaaggtgaaagagcaagaccctgtctctgaaaaaaaagagagacacatggtctcgctatgttgcctaggctggtctcaaactcctggggctcaagcaatcctcccgccttggcctctcaaagtgctgagattacaagcatgagccatcaagcttggagtaaaaattattaataaatttgttttgtaacaagttttcaaaatctgatgtgcaatttattttacatttacaacactcttcaatgcaaac

SEQ ID NO: 38202 - DNA, 1036 bp, Homo sapiens
ttcaactgtgtcccccaaaactcctatattgaagtcctagcccccagactttcacggtgtgacagtatctgaagatagggtctttaaaaaggtaattaagtttaagtgaggtctttcaggtaggcccaaatctgatatgactggtgtccttataagaggagcctgggcaacatggcaagaccccatcactccaaaaaaattttttaaaaattagccacatgttgtggtacacgcctacagtcccaactactctggaggctgaggcaggaggatggttcaagcccaggaggctgaggctatagtgagctatgtttgtaccaccgtacctcagcctgggcgacagaatggaaccctgtcttgaaaaaaaagaggggggaaatgtggacacagacatgcacaacgagaagatcatataaagacctagagaggatatggctgtctacaagccaaggagagaggcctcagaagaaacaaccagcagataccttgatgttgcacttcttgcctccagaactgtgaggaaataaatctctgttgtttaagccaaccagtctgtgatactttgttacagcagccctagcaaaccaagagtgagccaccttggaagtagatcctgcagtcccagtcaagccttcggatgactgaaacttcggccaattatctgactgccatcagagaacccaagccagaactacccagctaagctacttctaaattcctgacccacagaaactatgtgaattaataaatgtttcttcttattttaaatcactaagctttgcaggtattttgttatgcagcaatagataaacacagtggattaaaaacaaacaaattaacaacaattctatttcataagttcaggaatataacatatatcattcagaactcaatttgacattatgaataccatctgattttgagaccttgttttaaagaaataataagccctactctgcactcaactttaaatgtgaaaaacaggtcaggaatggtggctcacacctgtaattccagcactttgggaggccaaggt

SEQ ID NO: 38203 - DNA, 1046 bp, Homo sapiens
ttcaagcaattctcctgcctcagcctcctgagtagctgggatcacaggaacccagcaccacgccggactaatttttgtatttttagtagagacgaagtttcaccacgttagccaggctggtcttgaactcctgacctcaggtgatcagcctgtcttggccttccaaagtgctgggattacaggcgtgagccaccgcgtctggccttttttttttttttttttccttgaggcagagtctcgctctgtcgcccaggctggagtgcagtggcaccatctcggctcattgcaacttccacctcccgggttcaagcaattctcctgcctcagcctcctgagtagctgggattacaggcaactgccaccacgcctggctaatttttagttgtaattttagttgtgacgaggtttcaccatgttggccaggctggtctcgaactgacctcaagtgatccacccacctagattacaggcgtcagtgatcacacccagccattgagctcttattaatacctaatgacttgtgagcaattttaacaatgaacagctaagtaaatactaaagaaaatattaaagcatatcaggtaattttttctttactgatccactttattatttcactttataagtaatacataacaacataatattagaagacataataaaaatcacatatctcaccactgctaacattttggtgtatgccatttaaaagtttgaaataaacttgttaattttagaatagttttagatttacagaaaaattccaaagatagtacagagaattgccctatatcctgcagccagtttccccattgtcaagcatcttacattcctatgctacatttgtcacaacaaatgaagcaatatcaatacattatcattaactaaagtccatactttattcagatttccttagtatctgaataaattgccttatgtccaatttctgttccagtagctcacctagaatattacattatgtttacttgtctttatggaggtttctcaaaaaaaaattacactgggcacggtggctcacacctgta

SEQ ID NO: 38204 - DNA, 1037 bp, Homo sapiens
tgctctgattggatgccctgccctccagatgaaccagtcactatgaaaggataaatgggccacctctgcctagtttaagccagtctagatttacccctggaactgatcggtctcacccaaatagcacaattgctccgtaacagaggagtggggaaggatggtggggaggccaccaaaaagtccattacagttactttctgttccctctttgtaagattatctgtcacatctttgtttttatcttcatatgcatcttttcctcgctcactttcccccctgcattttgacagcagttctcaagttcttcttagaagaagaattacctggcttgaaatatcaatattgccaaagttgaaaaagtctgctgtaataaaagtatcagagaattaattttcctgagctaaagtaagatttggtttcaaaaaagtcaccaagaaccatggaaaataaacgcgtgtatgcgtgtgtgcacatgctcacaacccttaataccagaagacaatgcaacaggattgtaagaggcacagcctgcaaagtgggttatattgtagaaaagccagaacgacatccttagtgaaaagctctgaccgtgtgtaggagtcattttcttactcttccaaacataaatttgatgctttgaaattatactttcagggaaaattcagatgttggattccttcctacttagcttaggattcctggtgacagaaaagactgtaaatcatttgcttcaacaggaggtgagttgcaagtaacaaaacaggtaatagtggttccagaaacctaaaagaagatcgtacataggtctctgttttctttcttctccatgaatgtcttctcaattccaaaaagggcttgaagacttttaactgcattttgcacgctgtccctcgagaagagagaaaaaaattccctttgtcagaaggcatgtgtcatcttatgtaagtgactttgtataagttacgtgctgtagtaagggtaaaatctctcatgagtgtatggcttcagtctgtgttctacttagacctgattatgtc

SEQ ID NO: 38205 - DNA, 1059 bp, Homo sapiens
tgtagaccagatgaatctaactaacatatacagaacattccatctaacagcagtggaacacttattcttctccagtgtacagtgcgcatgggacattctccagaattgatcatatgttgggctacaaaatacatcttaacaaatttgaaaagattgagataatctcagatgtcttttctgatcacagcagtatgaaactagaaataatagcaggaggaagattggaaaattcacaaatacatggaaattaaacaacacactcccgaataaccaatggatcaaataaattaaaagggaaattaaaaaatcttgagataaatgaaaatggaaacataccaaaatttacaggatgcagcaagagcagtgttaaaaggggagtttattagcaataaatacctaccttaagaaaaaaggaaaatcccaagtaacttcacccctcaagaaactgaaaaaagaagaaactaaacccaaagtcagcttaacgaagaaaataacaaatattaaggcataaataaatgaagtaggcactagaaagacaatagaaatgttcaatgaaactaagagtttgtgtttggaaagaatgaaattgacagacctttagctagactaaccaagagaaagagaggactcaaaaaaaactgttaatgaaaaaggagacactacaactgataccacagaactacaaaggatcataagccattacaacaaacaaattatacaccaacaaattggataacctagaagaaatgggtgagtttctagaaacatgcgacctaccaagactgaatataaagaaatagaaaagctgaacagacccataatgagtaaggagatcaaatcagtaatcaaacctcccaacggagagtagcccagggccagacggtttcactggtgaactctaccaagtatttaaagaaaaattaatgccaatccttttcaaactcttccaaaaaactgaggtggacagaacacttccaaacccattttatgaggccagcattaccctcttgtcaaagccagataagaatgctacaagaaaagaaaattacaggccaatgt

SEQ ID NO: 38206 - DNA, 1044 bp, Homo sapiens
tggatttgctggttttttcttctggttctgttcaatttttgctccctataaatcttttttctaaataataagtctttaggccaggcgtggtggctcacacctgtaatcccagcactttgggaggccaaggtgggtggatcacctgcggtcaggagttcaagaccagcctgaccaacatggggaaacactgtctctactaaaaatacaaaaattaaccaggtgtgatggtgcatgcctgtaatcccagctacttgggaggctgaggcaagagaatcacttaaacccaggaggcggaggttgcggtgagccaagatcgtgccatggcactccagcctgggtaacagagtgagactccatcttaaaaaaaaaaaaaaaaaaaaaaaaagagtaagtctttagataaaagtaaaatatttaccttattgtatatttgccttatggcatattaaaactcttatcattatgaagtgatgacccctgtatctagtcatgtttttgtcttgaagtctgtttatttcgtttagaatttgcatggtataatttctaaaagtcttttcatgactgacatatgtgtatgtgtttcataatgttatatatataacttgtaaacagcctgtatttggacttccttgcccctcatttcatagtatgtcttttaactggagtatttagtccatttacatttcatgtactttcccccatatttggattatatctaccaatttgttttgtgctttctgtgtgccccaaccattctgttttctttctctcattcttttcattttgcataagtatttttattgtattttttacctctactcatttgtagttatatactctatttcttttttcatttactgattaacttagaaatcataatgtgtcatttctaagcctaaatttaatctagtgttacttttccataacgtgtaaatttctaagcctaaatttaatttagtgttaatctagtgttacttttacataatgtgtaaatttctaagcctaaatttaatttagtgttacttttcctccagattatataga

SEQ ID NO: 38207 - DNA, 1016 bp, Homo sapiens
tgtttatttttgaggtgttctgtgtatgtagttttaactctgttatgaaaatgttgaaacgtgctagtgaaaagtggcatacagttaccatggaaacaaaactgagccaaggacatcacttagtacctgcagcctctcctgatgaagtgctggttcttgtgcaggagcctgtgctctctggagagccatgcctttggtaaaggtaaagaacttcacgagcactgccacttcgaagaaggtttctaaaagtctagtgatttccatgtccctgaagccatccaactggatgatcccttgttagtaggttcacaaattccgcataattcattcaaagggtgaccaggttatttacacgatgttcctggatttctctctttggtggatgtaactagtgtctgtgctgacagatgccttgctttgccccaggtatgcatgggggtggaacattgaaattcaaggacaaactttgggctattgctacaaatttgccaccaagaaaaaaaaaaaaagttccagaaggggcagaacaggtagtaaggaaaagaaacgtggtgattgttgatcagtgcctaattgaggctaggtggaatcctttttaagtggtttcttttggccctgactgcggtatagacaccacagaagatgcaagcatgaatgttgtttgccttgaggctgaaagaaaaggatagagttgtaattgggttctttttttttatttttaaaaatctttgcccttgaaatgacgggatccccccagaaaatatccatccaaacccttcaaacaaatggacacacctaagtctaagtgcaatgagaagaaaagaggtactagctcctataagatgcctctcacagataagagtatttcttaatgtgtttcttttctttttttattacagagaggccagatactggctgtttcttttctaagttctgcagaatgggaatgtgatctctaatgaatttttcagtttatgaaagtactattatagaatactaattagggtgtcccatga

SEQ ID NO: 38208 - DNA, 1030 bp, Homo sapiens
aggtatgttcagcctgttcagtggttaatacacaaacgtgtttaatggaggcaacccattaaaagatacattttttgaaggaagatagaaaaatggcaagtaaacaaaacaatgacaacaagtgctttgagagatatcaacaaggtgctttggcagagaacagtggtatgaagtgtcagcttaagacacttcaaggtctctctgaggaaatgacatttaagatgaggtttcaagaataagaagaaactagacttgtggtttaaagtaacagggtcaggtatggtcatctttgagaaacagtgagtaagggaagcagttatttgaagtgaattgggaggatggtagactctcaacgaggtaagacttcattgtccatgttgaggagtttgaattttatactaagggttagagaaaatatatgtggtttttggtgaagccattgattatcctaatctaggaatagattaggataatataatctgatttatattttaagaaaattactctagatgctatgttaagaattgatgggaggaatgaagactggatgaggagagtccaaccagaaggcgtttggtgtccaagttggtggttctaagcaggaggatagcagtggaggtggtgagaaatagatttcagatatattttggagctggagttaataaattgctgatagctgcaagcagtaggtaaaggaagaagaatgaagtcagtcttctaggtttttgtcttttgcagtgagatggatggtgttgccagttagataaggaagactcagggtgggaagaatatgtgggtcaaacaggaactacagtttatttaacattttaactggcagatgtctgtgcacatccaagtcttgacaggaacctggagtaactgggcaattttccaggaaaatacagtttaacaaaatggacttctaaatagatgggaaaccttagcagacaaatcttcatagaagagagagacaaagttgtcagagaagtaccctacaaatatgtgtatgatccagattacattacagagg

SEQ ID NO: 38209 - DNA, 1031 bp, Homo sapiens
taatagctctaagatttgaggcccatatttaatttgagtatctggagctgttaggtacaccctctccttccagatagctgtgtgagtgtgaagaaccagaaacgtgtatttggaatttgtatatactccttttctttcccctagtttagggctttcgtcagcacagtgagtttggctaattgcacagaggtccccggggacagagctttaacctctgtaatttgttgaagggacattgtaccatactctgcatatctagctctatccctgacaaagctattcccacctgaaaaccgtatgtcatgtggattatctaggagctgatcttttaaatcttcctggctggcataaatttggttaagtatctcacaacacaaatgtggtgttatggtctcctggtagtggcagtaaggaaactgagttaagggtggaacactgctcaactgttacctatgggttttctaacaacaagacttggtactttaggagtctgttttcagacacgttgtattctctgtctgcaaggaagtttggtgtttggactagatgttggattcccagttctcttgttggggagcagattaacaggtcatccatgtattgtaggagacactctctcctctcaagacttaggtcctgcaaatctctagccagggcttgcccagaccaatggggactgtctctgaaaccctgttgaagcactgtgcaggtgagctgttgactccttccttttcattctcccactcaaatgcaaatagaaattgggaggatgggtcgagggggagatacaaaagaaagagtctttaaggtctaagactggaaaccactgagcatctggaggttggggaagaattacatatgagttggggatcattgggtgtattgggactactgcctcatttatgattctcaggtcctggactagcctgtatttttcattgctctttttaacaggtaagatggggtgttatagggtattaataatccatgtttttgaaatttttcagtcagaagctgaaatccctctttgg

SEQ ID NO: 38210 - DNA, 1020 bp, Homo sapiens
tggagtctggactccagtgggtccactgggaccactaaacctcctgaatggggcataacttaaggaggtggtgtccagaggatggccctgggtagggaggagaaggcttctgggagacttcgatataattgggtagaaggggcaatggggcttgagctctgggtaaacctgatgaggggccttctgaaccaatgggaaggggctgcatgactatggccatggatctgttttacaagcccaacaaaggtcagggttgtttcttagggccatgaaggccagcacataggggatttctgtccattttccctggtggtagcaaaacaaatctagttgatggatcatatttaaatttgtgcttctattttctggccaagattcctggtcctagagcttttattcaacccaggctgtattacagaaaaatattagccttttcctttttagggtttgggagtcaaacttttcccagttcttgaggatgtatcctagtagtgtgtcctgtggtacagagacttgattacctgtccacagagagaacagaggagagaagagaaaaagaaggcaacccctccaatttccctactgtctttttcctgaacttacagcagaccagagtgggtagggcattaccccattcatccatttttcctttgcgtatggcagtgtcccccattcattctaggggttccagaatgaaccagtgcttaccaggtacccctaaccttggtcccatcttgttttattgaggcacaattacccgtttgtaaagaaagaacagaggcgagaagagggcatctccccttgttctcttaatcctgtgcctatggcagactacagtgaacagggtgccctcccactcatccaaggggttctggaatgaacccagtgtttactgggtacccctaccctgatcccatcccatttctggaccagccttcatctgtgttgcagtggtaatctgttttgtgtttgtagcctggaactagtcttcatctctgttctatgggtactttggtctct

SEQ ID NO: 38211 - DNA, 1010 bp, Homo sapiens
tttcttttggatgtataaaccaacagtagaactgctggatcatatggtaaatctgtttttagttttttgaggaacttaaatgttcttggtggctgtgtcaaaaatcagttaatacatggatttatttctggattccctattgtgttccgtttgtctatgtgtctgtttttttattagtgccatgctgtgttggttgctctagctttttggtatatttttaattcaggtagtgtgatgcctcctagttgttattattgtcatatctaacatagcagttgaatagcttattggcagttgtatctggcacagtaatacctttcttagtttattctttgctcagtcatacttttcctggtatgtattccttggggctttaataatggttttttccctcaaaacagatgtgtcatgtgtcgttttcccattgagactacctggcatttttagtctcatcctttgttcagactatgaacactctttgataaacagcctgtggtagaagtatcagatcttactagtcctaagtattatgatatggaaacaccctgtcttcctgtcctcctcctgtctgtccccaaaattacacctctgtaagaacttagtcattttacttggaggacaacttgttgaactttcctcaatttagtgaatttactgcaattcttatctaaactacaatttatctctttcctttgtactcccaacctatcattacagtagtcattgtaaaaaaaaaaaaaaaacaacaacaacaacaacaactgggtgtttattctttttggctgcccagtagatgagctccctagttatattaggggaattccatacctcacagtgttttgtgagaaacagtgtaactactacatgttttcccccagccctcacacagcctatacccagacagaattgggagaaaaatgcatactgttcaagcttacctctctccagatttgaggataaaaattacagcagtgtggaattggagtggctcagctggccagggtggggag

SEQ ID NO: 38212 - DNA, 1063 bp, Homo sapiens
gagtccagaaataaactgtaacatttatggccaattgttttttgacaaaggtgccaagataatataatagtgggggaaaataatcttttcaacaaatgatcctggaacagcttgatttcctcatgcaaaaggatgaatttggacccctctcttataccaaaattaacaaaactggattgaagacttacatctaagagcaaaactataaactcttagaagaactacatagatgtaaatcttcatgacgtaggattggtcagtggtttcctagatatgccatccaaagtacaagcaaacaaaggaaaaaatgatgcgttaggcttccttaaaatcaaaaacttaggtgcttcaaaggactttttcaagacagtgaaaagccggcccacagaatgggagaaaatatttgcaaatcatatacctgataagcatctaatagctagaatatactaagaactcttacaactcaataataaaaagacaagcaactaaatttaaaaaatgagcaaaagaaatgaatagatatttctccaaagaagataacagatggctaataagaacatgaaaagatgtttaacatcattagtcatgagggaaatgcaaatcaaagcttcgtgatataccatcatgcctgctaggagtcctgtaataaaaaagatggacaataaaaagtgttggcgaggatgtagagaaattggaacctcatacattgcaggtgggaatgtaaagtgttgaagctgctttgcagtttcacaagtgtttaaacacagagttaccatatgacccagcaattcccttctagatagatacacccgagataaatgaaaacatatgtccatggagaaacttgtacacaaatattcattgcagtcaaaaagtggcaactttgtttcttataatagccaaaagtagaaacttctaaatgtctatcaattgatgaatccttaaacagaatgtaatatatacataaaattgaatattattcaaccataaaaagaaatgaagtactgatgcttacaacacaatggacacaccttggaaacatgggctgagtttgaaaaaccag

SEQ ID NO: 38213 - DNA, 1029 bp, Homo sapiens
gcattaaaggacacacagacacacacacacacatatagtgttagagctacattattacatttaccttattgttttcttcccatgctgtattcaacaccctcaaggttgttttgttaacctgtttgccacagatcatgtttcacatttttgttagtattaaccaccaggaagattgaagaaactcatcaaagccaagtaaaaagatggaggagtttctttgagaatgcaattgagaaagaaaaccatgaatttcattggctggggcaagttgtgacttctccaggagtgctcagctgccaagaatgtaggatgggaagaagtggattgtgctagggttggattttgcaaggcaggtgtgtctgaagggcagggtcattagagattgctggagattggccctggaatttgggctgcgtcatgagagaagttggatcagtaaggcactggtaaactggatgaaaggaaagggatagggaattgaagataaaatgaatgtgacgtgtatgataagtttgggatggaaattaggtgaagtagttctgagtgatgacactaaatacagccatagaaaaggggaatctgagaacagtgactcattttaagcatatgatgtgagcctcagaatggccactaatattttccacatgatggctacagttggaatggagaaggtaactatgacttgggggccatgtcagggacttggaagacttatcttaaggtctgttatgtctggtggctcttaaaaggaggagggaacttcctgaaaatggaagaggaatgttctgggggagcttcgagaatgctctttcctcatcctggcctcccaccccctgggcatctctacaagtgcattagtttatcttgtgtaagtaattcagctggattgtaagaatgatgctgtttacaaagaactttgtgggggttagaggaggaaggagggaaggacagcaaaagcttcactaagaatcttgaagaaaggagttggagttttccaagtagaggatgaggattctagataaaagaatg

SEQ ID NO: 38214 - DNA, 1061 bp, Homo sapiens
gggggtggaataagaagagacccaaggtgacactgctgtggtttgaatgtttttgttccctccaaaaattcatgtgttggaaactttatgcaatagggttgggaggtggggcctaatgggaggtgttcaggtcatgagggccctgatctcatgaatggattaatgtcactataaaaaaggctttcaggcatgggatcccttttttttattttttgagatggagtctcactctgtctcccaggctggagagcagtggcacgatcttggctcactgcaacctctgcctcccgggttcaagcgattctcctgcctcggcctcccgagtaactgggattacaggtgccctccaccatgccccgctaatttttgtatttttagtagagacagggtttcaccacattggccaggctggtctcgaactcctgacctcaggtgatccgcaggtgtgggctctcttttcttccatatgaggacacagtgttcttcctctgcggaggatatagcaaggagatgccatcttggaaccagagaccgaacctgccagcaccttgatcttggacttctcagcctccagaattgtgagaaataaatttctgtcctttataaatcacccagtctcaggtattctgttatagcagcacaaaaagaactaaggctgttaacagtgtggatatttgtccccgctaaacctcatgttgacatttgattcccagtgttggtggtggggcctagcaggaagtgtttggatcataggggaagatccctcacgaaaggcttggtgccattctctcagtagcgagtgagttcttgctgtattagttcccaagagagctagttgttaaataaagcctggcagttcctccccaacccctgcttcctcttctccatgcaatcctgcacatgcaggctccccttcaccttctgccatgaatggaagcagcctgagttcctcaccagatgtccagtcttccagccagtcaagtcaagagccaaataaacctttttttaaaaagaaagaaaaaaaaaaaaagaggctgggggcagtggctcacgcctgtaat

SEQ ID NO: 38215 - DNA, 1047 bp, Homo sapiens
ttctcttacagaaccaccgagtatttatccacttgagtaaatttaacattgatttaatttattcaatggtagtctgtatttccatgatgacagttgacccaataatgccctttcttatttcctctgggatgggatccagtctagggcccgacatttggatctagttgtcatgtctgtctggcctcctttaatcagaaacattcccacagccttcctttatctttcataacaatgacaggcagcagaataagtttccctgtgccttttaaagacagaacaaatgttcttcattgtgtttgtctgatgtttcctcacgatgaggcgagaaaatgaaatactgcgtaagtgatcctgcatccgtctcaaaaaaggtctcatttctggagacactgatgtccttctcacctcattggcggtgttgattttgatcattcctcccctccagggcgttgactgatttccccatggtgtaaattactagttttcctttgcatctaataagcagcctgtggggagcctgaaatatgtttcttgccaggtggaggcacggtcataaggagcagtgtgtgtgtgtgaggatggagagaagcccttcccttctaggggaacgtgaggagagtggagggtgcacttcctccacctgcagctggaaagtctgtgcgcctttcagtgatgaagcttacagatggatgttgcagggctttgggtagggcctggaccaggctccaggtagagtatttcgggcttggatgttttcaggcaccaataagtcaagcttgcattgatgatattacaaagtggcagaggtgcctcctgaatgaaaaagaaatggaatcctaaccctgacttctgtctttgagggtcaaacatataaaaacatgtctgatgccggatttctgggaagggcattggtttctggaggggagattgataatggcagagatggaagtctgggccagtttcacaccagaggcagggggaagttgcaaggaaagattgatttagggtgtgaaattgccaacagatgaagttgttccacctggcacc

SEQ ID NO: 38216 - DNA, 1026 bp, Homo sapiens
agtggcgggcacctatagtcccagctactcgggaggctgaggcaggagaatggcatgaaccctggaggcggagcttgcagcgagccgagatggcgccactgcactccagcctgggcgacagagcgagactccgtctcaaaaaaaaaaaaagaaaaaagaggcctcattagattgtcacattccatctcatgactttggctaagtagattaagcattgaaagaaaaagatttttttcaccaaactttatgcaaataggaagaacacaatttcttactggagtccagttgcttgtgttatgataatcatggaatataatctaagagcatatatctacttgttgtagtaggacttgaaaaaaatgaaaatagctttgaggaatgtaggttactagatcaattaacattagcttattaacatactccattactccccttcatttggtatgttatcccatatacttacatgtacatcaatttttctaactttttataaataaagacggggtctcgctgtgttgcccaggctggtctcaaactcctggactcaagcagtctgcccaccttggcctcccaaaatgctaggattacaggcacgagccacagtgccctgcctctaatttttttcataatcctgtcgtggcttatataattttttttttttttttgaagcagagtctcactttgtcacccaggctggagtgctgtggcgcagtcttggctcactgcaacctgtgcctcctgagttcaagcgattctcttgcttccgcccccaagtagctgggattatacaggtgcccaccaccatgcccagctaagtttttttatttagtagagatggggtttcaccatgttggtcaggctggtctcgaactcctgacctcaggtgatccacccgcctcagcctcccaaagtgctgggattacaggcatgagccactgtgcccagccaatttcttttttttttagccaacgctttaccctgacggattgtatgattcttatataaaaaaacgtatacccagggttt

SEQ ID NO: 38217 - DNA, 1033 bp, Homo sapiens
agacttgtctagggctgggggttcagctcccaggggcattcatgtggctcttggcaggtggtgggaggccttctccatagggctactcacaactgtttttttcagaatgagagatcacacacacatagacacaaacacacagtaagagaaaccaaaacagaagccacagtctttgatagcctaatcttggaagtgatataccatcatgtctgctgtattctattggtcatacacagaccagctctggaacattgtgcgagcagactgcacaagggtgtggtagggactcttgaaggcctgctggatgctggctaagacagtcttaaaggtgggtatggggagaaaggaatgaggctaagggaagactaggggcatcatagcaggtgagggaatgaagtgtctgtaaaaacaaggtgattagaaaaagcagaaaactgtctcgatatgtaaaatcatgtttaaatagcacagtctagcattttcaaggattaatcctgatatttcttgattataagttatgtgccagtctctgtggtaaacactgatgaacaaaagtgaaaatgtcagtcattatccataaggagctcagtgatctagagaagctaacctttagattaagtaattcttttgtggcttgttgagttcaggaagaaccaggcaatggaactgtgaagacagcacaagaagaggttaagagtggagcaggaacctgttcatgggagggtagagaggcaggagaggtgaactgcctatgggttggtactaccaggacatgattatgttgctgctcttgggtgccttggaaagcaaagatgttttcatcagtaatatgaaactggattttcattatacagttttttccttctgtcactccctaccatgaattacgtgaatctgtcatggtttccaggcctgcgtatcagaatcacctggaactgttcatacagatccatggctccagtcgataaatgtggaattaggatcttagaacaaggcctaggatgctgccttgtaaaccaactcttcaggagat

SEQ ID NO: 38218 - DNA, 1052 bp, Homo sapiens
tcatgtatttgccgatagtgattgggccttagactttaagtcttgcttatccagagttgatcaaaatctttagggtccctgttcactcatgaggttatgttgatctgtcaggtaattcaaaataatagtaataacacaaaacctaacataactgttaggttatgttttctatcattttttccatcataaagagtatgattttttaaaagagagaaagaaatataaaagtaaatctgacattagggtactttgttcatgttcagtctgatgaaggaataatcctggactggtcattggaagaccatttgaaattctattttaattttatgattattttgatacctttggtttttataaaacattaaactgaaattttactttgccttctattaggtagatttattgttgagatcatagctacatattcagtagtcaaacaacactacttttttataatgtcagataatttcctgttcacagtgttaaatatagtcaataaataaattatttcctctaattgtattataagaacttttttaaatgggcgtgaggtacaaggcggattgttgacttttgtattgaagagcctgtggttgttgcagagcctttccttgtctcagggtaagttgagaaaagagctcccttgatgaaaatatacacccccatattctactcccttatattctcactttattaggttcacttaggaaaactgtatctttcaatatgcaaatatctgctgagcaagttggggtttttaaattttaatgtatttattataaattgaagccatttgtttgagagtaatgatctgaaatactgtttccctgaatgctggaagagaaaagcctctaaaaggcaagttttgtctatatttccgtaatcactagcatctatcttgtatgccattgagaagcatgcatggtagtttaacacacactgtaaaatatatcagatgtatcttctttgaaataatttcaaattgcatgagtccattctacgtgccagttcttaagaatttggcagggtaaagctgattttaaaaaaatctt

SEQ ID NO: 38219 - DNA, 1021 bp, Homo sapiens
ctaagaacaaggcttacccgggtttctgcaaggaagcttcatgcattagcgtagcagatgctctatgtccgctgcacctgagctcacttctgcattggcagaagtcaatttctgagcacccgacaacttctccctcagcggccctgcctgggtttttctcaggtgcccaagtcatgccagcttgcccagccagcatgcgaggcagcgggactgctgaggatgtaagaccctcggggtgggggtggggggacaaatgccctagctacccagggatgactcctctctttcctccttccccactgccattcctccctttccccatgccctcatgtgtatttcctgggtcaacccagcaaaccaccttctatgtctttgtctcaagtgcgctagagaacgccaactgagacaatcagcaaacatgaaagcgggattgcaacaccggctactcctcagattgttgttgttgttgctatttttaacagaactgcatcctcagaccagatgtttgttggagtgtctggggatgcccagtcttgacagtggggcattgggcaaacatgactcttagctaaacacctaattccctatagcatgaaaatactggaattcaaagaaaactggccagccttgttcaacagccccctggtaaacagaacagatactgtgtcatttttaacaacaaacagcataaattaaatttgaaccgaagtgtatgtgtcattgttggctctttacagaataaatgaaatgcaagctgagcaaatctaaaaggcaaatcattttctcactttctgaagaagccacctgtgggtctctgttcattggtactaagcctcaccctcggagcaccatatacaatacaatgggtctccatgtatttcccatttatactaccactgagataaatgaggcattcaagagaaaacaaagcaataaatgcatgttacaaatcaattttatcagagacattttacttcatcaaaaaaagaaataactacattggactcattagaaagtgaga

SEQ ID NO: 38220 - DNA, 1051 bp, Homo sapiens
tttttagtagagacagggtttcactgtgttagccaggatggtctcgatctcctgaccttgtgatccgcccccctcggcctcccacagtgctgggattacaagcgtgagccactgcgcccggccctgagtataattattaataccttccctttcactctcaagtgtcctggcatgggtgttacttgtttcccatttgcttagactttctgctctcggtggaaaaaccatcacacacagttcacttgctctcaccttcaagttatttccctcctctagaatgctgtacttccaccactgccaaatcgtgaactttctctccttcaatatcccactgagaactcacccccaggatgggactctgctcaccccgtcctctactcaagcagaagcctctcagcgatcatgtaaataactgtataactttaattggctctgtttataagcctcttatatctttttttccctctaggtatttttccatgtgtttatcctgtctccattaatttgtaatcttccagagggcaaggcctgaacacaagcttctgttggtgtaaagtggaggcacaggtaaggctgattgctagacactgccgtccttctttattagtaatctgttaaaaaaaaaaaaattctttgttgtagtgttttgttagtgatggtcccgagactgctaacctaatgaaaaactatatccagtgtctgctagtgtccagacaaaagaaaatcaacagttacaagcttttcataacgtgaggggaaagtgtgcggatattttgacccataagggaatttatggtgtatggaaagcatgttatagaatttgttgcctttagatttttattcttgtcttttcaaggctgcaggactgtctcagaagggaaataatatttaccttccaaactgagatctaaaacccgaacaaagcctcaggaaacatactccaccaccatcttacaagtttgtgctacgggtggagggaaaatgaatctaatgtaggaggcctcccgctgtgcgtctagcaggaaagaccatacggtgcaagtctccagga

SEQ ID NO: 38221 - DNA, 1051 bp, Homo sapiens
aaattctctatattgtagctagaaaggaaataagtaataatttaaaaaatagtttttgttaatatgggtgaaaaagttactaggagcgatcatgtagatagctgacagtgcttagtttgaggaggataaaaatatgaaaatggagttaacatagcaagcctcctttttttttgcagataattatttttcggctcatgttgagagcttatttgatgctttctgaatgcttattaacgttagccaaatgcttctttttaaaagcaaatacaaaatgtagtaatatgattaaccagagtaatgattttattttagaacatttttgtacaaaatatgttctgatgaggtacaatcttatcttaccatagaacggaaaaatacataatttgtgtaaaatctcctatcatagaaaaacatttttaagcttcacatttaaaatggtgataatttgagcaagtctgggctaaagttgattcttgtattatgcagaaaaatattttatgaataaattaagtgctttactttttcatgtacatatttaactctttaaaaacatttttgcagtactcttctgcatattaatactatgctcattacaggtgatgctgttatactgttaaccattgttcactatagcacaaaaacttataaccaaagagagacctttcttctcagtgctcaagtcattctttgagaaagaagctctttttgatcatgaggctttaggcttacatttggtatacagttgcattgattttgatttttttttttttttttttacaattttaatgagaagttgtcaaaaggtttttagaaattttctatgatgaattttgttctagaaaatattctaaggctgtgctgtgatgcaaacatattgaaaaaatagaaagtgataacaaaacggttggctgctgtgtaatgagatagcagtccctaagcatgaattggaaccatacgatttaagagttacacctacttaatacaaagcttgatttttatggtccttatgtgtttctgtccacagaatttctgtgtgcctgtgtgactagag

SEQ ID NO: 38222 - DNA, 1043 bp, Homo sapiens
ggaataatgaaagtttgtttcttcattttgaaataattgtttcttttatttatttttcttatcttgctcagttggctccagtaaaattggtatcttagacttgctcctgattttaaagaaaatgcttctaatttttcaccattaaaatgtttgctatctttttttgtgggaagagagtctgtatattttttagttgcttaaaggtgttatcttctattttttatttgttgaaattatttttaaaaatcataaatggatttttatttttatcaccttttgtttctatgtaaagatgatcttactatgtcctttattctttcattctgatgtttaaaagtgacttacgtatctttaaaccaatttggtcatgatgtttaatcttaatcactgctagatttgatttgttaatattttattgaagaattttgaatccatgttcaaggcattggtttatatttttattatgttttataattttctgtgcctgattttgttttaaggttatgctagtttgataggatgatctgaggactatatgcttctgattcccatggagctgtttgtttgatattggaactgtacctttgtaggcaagtcttacaacatattttgacttttgggagggactgcagggtagacttttaactcccaagtgtacttaacaataagggattatccaaacattctattttctcttcagttttaggaagttgtatttttcttataatttatccatcttatctaaacagtcacatctgttggcaaaaaatcagtcgtagtattttcttactctctttcatttctgctgggtgtgtagttatgtctgttttttattgcttctatcattgatttgtgcctctcctcgctttcttgattagtgttgccagttttctgttttactttctttttattttgccaacatctgattttcatgatactttcttgcctcatcctttttagtttcattaaattttgttctttattatcttttcctgtctttttcttcaggtttgttctgttactcaaatttcttaacttggaat

SEQ ID NO: 38223 - DNA, 1021 bp, Homo sapiens
catactgtacaacattagagcaagttataaaaatagaaaatgtatttatttcatgacacttcacatcagttgtcacttttctattaccttttgtgctaacccagctatatcatagccaaagaggacctgtgttgagttacaaaattgttcttaccactttctgtgaagtacttgtcaggagtcaggcaaagtgcttattgaaaaggcaaataagaaggttagtataacaaatactctaagtatatacttggttttcttctcttagtggagtgtttaaaagacatagttaagtaatgataacagtgtatttttgaactgtaacatttataaatacaatatgtatataacatgtataaatacaatatgtatataacaaaaggaggaaaaaggaaaatagagctatataggcataatgttgccacatctcactggaattaagttaatataaacctcactggaattaagttaatataaatctaaagagactctgaagatgtgaggtaagtcctagagctactacaaaggaaataatcaaaaatctctataaatgaaaaaattattaaagaaattaaatattacatttgaaaatattcacttaatgtaaaagaaaacattaaaggagaagtagaggaacaaaaaaagacacaagacatacagaaaacaaaaagttaaattgcaggcacaaattcagctgtgtcaataatatcaataatatgaatggattaaacagtctaatcaaaaggcatagattgtcagaccagattaaagaaacaagatctgactatacactgtctgcactggcactcactttagatccaagacacaaatatattgaaagtgaaaggataggaaaagatgtatcatgcaaataacaagcataagaaagctggagtggctatgttaatatcaaaagggacttcaaaataaaaaatgttactagaggtaaagagggacattttctaatgatgaaagtgtcaatccatcaggaaggtatagcagttataaacatgtatccacctga

SEQ ID NO: 38224 - DNA, 1031 bp, Homo sapiens
ctctgcagtttaattagaccccatttgtcaatttttccttttggtgttttcgtcataaaatctttgcccgtgactgtatcctgaatgatattgcctagattttcttctagggttttcatagtttttcattttacatttaagtctttaatccatcttgagttaatttttatatatattgtaaagaaggggtccagtttcagttttctgcatatggctagccagttttcccagcatcgtttattaaatagggactctttccccccatcacttctttttgtttgttgaagatcagatggttgctggtgtgcagtcttatttctgagttctctattttgttccgttgatctatgtgtctgttcttgtaccagtatcatgcatgtgttctttaattctgcaataatttgatggtttttcagatatcctccaattaattgatttctggtttaattctgttttcatgtaaaaacacactctgtatggtttctactgattttaaatagttgaggtttattttgtagctcagaatatggtatgtactggtgaatgttccacatacccttatataaaaagtatgttctgctgttgagtggaacatttctataaatgtctattaggtcttgatagtgttttgcgggtcttttatgttcttcctgattttctatttatgtgtcccattaattaccgagagtggattattgaagtcttcagctctgattatggatttatttttttcagtttccgctcctttatttcgaagctctattgcgtacacacttaggattgttatgttcatgggatgacctatatcattatgtaatgctcctgtttatccttcataatattctttgctctgaagtccacttcgtctgatattagtatagtttctgcagctgtattttagttattgatttatggtatatctttccccaaacttttattttcagcctacttatgtctttatatcaatatttaaaatgcgtttcttatatacagtatatacatgggacttgcattttattcagtcctagtca

SEQ ID NO: 38225 - DNA, 1017 bp, Homo sapiens
cccttgtgaactggacttcacacagcagcataaagccctcttggccttccaccatgtgagcgtgccgcgtttctcccagccagaggctgcagccctcaccagacagccaaacctgccagcgccttgatcttggactttccagccccgacaactgtgaggaaatacatttctgttcttcttaaattacccagtcttgggtattttattatagcagcacaaatgggccacaatctgccatagtacctgtcatgtaggaagtattctgaaactatttatggagtgggtttcattaaaagttactctaatctttgaaatagaaaaatatcttacttttatgatcaatgttttgttacaaactgtctcaattatagaaacaggcttttgcatacttacctggcagtggagataccatgatcacgaaggtggttttcccagggcgaggcttatccatcgcactccggatatgctgacccctgcgattttcccaaatgtgggaaactcgactgcataatttgtggtagtgggggactgtgcttgcgctttcccctgaaaaaaaaaaaagcaagaaaagaaacaggcttttgctgaggatccactcctgcttcccctgttgggccattcctgttgtgttgtgtttgatgttagaaacaacgtacaaagttcctcccttaaaattaaatctagatctttacttgtcatgcctgataatatcaaactagagctccagatactataattttgattatgaactttagccatcattgaagtacatcgtcccttcttattaattctcttggagcaaatccttcatgaatgataaaatgggagaggggtcatcatccttagctaaggtagggatgctaagatcgctaaggtgtagggaatcgtatttgatagttcagctctatccagtgtccttagactaaacctgaaagttaacttccagaattttacgctgagacctgaaaaataggagcaatcatgtaaggaggagaaaggcaatgcgggtacattcta

SEQ ID NO: 38226 - DNA, 1048 bp, Homo sapiens
cctctcccatgagtggcagccacctgagaagggcagctttcagggccccgagtggctgtgtgtccctgtctgctgtgggtaggattctgcctgccaggcacactcagcctcccagtgacctcttgttagagacacatcgggtgggatgctggccataggcgggcgctctcctagaagggggagatggctcctgtgactgaggggaacgttacacaatcagtcgttccctcaggatggaggcaggtgtttatcttcactgcaggagttggtttgtctggtgctccctgagagggacattacggtcacgggtgcagggctgcaaataggatctgtccaggttctcaccggcctccagctggggcatttcagcatcaagaaactgcctgcccatgtgctgggggcgctgtggtctctgatgtctgtctggcctcatataggggagggtggggatgtattcatggtgcatgtgtgtgttgagtgtatttgatgtgaccggaatgtgagaaaataaaacaaaaaaccataaggaagggaagagaacacggactaatgtgtgccaggctgagctctgacagtcctatggcagataccagctctaaattcagcctctctttgagtctcctatttgaaagcagttatctgcgctctcaagggctctctctcaagccattgagtagattagctgaagaattagtgaaaaatcatttaaatttatatatataataaggggattgagaggctgaggcaggaggattgcttgaggccaggagttcaagaccagcctgagcaacatagcaagatccccatctctacaaaaatttaaaaattagctgggcatggtggcacacacctatagtcccagctactggggaggctgaagtgggaggatcacttgagctcagcagtttgaggctacagtgagctgtgattgcaccactgtactccagcctgaacaacagaacaagatcctgccttaaaaaaaaaaaaaagaaagaaagaaagaaaaggccaggaggcacggtgacttatgcccataatcccagcactt

SEQ ID NO: 38227 - DNA, 1035 bp, Homo sapiens
aaaaacctacaaattaacctgtctgggcccttagtctatagtgaactcagaagaagagtaggctttttcctctctggctccattcatgttttggcagcacaaggctgagagaaattaagacggtcacggtggaacagaacagaggcctcagaaataacactacacatctacaaccatctgatctttgacaaacctgacaaaaacaagcagcctatctctggaagggatgtgagttcaggtagagctttagtgtgattggtggggtagttgggttggttgcaacctgacgagaatggcgtgttgtgaccgtcttttgttatttcttttacttttttattttttaaattatttatttatttattttttattataatttaagttctagggtacatgtgcacaacgtgcaggtttgttacataggtatacatgtgccatgttggtttgctgcacccatcaactcatcatttacattaggtatttctcctgatgctatccctccccaagcccaccaccccccgacaggccccagtgtgtgatgttacccgccctgtacccatgtgttctcattgttcaactcccacttatgagtgagaacgtgtggtgtttggttttctgtccttgcgatagttttctgagaatgatggtttccagcatcatccatgtccctgcaaaggacatgaactcatccttttttatgtctgcatagtattccatggtgtatatttgccacattttcttagtccagtctatcactgatggacatttaggttggttccaagtctttgctactgtgaatagtgccgcaataaacatacgtatgcatgtgtctttatagtagcatgatttataatcctttgggtatatacccggtaatgggatggctgggtgaaatggtatttctagttctagatccttggggaattgccacactctcttccacaatggttgaactaatttacactcccaccaacagtgtaaaagtgttcctatttctccacatcctgtccagcacctgttgtttcctgactttttaat

SEQ ID NO: 38228 - DNA, 1065 bp, Homo sapiens
gtgatgatgagcattttttcatgtgtctgttggctgcataaatgtcttcttttgagaagtgtctgttcatgtcctttgcccactttttgatggggttgtgtgtgtttttcttgtaaatttgtttaagttatttgtagattctggatattagccctttgtcagatgggtagatttcaaaaatattctctcattctgtaggttgcctgtttactccgatgatagtttcttttgctgtgcagaagctctttaatttaattagatcccatttgtctattttggcttttgttgccattgcttttggtgttttagtcatgaagtccttgcccatgcctatgtcctgaatggtatttcctaggttttcttctagggtttttatggttttaggtcttacatttaagtctttaatccatcttgagttaatttttgtctaaggtgtaaggaagggatccagtttcagctttctacatatggctaggcagttttcccagccccatttattaaatagggaatcttttcccccttgtttttgtcaggtttgtcaaagatcagatggttgtagatgtgtggtgttatttctgaggcctctgttctgttccaccgtgactgtcttaatttctctcagccttgtgctgccaaaacatgaatggagccagagaggaaaaagcctattcttcttctgaattcatttttaccaggagtccatggtagggaagagaggaagggaaggggaggaggggttgagcccttattgacagtctctatcctaggctgggcatagtgtgtggctctgggcttatgaggatgagtaagttccatccctgcttagagggagtcaaccatacatgagaaaccagtaggatgccccttatggctgggatacagaatgaggccacgttccctttaatatttaagctcaccatctctgagcccccatcccactatgtttcttccttgcctgcttcctgcctgtccctggttccatctgtcaggggagggttagcctcccctcattcattcagtccaagggttagccttggttgccatttcctcaagagaggaaggcca

SEQ ID NO: 38229 - DNA, 1599 bp, Homo sapiens
atgatttccttaggacacatttcctaaaagtgggattcattggacagattgtatgcgtatttcaaatttttcttgacacgtctttaaaagcagaggcactttcttgtggtgcgtattcattcagccagtatttaaagaatgcttcccagtgttgagtatagtgccactgttgatgatggattgttaaatgagaaaagccggtttacaaaacaggtcatgctcttcccatccctgtaaagaatgtttataagcaaatatttataagagaaaacctaagaggacatacatgaaaatgttaacagtggttatcttgcggtaagattatggatgatatgtatgtttttttcttcgtattttctaccttaaacaaaaagatagaaaatatgttttaaaaagttatggatcatttgtttaactttaaaaagcagaaacaaaaccagaattaaccccaaaacatgttgattgagtcacttctatgtcactctttgcataactctccttttcatgtcacatattcttctcgattctagtgattgatcaaaggacacctcttcactttcccttgtcccttggacaccctgttttatcccatcctgtttggcttttctcacacctgcaaccacagacctgcctgagtttgtgtaaggttttctgaaataatgttccttctccttgtcgtctggctgtttgttcatctccgtgtacttgccttgtaggtgggcacttcctctgtggtgtacccagcagccatgtttgccccccaggtggctgccaggggcgtgccagtggctgaatttaacacggagaccaccccagctacgaacagattcaggtactgggataccctgatgggagagggagatgtgggaggcaggtacagacatggtcatctaaacatagttgacctactcctctaatttttaaaaaagacatagggtttgtgtttttttgtttgatctgcagttgcttttatggaagaacaaaatcattcactgtagactaaggtagggtagctctgtcattgtatgcgaaatttgccgtgggacttttgtttgttcacattttgaacgctcttcttggattccttaggctttgctttcccttacatttttaagctagacttagtgatgacctgtagttgtaggttacccaaatgctccgcaagtaagcctgggagatgcccttgcagaacctcatcacctgccgttcttactgggaggccacctggcagatacccctttggtctaatcgccaaggttatttgtatctgtggccatattatgacactgatcctgcttcccaagtttgggtgggaagtgtagattgtcatagtatgcatttttagtcttattcctgggtctgttttatttcttcatccatgttctgtcttttttctcaccccaacttttttttgcttttacctctaattcttgtccatctagttaattccttttgaataagttagaatataaataagtagtaaattaatataaatgaataaaatagaaaacttcattgaaccatcttgtcattactttaatcaacagtttccaaccttggctgcatattttaaaaatactgatgcctgggtgccacctc

SEQ ID NO: 38230 - DNA, 1026 bp, Homo sapiens
ggctggagtgcagtggtgcgatctcagctcacagcaacctccgcctcccgggttcaagagattctcctgcctcagcctcatgagtagctgggattacaggtatgtaccaccacacccagctaattttgtatttttagtagagacggggtttctccatgttggtcaggctggtcttaaactctcgacctcaggtgatctgcccgcctcggcctcccaaagtgctgagattacgggcatgagccaccgcacccggcttactgggggctttttaaccttgtttggctacattacctcagtgaacaaggggaagctcacaacaggaactcacacaaagaaggaagagaacagtaccaacaaggtagaacatcacgatgagaagaaagaatgatgcaaatatgtggacccccaggataaacacagctgcccaaaatttagctctggcccccttagatgggggaagtcaacagtgaagtgtttctcagcatcataaaggcagaagctgtggttcctgtggggcctgccaaccgttcccagatgctgaactctgctgggagttttttccatgggactttaaaaaatgatgcccttaggttgggccagacctctgttaacttcagtagggatggcaccaggttcaagaggccaaagaagagacctggagctagtgaaggaaacatagggtttatttggggaaccttacagggtggtccagtggccgcgggctggacagaactgcaaccacttataaaaagcatgcagtttacatagcactttcactcagcaccctcccctcagcagcctccacgtggcaaccctcacttcttaagttattgctgtcagatgcatctgccatacagggtcattctcaggggatgcttaagttatttctgtcaggtacatcttccatacactttactaccttggagtaaagtagtaagaatacagctttttccttaacctttaccagctaactcagtgcttaggggccttggaatgcctgctgtccagcaggtgtcacaggcctga

SEQ ID NO: 38231 - DNA, 1036 bp, Homo sapiens
ttgaattatatactggtacatttatttgaatccatataactgaaggaattgtagaacccaaattcaaaagctaccttggtatatgaatttgatgggaaagacggaggtaacgttctacttcttattttaccatttatttttgttcattcccatagctagcttttgaattcctgatcccattgtgttcattcagtacattttgttgactgcctgtcattgtactagggcatagtgggtggtggtgaataaaaagtgttttgaatcatttagtggggtagcaggcacttatccacaggctctgaaaacttgatttgtcccatacttgccttacctgccaccaacctgtccttcctgttccccacttcatttagcatctttggtgttttatggtttaaagcgaaaagctatagtcgtctttgggaattgatcaaaccctactaaatttagccttctaaatttttttttttctatcctctttttctccccttaaggctttaaattcagaaattcagcccccttttgcttaggccagtgactctcaagttttcagtaaaaaaactttaccaaagagttactcagatcctgaatacattaaacgtaagagcaaatctatttggtggcaaattccctttcatcttttaaaaccaagctcaagtgtcacctttaccttctcatttgcccccccccacctcccatcacttccgcttttgtgtggcctttctcctgtgcaaatgcttctgtattgtattctgtccatttacatttctctctccattgggccacagcccccttgaggctgttccctgtctcctgtgcctaaactattaaattaatcctttgtgatttctccaaatgaaatgaggcagacctactcccattcacttcatatttcaaatactttataacttgttctgaacaagtgtttcacttgaactccattgcccacagcattttgctgctttgaaagcctgctaataggctctcagattttaactgtgaagatcttccaatgcttgagagttggtggcagtgtact

SEQ ID NO: 38232 - DNA, 1049 bp, Homo sapiens
gagggcttgcctgggaggggttcgtcgaggtcgctcgggtgtctggttggccaggctgcgggggtgccctggactgggccaggggcggtcggcaccaggctaagcgggcgcctggcggctgagcggtgggagttttcggctggcgcccggcggggaattatccgaggagccctaacttgtataaaagcagagtccatttaaagttgggctggatagcctctctctcattggttagggggcttggaaaaaagagactcggcgagccctcgctgtggtgctgccgccgccgccgccgccgccgctggagttgactcttctgctcgcactgctgctgcagcacaaacgtgacttccaacattttttatttatctttcccttttcttttccaagatgtaactacggatcagacactaaggaccttcacgtttcgctgatgtagtttttggaggaaaaaggggggggagtgaagggcgtcggtttttttttgtgtgtgtgtgtatgtgtttcgggggaaattttccattatgagtgttttactaaagtgaatttttttttgtttgcttcgttcgtctttggctctttttttttccttcccaatttcggatttatttcaaggcgaatctggctttgggggaagaggaagaaaagtcggattacaagatcaaccaccaccaacaacaataaaaaccaccaggatatttttttgcaaatttctgacggctttaaattcatgaagcaattgtccccttttgcaatcagcatttggatctcagaatgagcaaggaaagacccaagaggaatatcattcagaagaaatacgtaagtgctcctaacaacacatcctttgacttgcagttttaagcaatggctgtgaatgtcaagtttatagataattctgcctctgaagggttttaaacacagcgtccgataaggctgtttcttttttttctgaaagagggcttttcaagcaaagtggtgtctgcctagtttggttgaaaaaacagactggtgtagagatacctcaagtgaataaattgacctcgaatgac

SEQ ID NO: 38233 - DNA, 1029 bp, Homo sapiens
accctattaaccccacaagagtaggggctgaatttatgtcattgtaggtcaatgttaatgtctaatacatagtatacattctaggaatatttgagttcaagtttggtggagtatttcgagtactacttagtagtgggagggaatcggtatgaatctagtgcaaaaagatagacttaactgatcacaattttggacgctataattttatagttgagaattcctgaggtttctagtactgttgtaaagtgacctgcttgtggtcgcatattttatcagacacagctggggcatgaaatccaggtcctgatacagtagaaggccctctctgttactgcctttggaaatacttttcttttcagggggattttcagttattcatggtaactgcagtaattgattcattttcatggaaaaataaaatccacgtgtaatccccatacctaattaagccaatagcattttactgttgtgcagatggccttttttgcttaataagaagtgattcaaatcagacaagtactcaaaagatagaaatcattgaaatcacatactggacattcctctacttgcacatacagttttatatatatgggccatactctttaagtgctgtatttttgttacctcctgtttgcatttataacttgtcatggtaatcaaagacagtgatttttaatggcttcaaggccgttggttgatagttaccactattttcttgactcatctcttcgggatgggtttttcacagatttggggctgttgtacaaaatgatgcatgcagcctgctttgcacgtgtctgtttgcactcaactctaaattcttactgtgaaattactgacttagaagtgcccgtatttacgttttgatctttcctagtacattgctttcttggagagaggctatactaatttacagtcccacaggtagtacacgttaggccagcgggttggttggtttgttggcttttaaaaaacaatacaggcatttgtaacaagtagtaaagatgtcagttgagttttatttaagtt

SEQ ID NO: 38234 - DNA, 1117 bp, Homo sapiens
catgctggagtgtgtatcagtacttcattcctttttgtggctgaataacattccattgtatggatgtatcatgctttgtgtatccagtcatcagctgatggacatttgagttgtttctatggtttggctatttttttttttttttttttgagatggagtctcactctagcccaggctggagtgcagtggcgcaatcttggctcactgcaacctccacttccgggtccctgttcaagcaattctcttgcctcagccttccgagtagctgggattacaggtgtgcgccaccacgcccggctaatttttgtattcttagtagagacggggtttcaccacgatggccaggctagtcttgaactcatgatccacccgcctcggccacccaaagtgctgggatttataggcgtgagccaccgtgcccggcccgtttggctattttgaacaatgctgcggtgaacgtttgtgtggaggtttttgtgtggatttgtttgcatttctcttggaataccttgttagaaaagcgtgcttatacgtattactactaaatttattttctgtcattaagctgtgtttcagttcatgcctctgaagtgatgtgctctgttcagcagagtcctatgctgtgccctccccttctggggctctagcttgccctttggagggtgtgtgtttgtgtgtgtgtgtgtgtgtgtgtgtgtgtgtgtgtgtgtgtgtggtaggggtcctcattttccttactgcctgtcactctccatgtcactgtgggtggccaagagtggtctcatttcctctacccctttgcaaaccgtaaacactggtcacacgtgcttgtgctggaatcatatgctccagtggcttgatggtgggacttcagatttcctgcattaccttaggttttgactttcttgtggttacctctgtcagcattctttggcagaggactatggggagtagaatgacctagaaattatccctgattttcttctccttccaagcctgctgaaccaaaaatggtttttatttttctttgaaaaactacccttcgtaatgaactccattaagaaataggagttcttcaaaggaggagggatgttactgtattcttttgatttctctg

SEQ ID NO: 38235 - DNA, 1079 bp, Homo sapiens
ctggcaatttttattttttagatacagggtgtcgctgtgttacccaaactggagtgccgtgacgtgaacgcagctcactgcagccttaaccttcctgggctcaagcgatcctcccacctcaccctcccaagtagctgggactagagctgcgcttcaccatgcctggctaatttcaggcaatttttaattgttagaaaaactgtaaggcaacataagagaagtggatggtggggactgcaaatgtcatgtggcctagtggtattgagaagcattttgtgaagcagagagtgcgtgttccgattctgtaggagcacatgtcttggtgtgggtgtctttgccttcctagaacttcctgatgataagaagcctgtaaacaccagtgtgtccgtcagtatttggaatcttgtttattacatagtcctcaggttcattgtcaaaaaattctttactgatggtattaatcagtatttggaatcttatttatttcatagtgctcaaggtcattgtcaaaaaattctttactaatggtattaatcatgcttctcacactccagtttttctggtatggttttctgttccaaattgactcctgtgctcaggtcattagtttggcttactaacaggagccctgacagctatattcaatatttttctctgcagtggccaagtagccaagaatttactagtttagacacccacctcagtttagaaggtaggtgtgagtgtgtgtgtgtgtgtgtgtgtgtgtgtgagagagagagagatagagagagagagagaatatctaagaaggagttaatattttaaactttgcattgtttaactggaaatctgtgttctgccgggccgcttttatgtggtgtacctataacctatacacatacttgtgcctttcaaaggctaacgccacatccctcctactaaaattgcttattagagctaattttaagaattgagttagaactgccctataatgtaatgcagaatatttcccaataatgcctaggttaacaatgatagtcttgctgtattgtgcaaaaaaggcttctgttcagacccagctgggtttcaggcttaat

SEQ ID NO: 38236 - DNA, 1058 bp, Homo sapiens
ctcttttccaattgtccctgctatattttcttccttgacaaactataaaaccaagggaatgattttcaactaatggttgtgttctttaaaaaactgtttttcagccagatgtggtggctcacgcctgtaatcccaggactttgggaggccaaggtgggtggatcacctgaggtcaggagttcaagaccagcctgaccaacatggagaaaccccatctctactaaaaatacaaaattagctgggcatggtggcgcatgcctgtaatcccagctacttggaaggctgaggcagaagaatcgcttgaacctgggacttgtgggttgcggagagccaagattgtgccattgcactccagcctgtgcaacaagagcgaaactctgtctcaaaaaacaaacaaacaagcaaacaaaacagctgtttctcagggtagttttcttgaagcacgatttttcgaaatgttgtaaattagtaggaccctggctttgagtcaggatcctagatggaatgaaatgacacctaaagattggtgtcattcttggggatactcactgaagaacatactgctccattttcttttcccttctgcatttctctgaaaaattttgtctatatcttttttttttttttttaagatggagtctcgccctgtcacccaggctggagtgcagtggcacgatctcagctcactgtggcctctgcctcccgggttcaagtgattctcctgcctcagcctccggagtagatgggactataggcgcccgccaccacgcctgcctaattttctgtatttttagtacagacggggtttcaccgttttggccaggctggtcttgaactcctcacctcaggtgatcctcctgccttggcctcccaaagtgctgggattacaggtgtgagccactgtgcctggcctgcttctctatctttgaaaaaggagtttttggggggcattaaggaaatttgtcccttttcattttagatagttttgggggatgtctttaatgtttttttgtggttctttagaggtaggcatatgaagacactggtgcatttttatc

SEQ ID NO: 38237 - DNA, 1801 bp, Homo sapiens
agataaatggatgtttcctcccttccctatttaagctgcctaagttgactaaagttcgacttgataaatgtcctagttaatttaattttgtgttagtgcctctcctcccctcgagtgtccagtccattttcagctgacttgcagaaaaaccaggttaatgcaaatccatcagattctgcatgcctgttaaaatgcttaagcattctacatggcgtgggagacatgatgcttgcctaaaagggtccctggagagataaagtatattcctgccagtgcatttagggagttatacatatataactgtctcatatgatttggcattgtcacatactgagcactgggagagccaaaggaggtctggggttggtaggctgtttggaggtaaaagtttactactggaatagtccttccagctcagccgcttccatttccacattgcctcagaagttgcctaaaggatgtgcatcttgttggcagccccatgactttctagaagccctgttgtgtctgtttagtgctttctacattaggtcggagatcttttttcattaggtcagagatactggactcctttttgttatggaaataacagtctcttggggttctctggaatgagccagggggtcctgttggcctggtccttggaggagaggtccaggctgttgctttcagtatccatgccacctagaatttccagtgactgttgagtcattacattgctatggtagtttcttaggaataggccggtacaatttgattgtgtttttggaccttcccccaagttacaaggccaccagcactcagactgtgggtataccatatggaccagggaacacattggacaaggcgaaagcttgttaccatgaagttcgttagaagatgagactccattcaaattttcagttcttcatgaatgagttcttagtaaaagtgctttgttgatttttttccatggtagtaactaccatgttttgagtgccttgttaagtaacataagtacataatattctcacacacttttgcaaagcagaatctattattttatttttacagatgagcagatagggctttggagagagaagtggcctgaagtagcacgcagtgtgggtggctggagtatatgcaggggctggagttacagcccagttttcttaattgctttgattttatttacctattttttatagaaacagggtcttgctatgttgcccaggctggtttggaactcctgggctctagcagtccttctgcttcaacctcccaaagtgctgggattacaggcatgagccaccgtgctcttggccttaattgttctgattttaataatggcatgatacccctgtaccccaagttatacagatgagagattttggctctggtatctctgtctctatcctgggtaaggtttctcagggttgtaggccagtctctttgtcaggaagagagctagtagttaaactgaaacaaaggtccgacagtctttattttgcattttaaggtacctgttgaaaatgactaaacgtaaaatgggacttttgttaattcagtagctgttactgaagcattagattgattcacctgtttaaaagtagttatgaaagacaacagagaacagctttctatttgtcgtaacttactaatagatagccaagtctgcaaaaaaaaaaaaaaaacagtcaaggattccatgtagttgcaaaaggcaagttcaagagaaagttggcaaagaaagatggatagatggagagaaagcaaaagaaatccttttttttggagagagaacacactgttggagtatgct

SEQ ID NO: 38238 - DNA, 1042 bp, Homo sapiens
ttggtaaacatgttttattattagcttgagaaggaaatgcctggtatagtgactaagactgtaatagggaaagagaactacttttctggagcagtaaaagttttgactaatatagatgatcagtgtttgtgaattttacgttggtatgtgtttttggtcattggtaacttaacagaaaagtatatgtcaagagaaagaatagtttatagctctttggacataggagggaaacgtgataccttttcatctttctgaatgaaagatgatgattcctgatctcaagtcttcattttacaggtattttaccattattaccaacatgttacttgaagagtaatgaagaggccgggtgcagtggctcatgcctgtaatcccagcactttgggaggccgaggtgggcagatcacctaaggtcaggagttcgagaccagcctggccaacgtgctgaaaccccatctctactaaaaatacaaaaattagttgggcgtggtggcgtgcgcctgtaatcccagcgactcaggaggctgagacaggagaatcgcctgaacctgggaagcggagttgcagtgagctgagattgcgccactgcactccatcctgggcgacagagcgagactctgtcttgggaaaaaaaaaagagtaaggaagagaaagctttccattgttgacttagtagttcaaagcctaatggtgtttttgccttgataatcaggaagatttattcctatgctttatattgattgtggtcactgtactttcttttacatgttttcttactttgctagatttgttaatttttacggtgacccacttttagttaagtgagaatttctttctaaatcaggctgtccattgcctaggatagccaaccttaaggcaaaggataacatataacctcattttgtatctgtttattgtgatcacaggttatttggtggttatttattttttatttattttttgagatggagtcttgctatgtcgcccaggctggagtgcaatggcgtgatcttggctcactgcaacctccgcctcctgggtt

SEQ ID NO: 38239 - DNA, 1045 bp, Homo sapiens
tcagctgcccatctcgctgcgcagcctcagttgtcccagcctccttttgctccttttcctccctcctggagctggtggtagagaatggacataatttgctgatcccccccccccccccgcccacccactgtaacttggttagttaaacctgcactttttggtaaaatctggagaggtgataatttattcactttttttagaggactctaaagccagaggattctaagcctccaggccacctctcccagtccgtccaagttgcagacaccagagagcagccagctcatggttacagtccttctctgaagcagccagacaatcatcggaaggcccttcacagactcccatatctagatgagtgatgctttacttttgacctttgtagcatggcctttccccctctaaccctttaatcatctctttaaaaaaatcaatcaacaaatatttattgaacgtttccttgtaggctttaaaatccacccataggctgctctgtgactcttaaggatttctgccctgcatccagagagaatgcagtagctctggccaatttacttagtatctgctttcttagattatgagcattttctgtttttcctgggagtccatgggtgtgtccagtgctggcagggggcaccatcaggttgcaaggttgaggtggtgcatcttatctgcttggtgaggtgcagggaggggtggagcagctgtttccagcatgtgtttcgctctctttattggccctttcagctgactgctttttacaaccagttatgatggaacatttaagacttgttttggggtcaccacaaccaagttttctcttctcactgattggcaggaggggtgcccactgggagccagcacaagtctgggattttttggttggacagggtttcttgcctgcagtttccagctggtaaatgagcctgggcttgaggaagttgtcaaaggccttccatcttttaaatcttggccatgtagctggtattgttgaagaaaacgtgaagaaggattttaagaaatggccattgaagattgatgttgg

SEQ ID NO: 38240 - DNA, 1050 bp, Homo sapiens
tttgtatttttagtagagacagggtttcactgtcttggccaggctgggctcgaactcctgacctcgtgatccacccgcctcggcctcccaaagtgctggggttacaggcgtgagccaccatgcccggcctcagtttggatttttaaaaaaccaatcttattgaagtaaaatttatacatgcagccatttcaggtgtacactgtgataacttatgacaactgcacacatctgggtattaccatcccatcaatatatgcacctcctgtcacccgagaaagctcccttgtgctcctgtcctgtgcccccatgccagcgccgacctgccttcttgcactgtagattagctttgcctgttgtaaatgccatatagatggaagcacttttgtgtctacatcccttcactttgctttgagattcatccaggctgtgtgtatggtttgttccttcctgttatggttcagtagtctcctctctttctgtctttctgtgttcttcctgtgactcactcattgtctgtgtttctttttttccctgtaagcctggcctggtcctttcgtgattccctgtagtctttttctcaagtgggcattaaagcaaccttatctttcacacacactgaaagaacctagtaactgagagatgatccagccagattctgcccttacctttacccctcaccaccccactaggggacaaaacaagcaaatatactgactgacccaagccttgttgttccgacgaaaacactggcgttcagcatctttcccgcaaaccgagctgcagcctccagtttcagaatagtgccttccataaaatctgtgggagttttccgtttatgttgcttgtttttaaacaatcttcttggaaaagaattcagtgctgttaatggattgccgtcggagctttttttacattacacctgtcctctgcttcctgatctccttttgatggttagggagaatatgttgacttagaatagcaaggagccatggcaccccaaggaaacaggaaaaatctcagttttcatggatgagaaagtcccattctatt

SEQ ID NO: 38241 - DNA, 1025 bp, Homo sapiens
ttccttattcgaactggagctaagcactgagatatttcagccatacgcttgttagggagtgtatctatgtaaatacaagtaattttaagtagacaaggctatattagtagaacctgattacttttatcttgctggtttcttccattgttttattagtatgtttcaaatatttaccatggtgagccgatcagcttctgatctatgtggatcagtatccaacaaaaactgactagaagagactgtggttgtggatgcttgtgaagagaatggaaaatgtattacagtgttaatgtcctctacaattccagtgacttagtattcagttaagacacaggtaaggtgttggttataagccggtaattcaagttaggttaactctgtttcttttccatcataaccagttgaaaagaggaagactttacatttaattaggtagttcgtagaatgtaagtgtgagaatagaaaaatatatttaagaaactcagtcattgttctttacacaaattagagtggattggtagctttgggggatttaagtgggttgaagtagaaggtgaaatgatgactgttaattatcaaaaaccatacataaatgtgatttgtagtttattttgaaacctactgtagtttaaattcatctggtattcattacaatgcagttcttaaagaagatgaaactgtatagctaatgacccaaatgtttccttcttatctaatcagggatccttctttagtagctagattagatgttattcagaaaggataatataggaaataattactgtatttcatttgtggagttaagcatatggcctctaattcattttcatatgcaatatatgtaaattagagaccaatctatattattttcagccatggccatgcaagaatatgattcattctctctctctctctgtgtgtgtgtgtgtgtgtgtgtgtgtgtgttagttaaacttgcatgtgaagtatgacttgcagtttgtagtaattttgtgatgctggtacattttctcatcttgtttggg

SEQ ID NO: 38242 - DNA, 1122 bp, Homo sapiens
cccaggttggagtgcagtggtgctatcatagctggctgcataggtgccttttgactcgcctccaccccacccctgcacattttcatattatagtcccttatcagtctcagggcataactctgcagtatgtgtaacattcagcatacttggtgaggccacgagggggagatctgatgatggcatctagggcaggtataaatgtgagtgatactgcattcagctgccatcccttccattctggaagagtgtgtgtgtgtgtgtgtgtgtgcgcgtgtgtgtgcgtgtgcatgtgcgtgcatccccgcatgctgccagtgggtggtggggaggagtagagaggactaagaatgagggagggaggtcataaaggacacaggaagccttggaaagaagggcacgtagcaatctctggggtaaaacagcagaactatagaaatttggttctaggacagtctttataaaaagaataaattcaagaagcagatgaatgggcttggttgtgacctggactgcaacgcggtctctgctgtctttactttcacattcttgtccttcaaggctcaatgttatgtcttttgtgaagcgtttttcatcccccacttagatgcattttccgtgttggagtagctgtgttgtgcacctcgtttgtatttgtctccacacacattatacagtatcttgtttgttttcagagaacccctaccatccccagcctagccacctttgattcatcttagtggattgccagtgaatatttattacaggcccaggacatgtagctgttcaataaatattggtgcaatggaagactctcctctgtgtgagagttcatgaagggaaccaggaggtgaattttaagggtcagtggcttgcaacactcctggaagggctttccaggacctcttctgaggtccgaagaagcaaagatcaccccccacaaagtcacctgtatggaattcaggtagcgatagagcttgtgaacaggatctccaaattctccaaaacatagtaaagctgctatttactgggcacccgctgtgtaccaggcactgggcaggatgatatgctttacatgtattacttgcaattcctaataacaccagtgtctgcaggttgctgttg

SEQ ID NO: 38243 - DNA, 1027 bp, Homo sapiens
ctttgcagtagataatctttgtgtggaggggttctcagtattttttaaattatattttataaacttccatgggctgggactggttcagagtcttcataagctcatagaaatgctttaaagtttgaacttaattaaatttttttttctagaagttaacttgtgggttttcttttcctcttctcttcagttatacttgaaaaggtagagagaattgctcttgctttcttctcgagtataaaaatgtcaaacattgttctttattcttcgctgaaaccatacaggtaaaaagcccacagtcaagcttttgcagacccagctcccagctagatgagaagcagctgcaacaggagaactagcgtggggagctctaaccagagtaggctttgctgtttaggtttagtggttgctattttctacctctttgtgaatggagaggtggaggcggatgaattaagccaattaattggaaaagaaatacttacttcagtagcataccatctgaagcaataggatggaagtttaagacttgttaattaagaccatgaaagaactccatggacaatgttgaaaagggttttcacattaactgtgtgtgtattaggaagggaaaaatgttttcactgagattcctgaaaccatattgcaacatgagtttccctcttgaccttgcagcttatgttggtctgcttttcaatattaaaagaaaaatgtggatcccatctatgaagtcatagctcatttaggggtgatgtggtagataggtcctggttagttttgaaggacctaattgctatattaggttttattttctaatccaagatggtgactttttgttggaggtgggagatactaaagaaaaatgttccatctggatggaattttgtgggcaggtaagtttttagtgtctccatccacaaccacaacaacattgtgtgccctaattagttacgtgtgtgaagtgggcctaactggagtagccagtgagaatgacttggacgttttcagaagaattatttgcaggttggaa

SEQ ID NO: 38244 - DNA, 1382 bp, Homo sapiens
actgtgtagcccaggctgaagtgcagtggcatgatctcagttcacggcaatgcctcctgggtcctggttcaagcagttttcttgcctcagcctcccaaatagctggaattacaggcatgtgccaccatgcccagctaatttttgtattttttgtagagacggagtttcaccgtgttggcctggctggtcttcaactcctgacctcgtgatctgcccgcctcggcctccgaaagtcctgggattacaggagtgagccactgtgcccggcctatttatcttatttttatgagacagggtcacactcagttgcccaaactggagtatagtggctcaatcatagctcactgtaacctcagaatgcctgtgttcaagcgatcttctcacctcagcctcttgagtagcttggaccacaggagtgtgccgtcatgcctaattttaagtttttaactaattttaaatttttgttgttgtagagatgagggtctcttgctatattggccagggctgtcttggactcctgggctcaagcaatcctcctaccttagcctcccagtgtgtgagaattacagacatgagccactgcgcccaacctagtctttcttttttaaagcattgttttcccaaaggctctgaaaaccttgttagccaaaaaaaggcacagcaaggtccgccaaccttgacttgacttcactcctgacttttaaatcaatacataaaggcttttgtttattttttgttattttgctcttcagtaaattagggcacctaaatttatattctgagtttcgattaaaaccacccaactacattcatgtctctggactgaactttggtattttctctaaggtctgtaacaggtaacagcacattgaaaaattcagtggaggtgactccatttactgagttgaaaacctttggatgtattcgactcccttttttcacacacgccacatctagtctgtcagccttctcttggcccagtgttgtaaatgttccagaatttaaccagttgtcagtctttggcaccaccctggtcctcatctcttgtacaggtaactgcctcagcctcccttgtttttccacaccactgtcccccatgatttaccctcaacactgcagtcagtgctcaaagtctgctacttctttgctccgaagtctccagtggtttcccatttagagcaaatttcttatctcccccacttcctcctctgtcctttcacacacatcaccgaagtgtaaatggtaaatttctacatacatccactttgcttataacacaccttttgtttcttgtatgattgcaaactgtaaggataggaagaatcgtaactttgcttcttgatagccatatttgctttccctagcagctttaacttaaaatg

SEQ ID NO: 38245 - DNA, 1030 bp, Homo sapiens
gataaccagtcttgtgacaatatacgtatacttctgtttatttccttgctggggttcgggtggggtagttattgttcaaccaaaaaagccagcgagtcagtcaggcattgattgatctcataaaatgatcccccagcagtgtcctgggtcctggtggaagaaacagcagcactaactcctttccatcacccacagggccgtaattctaaccagccctgtcagtaaggggcaaccatgaatcaaatcaagcctgttttggccaccctgtgggtacttggagactggctggtggataggactggtttttgtctggcctcaatcccggaggctttattttgtagtgatttccttagaaaaggatttgaaggtgtaggaaagcagtgtgtcttcaaggctttgcagacagactttacttcatcttcaggatgtttcctgcaagaggggtttcctgcaaaacccctagaggccagatgtgccccacaggactggaaccacttccaacctggagagttgtatgagtggatgtctgcactttgaatagttcttgcctgctttagactctaattttcttgtaaaagatttcttatctcccacagttttcttggtaaatggagtaacacataaggcacataagactctcagggacgtagtaaaatgcactatcacgtaacacgcaatgtcaattgaaaccctatccaatttaatgcagatatgtcagtgctgtccaaaagaacttcttgtgatgacagaaccgttctgtagctgtgttgtccattgacaggtggtcggattgtggccattgagtaactgaaatgtgaccagcatgactcaaggaccttaattttaaattttaattgagttaattataagtacttacatgtgactagtggctactgtattagacggtgcagattagaatgtggcatttggggattttttgggggtatatcataatgaacataaaaaggcattagtgattaaaagatccaaatattagaatttctttgtaaataaattaacataaattccc

SEQ ID NO: 38246 - DNA, 1159 bp, Homo sapiens
ggtaattttggagcctttcataaagatagcattccaaaaataagaatttgtaggaagactttactttttttaagtaggtatttatttggaaggaggtaagtggattttttttttttttggtcgggggccgggggtgaggggatggagtcttgcttgctctgttgcccaggctggagtgtaatggcgcaatctctgcccactgcaacctcagcctcctgggttcaagtgattctcccacctcagtctcccgagtagctgggattacaggcatgtgccaccatgcctggctaacttttatattttagtagagagagggtttcaccatgttggccaggctggtctcaaactcctgacctgaggtgatctgcccacgtcggcttccccaagtgctgagattacaagcgtgagccaccgtgcctggccgtcagtaagtgaattttttattgggaaaaagaaccttggaaggcatggtaagtatttattgactgtgtttctgggctttatttatgatttgtaattgaattgatagagggtatcaaaaatgtagactgtgaattggtttcctcctctcttcagtcagacacacagatgcatccgttagtttccatttcctcacttagagttttgtgtttttaatgctgttgtcgttctggctggctggaactcactggacggatggtgcatggatgttttggcaacagctgccaatttgtagccaaggaccagtattggaagcgcagatgtgggacattgtgtagccaacaccccccaagccccctttaagaaatataattttgaactcctttcagaatctttcagtcatttccaaagattcttgatgtgtgtggaatgaaatgtgggcccgactgtgaattcattgttaacaaaatatgttcacacaagtcataaaaacgtatttgtgaatcaaaataaaaaaatgtcaggtcacatggtctgatttacgtaagtttatttgtgggccatatttgaaatgaatgtctggggtataaagtgaccttcctctacgaaggggaacacctgtcccttctgtttttgctggaaactttcaggtctagctgtactagagatggtgcctactttatcattatcatttattattatttattattattattttcttctgaagacagtggcttat

SEQ ID NO: 38247 - DNA, 1050 bp, Homo sapiens
caacctctgcctcccaaagtgctgggattgtaggcgtgagccaccatgcctggccaagagactgaattttgtgtttgatttagttaatgtaaaattaaaaagccatgcgtggatagaggctatcagtgcagccatagaggcaggatacgcatgaaatggtggtgaaattcttcctgtgtatccctatgctctgttcttgcttttggcaggaagtctttctgggtattctttcagctatcctcatggtgtgttatgtagacaattctgacaaagttaaaaaaattgatattttactcaaatgccttttagtcttttgggcaatgttagaatatgtttgcccatggtatctgtgccactataatgagaagataataaactacagcctagcaatttattgctgagttcaaaattatctttgtctacctttgtcatttaccttatgtaggttttcccttagctccacgtaaataatgttggtagctccatctcatttccatcattgagtaattctcttgtgattgactctacttctgtgctgttgacacagccagtttccctgtgataccatgtaaattttaaaattgcctttcaccatattactaaagaaagtcatctgaattgtggaaaaattcaagatttcagaaaactgtaaaagattgccactggagagaataccataaatgatgttccatatttatcgttgcagcacttgggttatttctggtcttctccatgatgtatgaagcttttaaggaaaatgccaggaagaatatacacgaaattgttaacagtgattactggtatattgggacttggatgatttcactgcgtaaataagaggaggaggattctaggtagttttgacatttatttaaatgtttagtaacagaatgaggttacgttagcaggatataaaaggcacatattttgagaaagacgcaaaactgctttagttacagaaacaaaatcagcctccaaacaaaaaaacaaaaactgtaaaattgtaattaataaaggcccaagtatctagaaaacatcgtatgtctagat

SEQ ID NO: 38248 - DNA, 1048 bp, Homo sapiens
tgtgacctccaaggagcacatatgcataggtgctaatttgtaaatgaaaacgcatgctaatagttttctcaggtgctgagatgcagctacatatgattgatttaagcctgttttgagccacagaaatctgcatcccagggaaagtagagaagtaaataatttttgttgcggtgtactgtggtatgaatgtgccccccaaatttcatgtgttagaaacttgttccccaatgtagaggtgttggggtcatgagggctgcaccctcttgagtggattaatacctttatcgtgggagtggattcatacctttatcatgggagtggattccttatagaaggacaagataggcccccttttgtctctcttgccatatgttgccttctactctactatgttaggtaatggcatgaaggccatcaccatatgcctgtccatcagtctttaaaatggtgagaaataaatttctgttctttatatgttacgcagtgttaagcattctgtaatagaagcctcaaatggactaagagcgcaagtgtgctgcaaaagaaagatgcgtgaagtttgtggaacacaagcagagtgactagggaaattgcggcagcttcaatatggtcatgtgtgcacttcattttcccatatctgggagatgtaataagagcgagaaaaggaggagacccttttagtattgtgcttttctgggtaagtcagtcctctttgacgtcctaatagcatgatgtgagctgccagctgtgggtttctcagccaatctaatgcagggaaacaggcctgtacctgtttctgtgaacatggtagctgggtgcagtgcagttatagtaataacatgatgagcttcttgagtactgggcagtttgccttgggaggggacagcagctacttgagacctgccactcaggaagggccagagttttcgagattgtgactcttaataatcctcgagtggggccgaggtttgacaagtgaagggttctttgtgcttcttaacaggctgcttctagaaggctttgtgtgcttcagggcattctctttacc

SEQ ID NO: 38249 - DNA, 1058 bp, Homo sapiens
tcaattgcatcatacaggactggggatgtttttctccattcttttggggatatggggggaaaatttgacagtgctttctccctgatagttcttttctcttataattagcattaatggatgatactgtggctgacaataatgcaatatccatcatacccctgttttttaaattcttttaggccctaagagtttttccagtagccctcactctccagggtgtgtgtgtgtgtgtgtgtgtgtgtgtgtgtgtgtgtgtgtgtgtgtgtcaggagtagaatagggttgagaatatgtatgtgccagtgtactttactttccctggtttcacatgtttcagcttggcatgagacagtttatacccagtgggggaatctgcccgtaaaacacaggtacctccgtaagtctgtctccacccttcactgtgttcctaacagtttttttttttatttttattttttaaacgaagttttgttgtagatcagagaatgagagatgacattaaataatactgtagctgtcccttgatgcacagaattcatgcttctgtgatggacaattccatatactcctcaatcagtgacttatcttttaaaatggaatttgttgtatttttagcctgtggggttgtttagggtggtggtatctttcagagagtgttgcacatagatagattacgaggagccagttccctagaggagctgatggggagagagattttcagaaaattcttagaagggcaaatagggtcagctgtcatctttgtttattttaaccactgtgaaatgtggaagagaatgcattggtttttcattgtcatgacaacagaggctcttcacacccctgggcacaacaggaaatgaacccattcatttatccaagtgtgagtctcagaatcccattatgtgaattccatggagtgttaattcaagtattttgatagaatgttattgtgtattctccagcagtatttaatagttgcctaatcctactcaagtcactaaatacccttcttgatctgctgtttcctcatctatcagaaggagataagattttcatct

SEQ ID NO: 38250 - DNA, 1050 bp, Homo sapiens
tcatcttctaggttgaaaacaatccttttttcctgtgtccccatatgtagaagaaattgtgttctttcttacctctgacttcagggccagttccatcagagggacttactactattataaggttttactttgagagcaagttcctcagaattgcccttattcctcactggtcttctatttctaatctttcttccattttagcccctcactttctttcccagcacccagcaggtcacatcacatattcgtatttgccgaggagccattaaaacaaatccattcataatgttggttgttttctgcttttgttaaaaaattatcgtctatgggccgggcatggtggctcactcctgtaatcccagtgctatgggagatcaggtgggaagatcacttgaggtcaggagtttgagacaagcctcggcaatgtagcgagatcccgttcctacaaaaaatgaaaaaattatctgggtttggtggtgtgcacctgtagtcccagctacaggaggctgaggtgggaggatcacttgtggccaggaggtcgaggctgtagtgagtcatgatcacaccactgcattccagcctgggcgacagagtgatttcttgtctcaaacaatatcttatcctttgtagatatcaacaaagtctggatgctgaactgagcgtctagatattttctccattttagttctttgcaacataaactcaatcctcaccctaacataaactcaatcctcaccctttctctcaacatcttgagtgcaaggaatgtgatatttgcttcatgctgcttctctaatgtttgagtttttaaaaaaatcctcaacagatcctgttaagtggaagttaattccttatttctaatgtgcttcacatggatttttacctgattctctttgaatcttagaatatttttattggatcttactgctgtattttttttgttgctgtttgtttgtttgtttgtttgtttgtttttttgagacggagtcttgttctgtcgcccagcctggagtgcagtggcatgatctcggctcactgcaaccttcgcct

SEQ ID NO: 38251 - DNA, 1047 bp, Homo sapiens
cggtcccatcttcagggtcttcttttcctttgttgccttgctagcagatgtttcggctgactttctgtaatggtccttgtctggatttttctctttcaaggaggttaggccttctgaactgtattatttcaggtcatacactgcataattccaggatatcttataacttttgctggatgccaagtaaggactcctgtttcatacacatctaataatctaataatacacatcaggattccctcttgtgtttggatgaggtgcctttattagcatgggtaattggcaagataggggcgtctggttctgggaggcgcttggagacaggtaaaagtagaaggccagctttgtcagctttctctaaaaattatatttttcacatgtggatctttgccattgcagcaagagctttcgaaaagatcattcttcttatatttgcgcaactcctttctctgaagaacgcaaagcacttatatactttattcaaaatacttcagcaagtcctggagggcggataagaggaagcagccagctggtctgtagttcagggaattgaggcccaaacggggttggtgagcagaactagacatcaaaatcaagagtctgtgcatggagtgagggtattaaaaaccttgcgatcagtttctcatagggctgccttccttgagggtctcttccaggaaacttgtgtcagcatctaaatatgcgaacaaagcttttggggaacattgtttaggacaagctccctggaggtatagttgtgaattcccctaggaaagtgtatctctctgcctttcaaattgttacaggattgctattaaatatgtttctaaagtaacttcttttgcccatatctttttcatccctcattgggagcaaatcttaccttctcagggatgaggtgaccctaaatcaaaataatagcctttggatttaaagattttgcctgccgtggtgtgaaaacacttttctataggccgtttaactttcagagtatgtgtatacaaatcaatatatttgtctctgttcgttaatgtaaagctatttgta

SEQ ID NO: 38252 - DNA, 1070 bp, Homo sapiens
agccactcccagctgcaggagtgcgggaggaatgagagaggaagtggagcgtgctatgcactggacggtgtgttctctgattccctggggtgatgagggggcgggccactgtgctgggtgatagcgctgtattagtcctctcgtgttgctgaaatactacagactggggaattcataataaacagaaatgtactggctcctggttgtggagcctgggaagtccaatatcgaggaacctagtgagggccttgtgggtgcgttgatggggcagcaggagacccagtgagggaggggaagtccactccacgaagataccacgagtccattccgcctgcctagggcctcgggtttccttttcattaactggcttgcgtgtgcgtgttgcatgcacgtgcacacatctccatatgccagggataagtaactgggctgcatgcttcgtttcccctgcttctccagttccgtttcatcctggtgctcgacagctgcccagatccagctgaacttctcactggctggaccgtcagtggactctgtgcgcttgttttctctgttttctatccgctcacctcactgccagcccagcgttgccaggtcctctctgtggagagctatccctgataaagccatcaaaatgaatctcaccattcacacgctgtggagggaagagctggggagaaaccagcaaactgaaacatgcagcgtttccctgtctccgccaggtctcccggcagcacactcatcctgaggagactcgcccctccaagaagcaggggaggcagagtccgtggctctcctcttggcagctctcccagctgtcctggctctgaagcaaggcttggggtttcctcccttctccagcctgccagtgggtagcggggcacccggggcccagctggccgagctcagctaagttgaagtctctgctgagtttcccggcacagacttgtcctctgtggtcccagttctggattcactggaagggaagcgttctctgctccagccctcgtgagcctggtgggagtgtgtggctagtgggtttcggcagcattgggaattggctgttggtt

SEQ ID NO: 38253 - DNA, 1066 bp, Homo sapiens
taatgcccgatagtaacctctgcctcagcagtgttactataggtcattgcagactgttctaacagaaagcaggaaacagttcctcttgggttacttaaacttggtcagtttcttcagcctagtgtcagattacagtgtgcagccaagagctctgtttgacttcatgcagaatttttaaagtttttaagtttcttgaaaatgtaatttcatgaactcttctaaggctactgtaactgaattccaacccacagatatgttacacacgattggtgagtatagattgaatttatctctctacgttgtaaaacaccaccaacagtggtagacaactgaagcatgtggtctcatttttcaaacaaaatatgttctcccctggactgactctaatacttgattctcaagaatgagccaaactaggaaattgatatttaatatttattgaaaggcaggagacttcaatcttacagtggcatatcaaaaaattaaaaaggaaaacagctactttgaagacatagcaagctttggatctaagttctaatgtttttcataattctttggctgagaaatttgccatgcatatgaaaaatgtgattctaaaaattttaagtaatgatgaatgagcattatcctttaagagttttttacatgacatttgcttgtttgttttaccaaaggactgataaagactcattttgaaatacttatcatttgaatttgaaatttccactttgccttgtaatcgagctttaaaggttgaggcagacgtttaattttgtttctgaatgaagatggtatattgagttcttggtactcctgaaaatatcttgcaaaatattcaagtgattgcatgcttaaggatgttttagctgtctgtattaatcagaatagactttttaaaattattatttaaagccgatttgtgaaagctttgcgcttcactgtcataacttgcagtcgaatacaagatataacacaacatattggaattttcattgtgtagtcctattatgattttgtaattatttcaagatctctagatgcaacccagttttgatggcacaaaatt

SEQ ID NO: 38254 - DNA, 1039 bp, Homo sapiens
ttgtcactcaggctggcatgcagtagcatgatcatggctcactgcagcctcagcctccggtgttcaatcaatcctcccacctcagcctcctgagtagctgggactacaggctcgcaccacccaagcctggctagttttttctattttgtgtagagatggggtttcaccgtgttgcccaggctggtcttgaactgagctcaagcaatctgcctgcctcagcctcccacggtactgggattacaggtgtgagctaccacgccagcccatttgcacttttgagcccctgacatgttgggtggcaggactggctttaatgaaggcctgttagagagcagcagagatgtgtgtttgtgggtgggggaggggactttgttactttatgttccctttcaggtcaggcttagacagggaatctaatctatatttggcgtattggccggctgtgccagactaagtgccaagtgttgttcctgggaggctgaaatatttaaaatatttatctctgctagtgaacaactggcctgggttatgtgtgtgtgtctgggtggataaagttggggaagatcattttatttttcattcttagaattaacgatggcaaagagctagctcataaaaaggactggaaatgaggggaagcgtttactgttaaggctgcccttttccatgaagagctctgtgttttgtgtcctgctgataggttttggagtgccaagaaaaacccattgtgatctcagccgggtgcagagtgtagcagctagccccatgcctgttggaggatagaagagtaatttgagaccaaggaattgattgtttcaagcctgccaagccaaatgttacagagccattagccacacacagggttgctatgggtaggtcccttcagttctctttcagaatgtcactataaacgtgctccactgaagtagaacccagagtcatcaggaaggaggtggagaaagggacgtgccactgcgtaggttcgtgcacttccagcatctcatttctcctcactgatggctgtgtgaggcctgtgcag

SEQ ID NO: 38255 - DNA, 1031 bp, Homo sapiens
gtttgccataccatccttcctttgttttaggaataagcaagtatttttcttttttcctttttgttttttcattgtcagtattcaacataatgtgagcaagtattttttttttcttttttttttttgagacagagtcttgctttgtcacccatgctggagtgcagtggcatgatctcggctcactgcaacctctgtctcccaggtttaagtgatagtcctgcctcagcctcccgagtagctgggattataggcatacgccaccacacccaactaatttctgtagttttagtagagacagggtttcaccatgttcgccaggctggtcttgaactcctgaccctaggtgatctgcctgcctcagcctcccaaagtgctgggattacaggtgtgagccactgtgcctgtagcctgagcaagtatttttaagcaaaagaggcaggctgacagttcacaagttatccttcatgtcctgtgatgccatttgtacttaaatataatgttaactcttttggaaaaacaaaaaaaggactccttgtacattactgctttgaatacttgcacagaacaaacaaattacaagcccaaatgttgttgtttttaacaacctttcagcagctatgaatgtttatgtgtgaagatgcatgtatgtcttgattgctggagctacactgcttcccgagaacatgaaaggacactttgaacacttttggaaatataaacagtagcaggaagtagactgccatgtctgtcctaaggcatcatgtgaagttggattgctcttggttaaatgtacaaccattaaccatatacagttgtttggtctacgctgaccatttcacaagtgcacatacaaaagcaccctgtgagcggatgacgccataaatatgatttcctctttgcaatacgccatacagttgtattaactgtggatctcttggcccatcctgggaagagaaaggctgattttcttggggtcccagtggcacagggctcctgattcaggcctcatcacagaccacagtaataagaaa

SEQ ID NO: 38256 - DNA, 1038 bp, Homo sapiens
agccagcggtgttagacagcagcttctatggcagcagcaatgtgcagcagcagcaggggtaccataggaactgtgcccagagtagcagctcagggaccattctgccattatatttatattcacttttaattataggcaaattaagggggaagttattcagaaagttctagaaaagaggtgataacttccaggtcattgccatggaaaggggtagttagtaacttccaggtgttgccatggcagtggtcaactgacatggccctggtgggcatgtcttctggagaggtgctttcacctctttcccccattgcagcgagtcttcagtctggtttggcattcaagtcctgcccagccccagtcaagcctgcctcataccttaataagaatctataaatattttagagtatttcttttcttttcttttctttttttttttttttttgagttggagtttcgctcttgtcacccaggctggagttcagtggtggcatgatcttggctcactgcaacctctgcctttcgtgttcaagcgattctcctgcctcagcctcccgagtagctgggactacaggtgcgcgccaccacacctggctactttttgtactttttttaaaaatagaaatggggtttcaccatgttggccaggctggtctcgaaatcctaacctcaggtgatcctcccgccttggcctcccaaagtgctgggattacaggcatgagccaccacacctggccattttagagtattaaatctttctctccatcaatcaaaatagtagtagcttttaaagctgcctactttaatggtcagtattattttatttaccagaactttttcataatcaagaattcaaagctctctaaaataagggctagcaagttaatatacatttattgaacctgcgaggcggttgaacctgtgaggcggaggctgcagtgagcgtagatcacacactgcactcctgcactccagcctgggtgacagagcaagattccatctcaaaaaaaaaaaagaaagaaaaaagaagcttctccaacc

SEQ ID NO: 38257 - DNA, 1047 bp, Homo sapiens
actcaagttcttatgcttttcagtgctattttgtcattaagaaaacatctagatttgtgggcgtgggtggctcatgcctgtaatcacagcacttcgggaggctgaggcgagaagatggcttgaggccaggagtttgagaccagcctgggcaacatggtgagaccctgtctctaccaaacataaaaaaattatctgggcatcgtgctgcacacccatggtcccagctactacaagaagctgaggcaagaggatcacttgagcacaggagtttgaggctgctgtgagctgtgatcatgccactgcactccagccggggcaacagagcaagaccctgtctctttaaaggggaaaaaaatctagattttatttattttcttgcaatttaattggatagtaattggttttttgttgtggtttgcctcattttttttggttgcatggtaattatctataaatagattataaacttcttgatgatagagagcatattttatactttataaaaatattttcatgtggcagaaaatagtgacaaaatcagagaactctgaacttcctgtgatcctagaattgagagttaagccaaatatacaaaatctttgaagcctcaggtagattgggtgcttggtcttcaactccattccactctgatcctagggtgtcatcctgtactgcagatattagaaagcaaatacacacactcttccccaactccctacagcaggtttctaaacatccatccagcccagccaatctgatgcacttgcatgagatgtagaaggtgtaggttgactttcgcttcccttctgctgcctctgttgagagcacacaatgctggaggtgtttggttcttctgcagcagggttcgtgaaagttgcagggtttagtcagtaaccacaagtcaagaaggaggccgtaaggcatgcatgttgctggtgcacgtggttctgtatgtggcatgattctggagctggcagtagtagtaatggcgtcctgattgtagcaacgataatggggtctggagccagaaatgtccaattcccaatg

SEQ ID NO: 38258 - DNA, 1051 bp, Homo sapiens
gtgagaagagtttcagggcaagctgtataagaggttatgtgacattaaataggaagtttgtagtaacctactttttatgcaacatggctctgcctgttattgaaaagcatcttactttagctgcttgaccactgagaatctataagaatgacctcagggtcaaatatatgtaagaaaattgggtgattcatattgcaacagtgactacttctttgcgtacctgcccctcagtatgaggtagaagaatctccgtccctgtttttagcttaggattatttaagagacctcctggcttgatgcatacctggccagaaagggaatgaatgactgttgtgcactgaatgcatatccctgcatcataagtccagtttctgaagctaagtttgttatgacctcttggacaacagatcccaccagtaaatgtggttaaatgtctttagcttattcagccatggcagaaggtaatggtgtcgagttttttgtgtttaatgtcatacactcatcatctaaggccggtaacaacttgggacaacataaaaaaatgaggttgattcaagtcacagagagaaagtttaaatggagagagcctgaactatgttgctgatttcttttcttttctttctctctgatggagtctcactctgactcccaggctggagtgcagtggcacgatctcggctcactgcaagctccgcctcctgggttcaagcgattcttctacctcagcctcctgagtagctgggattacaggtgcctgccaccacacccagctaatttttgtatttttagtagagacggtgttttgctgtgttggccaggctggtctcaaactcctgatctcaggtgatctgcccgcctcagcttcccaaagtgctgggattacaggggtgagccaccgtgcccagctgctgatttcttaatctgtggcaaggactactagttgcctttccaaattccattttcaacttttcctttagcaacagaacattagcttagttaaaggctatactcagcctcctttgcggtcaagctgatgtaagtcaaagtgttg

SEQ ID NO: 38259 - DNA, 1027 bp, Homo sapiens
tttagatttttattttccctgagcacatttaatgcacgggtagctggggagaatcagtgggggataaaaacccaacctgatttcccaggctatcaattctgtctacttgacagtgatttctcccttccctagagtgttttataggttctgttagttgcaacccttttttcaaagtcttagaatactaacctttaattttattttagaatgcatactataaagattgtgatttatggatcaatgtctcatattcatgaatagcactagctcatggtattaatggggaaaggcagatgaaatggaaaggagccggagggtaggctgtggtggggcacactgtgaggggcagaacttgggaagcggcccaggcgctgaagtcttaccatgtgctccagcagtatggacattcacccttcgcttcagtgtctttgatatgttggcatgatttcctattaagaagacccaaatcatttcaaatgactggtgatgtgtgtgagagtttgcagaactgtatgtgtctatggctgtggagaaagaatgggggggaactcacttcattaatattttacagtaacaactacttctgaaaggttttaaatgtaactcgtgaaaagcaccaactttcgtacataacattttctcctttcgagattgctaatttgtggtgcagtttgctataagatcatcttgttttgcactctatcaatttaattctgttcttttatttaaattgctctggttcctccctgtccttcaacaatcattattattagtagcctaaccacaggtatatatctaatgttgtctactctaattaaaatacacaattgttttcatgtttgagtgttcatgcatctcatataatttattcctttggagtctatccagtttgcaaaacagacaaaattttgaatgattaagggctgaataaaatattttcttgccattgcaaattcaattatgttttgtactttgcactggataacaacttaagtttcctaaaaaggcaaaaaatttcaacacatca

SEQ ID NO: 38260 - DNA, 1239 bp, Homo sapiens
gtctcggtggagacgggtcagcccttgtccccgccgtccccgtgttttttctggtggtcagcgggctcttctgccttccctagttcccgagggagggcaccctcgtgggcatgggagctgccccggtgtcctcccgtgcagtctgtcacccacaaagggggacgcgggcagggcgccggagtgggtcccctctccgggcttcccgagggccgcagctgcctgctcggcgcctggcccggccgcgggcgggtgttgtctgacctggtggtttgttttgggttgttgatcaagcatgtcttgagtttggtcggtggcgccagttagtctgcagcgagaaggttcacacaccccctctattcattcctcttccacaggtgtgcggccgcctgagcccgagccaggagcactagagagggagggggaagagcagaagttagagaaaaaaagccaccggaggaaaggaaaaaacatcggccaacctagaaacgttttcattcgtcattccaagagagagagaggaaagaaaaatacaactttcattctttctttgcacgttcataaacattctacatacgtattctcttttgtctcttcatttataactgctgtgaattgtacatttctgtgttttttggaggtgcagttaaacttttaagcttaagtgtgacaggactgataaatagaagatcaagagtagatccgactttagaagcctactttgtgaccaaggagctcaatttttgttttgaagctttactaatctaccagagcattgtagatattttttttttacatctattgtttaaaatagatgattataacggggcagagaactttcttttctctgcaagaatgttacatattgtatagataaatgagtgacatttcataccatgtatatatagagatgttctataagtgtgagaaagtatatgctttaatagatactgtaattataagatatttttaattaaatatttttttgtaaatattatgtgtgtgtttttttttaatctatgggaatatttcttttggaaaatcatttttcagctcaattacagagctcttgatatcttgaatgtcttttctgtttggcctggctcttaatttgcttttgttttgcccagtatagactcggaagtaacagttatagctagtggtcttgcatgattgcatgagatgtttaatcacaaattaaacttgttctgagtccattcaaatgtgtttttttaaatgtag

SEQ ID NO: 38261 - DNA, 1224 bp, Homo sapiens
gtgccacaaaaacctttcatcattttcacttcttcctctgtaatatgaaaacgagacaaattcatcaggttgatttttggggatcgatgctgtcagggctcgcagagacgagccatcagatgttatttattacatgctttaccccgtctcctagctgctgtgagaaagcccacagtttgcaacctcacaaagcaaagagccagctggaaagtactgtgcatccagacaggtcacatagtcatgtcctgaaccaagatagctctttttgccatgatttcctacactctctgatttttctcattaaaaaaaaaaaatcttgaatttattttcttaagctctagcattctaaagtttaaacatatgagcctttgaatactcctgtctaggaaagagccgtgtaaattctaagtatctctataattgacttttgatatgttacttgtgtttaaacccaatttgcaacaccccttttgttggctaattttgtcgctatgttgggtagcagaacttgtgacgatcacactaataacataaagtttcccacctttcttgttgctgttttccttgttagcatctcagacttcccaattctgggaatagtctctaggaggcaaggttttcagctttggaaatgcatgcgtgacacagtagtgtggtatggaaggcgtgtggacttgaagatccggctccagaaacacgctctgccaattaccgtgtgtgaccttttataaattacatccatgagctgtagttacctaaaatagtgatcctctctccttcactggctggaaggattaaatgagatagtgtttataggaaatgtactttgtgttccttagttgcctccccccgccactccccgtggtaggaactcttgagtacttgtcaaatctgaactctcggcatttttacctccttcagggaaaactattggacaggctcttactgaacacccgcttttgtgcagaatgcacttcctgatactctgggagtttcagaggctactaaggtgtccttctggccctcaaggagttcatctggagacagggagacgacacattttcttcaataactaagaaaagaaagggcaatgaagaccataaggaaataacagtgaagtttcttaggcatccaaacttgatggaggggacaaaggaggcttcaggaagttttaaactagaacaggacttcagcgctcttaacattttggtcagatacttctcc

SEQ ID NO: 38262 - DNA, 1038 bp, Homo sapiens
tcggtgggcatttcctctctctttctgtctacctacagccaaaacaagttctggttacagtgacagttttaagtttgccatttgtggttggttctattatagaggctgggggaggaaggcaagcagtcctcacttcttgcttcctgccttgctctagagtgtaaggatcagcttctctaatcccttgacttttcactgctctatgtagtcagggtagacaaggggtggccctcaaacaacagccacctctggaggtctagcgtgactaaaccactgtcttcttttccaaatccagcactggggaccgacgtgtgggcctcccatctgacttgtggagtgaaagaaatgggaatagagcagcgctgtccatatagtcgagttttgtaaatatttgtcagatggaactagagatgcattatcacattcgacagtaacaagtggcaagtgttgagctcttttaagtcttgctttttatttcttataatatgcaaataactgttaaaatggccagccagttggctgtctgttttagctaaggtaggtctcttgcaatttttgcaccctagggagatctcaataggagtaggtctagccctaaactgtgcaggattaggaattctgatttactgatctggagggcggctttgtgttaatcagagttctaaaggcggacaaactagactgtgaacttaatacttaccctgagaagtataactgccaagtggacagttgcagaaattggttattgcctgtgttctcgatcagaaggttattagctgtgtcagagtaaaggcattgaatgatcccattagtaccttccagctgtggtctcctctctagagcgtacctgcaggggagggagtactgctagccacttatggagcatatggacactgtcattcacccacccaggtgtccagttccatgactctggtgtgaaacactgaatttgtttgttacctttttttttttgtaagaaaatacttgtttttagtacctgcttattatttttttaaaataaaaaatatataaggaagt

SEQ ID NO: 38263 - DNA, 1200 bp, Homo sapiens
tcattctgttgcccaggctggagtgcagtggtgcagtcttggctctctgcgacctctgcttcccgggctcaagtgattcttcctcctcagcctactgagtagctgggactagtggcgcatgccatcacacccggctactttttgtattttttgtagagatgaggttttaccatgttgcccagcctgcctccttattttacttgtatgttttttaaattattgctgctgctaccaccaccaccgctactattactgctactgactaatgtttattgaatgtttttatgtgtcagggatagttttaagcacgttatatgaaatcactaatttaaaccttaacatctctataaagtgggtgtgattattgtccacattttacagatgatgaaaaagacgaattagtaaatttaagtatctgccctaatttgcatttctgtgagtagcctctttgaattctttatcatttttgtgcccaaggctatttatagttttcttactgaattattggaacttttaatgaactatagataatgggctttctctggtgtgtgtgtgtgtgtgtgtgtgtgtatagtaaatacaggcatacctcagagatattgcaggtctgattccagagcacagcaataaagcaaatgtcacaataaagcaagtcatatggagtctttggtttcccagtgcatataaagtttacactgtactgtagtctattcagtgggcaacagcattatatcaaaaaccaacgtacatattcttaacttaaaaatactatattgctacaaaatgccaacaatcccctgagccttcagcgagtcatctttttgctggtggagggttttgccttcacactgaagactgttgctgtttagggaagaagtcattgaatgctggggcagctgtggcaatttcttcacataagaaaaaatcaagttttccacattgattgactcttcctttcataaaagatttctctgtagtatgtgatactatttgatagcatttttcccacactagaccttctttcaaaatcagagtaatccttcccaaactgtcctgctgctttatcaactaaatttatgcaatatcccaaatcctttgttgtcatttcaacattgttcacagtcatcttccatctcaagaaatcgctttatttgcttatccgtaagaagcaactcctcatctattcaagtttgaacatga

SEQ ID NO: 38264 - DNA, 2154 bp, Homo sapiens
tgcaatagtgacatcaaagatcactgatcacggatcaccacaacagacataatagtaatgaaaaagtttgaaatattacgagaattaccaaaatttgacagagatatgtagtaagcactgttggaaaaatggtgctgatagactagcttgatgcagggttgtcacaaaccttcagtttgtaaaacactgcagtatccgtggagcacaatgaaatgtggtatccctgtattgttttgcccaagcctattatgtttcttttgatttttctatgatgtatttctttctacatatgtttatttagtttttataatgtcatgtgtcacttaacgatggggatatagtctgagaaatgtgtcattaggaaatttcatcattttgcagacatcatagagagtacttacacaaacctcatggtatagcctactataccccaaggttctatggtctagcctcttgctcctaggctacaaacctgtactgtatgttactgggctgaatactgtaggcaacttaaacacagtggtatgtatccaaacatagcaacagtatagtaaaaatacagtcttataatcttatgggaccactggaatatatacagtctgctgtcgactgaaagcatcattgtttggcagatgactacatgtgacattacagtgctttttttttgagaccaagtcttgctcttgtcgcccaggttggagtgcaatggcacgatctcggctcactgcaacctctgcctcctgggttcaaccgattctcctgcctcagcctcccaagtaactgggattacaggcgcccaccaccacacccagctaatttttgtatttttagtagagacagggttttgccatgttggccaggctggtctcgaactcctcacgtcgtgatctgcctgcctcggcctcccaaagtgctgggattacaggtgtgagccaccacacccggccattacagtgctttttttgagacagagtttcgctcttgttgcccaggctggagtgcaatggcctgatcttggctcactgcaacctctgcctcccgagttcaaccgattctcctgcctcagcctcccgagtagctgggattacaggtacctgccaccatgcccggctaattttttgtattgttagtagagatggggtttcaccatgttggtcaggctggtctcgaactcctgacctcaggtgatccacccacctcggcctcccaaagtgctgggattacaggtgtgagccactgcacacagccgaaattacagcttttacagtttgagtttggtggcttgctttgggaaggcctttcctaatctgcaaaccataacaatattctatatattttttctcctggcttcataattttattattttgatctttaacctcagtggaagggtgtgtgtgtgtgtgtgtgtgtgtgtgtgtgtgtgtgtgttttaaaggtgtgactttatttttcctaaacgaatagccagttaaactagtgccatttattggatggttccgctttccccacgcatgcacttgaaatgcccttttctcagagagacacagagagagtgtgtgtatgtgtgtgtgtgtgtgtgtgtgtgtgtacatgcatacatgcatgtatgtgctgtgtgcatgtgtgtctgtgttgttctgtctctgaactttctactctgctccattgatacctttatccctttgtaaagaagcagcacactgttttgaatacagtagctttgtgatatgatttgctatagataaggaaaatctgcttcctgttacatacttttttttttcattaaaattacagtttttatgttcatgcttacttgcatttttacaaattgagcttcttctcccccatccactgtgagtttagggttataagaaaaaaaactctctgcacttattagatagtctactgcactgggaatagcagtaagctgtttacattttttctttcatctgatacaacaaaccttgagagttggtgccaatatcctcatctgtagatgaggaaagtgaggctcagtgatgaagcagtttgtccaaggctgcatttctggacattggcagaaccagggttccagaccaagtccaggaaatttcgaaacctctcttaaccattatgcaacccagacacgtggggttttctcacatgacgagggc

SEQ ID NO: 38265 - DNA, 2021 bp, Homo sapiens
gagagaaattatttacccagtgcttttttttaatgccagacactgtaacccttcctcggctcttttctagagttgggtctgtggtttggaatacaaaggtgaggaatacacagccctggacattcagaatggggcagtaggctgggaggagctgtgcgcacaaccccaggaaccttctactttttttttttttttttttgagacaaagtctcgctctgtcacccaggctggagtgcagtggcacgatcttggctcactgcaaactctgcctcctgggttcaaccgattcttctgcctcagccgcctgagtagccaggactacaggcgtacgccacaatgcctggctaatttttgtatttttagtagagacggggtttcaccatgtcggccaggctggtcttgaactcctgaccctaggtgatctgcccgcccgccccgcctcggcctcccaaagtgctgggattacaggcgtgagccactgcgcccggccccttctaccttttagaagaaaatgcaacaacgtgtcttagctctctagtggaggaacagaggtctcaggtggatccagaaatgctttgctatagagtggcatttaaactgggacattcatgtgtctaaattacctaacagtttgagccctcccttcccccgaggtggttgcttcttcatttgaattctctcaggtgccttctgttggttcttagaggtgaacatcagaaaagtaattttctttggagaagtttgaagcagcctcccaaacagaagtcctgttgagctcccactgggagttttggaaaagtaatctcatttattaggaatagtgtattgattttgtgtgtaaaatggactaagaggcctgtgacaatgagtccatttgaaattgcaaatttaaatatctaatacaatagttgtgcggaaatactacaccagaatataaatgattagctgcttagtgaatttctcatgtgcatgtaattaattggcagtggtggtggggatcaagtttgttttcatatcctgagtcctttaatttaccttttcttcaacaattactggtgtaagtataggggaattaaatcttagtgtcttttataaaaatatatagttttgctttgtcattcatttattgttttttggtctacattatccaattttgtattacacaatagaaggcacctaatcaaagatttcttgtttttactgcatgattgcactcttaattttgtgaaagcataggtttacttccagactgagaggtaaatgaataattattttgtgatttatttagcacttgccgccccaatcttgtttttcacgtctgcagttatggctgaaatatcttattccattcccagcctctctgttggtggtatctgcctgatctccacctagtgtcattgtgggatcgtggccacacatgggccttccagggctgtgctgttggtgaccagtggtgcttgtaaccctgaagtgttggcatggcctcagctgactgggctttccctcatgcccagggcttaaacttgaactctgcctgctctgttagcagtttttctctacatttcttttaaaatagactttcacttcttccttcccatcccccccaatacaactgccctggcatcctggctttttccattcttgacaaatgatctgtccactgtaactgtagctccactgtgctgatatctgttgaaattagacctagaatctaaatgtggctccatgaaactatgggtgagacattttttttcttcaaatagtctatggtttattggcaccccaaaccacctatccataccttctccactgtgatgctgggggaagaaaatggggtaatatatgtgtaaaagtgactgagaatgaaaagttctgcataaggtacaatgttagctggggtttttgcatatataataagaagacaaatgttcactaccactcctgcctgccttccctgggcatatcgaactgattccagcctaatagcatttcttatcatataatgggaatcacaaaccctc

SEQ ID NO: 38266 - DNA, 1831 bp, Homo sapiens
tccacctgcctcggcctcccaaagtgctgggattacagacgtgagccaccacgcccagcccccaagcttcctcatctaacatgggacggttaatgacttacctctcagggttgactgggaagggagcggctgaatgagaaccaatgttgggaatgtagacagggtcagaaaggttagccctctgatacgtgctaagcaaagattagagttggtgctgaaaacaggtctcttgcctaaatcttggattagtacacaacttccacatataaagagttaggggcatctttaggtagataaatctattttaattgttccgtaaatatatttagaagaattttggtcaacatggatttggtgcaaatttcgttgcagctttttttcccccttttgttattctaagctgccctacaatgatatttttagaaatttctgggaactcaagactgtcattgccagggcagagccaaaacaccagaggttctcgtagaccagtggttctcaactggggaatgttctgcccctcatgtgacctttggcaatgtctggagacatttttgattttcgtaactgggagtgggagatgctattggcatctagtgcgtagaggccagggatactgttaaacatactataacatatgtgacagcctccccacaacaaagaattatccagcccaaaatgtcactagtgccaaggttaacaagtcttgctctcagataattctttgcctatcacaggcattctttgtccccagctacagtgtcatataagccatctcaaacaagggtatattcgttgtcccccttatccacggtgttgcttttcgtgctttcagttacctaaggtccaaaaatattacatgaaaaattccagaaataaacaattcataagttttaaattgcactcggttctgagtagcatcattaaataccacctgggacttgagtcatcccctttgtccggtgtattcgcactatgttacactattccccaaccctcattccttactgtataggaaaaaacagtatgtatagggtttggtactatctgaggtttcaggcctgcagtaggggtcttggaatgtatcctcggaggatgaggagagactaccgtattttttccggaaagtctaggaccatttctcaaactaagagaaggacaaagttggagaggaaactgtttctgttctgcatagtttgagatatgtacaattttgagacccaatccaatttttttccaaccactttcttgtgtgttttttttttcagtatcttaacccacattgatgttttatcttctgtaagcactaaacagtggcaagttacacaaataaaatgtgtgcttactacattttaattgctcttttttatgcaaataataatagatggtttttttgttcttacacattgattcctgggggaattttaatattttattaaatattaaataaaatgccctatttttttcctttcaaattgaaccaccctagttataatgagccatcagttctaaaatgaatcctctctgttaaaatggcagcttgttctaactaatcatgctttgagtattctgctgtagttaatcaaagttaaaataggaggttatattttaaatataaattctacttttaaattctaaatttgctatttttccattctggaatattatgatagggttaccagataaaatacacgatgccaagttcaatttgaatttcagataaacaacaaataacttttttagtataagtaggtcccatgcaatattggggatatagatattttttaaatttgttgtttgtttgaaattctaatttaacttacttaatgct

SEQ ID NO: 38267 - DNA, 1056 bp, Homo sapiens
tatggaacagcttctgccctgaaattttctgattgagagatggatgtggtctggagtatgtgaaaatgggatagatggagggaaggttaggggagaggtgaacagggcctcttccagggtcttgtggaagaccctgttcgacgtttcctcacgtagactgtctgatgaggctcttccagggtgtggtatggccagggtgtgttaaatgtagggagcacaaggcaagaaagggctgcaccaagctgcttcctgcctcagggcctttgcacttgctgtcccatctgcctggaatggccttgcctcacatcttcatatgaccttggctccttgtcatctattgactcacctgtcacttcagaaaagcccttgctaccatctggtctgccagtcactctttatcctattttcatgttttattaacattcatcaccatctgcagttagactcttttgtttgcctagtgcccacaatgttgcccgacgctcactaggtgctctgtgaatatttgctaaatgaatgaagaacttgaaggaagctggcagtgggtggactcgctgagattaaggggcatggaagattactcaaggcagcctcagcccctttctaatgttttgttttgtttttaaattcagactctgtggactcagttcaattcacacaattgccaagtgcctgtctgtgtcgtgcattatgctagttagatcccaggaatcaaatgaattagacctgaaggagattacagaccagttctatggttcaggttgttaatgtgggcccctggatagaattctagatattacttaatttttttgtgtgactaccctctaactgaaatttagcgttttcttctagtatgaacgtaggcactaaaccacagtagaactggcagtgtgtttgactgtcacccatagaaatagatattttcatatcacattacacttgttgcagctgtcttgaaatattgtttatgctcatcatgacttcaaaattacagtaatttttgacctgctgctggatctttttatttcacgcactaacacagaagaacatagatta

SEQ ID NO: 38268 - DNA, 1347 bp, Homo sapiens
tatcactccttaaaatcatgttaatgaagattcctatcaaatgtggtccccaccccctgctctgggtttactgcttccctgtgaatcttctccacacttttgttaattttgggatggaagtttgagagagatacttttttcatagataggttggaagtgatgctcaccttatcaggactgtaagaggatattgcaagctttgatgattgagcagaaaaatctttgcacagctggtcagaacaagcttgtcctgccttgtgggagggacagagttttccaaatgatcttttggttaagaccttaattaaaaacagcctaaattcacttgtggcaagaatttattaaaggaagataaccatgagcaaatccacgttgtggtataagaaaagggagcaccatcgttaaaaaagtcagaggcttgaattctggtgaacttagcacaaagaagcaagaaaactttagactggtttcttaacagtttgctatctgtataactaggggtgaattgatctcaaagacctaagaatctgtggacttaaagacactgatttgtggcataattcgaggtagtttaaactggaatatcaaggtgtcagaagaaaaatgtacaagtaatacatctcagtttcttttctcctacgccacttaaatcttagacccaccgaaagctctaaatgtatcagtggatttttcattatttccaaaaatattctgcttgctctttctgaataaactatagagagaaacacaggtttctcttcaggtgccttattaagtttaactgttgtatagtacagctttgcttctttgtttcatttaggaccagaaggggtccaggtagctgaatatcccttccttgccctgacatccccattcactgcagcaagctttataatgcctgtggtcatccttggtatgaatgagcactggagaccccaccatgggcagtactaagcagaatcaggcttctgttcatcagaatgaacaaaggcacacgcataaaatgagagcgtggcagatggagaggggtggggagcctagagggtgactggctgcaggcctcagcagtggagacaagggcacaggaacatggcgccagggccgacagatttggcgtcagccgtggatgctctgcatagcacccatctgtaaatgggtgtggtcctggacaagtgaggtcctgctggattatttaagaatattttatggtgagttgtatttgttctttccagcaacagctctttgaagtagtttagtggtatatccattttacagtcagcacttcagactcaagtttggtgatcacatgccccaagtctccaactcctgggctcaagcaatcttcct

SEQ ID NO: 38269 - DNA, 1058 bp, Homo sapiens
gcccgtgggccggaggttggacaagcttgttctagacgttcttcctctgtctctctatgttagatgctttcccacgttagcagtccttttcccctcctctcttaaatgaccaagcaggactaggaaagcataaaggcaatgagaacacgctgcctgggatttaagcccttgaattccaataaggttctaatatggacttctactaaagcataatggttaattccatttagagagtggggaacatctttcatactttttaaaacatcaggccaggtgcagaggctcatacctgtaatcccagtgctgtgggaggctgaggtgggaggatcacctgaagccaggagtttgaaaccagcctgggcagcacagtgagaccccatctccacgagaatgttaaaaattagccaggtgtggtggcatgtacctgtaatcccagctatttgggaggctgaagtatgaggatcccttgagcccaggagttcaaggctgcagtggttgcagtaagctgtgattgtgctgctgcactccagcttgggcgcagagtaagactcagtctcttaaaaatttaaagtcattattcccaggtggagtgtactactgagaaatagaagtcccttggttggacctagcttataagaaacttcaaagcagtcattgccaactacaggtgatgattggtaatttgagcaaaatttgatagcttttgaaatggcatcaatttaaaagaagtagtttttgtttcttgatccggggcaaggctattattctggtttccaataccctttatccatctgaagagcatcaaaattggcgggtgccaatcaagtttggaaatggaactgagcagcatagtaacctatagaaaattcatgaatatagaaaattcaagatcatacattaaagaattgtcttttttttttcaaaaaaattttttttctaaaaatgtagtgttatattaaaatgtagtgaatattataataattctaaaaatgtagtgtttatattgttttcctgcttaagttaggccaaagttggtaaaatgcattttagaaccctat

SEQ ID NO: 38270 - DNA, 1027 bp, Homo sapiens
tagcattgataccccctctacatttgtttataaaacagtggtacatcttgtaatcagtagcttcttagaactgaggaattcgttttgtcatcactctgaagggcagtttagccagtacagtaagtcttcactccataggttcttggaaattgcaattttaaatgaatgagatatcatgaaagcaatttgaccataggctaattgatatacataagacttaagttccttccaaaatacgtacaatgttaaacactgaaataaaggtaagctatacatacatttaagaaagattaatttaaaaacaagtaagatgattatttaatcagttattccagctcggggtttctggtggatggagcctgtcccagcagctcagggtgcaaggcagggcaccagccctggacaggatgccatcccatcacagagcacattcgtacacagccagagtcactcagactgggacagtgtagacatgccactttgcctcatgtgcacagctttggggtgtgggaggaaccctgaggacccagagaaaacccacgcggatgtggggaaaacgtggaaactccaccgatagtggccatggccaggaatccttttttttttcctcattaatgttataacaaaatgacattgaatgaaatgttattcaaggacctgctgtagttacaaattggttattagacgggttgaagtctctgcttggccactttctagctgacgttaagtttctcatctgacttaaaagtccaggaaagacgaaatgatattatttagcacagcagcctgacttatagtagagcatcagtacatattacctatagttgttttcatgaaactatttcaccagaagtttagggatttatcctcaaaggcattaggagtgcctacacggcacataagggcattgttttgtatcataccacaagtagcacttaaggttggaatcattgctgaccccaatgtaaaatgcctctttctggaccagaaaatggaaagtgaaatttgcaattcatcccatgttatt

SEQ ID NO: 38271 - DNA, 1487 bp, Homo sapiens
gctctttttggtttggttgttatgagcgctctcaatgcaaagcttagaaacctctccagagaaataatcagctctccaaggagtgctcttgcagactagcatgttgccttgcttgctggtgtgtatcttcctataaattcctggtatccagtgtccatacaggagaaattggctgacttgttttcttgctgtgttgtatgacagataatcagaaatgtaactctggtgccttgtcatgtgcccagaggaagttaaatgtgcttgcctttaatatgtatatgtatacacacacacacacacacagcagttagaaaatagatgtttgtaaaatatgatttttttagggaatatgtaaaaactggcatctcttcagatagacatagaggtacttaaaaaccttggttaatatgtcttgtttgtatactccatgtggtgtattttacacagtatctaaaggtgttgcctgattttgaattagttaaaagacaggttagagacgtgggagaagagtatgttgtatttcttgtctgatctgaggaattttatattcctgaagtctataattaggtgcttgtgttgattgtttattgaaacaaagctgaaggtgggggtgaggggagtgccacatagtggaaaacactctatggcaaacatctgagctttacttaaaagcatgggctgcaaagaaatgtaaattcattggcttaattggaagagagtatttatagaaattgaatgatccagtaaaactaaaagcctggcttctttcatcttcagagacctgccttagtaaatgctgttctggaaatcccttgcctgcaaagtggactttgccatccaatttctggcctcctggcagtcagtcactttgacctaaccctattgcttgactcgtatttactacgtactttccttttttggcttagggttgtactgaaaatgtacatgtaaagaaaaaaatgtccatgtacactgaagttttctgattttttatatagctccataatttgatttcaataactattacaaagaaacttttataagaagatacaatttgaaaatcttgctgtgcagcctcttcccatctactctgcctgcctactacgccttttatagttcaccatatccattaggttctcgaaaattcttccactgtttatgcaaatctttaaatttttaaatacttttattttccttcttagaaaaggtgacaactagatgctattctgcaccttgtttttacatggaatcatataccttaataagcttttcagacactctttcaatcttctgctattatgaagttgcagtgaataaccttgtatatcacttcatacatgtgcaggtatatctgtagggtaatttcctataaggggatcaggatttgggccagcagatatgtgcatatgtatttgtgatcgtgtggctagcccctcctttttttaacttttattttaagtttaggggtacatctgcaggtttgttat

SEQ ID NO: 38272 - DNA, 1054 bp, Homo sapiens
ttgtgtcatctctgatttctttgaagagtgtttttaattcttgttgtagagatctttctagtgtattcctaggtgttttattctttttgtggcagttgtgaatgggattatgtttctgatttggctcttggcttaactgttggtatatgggaatgctagtggtttttgtatgttgcttttgtatcctgagacttcgctgaatttatgtatcagcttaaggagcttttgggctgagactatggggttttctagatatagaatcatgttgtctgcaaacagagggtagtttgacttcctctctttttatttggaggcactttatttctttctcttgactgattgctctggccagggcttccaatattatgttgaataggagtggtgagagagggcatccttgtcttttgccagttttcaaggggaatgcttccagcttttgcccattcagtattatgttggctgtggatttgtcatcgatggctcttaatattttgaggtatgttcattcaatatgtagtttactgagaatttttaacatgaagcagtgttgaattttattgaaagccttttcagcatctattgagataatcatgtgttttttgtctttagttgtttatgtgatgaatcacatttattgctttgcctgtgttgaaccaaccttgcatcccagggataaagcctacttgatcatgatgggtaagctttttgatgtgctagtgggtttgttttgccagtattttattgaggatttttgcatagatgttcatcaaggatattggccttattttttcattgtgtctctgccaggtttcggtataaggaggatgctagcctcatagaatgagttggggaagaatccctcctcctcaattttttggactagttacagtgggaatggtaccagctctttgtacgtctggtagaatttggatttggctgtaaatctgtctggtcctgggcttttcttggttggtaggctatttattgctgattcaatttcagagttcattattggtctcttcagggattctgtttctttctggttcactcttgg

SEQ ID NO: 38273 - DNA, 1069 bp, Homo sapiens
ctttttgagaagaagtcttactctgttgcccaggctggagtacagtggtcccatcttggctcactgcaccctccgcaccccaggttcaagcgattctcccgtctcggcctcccaagtagctgggattacaaaagcacaccatcatccctagcttattttttcttttttttttttttttttttagtagagatggggtttcaccatgttggccaggctgctcgatctcttgacctcaggtaatccgaccacctcggcctcccaaagtggtgggattacaggtgtcaaccactgcacctagcccgttctctctttaatctcccaattaacgaacatctactgcgacagcatccattacctagaattgtaggaaggtatataggatagacgtagcaaagaggtaagtgggtaagaaaataaacactcataaaaaggagacaaactgtcagagtggtcccctagctacacctgccacaattgcctcctgagaagtccttgttctgcacgagctaaaattcccattcaaataaattgttgctcttcctataatcattgagctgctgaatagagccagggtccttgatagacgtcatagtttgttattgactttatcaccagtaaaagttaatactgtcatccctttcctgcagcaacacactaccatttttttttccaaaattaatttaggtaaagaacatttttcttagtataattttcattgaattcagtattatcaagtttgtatatttttagagcttttggatcgctattccagcccacatttttcatagcaatttgtctagtatttcttcaagatctttttatgttcatttgaaaaatgaacatgacttcatatgtattcattagcaatcactgccgtaggcctttctgtttgatttttcttctgaacctcagagatagtggctcattatgaagtagaaaaaggctaactaagaccttgttctgaacttacagtgggtaagcaagaggcttcagatccataatctctatcaaaatgtttgcccacattactgtaacagggagtcattcagaatgagagtggaggaatttg

SEQ ID NO: 38274 - DNA, 1100 bp, Homo sapiens
caccagcagtcagcttctgctctacgccctgtggccttgggcaaccttgctggctcccatttagcacgtccaattaatattgctcaaagggtggatttgcatgccttctgttttacagtactatgtagggggagcatttcccactcagatgtaatgtccattgcatgataaagagacacagctatttcttatgaagtgtgttcaaatataccacctctctctaaacttttaccttagttccatcaacccttactttcctaactgtagccttcattaggcctttaccaacaggtttcggtcgtacaattcagtactagctaggggaagtgttccctggacagacataatatccattcctataaatcatttaggtaaagaggcacaacttccttatataaagcctacttaaacatcccagctttgatcatcctagcaatccttacatttttatgttctcacaatcttaactgtagcccaagtcagggcttgcccagtgggttttgatagcacagtgcttaaggctcccatatcgaggagtcccaggaattattcttcacctcccagacgattttcccacttgtgtccataaggctgtgggtacccagcaggggactgggccaagacacctttgctgtctgtcagtctttttcttgattaatctgcctgactattgccccaggcaatttcagatcagatccttcattgtaatctctgcctctgactttttaaatttctccaaactagggtaaatgtagcaaacatttttcaaacccctttatgtcgagagaccagcaggacttccctttgatctatccagccttccacagtgttgcattaaaacatttgttttaacctcattttatttcagtttccattttattcatcccaattttttttattttccataggttattggggaacaggtggtatttggttacatgagtaagttctttagtggtgatttgtgagattttggtgcactcatcactcgagcagtgtacactgcacccaatttgtagtcttttatccctcactcccctgcgtccccaaagtccattgtgtcattcttatgcctttgcatcctcatagcttagctccca

SEQ ID NO: 38275 - DNA, 1079 bp, Homo sapiens
catttcttaatagccatctaaagatttccaccatactgggaaaagtcccatgactcttctctttgtttttcctctgtttcatccctatcggtgtgttctttttttttttttttgagacggagtctggctctgtcgcccaggctcgagtgcagtggcgcaatctctgctcactgcaatctccgcctgccgggttcaagcagttctctgcctcagcctcccaagtagctgggatttcagctgcctgccaccacgcccagccaatttttgtatttttggtagagatggggtttcaccgtcttggccaggctggtcttgagctcctgacctcgtgacccacctgccttggcctcccaaagtgctgggattacaggtgtgaacaaccgcgcccggcccagtgtgttcttattcaccttatttcttaacaaccataaaaaatttccaccttcctgtgaggagtcctgtgactcttcccccctacccttcatcattctcttgttaattaacctaatgtttgtattagcatctgtaagactcatgaggggaaactgagcaagtacatctcataaggcttcttgaactatctctcgattttgtggcaacaaggttaaatggggcatccacattaaaggggcgcccctaatcgcatcatttaccatgacttgggtagcaaggcatattcagtgcttgaataatctggtggtcataaacccaggccccacatggcatgaatacaaagtgtatcagctgtttcagcttgacgtttataggtggagtcaggcagtcccccttcttccaacattcaaaaccaaagacactgctcctaaattactctcacagtgcattttagtaaagcctcctcaggaagctgatgataccaatctaaaaaatgaaacaattccttcacactataccctctgctttcaatggcttcttgattttgccctttcctgacactgccttcttggtgcccaaagtccttaggggtgctttctgatgtcgctgcataatttttcccttgtgggagcgaggttctgtgagtctactggctgaagcatagattgactgaaatctgaacttgg

SEQ ID NO: 38276 - DNA, 1025 bp, Homo sapiens
tggaaaacagttaacatggtgcgtagcatattataagcactcaaatatttgttgtgtaataattaatactaaaggtctgtatctatcagtggtattaataataatctaattcagctgccttataccaaaaagggatatttgtgggctcacacaaatgaaagtctgtggcatgtgtgcctttgggtatggctgtatctagcacctcccttgaagggattgggactcagcctttccccagctcttctgtgttggctcacttcccaagtagctccaggctcgcaccctactggcctaataatgcccagtgaaaagaacccagtactttcccagtggttcccaagaaaaatcccaggattgactgacccttcctgcattggtcatggtctcatctttaccccagacacttgagccttgggattgaggccaggattcagtactcacctctgcaactttgatgggaagagtcgtcctaatgttgatcagtctcaagtcttgtcttttcatgcttggagactaatagaaactaagaacatcagtagagctccttccccagtggaaaaaaaataggggcaacaaatatcaggcaggcagactatagatgttccccactggctccagtggtaattcttttggggttttgtggttttttttcgttttgagagagagagatgggagacttgctgtgctgcccaggttggtctcaaactcctgggcccaagtgatcctcttgcctcagtctcccaagtacctgggactacaggcgcattaccattgcacccagctctaactacatacattttcctacatagattttcagaactgcttaccagtacaactgtttctttgcagaggcatgttaacgtccatggggctgaggttttaacgttagcacataccttgtttatagtacaagttacccttgaaagtactgccggaaggtgccacatggagttccacacagaatctcacagagccaggctttaccactgcttggaaccaaatggcccatccttctgttgattact

SEQ ID NO: 38277 - DNA, 1027 bp, Homo sapiens
tggatgtgagtaggagtcctccccatgccccggctctgagggggtcgtttcaaactgcctggtttcttagttcctcactttcacatccacgcccacacgttcttttcttttctctcctactgttttcttctctctcattctctcttccctcctcagcttctaagccagaagtttgaagtctctttacaaagagactttgtttagatactgtcagagataaaaggatttatatttgatgagcatccagcaacggcatccttaaagaggtccctgcagttggaaagtggactgctgttcatctgttacatagatgtctgtgtgcacccacgtgtgtatctgacagatgtgtacacgtcttcagcttgtttctaataagaatctggaaatgatggcttatgggttatctatgtgtatacgtacaactgcatagttacagaatatctttatccatggttctaatagcagattaactcactttctgggtaaattaaggcaagacttaaatgcctccatttcgtctgtagagcagggatggtagcatgatacttatacagccacacgtatgattacatatgtaatatattttgtgaattttagagcatctaaatagccactataagcacagtattgaattattaaagcattttggaaggaataattctgttacaggagggctttgaaaagatactaattcagatggaagatgaatacatacctttttttgcacattttggaattttgttgacagtttggtaacccgttttggcctctggtttagagaaacatattgtgcactagtctcagttcttgcatacatcacatacatctgtttcctttactttcttttctttttagttgttgatataagaccctcagtaattacctgagtttttgatgcttttttggatgggttgtttttttgtttttttttttttttaattttgaaccattccatcttctctgtctttctctatctttttatcctttttcgcctttcttcccccaccacctgggagccatgaggcaa

SEQ ID NO: 38278 - DNA, 1025 bp, Homo sapiens
gttgattttctcactttggactggtttttacttcccgacttctgggtaagggtggccgatgggtccatgtggggcagagtgtggccacagctccttttatggccaagccttgtttctccagtttcagtttttcttgggctgtttgcaaatttgtttcgcagttaaaaggggatttgccagctgggatgggggaattgggaggcagatggggcttccaggagcgaggatagggtcgttggcctcaggtgccgctctccagttaggagtattttaggcacctcgttccttattgtcaggtttaacttcatttgttctcccactttataccttagtgaatttgtagatgtgacaaggctttcgcagttatatagctttcccagatcagtatgttaagaatttaagcagaagttattgagaaaagcaggtgtcttgctttttcacttttcgttcttctttgctcataaaacctttttctgaatctcgggacgacagttatctttcggatggaacgtgatctggatgtctatctaccttattgacttaatcctgttttgtagtggttggttactcgcactatgcagacgtgttgcggtgctgaatacaacatttattactaaagccagacactggatcaccgtcacggcagatgtcagcacacctgttgtaatcagtaagaagttacaagtagtatggagcatcattaatcctgctgtataaagcagtcttttatggagtctgattccttttaagtaaagaatccttacagtggttttgtgaactttttgggtgcttacttttcctaatcaatttttattttccagactcatctttcaagaggactttagactaattgcagataattaaggtactgatttattttaaaccttttatgtttgagtgctgtgcgtatttctgcatgttagaaaatgcagagaggtagcctaatgttttagctatttgccactatcatgttatggaaacattgtgctttacatagcattaaatcgaagagatattttcattta

SEQ ID NO: 38279 - DNA, 1456 bp, Homo sapiens
ttagcccagcgtggtggtgcatgcctgtaattccagctactcaggaggttgaggcatgagaattgcttgaacctgggaggcggaggttccagtgagcggtgatcacaccactgcactccagcttgggtgacagagtgagtgagactccgtcttaaacaaacaaacaaacaaacacatcaaacaaacaaacatccttaacttgccagtaattcactcttacttttcttcctgtggaaatgtgcttatgttaggttatttgcatgaactgagattattaagttctaatatttttctgcacattttggccactattatttcatgtagaaagttgagagaattttattcaaagctgcctttgtgtgaggatctgatagcatagaggtagtagaaatagacattttttaaggggtaactcccaacaaaataaaagcgaagtaccagttgtggcagggatgacagtggttattggatcaccgagctgtattctttctatcagctctctccaagggactcagctttctaggagggggagatggaaatcttaaacaggtttgatagcttccctaccttttatctgcccagacaacaaaaataaaacagctcacagtgttaggatttggggtgataaattaatttggagatatctaaatgtaaaatgagatttctgggcacatggcagtgcggtctgtatgataaacaactggggttgaaacagtaagtgcatgaactagacagactctttttgaccagaccttgtgttataggtgaatgaaatttgggaatcctatacttggaattctggaatggctagcctgggccaggaaaaatcactttgtaatctaagaaggaattgagttaagaagatttgttcatcacaccacatttccatgttgttgaggaaaatagattggcagtggtgacaaggtcaaggatgtgttgttcgaagttgtagaagataagcagcaatttaaaggcgttacaatacatttttaagagtggaaattgcattgaagagtggaagaaaagtcgacataagagaattagggcatgttgtttgcccaggctggtcttgaactcctgagctcaaccaatccacctgcctcggcctcccaaagtgctgggattacaggcgtgagccaccgtggctggcccttaatatgttttaaaaggatgtttaatactcttcattactgtgttatgcaatagttgcatgatgatttttctgatctctacattctattttttttctttttaaaatggagcacagaagtacttagtttctgatgtttttccatcttggcccagtaatttcctttttttttgttattttatgaagcacaaaactaaatatttttgaaccaagagactactgtgtggtattaattttgattttgtactaaattcatgttatttacacaaatcaaatagtgtcaaccttaaaatttttttaagcaat

SEQ ID NO: 38280 - DNA, 1052 bp, Homo sapiens
cttcttgtagcatgtgagaaataatacttcaaaattcaagtgtaattgtattaatttttgtgaataaactgctatggagtgctgaagtgtgttaagatgcctagtcttttcagaattaccggcattatggtattgaacttaaaatattttatgtttataatattttagaattttcatgagtcagataaacatatacccagattttcagaaacttgacatttgcttaattgcttaataattcacatcaggcttagagatttgtgaaatatttttgggataatttatttagaaatagcgtgtgtttaaatattaattttcttttttaagaaaatgggcagatgataaattaccatgaaagcttcatttaaaaatctgttgttagtattgtcttctttaattttggggagaaaaaacttctgagatgttaacaattgaacatgtagtgttggctctttttggccttcaatttaaaattgtcatgtgtttggattaaagacatgatgtatttttagctattgggcaagagatggcaatattgcattacatgatcactgcagttacactattataaatgaaagtgaatttcatgttacaaatgttcttctaatgcaattattaggcgtcattaaattagtttacactttatttcttctgattgattttttaaaaaactttttagcagtatttatataaaaattggacaaattgaccctttcagaggcagtatgaccctttcagaggcagtatgatcttgtgcagatacccgtctgcaatatgtgtgctgaacagatgtgaaaattatttagtcactggcttactgcttgacaccttcattgctctgttgccctgactgtgcttgtcctagaatctggttgttgtcctctttgtccataggagcatatgaaggtgggagtttttgaatttgaggacaaacatttgttacctttaatactacattgctttcatactcactaaaaactaacctttgcatagtatgcaacttgtatagcttattaatcttcaagtctattaacatataatatggttaaaga

SEQ ID NO: 38281 - DNA, 1031 bp, Homo sapiens
taggatatttttttatcccatcaaagctatctatatatatatatatttttaaatgaacagcatttgtcagtgatttttacaggggtgaaaaagcacaagacagttccattactattataaaatgttttacttttgttgtgggggtaagtttagaagtccaagatataataatttcagatgtgcttctactgtttcctttacttaaaagtagggactattttgaggcaatataatttgtatgtttcagtttttatttctctctgaaaatcactttttagggtaccatgccttggaaagaaagtttacatttttttccgttaaaaacccatcctcctaactctgaaatgactgtctcagttactaaatgtatatagcttgggggaagtgaaggcacagttggcagttagaggtttgtttttatgttcatgggagtatatgtgcttatatttaaatgttcactcttctagcagggtttgttgatgttagtaatatgctacatatgcgatttgtctgaattgtttaaaaatgcataattacaggaggatttgattattcagcaacagttccagtagctaaagactatcatatagatattttcttccagtatttgacagtggttctgtgagctatgagtagcataaaaaataaaaagaagatactgtgactctttaataccctagaggccgtagtcttaggatattcttactgtagagatgaaaaaacagggcttcattaacaaactgaactgctatttcacctcttttagtagatgtgtaattctgtgggtttggtaaataacaaaggcttttttcctaaatgatttaatgctttcagatttttgtgggaaaattagaaaaagcaaaaatgcactcagtgattttttttttaaacccctttgtttctggacaaatggacaaagatagttaagtgtcccaaaaatggttttaacaggcttccctctacaaccccatacataccctggctgtccataattccaattttgggtaggtagtaaaatgtgatattagact

SEQ ID NO: 38282 - DNA, 1031 bp, Homo sapiens
tcccctagtcagagactttgcaaatgatttctacaaaaataaactataaaatagatgatataatggggcctattattcctgatttgattttaatttgcttccttttataatttttccacaataaaacagagcctctcagaaagtaaaaggatgtaatcctagctcagatggtatagggtccttatgtcttgagctattatgatggaaggtacccctatacctccactgatagaaatatgatgggcagacattttctttggtgaaaagtagttcatagtttactgtgatatccactccttggacttactttagaggactgtttactgagggcaaaatatgtgcatgattacatataatcaaggttaatttttatcaagggtcaccatgtttttgctatggtctgacaatcatgacctacattaaaagagccctgtgggtctgtctggtgtatttttgcttgatgtctgggtagtttatttcagatgcttgtcagtttcattatatatttttgtttggggctcttgctggattttcaggtacaccataaaaacagttctctttgcagttagattgtcatgaaatagcttctgttttatggtatgaaaacactctttaatcttgaagggtgagtaattttgggaacattttccatttggtggtgtgttatgttcaaatggtaggttattttgaaataggatagactttgcagctaagattccagatttagttcagttaattcattctttagtgagtttttcttgggaaaatattttggaattttcatttcaaatgcatcctcctcatttaagaaaaatccagatgagtagtttatttcacaatataataactaaataggatttataaagcagaaatttataaatcctttcttttgctgggacaaaggcaatggtgaaaattaaaaaaaaataaagttaggacatttaggtaactcaaagacagaacttaatggctgttaagattggagtatttggttttgtagtttttaaaccatatttaattttggccatatc

SEQ ID NO: 38283 - DNA, 1090 bp, Homo sapiens
acaaggtaggggatatttccatcaccccagaaaaatttttcctacctctctcccatcaaccctccttttcccttcccctcccctctgcagcagccactttctgattctgatttcacttgttcttgggagtcatatgaatggactcatagtatgtacttttatgtctggcttcttttattcaagatactgtttttggattcatccatgttgttgcatgtataaattcgatttgcttctagcaacagaaatgtgtatactagcaatcaaatacaaatttacttttaccttaaagttgagagattgagtagtgcttttttaagaggattgttagtagacttccacagcaactcacatatattgagtgccagtccctacgctcagtgctttacacacattatcttatttaattgtgttttgtgattgtttgtttagttgtttacttaattctctacggcagacatgttcggtgaaagcattgacatctgatgaagaagttgacttggtgtttgacaaaagaaactgtcttgtgatataaaattctgattgttttctcaggactaagtactaagcattgtttatggcaggcatcgatgagcttaaatcatgaaacaggaggaaaagtgtaaaaggacaatggaagagagttactgggtgggaaagaaagaagtgcagtagctagtttagattcgtcttatacaatctgtgatgaaacttttgagacagagtctcgctctgttgcccaggctggagtgcagcagcgcaatctcggctcactgcaacctctgcctcctgggttcaagcgattctcctggctcagccttccgagtagctggcattacgggcctgcaccaccatgcttggctaatttttgtatttttttggtagagacagggttcaacttgttgccctggctggtctcgaactcctgacctgaagtgatccacctgcttcagcctcccaaagcactgggattacagatgtgagccactgagcccggcaaagttgcctttcttcatagaagaaagttgcaaaatatacatgaatgaaagtatattacatacaatacggatgcctgaaaaaaagcatatgt

SEQ ID NO: 38284 - DNA, 1035 bp, Homo sapiens
ttttccgtctctcaggggtcactgttctgcattgtgttatgttcaatgtcttgaaaaattattgttttatatgttcggcctgttttttggtcgtttcatgtggaagcttttaatgttaatgttatttctgagaccatatatttatataacattgaattggataagattaaacagaagaaacattatttagaaagttaaaaaaatttttctgcgtgagagcctgttgttagttatttagaatcacttcttaatcacagcaagatactttgttttattgaagatttgtttccctctagattttctccttattaaatagtagaacatagagaagagaacagttaaggtcggccggattgcttctgcaggtttgtgtccatagagaagctgaatgtgtagaatttcaagaaggtaattgagaagtccgggagtagagtttatctcaacaccaaaagaatcatttttaaataaatacagggtgagaaaagtgaagaatcaaaagagtagcttttgaagcacagtattcctaaggtcttgttttaaggatatgtttctgtgtttgttttttattgatttgagatcatcttaatgcgtgttagaaaatttatcaggctgaacgagttgatcctaaaatgctgcagaaaagttggatgtgaaatgggaaagaaaactaactttcatgagatgcttcgtaaaatctatttcaattcagggtgaaaattgcaaaactgtctgccaatgcgtttttgatggacattctggctatttgtgtgagtcttctgcattgaggttttatttattgagcttccttttgcttcactctagaccaggtggtttacatatgttatctcatcttgtccttctgacaaatcctgtgaggtatgtggtgttaatctcattttaaagatgaagattttcaggcttatagggtttaggtagttgacttaaggtcactggtagtaagcagggattatggctgggtctttgactgctaggcaagtattaacacctcatcacacacatgggctgctttttctg

SEQ ID NO: 38285 - DNA, 1100 bp, Homo sapiens
ttagtcatctaaatatcagaaggacattcctggtgtgaatgtctattcagctacttcatgcttagggctctagggattctgtcaatctgaggtttcgtgtcttagccctggaaaggttttaagtttgtccttaatttccataccttcattttctttatgttctccatttctggcaatcctgttatatgtgtcagcttttgtggactggtcctttgtgcagtgatccacctgcctcagcctcacaaagtgctgggattacagatgattttaaagtgatggtgttatttttcaggaggctaactctattattggtatatgatagatggggaagattttacctgtgacccagaatgaacatgtttgttatgtatttcagtttaaaattaataatgtgtgtgaccaagacactggtgtttactattactgttatgctcttggataaagctaagaatattaaaacttgaaaaaattaatacataatatgttacatatttgtgggtacgtgtaatattttgttatgtgcatacaatgtgtaatgattgagtcaatatttggggtgttcattgccatgaatatttatcatttctgtgtactgggaacatgtcaggtcctctcttctagttgtatatttgaaatatacaatatattgttgctgtctgtagtcaccctactcggctatcaaacattagaacctattctttctatctaactgtatgtttgtacctattaaccagtctctcgttatccctcctagtccttggcacatccccttcccacttgcgatatctattattctattctctacctccatgaggtcaacatttttagcccccacatgagtgacaacatgcaaaatttgtctttctttgcctggtttatttcacttaatgtaatgatttccagttccattcatgttgctgcaaatgatatgattttgttctttctttatggccaaatagcattccattgtatatatgtaccacattttctttatccatttttctgtgacagacacttaggttgatttcatagctttgctattgtgagtagtgctgcagtgaacatggaagtgcaggtatccttttgataaactgattttt

SEQ ID NO: 38286 - DNA, 1085 bp, Homo sapiens
caagttaacgtggaagaagtatccttttttcacattttctctgaatcttatctccatggatcttcttagaaaccttcttctagaaattatttcctcattccatatttccaacctctccaactcccctggaaccttttcattggtatttaaacatacctgggtctaatcggccccctgtgcccctgttagctattgtcctacattttttcttgccttcccagccagacttttaaaaattcttctcttcttaatttcattcttatactcattctttttcccctttattggttttattgtgaaatatattaaacatacattagcgtttataaaacacatacagtttaaataataataaacacttaaacatctgccacccagtgtaagaagtataacattgtcaagaccgtagaaactgccgtgttttcaatcataactcccaagaagtaacctttatcttgacttttgtgagtcatttccttacttttattagttaatgtatcatctattaagtatgtctttaaacagtgtgttgtcttgtttagccgtattttgaactttatctgttgaacttatactgtttgtgttcttctgagatttacatctttttctcagcattacgctttgagatttattcatgttaatgggtgtaaattcatagaatttgctacaatttattcattttattattaatagagttttgaatttttcccagtgttttgctttcatggacattcctgctatgactattttaaacatgttttccggtgcacatgtgtaagaattattctagaatatgaacctgggagttgagttactgggtaacatatctgtgtacattcaaactttattaggtaacgccaatttcttttcacgaatggatgtagtagtgtgcattctcaccagtaatggatgtgtgcatttgttgttttccatttttgtcagcacttgatatggccagacttaagtttttgcaagtctgttggtgatgatggtatttcgttttggttttaatttacatttcctttttttcttttcttgagacaggctctcaccctgtcgcccaggctgaagtgcagtggcaggat

SEQ ID NO: 38287 - DNA, 1049 bp, Homo sapiens
aatggcttactacagccttgagatcatggaccaacatgattctcctgcctctgcctccctagtagctgggactctaggcacacaccaccacacctggtgcttacactagcactatttactaaaaatttagtctttaccaccagtgttttgggatgccatttttgtcaaaacgaatttccaaatttacgtaggtctattttgggctttctgttctgctccacggttctgtttatttgtattccatctacgctgtttgcaaaggaagttttatttatattatagtttgacatctgctagggctagtcctttcttgtagtctgtctcccttcccttccctctccctctccctctccttctgcctctccctctctttctctttctctctctctctttctttccttcctttctttcttcctttctttcttttctttctctttctttctttctttctttctttctttttctttttctttctttctctctctctctctctccctctccctctccctctccgtctctttctctctctgtctctctctctctctttcctttctttcttttctttcttttttgagaatctcactctgtcacccaggctgtagtgcagtggtgcaatcttgactcactgcaacctccacctcccagattcaagcgattcatgtgcctcagcctcccgagtagctgggattactattagccaccatgcctggctaatttctgtatttttaatagagacaggatttcaccatattggccaggtggctggtctcgaactcctggcctcaagtgatctgcccacctgggcctcccgcagtgctgggattacaggtgtgagctaccgtgtctggcctagtttttctttttaaagtgtttttctgagtattctttcatgtgaattttttcaaattaactttagtatcatctgtgtaactccatgaaaaattgacttggtatttgtattggtaaattagaaattaatttttttcttttgagacagagtttcactctgttgcccaggctggactgcaatggcacgatcttggctcact

SEQ ID NO: 38288 - DNA, 1035 bp, Homo sapiens
cttcacagaagtctgtatacgtatcctcatttcttccccttaaaataaagctacaaaacatttaaactaatctttcacagacccttgttgcccttgtaaagcagatggaaacacagtaacaggtggcactgtaggctggggaggactcttagtctcagctgcccagccgccccagtgcccctgaccttctccctcagggacctcagtgggagtcagggtgatggagtcatgctttcagggaaaaccacttctcctgcataacgttggtatccttgggtctcttgataaaggtgcatgatgactgtcccacagctacttgcagctgtccttgccatctccacatctctgttcttccattcttcccttttacatgaaaacttggcttctaaagcatatttcttccttctcgctctaaactgtgaactttagatcagtgactatctttgtgtctttatttttccttgtgtctggcatgtgatacatgaacaaattgtagaatgaaaacatgaaatgcttgtgaacaaaagttctctgaaaaagggatttggaggaaacagactttattccagtgcaccatgacacccggctatttgaagcctttagtgtaaaacaaaggtgcattctagagaatgaagaggaggcttgagttgtataacaaaagttcccacccaggtttccaatcaggtccatttgtgcaaatgaaggattgaaacttgcttagttttgattggccaacacagctgagttctgattgttgaatgcaataaggtttttgaaatatggtattcatggaatctggagatcttgggtgctcctgccagctccagcactaactatggaaactgtgggactttaggcctcaatcattgcctcttcttaaatcttaatcttctcatctgtgaagtaagggaatgatattttgtcatctttaagtattttttattatgctatgaattttaagattttgtacaggccgggcatggtggctcatgcctgtaatcccagcactttgggaggctgaggtgggtggatccc

SEQ ID NO: 38289 - DNA, 1083 bp, Homo sapiens
aattttttaaaaagtcaaccaaatgttatggtcagtatcatagggagtcaacatgtgcatgaatggaagaaataagctaaggttgataagctgttttcgtcaggtctcccatttgtgtgactcccttattttttcttatctttttttttttttttttttttgagatggagtctcgctctgtcacccaggctggagtgcagtggcacaatctcagctcactgcaagctccgcctcccgggttcaagcgattctcctgcctcagcctcctgagtagctgggacttcaggcgcccgccaccatgcctggctaattttttgtatttttagtggagacgaggtttcaccgtattaaccaggatggtctcgatctcctgacctcatgatctgcctgcctcggcctcccagtgtgctggaattacaggtgagccaccgctcccggccttgactcccttattttttctagcagtgggaatacggtgtggagacgggtaggaggtagtgtaggggacaaaagtaaaaaattggaaattgtggcataaaggacatctgtgctttattttaccttctctgaccctatgaaagtcatcctttttgacagttctttggcaatttttatcttccaaagccaagagttagatgctgcttaacagttcttatataaattatatcatttttaagatactcctatcagattatccttagcttgaaggtttgaaatcctccctcaggcaaaacacatcttagaaattactgtctgaccctgtgatattttactgatactttatcttttaaaatttatcttgtctttcttgttatttgccatcagacagacatatggtggtaactgagaacctttaaggggaatataattttctttgagcttatattcttgaatttattatcattttaaaaagcatttttttccccctgtaacactctggctttgcgaaaactaactcatatttttacactttatgtctgtaatgtacaaaatttatcagttcctattccatttctggatacgtaggctatctacaaatatttgaatggatatttcaaactcattatttcattataacctgac

SEQ ID NO: 38290 - DNA, 1036 bp, Homo sapiens
gtaatatgtacaggtctttatgtaggtaaattatatgtcacaggggtttgctgtacaggtaataagtgtagtacctgttaggtagtttttggatcctcacacttcgcacatcctctaccctcaagtagcccccagtgtctgttgtttctttctttgtatccatatgtactcaatgtttagctccctcttattagtgagaacctgtggtatttggttttctgtttctgcgttagttcgcttaggataatgtcctgcaactccatccatgttgctgcaaaggacatacatgaacttattctttttatggctttgtagtattccacataccacattttctttgttcagtgtaccgttggtgggtatttggattgagtccatgtcttttccattgtaaatagtgctgcgctgaacatacatgtttctttatggtaaaacaatttatattccttttggtatatatgcaataatgagatttctgggctgaatggtagttctgttttaagttctttgagaaatcgccaaactgctttccacaatgagtgagctgatttaattcccaccagcatgtttaagtgttctcttttctccacaatctcaccagtatctgttaatattagactttttagtaatagccattctgactggtctgagatggtatctcagaccagttgtgagtcaacagatttttctagtactattcaattgttgtttattagaggaggcaatgatgagtttgaagtgaatgaagaattagcttatctgaataccttatgtggaacaactacaagcgaggatatttacaaggaaattaataaagcattacttagttcaagctgaagtggaatctgctaagatgtgttacagctgatacggtaaaaatatgtgtgaagcagaacaagtcttagatttacaaatctgtgaaaatgtagagtgtttaaagcatatgttcattgtattattcgtcactagatactgatgaaagtatttgtatctgtcatgtgctgaactgaagtgtcattggtgaacttcatttcat

SEQ ID NO: 38291 - DNA, 1060 bp, Homo sapiens
tttcgattcctatatactcaatacaacaagtattacagattcgttatattaggcctatttacttgcttcctcatatcacgaaaactttcttgggtagatgcaatgcaaggcattacccttcaccttagtcatatgggttaaacaaaataggtaactccggaattaggcaaaatcttgtgtgcaggaatcttgaaaaactgtattatttttcaagctctccaaaagattgagttgacaaaagaaaaagtagcatcaaatgttttattttaggtccttctgtactgcaagagcagaagtagaccaatgttaataattttgatttctcagattcactgaagagatgtgggtctacaaacactttaggtacttggatcaactattctcaacatgaatatgatactgaattcatttatgcaaatgatttttacagtaggtttgctgttatttacttttattattattattttttgagacggagtctcacttgcagtggcacaatttcagctcactgtaacctccgcctcctgggttcaggctattcttgtgcctcagcctcctgagtagctggattacaggcatgtgccagaacagctggctaacttttgtatttttagtagagacggggtttcaccatgttgcccaggctggtcttgaactcctggcctcaagtaatccacctgcctcggcctcccaaagtgctgggattacaggtgtgagccaccatgcctggcctgttatttactttaacatgggttattttctaccagttacatgatcatagctgagccttttgtgaacctaaactttagaataaccatcaaaacaaaataaatgatagtagacatatgactctcttttccctttcttcaaaccaataaattaactaaattaaaaacagaaatgcaacaatatgttttgccctatatctttatagcactttacaatgattgtatgaagttgagaacagtaacatgagatactattcaagatgattcaccgtactctgtttcctcaggtaaagaatttgtatgatatgtttcagaaagatattttttaataa

SEQ ID NO: 38292 - DNA, 1061 bp, Homo sapiens
cactggagtgcagtggcatgatcttggctcactgcagcctcctcctgggctcaagcaatcctcccacctcagcctcctgagtagctgggactacaggtgtgcactaccacacctggctaatttttctatttttgatagagacagggttttgccatgtttcccaggctggtcttgaactcctggcctcaagtgatctgcccacctttgcctcccaaagtgcagggattacaggtgtgattatgagacattttatattcataaaaatttatttcttgttagtctaatgaatgaggagactaaaggctaacccaaaggcaaggaagcattcagaagagattctgaaataatcatgaagtcattctgaatataaaatggcttcccacaatactaaaaatatgctgactatgcattcagatgtgaaaaaatgagagagctcattaacttttgaatggacagcattaaagtaaatatttctatgtttaaatagaaatgtaatttcttttgtatataaattacatcttactggttttctggcgttttttttttctctctctcaacctccataattgactatctttaccttctcagtgtgtgttttatttttgaggagactgctgcatgtgagtttaagatttaccaggtaatttctgggtatcattttgttgttctcacagactgttgtgaaaccttccttctcacttcctcctttctgatgagattcaggttttaaaaattcctaggattaacagtgtttgggggctgagtttgctgggtttgacacggttgcattttagatatctagaaaaacatgtcaagtggtgaccaggactttgttggggccagaatgaatttacaagctagtgttttctaggatatttgtattgatttttctctagcagctaatcaatcagtttcagttgtataagtgatggagcaaacctttttaagtgtgcagggtgagtggtgtggaaacaacacctttcaccgcactgtctctggaatcaaaatgtagagatgatggatgagctgtttttatagctatcgtgtgcttttctagatct

SEQ ID NO: 38293 - DNA, 1032 bp, Homo sapiens
tgtgtgtctaataattaccataatttcaaagtattgtatatttcaagatacctgaaataattgtaatatgatatgcaaatttttataatttctcatgggtgaaatcacagccactacaaatagctataacttgttgcctacattcacagttgtagaattggtaaattttggcaagaaataaatgaaaacgaagttatgattttttatttttattttttgcacccaagttcggtctcttcccactctcttagtctgttcagtctcaaatagctttcttaatgaagatataaacaacaacaacgacaaaaattaataaaagcgcttagcaacaccaagaaaataatccaaaaatgattaggccagaaggtttgtgctgtcttggcccttgaccaagacctctagttgatagatccttcaaggttacctctctcagcccccttctagaagattaaccatgtcttagaaattggtgctaagtagttccttcttatttgatgatgattttaaatgcatgtactattttgtctgaactagaatccaaactttccatgaaattaacatcattccctgttgaatctaggtgtcatagctctataaccttcaattagtttacaaacaatatatatgtctccttacctgtgaacaaggaatgcttaagaacacaataggcttggaatttgcaactaatttggcccaatcttgagtagatggccaaactaaaatcttgaagttattttgccccaacatagagcaacagaaaagactcaagcaagttccttagagattgtagctgcatagttctagatatctttaatatagaagggagtagccacacaaaaaatatcatgtttaaaaacataaccaacaacttgtattattgaacatattttaatttaaaaatgtatattttagaacagcaatatgaataaatgaaaacgtgtgtgaaaataattcattattactctgaataagcctacttttcctaattatccctaaaaagtttatttttctatttcctgattatctctttta

SEQ ID NO: 38294 - DNA, 1045 bp, Homo sapiens
gcaccctggtgggtttctgctgataaatataagaacctgtagtttaaaactggcagagctggactggggattagaaaagtcactgcaactttaagcagcagattctttcacttggggcaggatgtaagggtgtactttctctaaagatgccgtcagtacaaatgcggaggatagattactactgcttgctgctaacatgacaggacattcagggtgccactactgttgagtgtggagtcagccttggaggaaaaaatccccaaaaccttctttggcaattgtctcttatgtagtggacatattttaggcaaaatgacagcatttgtgcattgatgggattaatgcttcattctaaggattaaattcgttaatattttttctttgtgtacttttttattcctaaaacttttattttgagcatgcaggagacagggatttcttggaaagaatatgaattttgaagtcaggcagacctagatatgaatgcaaattctgttgcttcttagccacttgtaacaggcaggcgtagaattcagtgtgtaatcattaaacattttgttttctttcctcacattggtgaggatagttttcttttgagtatttgctttagtgcctttaattaatgaaaaacaactagttaaaaggttggctaattcctttatgatatacacacacacacgtacacacagagctacctatctcctctcttactttttattgtcagtctttttattacaaattagtcttctacatattataaatttaaatgctaactagaaccagctaaaaagtcaatacacttgttcaatcaacacttttatttaacacatagtatgtgctgtgtattggaaggtctggtgatgatggttccaattctggccttctgaagcttatattctaaatggaggatgctgtagactgctgtgaatacggtggaatcaataagcatttacattgtgatgggaaagacttttgtggttagggaagcattcctgcaggcagtgttgtaaaatgtggagcactttacaaaaaatatgttcataat

SEQ ID NO: 38295 - DNA, 1031 bp, Homo sapiens
gtcacaagggaaatgcaaatgtgaattacaataagatactcctatacatgaagtacaaccaccagaatttaaaagattaacagcactaaatgttggcaaggttgttgaacaactggaattctcatacattgttgctgggaatgggggtttccacccactttggaaaaatgtctggcagtttcttattgaagtcaacatgcacttatcctgtaatccagcaattctactcatttactaagagaaatttgtcaaaattagtcacaaaaaagcttgtataagcatgtttatagctattttagtcgtaaccaccaaaaattagaaacagcccatgtgtttatctgtagaagaatggacaaaatggaatttatccacaaaatgaactattatttagtgactaaaaggaacgaactaccaatttaagcaataacaggaatttaacaatattatgctgagtaaaagaagcattacacaaaaaaagtgcaagatatgatttcattcacaagaatctctggaaataatctgtggtagaaaaaaaactgaatacttgtaggcacgagggtagggagagattgtctgatgaggtgcataggattactttctagaggaaagtattttatatctttagagtagtttgggctacacagtagatgattgtcagaactcactcgcttaagatctttcctttttttctttttttgtagttgttgttttaagagacagggtctgtttctgtcacacaggccagagtagagtggtatgatcatagctcactgcagccttgaactcctgagctcaagtgatcctcctgcctcagcctcccaaatagccgtggaccaccatgcctggctaatctttaaaaaaaaaattttttttggtggaacataatttctttttttttaaattatactttaagttctagggtacatgtgcacaatgtgcaggtttgttactcatgtatacgtgtgccatgttggtttgctgcacccgttaacttgtcatttacgttaggtatttctcctaatgctgtccct

SEQ ID NO: 38296 - DNA, 1085 bp, Homo sapiens
tgagagaccagagttggatgcccaagtgttcaaatagtggaacctgaggatcaaccttactagacatattttttttaactttttcagtgttaatcttttaacagaatcataaagaaggtaatttagctatctattgctatataacaaattacaaatatgcctgaacatatttttttacttagcttactctggtgggtataagattgaatatatggtagtttgtttctactccctcttacagaatttactttctgaattactagcagactttaaaataagatgttgttacatcatatttactgattctccattaaactcttaatccttagctatccaatatgtacatatctaaaagaaatatatcaatttattgtgaattggtttatatgttaaaatcacagattatttatataatggcaaaaaaaaaagaaaacaaaaaaaagtgttgagagcagatatctctgcctattttccagtcttaggagatgtatcagtcagggatctccagagaaatagaaccattgaaccacagttgtttacacacacacacacacacacacacacacacacacacacacacattaccacaaatgtagaagcttaaaacaacccatattttttatctcacagtctctgtgggagtctggcatagcttacctctactcagggtctctcacaagttagtcaatgctgaggtctcatccaaagactcacatggggcaggatctgcttccaaaatcacttatgtggttgttggtaggattcagctccttgtgaactgtagggttgagggcttcagctcctcactggctgctggatggaagcttccctcagtttgtgggcctctccaatatggcagctcacaacatggaaatttaacttcatcaaagccagcaagagagaggacctactgcgagaaatgcatccaaggtcctgccccagctctgtggaaaacacaccccacttctgcagccaacacagcagacaggtttctggccttgcctgagcacaccgcatgggcaggagcagtgtgactccacactgcccaactgattgaaatttctgaggttctctctttccatcca

SEQ ID NO: 38297 - DNA, 1050 bp, Homo sapiens
gcaaaaagtttgttttaatgagtccatataatacacagaaatttccataatttaccaaatgatttataatttaaactgcatctgtatatcctttgagatgatctattaaaatgaatgaatagctcaagttatgtttaaggcataggtcataagtttatttaagaattagtcataagagtatttattaggagggatggtatttgactcaaatactttgaaaacctagaagtcatagaagaaagataaagtgattttaaaaggtatttgggggagaaaagcatctgcatataaagtcttctctctctctctctttttttctttggtagaaacagggtcttgccatgttgcccaggctggtcttgaactcctgggctcaagcaatcctccagcctccgcctcccaaagtgtgggggttataggcacgagccaccatgcccagcctacatataactcttgggtacaggtatacctccttttattgcactttgctttattttgctttgtagatattgtaagttttttcctaaattgaaggtttgtgtcaaccgtgcttcaagcaattctctcagcaccgttttttccaacagcttgtgctaactttgtgtctctgtgccacattttggtatgtctcacaatatttcacatgttttcactattatatttattatggtgatctgtgatcaatgatctttgaggttactattataattgttttgagatgccacggactatgcccatatgagatggtgaacttaattggtaaatggtatgtgttctgactgttcccccaccagccattcatctccctctctctgtctgtctttcttccagcctccctattgcctgactcacaacaatattgacattgacttagaggcctacaaaggcctctaagtgttcaagtgagaggaggggctgcatgtctctcactttttgtcaaaagctagaaatgggcaggcatggcggcacacgcctgtaatctagcaatttgtgaggctgaggtgggtggattgcttgacctcaggagttcaagactagcctgggcaacat

SEQ ID NO: 38298 - DNA, 1027 bp, Homo sapiens
gcaggagaatcgcttgagcccaagaggcagaggttacagtgagccaagattgtgccactgcactccagcctgggtgacaaagcaagattatctcaaaaaaaaaaaaaaaaaaaaaggaagagccttcttcataaaataaattatagagcccacactgtagtcttgaactttgaaatcctaacccctggccagaagaggcagcaaaagatgatgaagtaaatgagcttcaagggtgagaattgttccccacagaaagccacccactactctgcactttatgtgcaggaggtaatccaggctgtgataccacacccagggagaaagccatccaaaagaaacagagcaaaaggaaacaaagatatgcaagaatcaaaggtctacaccatctcaaagtaagaggttttaaactcttcctttgtttcctggaccagaccttcacaccttgctgtttcttctcatcctcctctgcatggcagagcccagaacactcaggattccacaaacacatcgtatgtaacagaaaaggtgactgagccccagaaggcttacatggcttcccagtgtcaaaacgggcagtagggaagggagcccaaatctggtgctcctcagtcctgtgcacagcaataccttgtacatttccattttcctctcactaggcttagaccactctacagaaattacttgacttatctcaagggtactgaacagagttcaccaataagaaaaaacagaagatgaaaacagaaaaaaataacagcaaatgaaggtggtgattttttaaactatagggattgaaggaatccactcttgaaataactaccctgatgctttaaaaccttcagggcaaggatttcttgagaattttattgggaagacagccttcttgtgtttttagaagatgcttcacacaacagactttaattagagagtacttggctggtttgttttccttcctcttcattctgttcacttcttattcacctgactctcagattttttaaaaacaacttttaccaacttaaaagaa

SEQ ID NO: 38299 - DNA, 1001 bp, Homo sapiens
tggagatcacactccatcccatacccccccatatatagtttcagtttcaagtgccatgcgtcaattagattgtagagtatgagtctagtcagttagcatctctgagagatttttaaattaacgctgtattgtgtatatgcagcaagggcagaagcaaccctggtatataatttcacatttagattataagtaagatatattgcaaaactgtagtaggcagccaatatgatatacctgcttatgtatagcagatgactgagaaaacttcaggtaacctattttaaaaaaaaaaaaaaaaatcagattatcactgccaataaagtgatcctaggcccagtgcggtggctcacacctggaatcctagtacattgggaggctgaggtggatggatctcctgagctcaggagttcaagatcagtttgggcaacatggtgaaaccccgtctgtatcaaaaatacaaaaaattagctgatcgtgttggctcgcacctgtgatcccaactacttgggaggctgaggtgggagaaacaattgagcctgggaggcggaggttgcagtgagccaagattacgccactgcactccagcctgggtgacagagtgagacctatctcaaaaaataaaaaagtgatccttgcatagttttagacagttcatcagaaccataaaattgtgtattttgtctagtccatctgttgtgaagaataatatagacttactcccatgaggacagtataatcagctttgccatttagcgaaaaagagttttcctgtcctcttggggaagtccatctacctggtgagtaatttccaactattatggacatttagaagtagatgaaatattttagactaggcacagtggctcacacctctaatcccagcactttgggaggctgaggtgggtggatcacctgaggtcaggagtttaagaccagcctggccaacatggtgaaaccatctctactaaatatatatatatatatatatatatatatacaca

SEQ ID NO: 38300 - DNA, 1033 bp, Homo sapiens
cctgggctcaagcagtccttccacctcagcatctcaagtagctgggactacaggtgggtgccaccatgcccagctcattttgttttttagttttcatagagacagggtcctactatgtggcccaggttggtctcgaactcctggactcaagcgatcctcccatgttggtctccgaaagtgccagtattacaggtgtgagccactgcacccagctgatccttcttacccttttttgtaatcatcttctccctccattcacacccagttcctgacaactactgatctgttttctgttctcatagttcaatctattctttttttaaactttacttcttctttgctaaaaaagcttttgtactgtacctacagaaaagtatatggctgtgcacttttgtaaagtgaatacttccttataactaccagtcagatcaagaaattgaacatcaccaagtaccacacaggtccctgtcatgtcctccatttactgtcctctccccctcctcaaaggaagccaccatgccttattctgacaccacaggatagttttacccattattattctggatataaatgtaagaattcatgtttgagtgcttggattttgggtttttggggatttgtttgtttttgcataacattatgttggcgaactaatctgtttttaaagtagctgtagttcatccattgttattgccaggcagtgttctacagcatgcgtatatatatcacagtttattcatcctattgattattagccgggcgtggtggtgggcgcctgtagtctcagctattcgggaggctgaggcagaagaatggcgtgaacctgggaggtggagcttgcagtgagctgagatggttccactgcagcactccagcctgggcgacagagcaagacttgggtattttcaaaatcccaatattagtattgcagcaaatacagctgacagggttcttcttgtttttttcttttgttccacttgtgtgtaaacttttccactggggggtctggctaggagtgtaatcgctgagtcat

SEQ ID NO: 38301 - DNA, 1031 bp, Homo sapiens
accttttctcttcatggtgccttttgaagaacagacgttcttcattttaatgtagaatttatcaattttttttttatgttagtgctttttgtgtcctcttaagaaatgtttaccttctccacaccatcataaagatacccctcaatgtactgttctagaaattttatcattttgccttttacctttaaatctgcagtccaattggaatttattttaatttaaggtatgaggtgtgtttgggtttcaggggaagttcacgtttgttttgggtttttttgcctcggaagctatccatttgagtcaatgcagtttattgaaaatatcattcttgtctcactcgcctgcctggtcacctttattataaatcacatgtatgtacatgtgtgggtctgtcctgggcatctattctgttcctttggtctgtttgtcagtctttccacccatacacaggttaactaccatagctttatagtaagtcttgatattggcaatgtaagtatttcaatgtcgtatttttcttgaaattgccctaactattgttgttcctttgtttttgtaaatttgtcaagtttcaccaaaaatcctgctggaattttgattaagatcatattgattttataggtcatttgggggaaactgatgttgttataatatcaagtttctgtccttaaatgaagtatatgtctccatttattttgatcttctctaatttctatcgataatgttttataattctctgtatatgtcttacatatcattttattaaatatgttcctacatgtgtgtttccattgatactattgaaatgattttcatttttgttgctacttagaaataaagttgattaaaatatatttattttgcccaactaattcacttattaattctaatagtgtttctgtagggtatttttttagattttcttagtatacagttatgtcatctgatagtcatagttttaatttttccattccaattctcatgacttttatttccttttcttatcttactatactggcaagaatgttcag

SEQ ID NO: 38302 - DNA, 1072 bp, Homo sapiens
ctcctgccgaaggcttgacagtgttgcttggcaaagagccaacttcagaaattttcatccactggctatctctgtgtagtatcccttgctctacaacataaaaaagaaaatcaactgatttctgaagtgacataaagacgagagaatggagaagattgagctgtatattaaattgctttctggttatcaaataaagactcctttgtcataaaggccaaagataaaaaagaaaatgtgtatgtttaatatatggaacaaaaataagtctatttttgacatagtacttgaggagaagatgggtcaaaaagcccagccacccctgaaatgaattttagactcttattattggtatgatggggcagagagagatatcagtgatggttgcattgctgatagaaatgattttttacagtaggtgctaaattagatgtagaaaggagagttatcaaacctacattgtcatgtctgaccttccaggtcccagtcgaggaatcatcataaaaacgagttgtgggcttatctagagatgcagcaataactggcacagaacaattttcgagcttctcttcaaatggggtgacaccaggggttattcggggtagggagggagatgcattggctttgatcagtttttagaactgtatagcagcttatctgtgggtcagagaaatttcgttttctccattcttttttcatcactttttcccttgggtgcgatgtggattagcgtctggaagctggtatgaggctctgagcattaatagagtttgcgcagatccagactctgttttcgcaatactgggctcaagctcagcctcgctgaatgttagattcagtaaaggcacattaccatctctccataaataaaaggaagagaaatacttaatgacaatgtagaaatacatagaactccaggatactaattagcaaaactcacactgcatttattttatccagttgcacagtgttactctctcatagttatgtctctaacataacttccttttttaactttttgtttaattatattgcctgtctttaagaaaataatttataggtatcaggcattatt

SEQ ID NO: 38303 - DNA, 1066 bp, Homo sapiens
tgattagtgattcagctttctctttttgtacttgttgctttaaacattcactagttctcacttcagttgtaacatgcacatgttctcattttaaacaaagccaaatggtttttaaatccatggatgaaaaatcattttcaaatcgagtattcatgataaattttgaatatgtaatagatatgtacttaaaacttcactcaaggattgcaaaatacttatctaaacataggtgtttgtgtgtattttgtaattttcaggacatagtttgataatggaatagtgcttgttagcatgtatctctatcagggtttcttctggcttctctggcttcctccttcacatttctcttcatttgtgtctctctgatgttgctgctgcccattcacagtagagtcctgttccttggtaggccatggctgctcagatgcatcccagacatacatgcaacagactcgggggcatttccttttgaatggtaccccagccccactatatccaggactgaattcatcactgtatttattacctcgatgaatattacatctctccagctactgaaccaaaaccagaatgtcatcctagactcctcccactccctttacccactacttttgattgttctcattttcccagatctatacctgtaatttatctgggtttgacctcgttctctttgtggcaatggcaatggccacaaagagaacgaggtcaaatctagataaattataggttcacttggtggcagttttctcctgaatttcctcatctctccccaactgattttcctatttccattctcactggcttctcccaaaacccaatccattctctcactgctttgatggggatacttataaaatgccatccagactgttgatcccctgtgtaaaattcttatgtagccctcagtcacttacaggatacagccccaacatgatccataaggcccttcctggctagtagctccttaccttttacctcatattccatgctttccccagtatgctacactctctgtggtctcagtgtctactcataagttgttttttgtttctagaagccaccg

SEQ ID NO: 38304 - DNA, 1040 bp, Homo sapiens
ccactccagccatgtactacgcagatccaaggaaggagtaccaaacacatctcagtttaggcggccttgcgcatcagtgttcaagaaatatttccattcgactcttagagtaccagcaatttttgaaacactgttccattttctaaatttttttgagtcttttatctctcctattctatttaatcaccctactatataaagccatttgaataattcatgttcactggttcagaagtaggtgatgttttgaaaattcatttttatatgaattagatatatatgatttagtaatttgtatatgtccccaattatattcttaacctgttttttctaatagtgttttgacatgactttttaacacttgtcatctatattgacaacctcattggcagggtagaggtatgtgatttctttttttttttttttttttttttaatcgttaagcgtttaaccatgaactctcaaatacaaagaaaagaattgcctctgtgtggatttatttaagactgtaatgaattaacctaatgccatttgaatttagattgcttctgcctctattctgataagttagcgaacatatgtgacattcattcaattatggcagctgtttaatcatcaatagtaatattttatcttaatcataatgtaggctgtatcacctctagatttgtgtgcccatatgagaagacgggtatcattctcttagctagcaacaggattcctcttaggaaaggagctggctttgcttaggaaactatcttgataaacagttcaatggacaaagttaaaacctgaggacatgagttacaaggaaacaagactaggaaagacagaactaactgctcagcagtagaaaaaaaatagagggatttttttctcttagcataaatgagagaaagggtaataaaagagagggaagaagtggggaataactaatattcagttttaagtggtttgcatttttccctgtgtggacagaactaagccagaaaacaaaaaattgagagctagataagacctggagaatgcaggtcctctgg

SEQ ID NO: 38305 - DNA, 1113 bp, Homo sapiens
agctgaggcaggtggatcacttgagctcaggagtttgagaccagcctgggcaacatggtgaaactctgtctctataaaaaatttttaaaaaattagctgggcatggtagcttgtgcctgtagtcccagctactggcagggctgaggtgggaggatagcttgagcccaggaggcagaagttgcagtgagccgagatcgtgccactgtactccagcttgggtgacagagcgagaccctgtctccaaaaaaaaaaaaaaaaaaggaaaaataagactggtaaaatatacactacagtgttaacactagttatctttagcagaatccctttttttcctttttgtgctttttctatatttttgaaaatttctaaaatgaacatttattccttttgtaaagaagggaaagagaaaggaaagttttccagtgccattttgtggagtgatgggacaaatttgtctgaaaggaattgaaacgggaatgggaggtttagaaggaagaacgatggatgtaaggaagatagtgagacatggatcaactctgagctgcagccactggagaatttgtgtggtgggattactagaattcaagcagctggagaggtgcagagagatccctaggagcaagactggtgtgcatgctgctgtggttgctttggcatggaatccttctaagagtatcaaactgtataaagtaggtaggaaacagaaccttgtatgcctggtaaactttgccaaggagaagggtctgctctctgcctaggctggtttttcagcatatgatttaagcatattttcctttgactcttcatatgtgtttattgatttctttttctgcgccatattctttgtttctactgtgatgcttagagagatggtaggtagggtggaaagagatacgctttgaacttggcagaattcagccgacatagatttgatccctgctctatcacttatgagctctatgaccttggaaaaatttgctccagtgctcctagccagcagtgttagaatgatgctgataataatcaccttgcaaggttttaagcaagatacatttatgtaaagtcaccaactcagttcctttcacgataatgggcagccagtaaatgttactt

SEQ ID NO: 38306 - DNA, 1024 bp, Homo sapiens
gttgtgaatgaggaatcaaaatggaaaggttatcattttcattagctaggaaagaacaagaccatacttttctccaagtgtaattacagcggttcactggcaacattacactgcagtaattagtctaaaggtgtatgtgagggcaggcttttgcacagacactagaaatattatttcagagttgaaggtcacagccttgtatttaacatgttccaggcagcttaggggggaaaaaaaaaaactaatttgactggagctaaagaaagacatttgacatttcccagagtcatacattcagaaaccagtcaggtcgaaaaattgtattttattttctacaataaaaggcaaaacttagctgcagaaatagcatgtcagaatattctgtaggataagcacagataaaattcaagtttattagaaccatgatgtaaatgattacaggaacttttgatatgtgtggggttttttttgtttttttttttgagacggagtctcattcttgtcgcccaggctggagtgcaatggcgtgatctcagctcactgcaccatctgcctcccaggttcaagcgattctcctgcctcagcctcccgagtagctgggattacaggcatctgccaccgcacctggctaatttttgtatttttgtagagatggagtttcatcatgttggctaagctggtcttgaactcctgacctcaggtgatccacccgcctcggcctcccaaagttctgggattacaggcgtgagccgctgcgcccgggctgatatgtgttttaatctttgccttaggaagagaatggacagaaaaaataattgtcagcagctcttaaagggaaacaaaatagtttctttcttccttaacaccattttcaagaaacaaatgtctatcttacacaggtccatatatctacgtcctttgtgaattttttgttactctatttaaatagtaatattgaaatctttttgtaactcagcatctcagaatagaaattgattgacattattttccaaagccacgtcag

SEQ ID NO: 38307 - DNA, 2596 bp, Homo sapiens
gttttcacctactgaagggcgcgcaggcagggagaagggccggggggggtaggagaggagaaaaaaaaagtgaaaaaaagaaacgaaaaggacagacgaagagtttaaagagaaaagggaaaaaagaaagaaaaagtaagcagggctggcttcgcccgcgttctcgtcgtcggatcaaggagcgcggcggcgttttggacccgcgctcccatcccccaccttcccgggccggggacccactctgcccagccggagggacgcggaggaggaagagggtagacaggggcgacctgtgattgttgttattgatgttgttgttgatggcaaaaaaaaaaaagcgacttcgagtttgctcccctttgcttgaagagaccccctcccccttccaacgagcttccggacttgtctgcacccccagcaagaaggcgagttagttttctagagacttgaaggagtctcccccttcctgcatcaccaccttggttttgttttattttgcttcttggtcaagaaaggaggggagaacccagcgcacccctccccccctttttttaaacgcgtgatgaagacagaaggctccggggtgacgaatttggccgatggcagatgttttgggggaacgccgggactgagagactccacgcaggcgaattcccgtttggggcttttttttcctccctcttttccccttgccccctctgcagccggaggaggagatgttgaggggaggaggccagccagtgtgaccggcgctaggaaatgacccgagaaccccgttggaagcgcagcagcgggagctaggggcgggggcggaggaggacacgaactggaagggggttcacggtcaaactgaaatggatttgcacgttggggagctggcggcggcggctgctgggcctccgccttcttttctacgtgaaatcagtgaggtgagacttcccagaccccggaggcgtggaggagaggagactgtttgatgtggtacaggggcagtcagtggagggcgagtggtttcggaaaaaaaaaaagaaaaaaagaaaaaaaaagaaaaaaaaaagatttttttcttctcttaatcggaatcgtgatggtgttggattatttcaatggtggggttaatatagcatgttatcctgtctatcttttaaagatttctgtataagactgttgagcagtttttaaaatagtgtaggataatataaaaagcagatagatggcgctatgtttgattcctacaacgaaattatcaccagctttttttcattcttaactctttaaaggattcaaacgcaactcaaatctgtgctggactttaaaaaaacaattcaggaccaaattttttctcagtgtgtgtgtttattccttataggtgtaaatgagaagacgtgtttttttccttcaccgatgctccatcctcgtatttctttttccttgtaaatgtaatcagatgccattttatatgtggacgtatttatactggccaaacatattttttcttttgtccctttttttctttcctttctttttacttcctttatttctttattccttccttttcctttttttcttttttttttctttttttttttttttttttggtagttgttgttacccacgccattttacgtctccttcactgaagggctagagttttaacttttaattttttatatttaaatgtagacttttgacacttttaaaaaacaaaaaaagacaagagagatgaaaacgtttgattattttctcagtgtatttttgtaaaaaatatataaagggggtgttaatcggtgtaaatcgctgtttggatttcctgattttataacagggcggctggttaatatctcacacagtttaaaaaatcagcccctaatttctccatgtttacacttcaatctgcaggcttcttaaagtgacagtatcccttaacctgccaccagtgtccaccctccggcccccgtcttgtaaaaaggggaggagaattagccaaacactgtaagcttttaagaaaaacaaagttttaaacgaaatactgctctgtccagaggctttaaaactggtgcaattacagcaaaaagggattctgtagctttaacttgtaaaccacatcttttttgcactttttttataagcaaaaacgtgccgtttaaaccactggatctatctaaatgccgatttgagttcgcgacactatgtactgcgtttttcattcttgtatttgactatttaatcctttctacttgtcgctaaatataattgttttagtcttatggcatgatgatagcatatgtgttcaggtttatagctgttgtgtttaaaaattgaaaaaagtggaaaacatctttgtacatttaagtctgtattataataagcaaaaagattgtgtgtatgtatgtttaatataacatgacaggcactaggacgtctgcctttttaaggcagttccgttaagggtttttgtttttaaacttttttttgccatccatcctgtgcaatatgccgtgtagaatatttgtcttaaaattcaaggccacaaaaacaatgtttgggggaaaaaaaagaaaaaatcatgccagctaatcatgtcaagttcactgcc

SEQ ID NO: 38308 - DNA, 1033 bp, Homo sapiens
ttttgtaattttggggtggcattctttcagggcctgccttccaactggatcaaattcttctaaagtctgctgtctctaaaataactaccttcactcactgaagacataatgttcacagtaagactggtctaaaaattccattgttgtgtcatctttattgagttttaataactgtgttatacaagcctttcttcccttccatactgtgaaacagattaagtagcattagaatcagctgcattaaaaattgggtaaatgctgtggactgaatgtgtatgcccttgcaaaattattatgttgaattactaactcccaatgtgatggtattaggaggtggggcatttggtaagtaattaggttatgagagcaaagcccttatgaatggaattcttgcccttggaaactccagagagtgtgcttttcctcccataactatctgtaaagacacagagaaaagatggttgtctaggagccgggaagtgggccctcaccagacaccaaatctgtcgttgctttgatcgtgggcttcccagcccccggaactgtgggaaataaatttttgctgtttataagccactcagtctgtggtattctgttatagcagccaaacaaatagaacaagaaaatattcaccccaccaagaaaccatatggatctggtgctttttctaaggggggagggctagctctttgagcaattcctctatttcttttatgtgtattggaactctgatattttatcacttctagagtaaattttaatttttggaaaattatacattttatccatgttttcaaatgtttttgtttgtgtagggttgcataaatgagttttatatgctttaaatgtcttccatattgatggctatttctccttctctcttattttgtgtatggctgatttttcacttcccccacttcagttagcttgtaagtgagccatggagaaaatggcaacaaatactttaaagaagataatttttaaaatgagaataacaatttaatttctttagaagatgagaaaggtacacact

SEQ ID NO: 38309 - DNA, 1030 bp, Homo sapiens
ttgacataggtactcacagattggccacaacaatagaaaagacaaaggcagccaggcgctgtggctcatgcctgtaatcccagcactttgggaagccgaggcaggcagatcacaaggtcaggagttcgagaccagcctgtccaatatggtgaaaccccatctctactaaaaatacaaaaattagctgggcgtggtggcgggcacctgtagtcccagctactggggaggctgaagcaggagaacagcttgaacctgggaggcagaggttgcagtgagccgagatcgcgccactacactccagcctgggagcagagtgaaactccatctcaaaaaaaaaaaaagacaagacaagacaaaggctagcttttccactggtagctgaatgctatatactaatttaggaagtttttgtcactaagtatatgatacacatgttgggagtatgttaattattttctcttttaattgaagtgaaaagagcagtgctgggattgaccatgcagaagagatggagttgctgttggaaaactactaccgattggctgacgatctctccaatgcagctcgtgagcttagggtgctgattgatgattcacaaagtattattttcattaatctggacaggtaagaaagcattatataaaactaagtttttttaataaaataattataagaaagtttttaaggaaatattttgtgaggaattacgccatcattatcatctatactacattattattattttttttgttgtgtaggtttcatccatgtggtctgtatagatttgatgaatgtgctgtatatagttagtgggcccttctaatctgaataggtgttctcctctccagccaccgaaacgtgatgatgaggttgaatctacagctgaccatgggaaccttctctctttcgctctttggactaatgggagttgcttttggaatgaatttggaatcttcccttgaagaggtgagaatgtattattatttctaaaacttgggggttttggccgggcatggtggctcatgtcagt

SEQ ID NO: 38310 - DNA, 1046 bp, Homo sapiens
tactttgtttcccaaaacatataattacagatgggaaaggtgtgataaaacagtgtctctgtgaagcagtgttaatgaagagtttttattttttaattcttacatgtctggcaacgtaccaggcggtttgcatactttatttggctcaatcattgcaactctgaaaatagatatattatccctactttgtagatgagaagactgaggctcagaacatttaacttgcccacaggcatagagctggaaaaataacagaattaggacatgaccccaaagacttgcactttctactgctctgttgcctttctgtattaagataatacttaactcccagagtttttcatttcactgtggttttgtacagtcatccctcagtatccaagaagaattggttacaggatccccacagataccaaagtctgtgggtattcaagtctctgatataaaatgacccagtacagtcaaccttgcatatctgcagatacagaacccactgactgtgttttcacagaatagcttattgtaagttttctagaactgaacctggatgtgcatctggcacagtgtgatgctggattctgtgtcctcattagtctaacgagtctactctgttgcccacatcacctcccattaggaccactatgcccttttaaaaagtggtctttataagatgtaagtattatgacacccttctgcatacaactattcaatggcttttgattagccttaggataaaaatcccgtcctgccgcaccgacttgtccatcttgtgggtagccacttgttactacctctctcagtgtccttcccagacatgctgcttccactcctctcccctcagatccccgttttgcttagttacttcctcctcatctttcaggtctcaaagtagttgtcccttcactgaatgcaccgacaacctggcccagtaaagttactttgtcgtctgcgcccaaataatcctacccttccatctgctacattccttaaatctgcaatcccttgttcaaagcctgcaaaagagcatgagctccttgaagcaaaga

SEQ ID NO: 38311 - DNA, 1675 bp, Homo sapiens
tcccttgcaactttaaaatattctgaggtgctatcgtgcccagcatagcaccagacattcagctcacagtttgagaactgtggatataagcaaagaccttaaattgcgtgtcctctggcatcatgacttaagatttgcacgcatgtaaacaaaggctgcaaagaaacacaaagtaaaagcagtacatttggcatatagatgattttaaaatatttaaaaccttttaaatcatgttcttctcctgctttattctgtgggtgctatcaaggcccttgtttttcttagttcctttctacaggaaagagctgtacaaataacataaggctttcaaactctggggcagtaacaattcaaggaatcttctaaggaacctggcgttttgcgatggaaatgaactgtgttctcttttaggaccatagaattttttggctgattacaggaattatgttcatgggaagtggcctcatctggaggcgcctgctttcattccttggacgacagctagaagctccattgcctcctatggtatgaaggatatggttcacggcggtattgtggaagggttatgatcatgggccctaaagtcagagcgcctgggattaagttgtcacaggcactatggcccttgcgagttgctttctcaaacttccttcagtttccctatctgtcagttaagtcggtattacctgcttcatagggttatgggaagaattaaacaatatgtgtaaagcacttactagcacactgcctaacacaataagttagaaatataatttgtgtagaactctgacaacatacatttaaacagatgttagtaattctggtataaggtttgtcataaccaaatggaaatgtaggaaacatttataacgttcttaaaagatagaaaattcacctccattttctttgtacttgaagatggcaccactggaataaatacttaagacactgatactgcttatagtcctttcttcactgagtagttacataatacatcattttactagtggcttttcttttaaaaaagatactaaaattaatacttctgctttatttagatggcttctttacctaaaaagactcttctggcagatagaagcatggaattgaaaaatagcctcagactggatggacttggatcaggaaggagcatcctaacaaaccgttaggaacagccccgtggatactgaagttttttttatggtagttacaggaaacttctgatactctttttattattttcttgtatagagtcagacacttgaaaaaaactaatgtttgaagacaaaaatattttggcagtcacaataccagaactggattgcatttccagaattctgagttaaagaaacaaagtatttgctttgtaaaaggccaaaattctatttcctacaaactttaaatgctgtttttatagatgtgatatgaggcaacacaagcacagacagttgcatagattttaatttatacatatcaagaaaagtgcaatttcatgctgaatgaagcgtaggaacttgacaagcccataggtagctatagttctttgtcagtatagggaattatgttcatgtgaatttcctgattctcaggtgactaaaaagctagcattctatgtattaaccttacaacagactctgtaagtttgagctttaaaaaccaaactttgacataacct

SEQ ID NO: 38312 - DNA, 1034 bp, Homo sapiens
tttatgtgcactcatttgtatgtgagtgtttgtacacctctacctaatttgatcacatcaatagttagatttgtgtaggcagcacctgaatcaagatacagaactgtttcatctctacctaggaaatccctggcagtacctcttcataaatgactttgaaagtaacttggcaagattggtagcttttttaaactttcctttcactattatatacatgcaaaaaaaaaggatacataattgaataagtgaatcgctcaatgaattctcagaagaccgagatcaaggtgtcggcaggtttggtttctcctgacgcctctcatcttggcttgtagatggccgccttcttgccatgtcctcccatgatctttcctctgtgcctgcgtgccccagatgtctctctgcaggtcctaatctcttcttctaataagaaaaccagtcgattggattaggacccatcttaatggcctcattttactcattttaacttaattaatcacatctctttaaaggctctatctccaaatacatttcaggtactgggggttagagcttcaacctatgaattttgacataacacgattaatttagtcagctgggcgcagtggctcacgccagtaatcccagcactttggtaggccgaggctggtggatcatttgaggtcagcagtttgagaccggcctggccaacatggcgaaactccatttctactaaaaatacaaaaattagcccgtcatggtggtgggcgcctgtaatcctagctacctgggaggctgaggcaggagaatcgcttgaactggggaggaagaggttgcagtgagccaagatcatgccactgcactccagcctgggtgacagagtgagactccatctcaaaaataataatttagcccacaacactgaaggaatatttttttaaatgcctttattttctggctggtcatggtggcccatgcctgtagtcccagtactttgggaggctgaggcgggcgggtcatttgaggccaggagttcgagactagccttgccaacatgg

SEQ ID NO: 38313 - DNA, 1041 bp, Homo sapiens
tattcccccacaacaaaaaagtatgcagtccaaatgttcatagtgctaaagtgaaaagcattgacttagaacaaagattaacagtcaggctgagtaccatagcgcacacttgtaatcccagcactttgggaggcctaggtgggagaattgcttgagggcaggagttcaagaccaccctggctaacatagggtgttagactcaatctcaatttaaaaaaaggaaaaaaaaaaaggttaaccgtcagactaaatgtcctgctcttgatataaagatcacttttaaatttgtcaacaaactaagtactgtgggactataaagaaatactaaccatagttcttggcctctaggaatttataacctaggaatggaaagtgtattgcaaggaagagtcccatcagaggtactgtttagaaaaggagtttcatgagtaagttcaggaaacactgatgtatccttttttaaaaattttggtaaaatacacataacataaaatttaatacctgtgttagtccatttgcgttgctataaaggaatacctgagactgggtaatttataaagaaaagaggattattttgactcacagttctgcaggctgtacaagaagtggggtgcttgcttctggtgagggctcaggaagcttacaatcatgtctgaaagcaaagtgcaagcaggtgcgtcaaatggcaagagagagggagtgccacactcttttttttcttttcttttctattttattttattctattcttttttcttttctttccttccttcctttctttcttttcttcctctcctttctttctctttcactctttctctctttcttctctctctttctctctctctcttttctgtcttctcttctcttcttcttttcttttcttttcttttttcttacaggatcttaccctgtcacccaggctagagtacagtggcacattcacagctcactgcagcctcaacctcctgggctcaagcaatcctccttgtctcagcctcccatgtagctgggaccacaggggcgtgccaccatctccag

SEQ ID NO: 38314 - DNA, 1050 bp, Homo sapiens
gagttcataccataaatgttacgatgtttggttttataaaagagtacctgtaagtttttagtttctgtgtggaagattttttcagagagaatacagatagccttcttgtattagaattttgtcatatgtggtttgaaactgttcattggagctgaggaattttgttacgtttgttttaactagatatgattaacaaaatgaccatagcaagagcatgcattgaaatgagagaagttacgtgtgtttgtgtctagtttgggtaatatgattcattcttaagaattcttcaaactttattataatttttggaaataacaagtttgtcagttgattaaaccagtgtcttgttcataggcgaccttacgcaattatatagcagaccaaatgtttgtgttgttagtgttccttttccacccctaaattatagaaggactaagagtaacactccatacagaaactcagtaactaaataaccatattgcaactcagtaacaagataatgaattatgctgactttttagaatagttctgtcccaagaagaactctgaagatgattcagccttctgcatctggatctcttgttggaagagaaaatgaggtatgcactatatggctaaaatggggtactggtgatacagtgtctacatcgaaaacatttctactattttcttggtcagaaacacgtaaattgttgaaatttggaaataatttgggaatcacaattatatatttcccaaagaagtgattttggttttaattgttcaatttaagaagttcgtcgggtgcagtggctcacgcctgttatcccagcacttagggaggccgaggtgggtggatcgcctgaggtcaggagcttgagacaagcctggccaacgtggtgaaaccccatctctactaaaagtacaaaaaaattagccgggcgtggtggcacacacctataatctcagctgcttgggaggcttgaggcaggagaatcacttaaacctgggaggtggaggttgcagtgagccgaggtcacaccactgcactccagcttgggtgacagagcg

SEQ ID NO: 38315 - DNA, 1054 bp, Homo sapiens
tgctatacgggtcagctatatcagtatgctgatcagcttaggttttaacatttttacaataaattattggtttattctttaaaagagactgaatggtgaacctctggataattttgaatcactggataatcaggaatttgattctgaagaagaaactgttgaggattctctagtggaagactcagaaattggcacgtgtgctgaaggaactgtatcttcctctacggatgcaaagccatgtatatgaaatgcattaatatttgactgttgagaattttactgccgaagtttacctccactagttctttgtagcagagtacataactacataatgccaactctggaatcaaatttccttgtttgaatcctgggaccctattgcattaaagtacaaatactatgtatttttaatctatgatggtttatgtgaataggattttctcagttgtcagccatgacttatgtttattactaaataaacttcaaactcctgttgaacattgtgtataacttagaataatgaaatataaggagtatgtgtagaaaatttgtctgtttctatgcttttatgttgttctctttccattcttttgctaactaccttggaggagacaaggagaaaacgaacttaaagtatttagactgagatagctgaggtttttaactcccaaactttgttgtacctcaagctcattgtagacactattgatattaacaagttgtttttggaatggagcatgagaatctattttccaaaagcttttcaagtgaatctgattagacagtgagaggcccaactggctagcaggatcagactcttcttggaagcttaaaatgatggatgatggtgataatcctcaagaaacaaagtgaggagtgggtagaagtttgacggaaaaaatcaggaatagctgaaaattatggagcttttctatttcacatattggtatagtgcaaagtatgtaaatattgaagaataagagtagggtcagattcattagggatttcccatatatactaagttttgaaggaggaaaagtacaaactaggggta

SEQ ID NO: 38316 - DNA, 1029 bp, Homo sapiens
ccaggatatggctgagaggaagcacatatgtaaattgaatgcatcagggatcttttggagaagtcaaacaagaattctgattacctcatcagtgatacctaaatgcagatttcttcttgcttcagacaaaatttttcaaagatactcaaagtatctcagctcttgttgtatgtgtgttttgaaagatagggttgaagaaaacaatgaaaagataacagggatatctgtcctccagagttgttcaggggattcagcatatgagaagttatttgcgaagttttagttcccagtctgggcatcagctcattatcattagtctctgatatgagttgtttaatgatgaacttgtgcaaagcacttgatcctattcagcgtcagacattcattgttaaaagaacacattgaggacactgttgtaggtcaggaaattgaaggtagggagttgagggcaagtagaagagagtttcattctggagttagttcagtaaacattgaatgctcatgatgtgtcaggctttatgctgctaccagaggcaggaagataaataagacagaacatgcagacttgaacagtacggtgtggtaagaggtgtgcccatggtactgtgcgattatagactggcgttggcccagtgcagggctagagggatgctccatggtgatgactgagttgagccttaaggcccggatgagctggccaggtagtgatgacaagagggagagggatttaaagtgtgaagttcaatttaaggaacagagatgatgcaggaagggctaagatatggaaggctttgatgaagattttggggagccagggaagaaggggagagatgatcagatttccattttgattgcagcttggtaactggattacagtgtggcagaactggaggctgggagaccaggaaggtttcaaccaagttagaaaatcatttttggtttagaagacagtgaggggctgggtgtggtggctcatgcctgtaatcctagcactttctcaggctgaggcaggaggatcacttgagctca

SEQ ID NO: 38317 - DNA, 1030 bp, Homo sapiens
tatgaattaagttaagtaacagcaccctcttacaggacacaagagaataatcatgtctgtacaggttggcccctggtaagatgctcatttaaaaatggttgtgtcagtttaatataagtgtgttcttttcttgcctacttaaaatgtatttctaactatgacttttcttttggaaaatgattgactttgggggagctctttcagaggtaaaggaagttaactagcagatctaggtaactgaaccttgtgtactattctagaaatgtttatacttctgccaaattgaagcatgagttcagtgtttgcataaccacctgtgcagttactcatagtagcattccagtatgcatttgctgaactatactcttcaattttgcaataaaagtattttcacatgttggctgctactgtgaaaattggtttctctcaaatgttcggaaagcttgtgctgcagttttgatgtggggggtgtggtttagtgctgcataacatttacttttttggtggaagggggatctgtgatgtaaacttttggtttcaatttctctatttggagctctttttgttagtgctaagaattctgagggtatccctatagatgctggttaaaaaacaaacaaagcaatgttgtcattgacagtttggtcaagtgggatgtaagctgctgagtggggtgaagacctggtctccttggggctgatttggggtttgggagtggtttggagggtggctgccattgaggagcaggaagtgtgggggttgctgctgtgtctggaaggacctcctaggggagagctagcaaaccaacatcaccagtgcccccagaacactcagctgtgtgtgatgtggctgtgtgtgcccttgctggtactcagtcctgttaaggcttgaagaggaaggtaaggagggtaagacttggagagggaagagttaaggagggagaatattaatgcagtaaggaagtaattcatattttgagacaggttcccatgtgtgaacacttgacttccaaacagcccacacttggctt

SEQ ID NO: 38318 - DNA, 1032 bp, Homo sapiens
cagacattactcaggaatctcatagaaccccagatgattatgatataaccaataacataagacccacctgattggcagttctgtgaatcaccctaaaatctctactaaaatggttaagtcctgtactctttactctggagtcctcttgtctacctttcagaaatggttgaaatatttagatgtggaattaatgagattttacatgtctacactcttgctttatatattttaatgtgataaatggcctcatgtatgtatattcttccttgtcccagactcatgttttttgagtaaaatctttaattggtcaaaatgtgttgtattgatcagtatgttatatagaatgatgtacttattgatttactgtaaataattacagtggagcaattctgttaggagggttcgtttttgccattttagcaaggaaaatttgccagttattttggctgaatttaaaaccccttacatgattagatcacatgtctatttctgctgtaatagaggagtgtaagtaactaagtttatctgaacttttaggagtctccttttaggctcaaattagttagtctggtgtctatacagggcctttgttaaagactggatttaaatattgggtggatctgtcttggatcctgttctagggaacgcttcttggaagtcccagacggggaactcatcataacctggttttaccccgtagcatggccctgtgccatcgacaccattagagcaaggctcagtgtctcgagctttagtttaattctcaacccattgatcgctcttgcagtcagcttaacagttgaatgcaatgctgtattttgttttttttttttttttttaaagctagtccagaaattaccacagctgcttctcagttaatcagatgcttaagactcccgtttccacattgcttggctgctacatttttataacaccacagctgtctggatctagcttgtgcccctcgccccccttacccctttccatctgccacctctcaccacttcctcacttgctatgtatcgaggtggc

SEQ ID NO: 38319 - DNA, 1050 bp, Homo sapiens
ctaagtgtatctttaatttccagaagttcggattggtttttcttcagaatatctgtctctttagaaaattttttgttcatactgtgaattgttttttcaatttctttatgctgatttttacctctgtcttgtatttccttgaacagctttaatagtccaccttttgaattctttatctggtatttcaaagatttcatcttggtttggatccattgcagaagagctagtgtgatcttttggggttgttatagaaccccgttttgtcatattgccagaattattattattattttttgagatggagttttgttcttgtcacccaggctggagtgcaatggcacgatcttggctcactgcaacctctgcctcctgggttcaagggattctgctgcctcagccttgcgagtagctgggcttacggtgcccaccaccatgcccagctaatttttgtatttttaatagagatggggtttcaccatgttggccaggctgatctcgaacttcctacctcaggtgatctgtctgcctcagcctcccaaagtgctgggattataggcatgagccaccgtatctggctgccagaattatttttctagttccctctaatttgggtaggctattctaattattcttgaatttatttttgatttgacttaaaaattttttttctcccttgaggatgtgactttatcgtttattgtaggctaattcagctcttggtgctttcagggatgaagactgtgtatgacttccttggttatagagagtctttgtatgacagctttcttagatgctggttgtagtagcatagtgcttggtttgtgagcaggttcattgtctcctgtgggattggaattgcgaggtctcttaaagcttatctcattgcactttttaattaattaatttttttctgcagtattttatttactgagttgaacagcttaggcttcaggccagtaggagagatgtccatgggtaaaaatcagttgtggctaaagcaggttggtaaatgcaatactcagtggtgggcagaggtcccagccttgatag

SEQ ID NO: 38320 - DNA, 1078 bp, Homo sapiens
aggccagcaggaaagtgatccaccttccaattacactcctgacccagagttccagctattctgatcaggcacctcttttcatctgcaggaatgttgatgttcaacatagaaagggattgtgactgtacccctcatccaagcttgaacctaggggacatgcattctctgtggatgcagttaccctgaagtattccagaaaggctgtctacaggtgcatccatgctgagctcccatgggggaagcctcagctatgtcgatagtggatgaagaggagaagaaatcaccttctccaagacccttcatgggcaccagggctgactggctgttggggtagagccacagacgttttctgctgagccaagcattgcaactgtgcctctgctaaaagaaacttcccagaaatgggaagttctgggacttaaggcctgccatcttgtgttttttgtttcatggagtgctcccttgatgtcatgtacttcttcttcccttaggagtagaaatccctgaagtccagactactgtgaatgcaactcttatctgggtctagctgcctagtggggctgccacactccagggtggtgctgggggatgtctccaaggaatccagtgatgtgacctgtcctcaagtatcccagcagtgggtaccagcaccagttctgatggggatggcaggggagtgctgtgagattccttggtcatgaaaagccttagtgtgttggttttctcaagtactggttgtagtagtagatgaactggtcacatggacagactcaggatctcttggttagccagggtgttgcaggcaatagtgattgctgaggtcacacatgacttttctccttcctgcatgttgtcttcttctgcctgaagatgctaatctcctatgtcagttggcctccaaccagaaggtggtgcttgcaaaagagtaccagctgtggtggtggtaggatttatgctttgccttatgtacccaggggaagtactctggtgtctcaggcaattggtggggctatagagctccgaaaagtttctgttctttttattaagctaccagggtaggattgaggggcaaagccag

SEQ ID NO: 38321 - DNA, 1072 bp, Homo sapiens
atttcacaaggcactttaaaaaatattgtcccttcaagttttttccctttatttctctccatgattttgtctaaatttaccagcaagtcacaaaaaaatgaaaattaaaaccctactggggactaggagctcgctgaattggcttacatcattgtaagcatggacatatttctgtgcgttgctgtccccaagcccatgcgctgttaagaatatgcattgtcgggacggcggtgcaaggagaaacatcctggagaggacgtacaggatacagaaacaagtgactgctgtgacatcattagtcaacattggttgagtgacagagtaaataaggcatcttctgttataaatgattgacaccgctgaaaatttagaaacatcttgctccaatagcagcattatcttctttggactatgcaaatcttttcaaattaaaaattcaagttaaaagaaactatttttaattgaccctcattgcggccattccttgatcaatatctctgaataagattgttaactgaacaatgcatcttctggcagaaatagagataatgaccgttttgttttcacttatttttcttgttacaaaatttaaaagtaacatcaattttaaaagtctttttgttatacataagttacattttgggaccttctttaatgattgctcatatagtattgctcgctttttgaatcagtgatctgcctaagcatttgcaagtcactcttagcattcctcaaaagttgctgttataaatgataattttacatagaggatggaggaaatgagaaaattgcgtttgtcttcctattgaggtaagacataagcaagtggaaaggtggtttccagccggggaatgaagcctgttgttcatgctgttgtgtgttgacttgtccacttggatggctcctaggatcatgcgggtccttgtgacttccatatgtcacagatcttgcgtacagtttctgtgccttgccctcctcccagtcttttctgccctgtggttatttctctactgccactgaagggtggcactcaagcttttccttatatgagattcatccccttcagggtatg

SEQ ID NO: 38322 - DNA, 1034 bp, Homo sapiens
ctgtctttctgtctatttaacagtgtgtgtgtgtatgtgtgtgtgtgtgtgtatgtgtgtgtgagctggtgcccggtaacaaatacactgatggggctccttgctctcatttcactacaggcggaaaacaacttctgtagagtggattctcctctcacttattatttctgtgcacagtgttagcatagataagaaacagttcctaccttctggaaatttagtttttacaactttatctcttatggaaatgaatgaacttgtttcatgagactactttagctcctgaaatctcagttgaaaaagaaaaatgagaactgtaaagaagcggagctacttgaaaaggccccgctggacacgtctgcaggttggttcgcacagatgtctcccctagctgctgcctcctttactctctgattgatttccccttaaccctgagtgtgaatgtccacttttgtttttcgagtaaaactgaggctctggtttccaaatctaccatcaagattaatttatttctttctgtagttgtagactgtcagcttcctgtttttaatcccaccagcttccggtcaaagatttttgccatattttcttcctgtgtttgagtagctgaaccccctatgtatcatcaaaagagcatggcctgcagttttatggaaacaaagcaagaattttaaaagagaaatgtgatcctagatgaggtcagacagaagtccagctttctgtgtccaaggtttacctaattgagttgaataatggctgtgcctacttctgacagccttgctgtttctttgcataatatctgcttcattgtcttgatgtagacagaatataatgccattaaaatgccagatgatggttttgaaccaagatgaaccattccaaattgccagattctgtaatatcattttaattataatgtcttctcaaacatggttaccccgaagtattaaaataatggttcttaattacaggttcctttgggtaaaatagacaaaaatcatgctgcacttgtagatcttgtgcatttacacgga

SEQ ID NO: 38323 - DNA, 1050 bp, Homo sapiens
attagtactgataataataactaggaaaattaaattcttatagtcatacagatcagaaagatggtatcagaactaggtaatctaggtttaataggttatctagaatgtagagtagcgaagaatttggcaagagatctagactctcaatcccttgtcaacttctttgtttttgcattttaactttgtattataaaatagcccccacatattagcagtttatttttgatgttcagaaaaaaagagggctgtacaattgtgacttcagaatacatcttaatgctccactaaaaatacaaaaaattagctgggcgtggtggcacgtcgcctgtagccccagctccttgggagcctgaggcaggagaattgcttgaatcgggtggcgaggttgcagtgagctgagatccaccactgcactccagcctgggtgacagagcgagactctgtctcaaaaaaaaaaaaaaaaaaaaaaagctttaaaatcagaagccaaatgattggttaattgtgatggaagggattttcagtcctttgatctgaaaacctgtggatataccatcctggtatatcctctgtagagtatacctctgtagagtatgaagattcttttgatggtatggaaggcaagttagtcattggtgagatgacagcacagtggttaagacacgggatcatgagtcacactggctgggtttgaaccctggctctgcctcagctagccttgtaaccttgcatatttcaaacttccctgtgcctttggaatgttcatctgaaaatggggttaataattatacctctcttctggggtaattatgaagactgtatggataaatatatttaaagcgctttgtgttagtacataaaaatgttataaatgcttgctattttcatatgcttaaaggtcttccttttttttaaatgaacaattatctaacatgacaagttttcttaattgaaaagaaaaataaagttagaaaatccttatgttacagaaaattttggatttcctgagactagttcatggatttttttctgtgatgctcttattttatc

SEQ ID NO: 38324 - DNA, 1050 bp, Homo sapiens
tttaagttacctggctccatgttttattctcctaatggtctatgagttacttgatggcagagcttatgtattttttcatcttgcttattctcacagcacagtgcctagtatgtatgactggatacttcattgattgattgattggttgacagggtctggctctgttgcccaagctggagtgcagtggtgcagtcatggctcactgcagcctcaaccacctgtgctcaagtgatcctcccatctcaaccaggactacaagcgtatgccactgtgcccagctaatttttaaaaatttttatagagacgaggtttcactatgttgcccaagctggtctcaaactcctgcactcaagtaatcctcctgccttggcctcccaaagtattgggattataggtgtgagccaccatgcctggtcgcttgaatgctttttaggcatatgttgaatagaagacaatatgattggagatgagagagaaaaaagctgtggtatggcaaaagaaatcaagatttgaatttagaatatctgacttaaaattaaactcgtcccataaccttcaataagttactcaatttttttgaaatttatttttttcaactgtataggtaggaaaaataaagctatgtaataactatgtttagctgacaatatgtaattcttactgggtgtctggcactattttaaatgttttacataaattaatacatgtaatccttaaaataaatgatgcagtaggttctagtattacagatatggaaaacaaagagtaggaagattaatttgcctaaggtgaccatgaggatccagtgaaacagtatatgtgaaaaggagtttgtgaaaagctacataaaaatattagatatctttataatttccaataggatactaatcagttttgaataaaagacatattctagagaaaccaggtttctggtttcagatttgaactctcaagagcttggaagttatcactcccatcctcacaacaacaaaaaaatctgaacaaacagaaaaccaatgacttttcttagatctgtcaaagaacttaagc

SEQ ID NO: 38325 - DNA, 1053 bp, Homo sapiens
ttttgagattcatccattttgtgtatatatcagtagtttattcccttttattgctttataatattccaagatatagatatattgcaattttttttttttttgagatggagtttccatcttgttgcccaggctgaagtgcaatggcatggtcttggctcactgcaacctccgcctcttcggttcaagtgattctcttgcctcagccttccgagtagctgggattacaggcgcccgtgaccatgcccagctaattttttagtagagatggggtttcaccatgttggatgggctggtctcaaactcctgatctcaggtgatccgtacatcttggcctcccaaagttctgggattacaggcatgaaccactgcgtctggccgatatattacaatttatttacccattcacctgttgatggacacgtgggttgtttccagtttatagcattgtgaaacaaagccagtatgaacatttgtacatgtcatagtatggacatgtgttcatttatctgggagaaatgacccagaaatattgctgggctgtataagtgtttaattttatgttagaaacagccaaacttttttcaaagtagttgtaacattgtcctcttacattcacaatatatgagagtagtttcctccacacccttgctcaccctggggattgtcagtccttttaacattagctattctgttgaatgtgaagtatctcattgtggttttgacttgcatttccctagtaactaatgatgtttaaaatcttttcatgtgcatactggccatttgtatgttttcttttgtgaaatgtctgttgaaaacttttactctttgttttggcttgtcatcttactaagttataaggttccttatattttccaggtgcgagtcctttgtcagatacatgtattataaatattttctctcagcctgtgatttttctttttcttttctatttatttatttatttatttattttttaggaagagtctcactttgtcacccaggctggagtgcagtggcaccatcttggctcactgcaacctgtagctcccgggt

SEQ ID NO: 38326 - DNA, 1034 bp, Homo sapiens
gctaattttgttttttgtttgtttgttttgtagggacgggattttgccatgttgcccaggttggtctcgaactcctgggctcaagctacacccgcccgcctcggcctcccaaagttgtaggattaaggtgtgagccactgtgtccagcagatataatgtttttaaaagtttgagagttaatatgctctctggtgtgccctaggtcccactactcctattgccttaaaactcacgcagtacacatttgtcttccatgggcttcagttgtaagagaaccctttctactctttgctgttcacaagtctccttttaaacagagcttgttcccaatgctgttttgttttgccctctgccatgttcttccggccatcacctcctgtggggaaaagagagagagatcacattgttactgtgtctgtgtagaaagaagtagacataggagactccattttgttctgtactaagaaaaattcttctgccttgagatgctgttaatctaaccctagccccaaccctgtgctccctgagacatatgctgtgtcaactcagggttaaatggattaagggctgtgcaagatgtgctttgttaaagaaatgcttgaaggcagcatgctcgttaagagtcatctccactccctaatctcaagtactcagggacacaaaacactgaggaaggccacagggacctctgcctaggaaagccaggtattgtccaaggtttctccccatgtgatagtctgaaatgtggcctcgtgggaagggaaagacctgaccgtcccccagcccgacacccgtaaagggtctgtgctgaggaggattagtaaaagaggaaggaacgcctctttgcagttgagacaagaggaaggcatctgtctcctgctcgtccctgggcaatggaatgtctcagtgtaaaacccgattgtatattccatctactgagataggggaaaactgccttagggctggaggtgggacatgctggcagcaatactgctcttcaagtcattgagatgtttatgtgtatgcatatctaa

SEQ ID NO: 38327 - DNA, 1071 bp, Homo sapiens
ttgaacctgagaggcagaggtttcagtgaatcgagatggctctaatgtactccagtctgggcgacagagagattcggttaaaaaaaaagttcgacttaaaataattctggagtcagaatgggtttacatttaattcttaacccagttcctcaaagcctgtagctctgttaagaaaataaaggccattggtcaagcctgcttggtcccaccctcatctccccaccctcccccaatcgctgctcccgccatttcctggggcttggaggaggggttaaaggagcggactgtaggcgtcacatttcccgcctgcgcgcttttcagtctcagtgtccgctggaggtgggggcaggggtaacgtagatatataaagatcggtttcctattctctcacttgctcttggttcacttcttgggaagtcatgtctggacgtggtaagggcgggaagggtttgggtaaggggggtgccaagcgccaccgcaaggtgttgcgtgacaacatccagggcatcaccaagccggccatccggcgtctggcccggcgtggcggtgtgaagcggatctctggtctgatctacgaggagactcgcggggtgctcaaggtgtttttggagaacgtgatccgtgacgctgtcacctatacggagcacgccaagcgcaagacagtcactgccatggacgtggtctacgcgcttaagcgccagggacgcaccctttatggctttggcggttaaggttgctgatttctccacagcttgcatttctgaaccaaaggcccttttcagggccgcccaactaaacaaaagaagagctgtatccattaagtcaagaagctcaatgtgtaattaagatgaatgatactgagctgacatcctaaaaaggaaagattaggggaactccaagtttgccctccactcactacatatgggtaggggagcaacgatattccaactctgaagaaagagtggaaaaaaagtagtgttaaaaatttgtattagtttccaagggacaaagaagcgctgcccaatcaatgagggccattcgtagctgtcaaccaatcagaactgatgagct

SEQ ID NO: 38328 - DNA, 1050 bp, Homo sapiens
acaggaatacagcgcattcaacttgcaaacacccttccactcccacaaagagcaagctgtcactggccaatcaaaacaatgaaccataatgaaacagtttttcttgctccacccacttggtgaccaaatttgaaaaaaaaaaaaaaccgcgccaactcatgttgttttcaatcaggtccgccaagtttgtatttaaggaactgtttcagttcataccttccactgcgataggaatcatgtctggtcgcggcaaaggcggaaaaggcttggggaagggtggtgctaagcgccatcgtaaggtgctccgggataacatccagggcattacaaaaccggctattcgccgtttggctcggcgcggtggcgtcaagcgcatttccggtcttatctatgaggagactcgaggtgtgcttaaggttttcttagagaacgttattcgagacgccgtcacctatacggagcacgccaagcgcaaaactgtcacagccatggatgtagtatatgccctaaaacgtcaggggcgcactctgtatggcttcggcggctgaatctaagaatacgcggtctcctgagaacttcaaaaaacaaaaacaaaaaaacccaaaggcccttttcagggccgctcacaaagtcgtttaaagagctgaaatgcgttgcgagaatgagtttggatgacagaaataaccgtgacatcctgcataagaatgaattgtgtttgccatgaccggccacactgtgacaaaatttcaaagcataaagtaggcatagagaggtaagcgctaataaagtgattggctccacaaaaagcattttgctgggcgcagtggctcacgactgtaatcccagcactttgggaggccaaagctagtgtatcacttgagatcaagaatccgagaccagcctggccaaaatggtgaaaccccctctaccaaaaaaaatacaaaacttagccgggcgtggtggtctgcacctgtaggcccagctagcccggaagcagagattgcagtgagccgagatcgcgccactcccctccagcctgggagacagaga

SEQ ID NO: 38329 - DNA, 1050 bp, Homo sapiens
gaaacgtaaaactgacagacttgggggggggggatgtcccaattagcacggcttctgtatgcaacgagtcccatactttgttaaaggaagaaaggaatgtgagttctcctaatctgttaagtatctttcggtgtaagttctgacaccacaatgttaaaaaagtcggatctcaaaaaccaactgctccaagcgaagtgcacagctgtcttgcctaaagaggcctatttatagtagcctcgggtagtctggtctgggctttctcattgggtacaagtaaaggaacgaaatagccaatgaaaaggtagacttttaagtgtcgtttacattggcatttgtgacgacactctaaaattaatccaatcataaacgaaatctgattaacctcatttgaataccgcatctataaatgaacagggcctcggcgggagtgattattttctcaggtgtttgcaacagtgttctaactattaacgctacgatgcctgaacctaccaagtctgctcctgccccaaagaagggctccaagaaggcggtgactaaggctcagaagaaggacgggaagaagcgcaagcgcagccgcaaggagagctattcagtgtatgtgtacaaggtgctgaagcaggtccatcccgacaccggcatctcttccaaggcaatggggatcatgaattccttcgtcaacgacatcttcgagcgcatcgcaggcgaggcttcccgcctggcgcattacaacaagcgctcgaccatcacctccagggagatccagacggccgtgcgcctgctgcttccgggggagctggccaagcacgccgtgtcggagggcaccaaggccgtcaccaagtacaccagttccaagtaactttgccaagtaagcatctttacacctaatcccaaaggctcttttaagagccacgcatgttttcaataaatgagttgtaatcatttcattcaaaaggggggttattggacttagcaccacagtaccaatctttaatgttacgttagtactgcagaggaaataacttggaagttacagggaataacaatagg

SEQ ID NO: 38330 - DNA, 1027 bp, Homo sapiens
agcagcaaatgattttaaacatgttaatgtatttaatctcatttagttgttaaaatatgcctaaatttcctctttgggaacgcaagacttgcagagatgactccatggagagcggactctgccggcgggaactggagtcgttggtgacgtcatcccagtctgatctgtgaagggtagggccagcaggcagcaccaaagttcccgtatgcgcgttttcagtcttcatttaggtccgaattcccggcatataagaatactaccgtcgcttgtttttcagatttttgcggctattttcgttggtgtgttggtcatgtctggtcgcggcaaaggcggaaagggactgggtaaaggaggcgctaagcgtcaccgtaaggtcctgcgagataacatccagggcattaccaagcctgccatccggcgccttgctcgtcgcgggggtgtcaagcgcatttctggtctcatctacgaggagactcgcggggttctgaaggtgtttctggaaaacgtgattcgtgatgctgtgacttacacggagcacgccaaacgcaagacagtgacagcgatggatgtggtctacgcgctgaagagacagggacgcactctttacggcttcggcggctaatgctaccgcttaaacgactcagcatctcgacttcccaaatcaaaggcccttttcagggccgcccacagttttccgcaaaagagctcatgacttgttagacgattggttggtctctttataagttaattgttcctgtcaacaggtacgtatatttttcagccgttttttttttttcgttccaaattacatttggggtttcggcatacgattttttaggctacgatccttttatgtttattgtagtagggccttagattgcactgaaaaggctagggtaatagtgtctgtttaccttaccacttttattttgagtacctaaaaatgcatggttttcgacataagtgggaaaaccgcaagacactgcgtaaccgctcaaaatggcggagagcgaagaacaaagccggt

SEQ ID NO: 38331 - DNA, 1180 bp, Homo sapiens
ccatggccttggatgagatgccagtatcggggtgaacctgttttagcaccttgtacacatacacggagtagctctccttacgactgcgcttgcgcttcttgccatccttcttctgcgccttggtcacagccttcttggaacccttcttcggagcaggagctgacttagctggttcaggcatgctgtcagaaaacaataacagcagtgagaatgaacgcacttaaataaaagctcgtgtctagagtctctccttttataggcctttcatgcaaataaagaattcaaaatatccagctctgattgggcaatgtgttagtgacgcatacatgtaaaatagccttcaccttatttcctttctaattggttggctcgtcaaagaacaattttaaccaatcaaattgcgcctttcacaattctaccgatgactataactagcttcttattcctccatcgagcccattctttttctttattcagtggattgttagttcttctgctgttaggaagccactatgtctggacgtggaaagcaaggcggcaaagctcgggcaaaagctaaaacgcgttcttccagggccggtcttcagtttccagttggccgtgtgcaccgcctcctccgcaaaggcaactactccgaacgagtcggggccggcgctccagtgtacctggcagcggtgctggaatatctgacggccgagatcttagagctagctggcaacgcggctcgcgacaataagaagacccgcatcatcccgcgccacctgcagctagccatccgcaacgacgaggagctaaataagcttctaggtcgcgtgaccatcgcgcagggcggtgtcctgcccaacatccaggccgtattgctgcctaagaagacggagagccaccataaggccaagggcaagtgaaatgattactagtcaaatccgtcagtgatcccgagtcccagaaaccaaaggctcttttcagagccacccaccttttctgtaaagtgctggaatacacatacgatgcctgaaatctcaatgttcactgtcctaatttttaacgaacgcttctgacgttactggtcagttctttattgaaatccttgctcacatttcatgcactaatttatcttactggtgtttctttgcagtaaaaatgcgtttataaaggtatacaagaatagaaaccgaggttg

SEQ ID NO: 38332 - DNA, 1045 bp, Homo sapiens
atatcaatatttaaatgcttagttaatagaactattaccaatgagatatttgacattttgaaattttaaatctttataatctgtgtgtgttttacacttagagttcatttttattggaactgttaaatagctagtggatagataccctaatggacagttcaagtttacactacactcaggcacagtgctagattgcaaaatggaggaaaatctcaggggcacagggtgcccagggcgggctccccaatgtttccttcgtgaagcaggagcagcctcaatagttactgctcccaggggttggtgctgccgaccagccacagctactggtccccagaagggttctcagcccaagaacccctgtagccttggaatatctgcttcctttcatccctggagttttttttgtttgtttgtttttgttttttgttttttgttttgccttagagttgtgataactggcatccttgtctgattctgcccttgttgaacagcccagtttactgtcgtggggccagctaatcccatcctggccatggtgggagaaaacactacattacgctgccatctgtcacccgagaaaaatgctgaggacatggaggtgcggtggttccggtctcagttctcccccgcagtgtttgtgtataagggtgggagagagagaacagaggagcagatggaggagtaccggggaagaatcacctttgtgagcaaagacatcaacaggggcagcgtggccctggtcatacataacgtcacagcccaggagaatgggatctaccgctgttacttccaagaaggcaggtcctacgatgaggccatcctacgcctcgtggtggcaggtgcatcacttcattttgctttattacttttgcacagtgtgacttttggggaaagtttctcccttaacctcaggcccattgcagaccaacggatttctatctggcgtcccctttccacagagaaagtggcttcctcttgcacaaaggccacatgagtgggtttgccctgctaagctataggtttcacttctttttttttttttttc

SEQ ID NO: 38333 - DNA, 1102 bp, Homo sapiens
gatttttattaaagcacaactaaatacagaaacaaagttatctataattcctgctaactccacagagaaagactaagaatttagctgggaagaaattggcaaggcttcagcatagaaatgcacttaaactgggatttctaatagtttgttaaaagtgacactaagtgattacctcagtgttgcagttagtgtattttgctttaaaaggtatatttcaggactgaaaaaagcctttaagttgcagaataattcgtggtgacatttcagtccatcagaccagtggaggcaaggactaggaaattgggttcttcccagggggccccaaatcataacaggtaggagaccctatctttgctactcacaaaggcaaccttacatctgattaaaacagaatatcgtggatggagggcttcttgacccattgtcatgactgtgttcacagcagcactgcaatgttgcccagtaatgaatggttgtatgtggcagggacccactactctttctctgtaaaaccaaccctgtcctggccttccctagtctgaattgggttgctgtaggactttttgtttgcttgcttattgtactctgtttgttggattggttggtggctgatttttcccttaaatctattgtgtcatgcttacccgtattgaacccatggaatgttttgtaggactttgttttccaatttgctgaggtattttaatttcttttctaattcaggatttctgtgtgagccttcaaatgcacaactagcttttttctcctgacaaaaattaaacagagcagaaagcactaggcttaagtgattgctttaattttctttctttaacataatttgttgggagactttacaaaggaattattcaggagaagtttggatgatcacgcatggctgaagggtctcccaggaccatgcttttgcagctctctcactctgggtattctctttcattgaaggttctagtaaagatagaatatatttaggatgagcctgaattattaggatttttggtgatgatctctgacattgaggaggcaatatggttatcttaaggatcccaggggcatccagatatttctaatacattgatgttcttaa

SEQ ID NO: 38334 - DNA, 1073 bp, Homo sapiens
acagcctggactcaaagcccagcttagaaagaaactactcatgtggccttggggagttatttaacctctctggacctcagattttatatctattaaatgtgcgaaataaggtttctacctcttagggttgtcatgagtcgtattaatacatgtaaatctcttagcacaataccagcatggtagcaggttctatgtaagtatttcctagtattaaagttagtaatcaataaagtctcctatcccccattgccaagccaccataatttcttgcctagactgtcacagtagcttccttcctggtctccctatctcctaacatctggcccaccggatgaggatgggatatattgtgcaaccccagcagacatcatcccatagaatacaatgtaaatggcacctccttcctcccatcttccctgcacctacctcacttctattttaaacatacacatttcctcatgtcaaacttttcagatattttcccttcaccttcccactaaaactccaactccacagcagacatctgttgatgttgtctccaggggaagtggatttaggactcatcaatgcagggatcagaattgagcctttcagaatggaagacaatgaaattcattgagggttactacttgcagggcctgtgctaactgctccttaaataacttatggaacagatctcatttctgccctacagatgaataaacagagaccttgagtaattagttaaccggctttgggttccagggctaatgagttgtgaatgagaacagatgaacatagaaaaaaaaaatctcgagacagtagatagtaaggcagtgtgccttggatgtgctgacagatatctagatacagcataaagaaaatgtgtgttcatgagagttcttaatggcaacaagaggtagcatgatatccatgagaaatggacatttgttgatgagactaactaaacaaaggagacggatttctgggcatttttcaacacctattgcatgcaggacactgcactaggtcttgtaaaagacaaagagaagatagcatcaagggcctaggtcttgaaggagggctgagtacac

SEQ ID NO: 38335 - DNA, 1024 bp, Homo sapiens
taaaaatacaaaaattggctgggtatggtggcgtgcgcctgtaatcccagctacccaggaggctgaggcaggagaattgcttgaacccgggaggcagaggttgcagtgagccgagatcgcaccactgcactccagcctgggtgacagaacgagactctgagactctatctcaaaaaaaaaaaaaaaaaaaaaaaaaaactggagcaatttggagacaagattaaaaaaataataataacattgtagaatggtggccactcacaaggttacagaatttcccagtaaatgttttcaagggtggggcagaaggtatgatagacaaaagctttaaaaaagtcacacagtgcccatgaatgccagccctaggcctaagtcctaattactcaaactcaaactattttccatttcctacctgtgtggctctcaatctgtgctctgggctacccacattttttagtacttttattaattcttgagcagacacatacaatttttctgtgtaagacataggtaatactccagccatgtgcttcccctacagtttaaagaagagaatgcaacctcccccatctctggactaacctccatgccttctccaactacatccctttcccaactcccaagagatgaccactgtccaatttttatttatccctttttttttaagttttactatatgtttgtggcctcaacatgtcatagttttacatgtgtaaatggatctatagtgtacatattcttctgcaacttgctatttttcttcggcattatattcttgagattcatcctcgtttttgaacctacctgtaatctatttgtttctgctgctgaatggtattcccttttatacatactaccaaaatatatgcatcccttctactattgaaggacatttgggtgatttacaggtttttgaaattacagtgttgctagaaacattcttgtggagatctcctgtccacacctccaagaatccctctaagtaaacacctagaagtaaaattgctttacacaataccactgt

SEQ ID NO: 38336 - DNA, 2139 bp, Homo sapiens
gcagagtgctttacaaataaccactgtttccaaaagcaaatacactaattggcacacacacacagcagtacataagggttttgattgctccatatcagctgagcccttgatattgtcagacaacttggttttcctcagtttgatagatatgaaatgttatatcctatgcttttaatatgtacttcttatatatttttaggtgcttattcctcactcatgcttccaagaagtacctgttaacattttttgccatagttttaaaattttcattttgtcctttcctcatggatctataggaatgctttatgtattcaggattctaacattttgtccattatatattttacatatatctttgccaagctggtacttattgttttacttttattatgctatcttttttgatatacacgaattattaacaatatagtcaatttgatttttaacgtttacattcgtcagtctttccctttatggtttacgctttttgtgtcttgttaaagacatctttccaggaacagcgtgaggaggacagaagcacccaacaggactgctcaagccacctgcgaacactgctgctaccatgcccaagagaaaggcaaaaggagatgctaaaggtgataaagcaaaggtgaaggatgagccacagaggagatcagctcggttgtctgctaaaccagctcctccaaaaccagagcccaggcctaaaaaggcctctgcaaagaagggagagaagcttcccaaagggagaaaggggaaagcagatgctggaaaggatgggaacaaccctgcaaaaaaccgagatgcctctacactccagtcccagaaagcggaaggcactggggatgccaagtgaaatgtacatttttgagagctctgtacttatagtgactctactgtttgaaatactatttttttaaatcaagttttataaaagtgtagaattttggcttttttaagttatgttgttagcacacaggacacttccttgttgtcttttgtggaaagggcaagtaccactaatagggtgtatctcagaaactgaattgaaataagggaaaataggattttctgtcctggtttttgaagattgttcttgattcccttgattcccaggagagattctctgacattcacgtgtcagccactttggcacggaagccttacagtgtggggaaccaaaacttcgtgtctcccctttccccgatgccatcagcatagacttgacttccttaaaccgagagttttgatgtggccttggcaaccctaaaatcagctgtgttaggtaacaaaactcaggctttctgttgatgacatcgagatggtgtcacttaaaagagccaagattcctgttttcagtttgtggattcatcctgctggttttactttagtccctccatgtcaaagtgggcctgagaaaagctcatacatgcctcatgtgaagtgtccaccctctctgaaaatctttcttgttcaaaacagcaacgacatatcttgttaacttttacggtgacttttggaggaggggagtttggaaattgtaaaatgttatagattgttgcctatttcctgctgaaagtaaatgtttttaaaaagtatcatataaagctgaatacaaattggtttggggggagatcctttcctacccaaagtcataaatatattctttactgccttgtggaaattttatagttttgcctttcacatttgtctttagtctgtcctgaactgatttttgtgaaaattatgagttagaaattcaacttaacatttttcatattcgaagtggttgtctctgcactatttactgaaaagttcatcctttccccagtgatttgtaacactgcctctttcataaattaaatttttgtgtatgtgtgtgggtcttttgatggtttctattctgactgacatcaatttgtctaatcttgtagcagtacagtacagtcctgattattgcaactttaggaaaaggtctgataaaaaccaagatgcctccacattttgtcataattgtaaccaatttcacctctgtctccagtatcaccacaaaattgttcttccttggagtgtcttggctattcttagccaactgttcctccatattacttctagaattagaccaacaatttataaatc

SEQ ID NO: 38337 - DNA, 1045 bp, Homo sapiens
gacattttcttgagggccatatagcttggcaggaggggcaagaattgatgggttatgagaacaagagaggaacgcctcactgggccacagagagggtccaggaaattgtttgggctcgaggacctaaggtccttgggactatgcttggagccacattggtaaccgggtctggagttttgggagtgccagtgcaggggtcactctggtaagcatccaatgacactgacttttaggtcctggaaacattttgcggcctatcaacacaaattggtgagaatggggaaaagagggaaaatgtagagaaagtgactggaatgcatgctaatgattcaggttacgtttacgtcctttgagtttcatttcatcttacctataaaaccaacatagacattgaaatctagaatcctaatcataccaaagaaattatgtattctcttagtgtattgggggaagagctacgttcgggtgagcccggctagctcagtcggtagagcatgagactcttaatctcagggtcgtgggttcgagccccacgttgggcgctctggttttcaatcctaaaatgttttcaggtttctcattgcggtccaaaaaaagggcattattaaagctcatccctctggaagaagggaattgtgtgatcatcgtgaccattttagccttactgacttgactgacgcattccagccttctctgaaattctagctgaacttagtctcagtgatccctggtgtggatacacttctctggcctagaggttttgtaaaaccagatatacttaaacataggttatgtaagtcgttggtagggcatgagctcttgtatatttaacaagttcctgggctgattctaaagcacaaatcccagcaaaaaaggtttaggaggcaggaaggacccatgaccatgagttaaaaaagcataccacacacctcttcgttgatttcaaaagcccaattagccacataccttcctctcacttcactaacatagttctcatctcttcaggtctcaggacaatataaagaaaatgctctagctcaggtgt

SEQ ID NO: 38338 - DNA, 1001 bp, Homo sapiens
cctgccttagcctgcccagtagctgggactatagacgtgagccaccatgcccagctaatttttgtatttttagtagagatgggttttcaccatgttggccagactggttttgaacttctgacctcaagttatccacccaccttggcctcctaaagtgctaggccacagcacctggcctctactctttataaattaccctgtctcaggtattttgatacacagcacaaatggattcattatacagagtacgtccagtgtctgaaaaaactgctttaaagccgattgtagttttaaaaatgagtatcaatgtaattaaaactgagtctccttaatgcaacaagacttgaaaacccagaaactttcaggacacattattttaggaattctagaagatgaagggctaggggtcctttcgatagctcagttggtagagcggaggactgtaggttcattaaactaaggcatccttaggtcgctggttcgaatccggctcgaaggacgaaagttttgaactacgggctaataattccagaaataacggaactttacgaaaatcaggatctagacaggaagatgtattagactgctgtttaatcctttctttaatcccctttgtgatacaggaagtaggactctgttaatcacattgcagttccaccacttgaccctatgggtaagccttgccaaaagggtggttagagactccaaggctgaaggtgggaaagtgaacttgttttctttctggggccttcctgtttctctaggtgtcaccccagtaatcctaacagagacaacaattttgtagcagccccgtcttgaaatttcacttcttattggcatccctgtagcttttccgcctggtgtctaaggcacagataggacacacaataatgtcaggagagactgtccacatcctgggatccctcctctctagctgctagctctctattaggttagaaacattgaaagttagcatatactattttcttagttactcatgc

SEQ ID NO: 38339 - DNA, 1077 bp, Homo sapiens
cgcctcactggcttctcataggtacctgggtcaggacgaagccacatagttcctcgtgatgagaaactcacttctggcacctgtcgagatgccagattccatgccaagcccccgaagattctgactagtttggcaaaaaatgggatctggcaggtccacttcaaagcagcgccctcttccttttgttgccaaagatctgaggaccacactgctaaactgagcaagaaacatgcgtgggttggagatagaagtgagaataatgagtttacaagcacagtattaccaacccccaaaaacaaccaccacgctgggaaaattccatataatgaaacttaatgtgttacctttggcttctttgccataagcaaaatattggggacggggagtggataaggaagtaaactgggtaggtgtgtaaataaggacgaaagactgcaccattctttagatgacaaaaacagacgtttctgggaaataagcaaaggaagagccccacaagcagcggcctctggtggcgtgccgtgatcgtatagtggttagtactctgcgttgtggccgcagcaacctcggttcgaatccgagtcacggcagtaccttgatgtcgcctcaatttctcaacgtactgagcagtaccttgacgtcgcctcaatttttcaacatactggagtggagacagtctcggaaaaacccttgcaaaattgaattgacttacgatctaatctgtacacaaaaaacactagtattcatcatggtgccccaaccagtcagccaagcagagagtgtctacgcttgttgccttgtcttttttttcccctctccaaagattctcttcccaaccctacccaagccctacagtcttgttggcattggctgtatgtgaagaaactgaggtaatttttttttaatggaaaacttttactttcaaacactggtaggcatgaggaaaggactgttcaaaaggggatccaggtttgttgtggagatctttcttaaaacacaaaagacaaattattaatcacgcgtttctaagtatcctagctggaccaatgctgaaaaactgtaacctttgatcatctg

SEQ ID NO: 38340 - DNA, 1021 bp, Homo sapiens
gactcccaaattgaggatctagacataagaaacctgggacgatctcgatcatgggaccatcgagaatcagactcgttgggaatatccttcaagtaccaatttgtatgttgtattagtgagcggcttttacgaagcaaagactcattaatatttcaccgaatctgattcattgtctgcatgtattgactagacattcagaaggcagcaaatatttccataaattgctgggccattagccacagtttgaaatgtttaagcgtcctctttcaagtctacgaatacagccattttgctttgtttttgcgttaagaggaaatttctcgttatttctattaagactctaaagcaactaagaaattgttcctccctgtaagacaaacaggaattacgttgaagaatttaatactttcacggagaaggggcgaggatgcgggtgagatgaataacaaaagcacagatttgcggtcggccggttagctcagttggttagagcgtgctgctactaatgccagggtcgaggtttcgatccccgtacgggcctttggctttttcccccctcgagaaatttggttttcatgctctaagatgattcaaattaaccgtccccatttcttaacgaacctagaacctaagttcgtttccgaatcatctgaaatgctacatctccccaggtaataatcttcttcttcttcttcttctttttttaaatgttctttctgtttcctccaggaataagggttggggacagaaagctgttcagagcagagacctccaagactgggagcctgcttaatgaaagggggggggggcggggaagagttcaaggagtggaaaaataactggcattttttttaaaaaaataaagcttatttgatttcagattttccttccaaattagtcctgaaacctaccttctttctcaaattgtagagacacaagataaagagaataaatccttagaaggttgtggatatgtgtctctgaaaaccctttcgaatttaactgacagacgacattgtcc

SEQ ID NO: 38341 - DNA, 1123 bp, Homo sapiens
aggtatctgactcaaatttctcacctgtaaaatagagattatgggtcccatctcacagcgtggttgtgagcctcacaggtaaggtaacaatagaaaacacttgtcacaaaaactggcacacggtaacctggcatactgtgtgcctggcacctggcacacagtcttgtttaacaatctcacttgtctaccattgatgaaatagaggccgaggcccggggcgccaagctcctaaagcacttgaaaggagtggtttaggattagaggactcctgacagttggaagtcaacgttttccattaagactgtggtgtaaaaggtgttgaatgtaggcatgtggcaggtaagcgtcttcttgacttaatcctccaagaggaaaagcagaatgcacccatcacccaaactatggggcggagggaaggaacctaaagtggagaaataggtcacctatgactttaggaaatgctagttcagcttcaggttccatggtgtaatggttagcactctggactctgaatccggtaatccgagttcaaatctcggtggaaccttggatttagtcctctgcagtcaaatccccatcgtctctccacaatctatactgttgctcatacaaatcactcgaccaaattttattcctggtatttccacgtcacatctcttgagcggagtatctttagctgccaaccaaataataactttctttttgctgcgcacaatttgttctttggagaaaaaagagagaagcctcaaaaggaaatgcacgaggcagtcgctcgagtcctgctggaactgcaaatcaaagtctccagaaaagatctgcaaacaagtgaggagacaatagataggaggctagtgagaagagagaaaggaaatttggtgatagtcacgaacagagaaaagctgggatggaaactgaggaaaggacttacccactaaatgggtctgggagaggtgacagtcgccgaagccgagagaaaactgtcctcagacaagaccacaaggggatagaagctcaacttgtgagggctgggcagatagaacaggtgacgggaaagatacaactggcgatagtcaatagtcaatagagatagatgctgtttcgagtttgcacaagcaagttttac

SEQ ID NO: 38342 - DNA, 1032 bp, Homo sapiens
ctgaggctgcccaggcagttctgctgattgctttgtggattggcaaaggctccaggaagcaatcaacctagtgccacaaaacaaagcacccagagaagccctattcctgacccttcaaaaccttcttccttctgaagggggtagaaaataaaggagaattatccctggatcaggaattgattataggagagacaagcaatgtcaaaagaattttagataattagggtaactgtggtggccagcgctgttagtgctaaaaagtttgagtcacataaaggaatagcaaaccaccaggttggctagggctgcagcatgttgtgaccacttaagagaataatgattttgtagggatacagtatccagagagcagtaaggtgactcaaataatgaaagtatgaggaagaaaggagaaaaggagaggcaactttccacattatggtggaggaatcccttggatggactctggataaaggtatagccctaacctcctagcatctctgaaatatgtttgggggctatccctgaaacttttgtcacatccgctagacttccttttcccatcttacatacatcctccaaagccaggaaaaagaatgcatctctccatgctctagagcagcagctgctgaagggagactcataaatcctctgacagcatctttccttaaacatacaccatcacagttttcaaattcattgatgtgagatgagcacagcaatagcatcatctcccttatactatatatgatattctttattgtaaatgttttgccatagtttaacttgcagtattgatgaaagttttgtaagaaaagacaagcacatgctagtaatggtgttttataatgtgggacgagatttttcagaaaagtgacttgaccaaggaagtgcagctgtaagcagtgtcatctgtcttctattttgaccctcaggaagaagtaaggggactagtgccatagtgtctttgaactcataccccatatgaagagaacgtcaaagaggctggatcacctaaagggtttagagaaagtt

SEQ ID NO: 38343 - DNA, 1045 bp, Homo sapiens
atcgacaagctaagttacttggagagcagtcccctgatttcatcatgttctttaacttggcatcacatttgccccctcctttcattcctcttcgctctctttttcgagattcgtttctccctgcccatcccgcgtccttgagagaacatctgaggggtgattatcctccgagtgggtgagagagtacgtgtggccttctcctgccatcttgtggcaaaaaagcaaaagcacaagttcaaggcgttgtgttttccagccccagttaaaatgctttcttcttaactttctactgagtcagtgggctagggcagggtttccatttttcactccttttaattgcaggattcaagtttcttcaagagttgttagtgcggaggttaaaagggagcgggaggggggcgggggagttaataggaagagcgaggagtgggtaaaggagaaagtcctgttgagctttgtgatctggtcagagctgtccaaaagaaataaacaaataaaaaaagccaaaatgctttataccctaaaataaataataatacgatcgtgctttctagttctattagattaagtccccacacttacaactcaatttaaccttaattatctgtttaaaggccctgtcttcaaataccaaccacactgagggctgggacttcgacatgaagttgttttcttttgttttgttttttgagacagagtctcactctgtcgcccaggctggagtgcagtggcgcaatctcggctcactgcaacttccacctcctgggttcaagtgattcttcttcctcaacctcctgagtagctgaactacagacaggcacctgccacagcgcccagctaatttttgtgtttttagtacagacagggtttcaccatgttgtccaggctggtcttggactcccaaagttctgggattacaggcgcgagccactgcacctggtctgttttgggggaacacaatgaagtccataacagcacttaagaccattttccatgctttcatcccgactttctattccaagttctcctttataaaatatctaca

SEQ ID NO: 38344 - DNA, 1047 bp, Homo sapiens
atccatgaagtgctccctcctccaacactttcccagcctcctattcacagctccagcctccccacgtccgatatctacccccaggggaccgttactattgacagcgagcgcgcggagctgcatgggcacacaaggcggaggggacaccaaggtccgttattccccagcacgttcactgccccagcgacagcgcaagcctgaggcacgcagacgcgggaggaacccgaggcacagcacacagcaggtgaggggcgtggtactccggtaccctcagtcggccgaccatagagcttgtagacctccaggactcctagagagcttccggaagtgcctttggggcaagatgcgtgctggccggtgttgtgcctccgcagatttagaagttagtggccggaggggcctggtccgagtacagctttcatcgcctttactccccgaccttccttcgagtctgtttatccgttgcagcctcccttccccacgacggggcgcctctgcaactcacagtgagtacggtcgggctctgggccggaggaaagtgggtgctttgtggctggtccaggccgcagctgaggactggcctgaggggtccggagaggggcctgtgcggtgttcggcgccgcggaccgattctgacgccttagttgctgttgcaggcagagtacgtccccacgaattgcccttgaactttttgcgagggaaccttttatgaagctttcttcatagataatcgtgttgtggtatgtttttgtagtcgatcttgtttatcttaaaatggggaacgccccccccatgttattttttatccaactatttccagagtctgaattgttttcacttagcgctcttttgcgtttaggtcacaacaaaattctcagtttttaaaaaagacatattttgcttttggaagccccgtttatccatggaaaccaatttttgctgttactcttctttctttagtgtattcagaaactggtggtgtgttgactagataattgtacgaaagtttttttttttttttaatttcagggtaattcagaattcaac

SEQ ID NO: 38345 - DNA, 1043 bp, Homo sapiens
tctagatctttgctctgtgtttcagttgtgccttaccctctgtaagatactgattcttcctggggccagtattaccttgtatgcaaatattacatatgatgggtgcattgtcagagggaaaatatatgtgtatgtacacatgtgtatgtacacacacacacacacctgccatacactttagaagaacgcttctcttctattccaataaaaagtccttttagcaatgcaacatattaacaaaattgggtgcattcagggtggtatggccatagaccagagcaacacattgaaatgtatacagatgtactagctaaagtctctttatgtgtcagtattaagagtaatatgtagccagattacttaaatctcagaattactaagcatgtggcataaatttggagaaaataatatgactagaaaaattagtgttatattgggtgtgagaaaagactgtgtcttgaaagaattatcaaagctgatacagcacatatacagaattagccaaatggtataagacaatagaaaaaggctgtggattctttgaggacatcactagaaatcattctttgtctcaagttcacactcttagcatagaatattattgactaggctgtatgacattttgagctcttaactgtgaatggcattcattaagctcctttatcctatagattctatctttatgttcatctgaaatgaactattcatcagtactttctcctcccatcctaagcttctcattttaggaactgacatgataaggtggttctttcataactctaatgccatccaacatagccctgggagaggcatgttaggtttcagagattttctccatggagcaaggtgcagtgctagaatatggtggttgattcccaaacagagcagttaactttactcttggttctgagtctccaaataataatagccgacgtttattgagcacttactatgtgcccaaccctgttatgcctttctcaggctcatgataaatgtattagtctgttctcatgctgctattaaagacatacctgacactgggt

SEQ ID NO: 38346 - DNA, 1027 bp, Homo sapiens
agggagcagctgcttcccggcgggtgcagagaatcttccctcgaccgagggggcggggtccgtagcggaggtgtcggccctggggcctatgagagtgatgaagctgtggatctggtaaacagagtacaaccttctgctgcatatttttcatccattcagcgcaattttaagtagatattaaaggtaggcgccaccgagaaggtaatatttgagcagaaatctgaaggaggtgggtggaaagacctaagtggcttttgcggtcaggaactttctaggtagagggaatagcaagtgcaaaggtcttaaagcaggagcttgcttggcatatttgaggaataacggggagaccagagcggttggagcagtgaacaaaggcgacctttgtagggaatgatgtcagagagattggggtatggagaggaagagtgtagaggaaatgagaactgtatcgtgtaaggaattttgtctttttttggtgtgtgtttttggaggattttgagcagaagaaaacatgatctgacttatgttttaaagcttctttacttggagactcatgatgataatagattgtaagtgggcaagaatggaatcaagaaaacttaaaagttaagagtaattttttaaaattccaagtaattcaggtgggagataaggatatcttgagccagtgatcagattatgatctgctttgaaaatagagacaataatatttgctactgggtcagatgtagggtgtgacagtaagaaggcaaatataaatccaaggttttgggcctgtgggtgcaagagatactggagaaaagatctgaggtttagctttggtacctcgtgtaagttcttcaactctccccgtctcaatttccttctctgcacgaagaaattaggaatagtgtcttctttatagggttgtgtgagggttaaataattaatatatgtgaaacatgtagtatagttgtcctggctcattgttttattatgctgagacatgaagtgtgagtgggcattaacaagaagaaaattggagggt

SEQ ID NO: 38347 - DNA, 1034 bp, Homo sapiens
tttgaccaaatatctgagcaccctgtggccagttaagttgacacataaaattaaccattacaataccaatcttttattttctggctaataatcatcactttttttgagacagagtctcactctgtcgcccaggctggagtgcagtggtgtgatctcagctcactgcaacctccacctcctgggttcaagtgattctcctgccttagcctcccgagtagctaggactacaggcgtgtgccaccacacccggctcattttttgtatttttagtagacacggggtttcactgataatcatcactttcttggacttttttacttatattaagaatactaggaattggctttttaaagtttaagttcattttgactaagaaaaataattatcagctgggaaatgttaactatatacacattcaggaatatataacagcaaactgtttggaggctaagccactgattaagtgagccttctcccgttctcccacttaccgcatgcacattgattcaaaggcatgtgtcagcagctgacagatggtgtttcactgatctatagggatactcaagcatagtcaaaatcaagaatgctaaatccccacataccaagggcctgccccaaaggatggtagggaattgtctgagttcatttttgacatgttggatttgagaggcttctgtagggtatcctggtcccaaataggcagaaggaaattcaggtctgacacttgagatatctgacctgaagaataaggaaatcatcagcataaggacagtaattgaagtcacaaaaatacttatactctacattagccctttctagtttctgccctatctttcttgttccattcaatgtattacttttttgaaatttgtcatttatgctcactctccattttctcatttcctatggcaggctagctattctcactaccaaaattaccttcacagaggtcactaatgacatctttgtttttgaatcaagtgtctatgccaggtcttagattaattcaccatcttatagcatttcacactctt

SEQ ID NO: 38348 - DNA, 1024 bp, Homo sapiens
actgtacagccatgccctttaagacagtttatttgcttgcttgctagcttctctgtgtgtggtatcccatgataaaatttaaactatttaaaataagtcacctcccaccagaattccccatctttccccaaagacagtcacagttaacaatgtcttgtgtaccattctgtaactattttacgcaatcacaagcatccacaatgtttttactttgcacacatggcttcattatatttttttttccttttagttgcagattcctttccccaagcatcaaaagacaagtaattggtggtatatatttaatattgcaggtgaggagacaaggattgagaatgggaagcttattgtagtaacagactcttgtggaagagtagagtcatctgggaaaatatctgaacccatggaggctcataatgagggctctaacttggaaaggcatcaggccaagcccaaagagaagattgagtataaatgctcagaacgtgagcagagattcatccagcacttggacctgattgaacatgcgagtacacacacgggaaagaaactctgcgagtctgatgtgtgtcagagttccagtcttacaggacataagaaagtcctctctagagagaaaggtcatcagtgtcatgagtgtgggaaagcctttcagaggagttcacacctcgtcagacatcagaaaatccatcttggtgagaagccttatcagtgcaatgagtgtggcaaagtctttagccagaatgcaggccttttggaacatctcagaattcatactggagagaaaccttatctatgtatccattgtggaaaaaattttaggcgcagctctcaccttaatcgacatcagagaattcacagtcaggaggagccctgtgagtgcaaggagtgtggaaaaacctttagtcaggccttactcctcacccaccatcagagaatccatagtcactccaaaagccatcaatgtaacgagtgtggaaaagctttcagtttgacctcagaccttattcgacaccacagaatt

SEQ ID NO: 38349 - DNA, 1105 bp, Homo sapiens
gcaattctccagcctcagccttctgagtagctgggaccacaggcgcacaccaccacggccggctaattttttgtatttttagtagagatggggtttcactgtgttgcccaggctagtctccagctcctgagctcaaagtgatccacctgcctcagcctcccaaagtgctgggatcacaggcttgagccaccgtgtctggccagcttatttctttttagcactgaataatattccattgtctgcatataccacagcaaaagaaatatctgttaaaggactgttatccaaaatacagaaagaactcttaaaactcagaaataaggaaacaacccgattcaaacatgagccaaagaccttgacagacacctcattaaagaagatatacagatggaaaataagcatatgaaaagatgctccacaccatatcccatcagggaaattgcaaattaaaacaactgtgagatgccactacacatctattagaatgaccaaaatccagaacactgacacatcaaattctggtatggatgtggaacaacaggagctctcattcattgctggtgggaatgcaaaatgatacagccactttggatgacagttaggtagtttcgtacaaaattaaacatactcttaccatgtgatacagcaatcgccctccttagtgtttacccaaaggagctgaaaaccagtgtctacacagaagtttgcacacagatgtttatagcggctttattcataattgccaaaactcagtaggtaaatgaataaataatgggtctgttttttaaagagttttttatatttttactattgaacatcttttcacatgttaatttgtcacttatcttgtgtgtagtaatgttcatatcctttactaatttttctactaaagtctccttttactcttaaacagaagtgcccttaaaaatcaaatagggaacttgcatatcagcattttaaatgcacgtgtcctttggctgaacagttctaatatgtggcatttatcctagaaatatattcttaaaagaatgtaaaggtattgaatggtgttccctctagcattgcttttaaagaaaaaatataacctaagtatgcatcaatagga

SEQ ID NO: 38350 - DNA, 1112 bp, Homo sapiens
cttggaaactacacaaacgcgtggaaattaaatagcatgcttctgaacaactaatttgtcagggaagaaattaagaaggaaatgtaaaaatgtcttgaaactaatgaaaatagaaaatgtgacatatcaaaatttgtgggatactgcaaaagcagtactaagaaggaaatttatagcaataaacacctatatcagaaaagtaaaaagacatcaaatgcacaacctaatgatacacctcaaggaactagaaaagcaagaacaaaccaaactgaaattagtagaaggaaacaaataaagattagaacagaaataactgaaattgagaccaaaaaaaaaaaaaaaaaacccagaagaacaatgaaacaagaagttggattttttttaaaagataaacaaaatcaagtctttagctggacaaacaaaaaaggagaagacccaaatgaataaaatcagaaatgaaaaagacataacagctgagacctcagaaatacaaagaaaccattagagacttatgaacaactatgacaataaatttgaaaacctggaagaaatggataaattcctagatgcatgccaactaccaagattggaccatgaaaaaatagaaaacctcagcaaaccaataacaagtaacgagatagaatctgtaataaaaagtcttccatcaaagaaaagcccaggacctgttggcttccctgctgaattctaccaaacatttaaaaagaactaataccaatcctattcaaattcttcaaaaaaaaaaaaaaaaattgaagaggagggactacttccaaattcattctaggaggccagcattgccctgataccaaaactagactaggatacaaaataaaaagaaaactacagaccaacatcactgatgagcataggtgcaaaaattctcaatgaaacactagcaaactgaattcaacaacacattaaaaagatcattcaccatgatcaagtgggattcactccagggatgcaaggatggttcaacatatgcaaatcaataaatgtgatatatcacattaatataatcaagaacaaacaccatatgattatttcaatagatgctgaaaagcatttgataaaattcattgctttttgat

SEQ ID NO: 38351 - DNA, 1050 bp, Homo sapiens
agtttcactcagaatacaggcctcattgaacatcaaaaaatccacactggtgagaaaccctatcagtgtaatgcgtgtggaaaaggcttcacccgaatttcataccttgttcaacatcagagaagccatgtagggaaaaacatcctatcacagtgacccatgccatacatgccagagttggtgctcatttgtcactgatctgaagccactccccctggagtctcaactatagaaattgtgggctgggctttatttaccactacacattatcaggtgttagaaaatgtagactgggttagacaaattatcttctaagttctagaaggggtttgtaatcaaaacatatttgataggaggctacgggagagttgtctagaagaggtaagacctgaaactgtttgttctctcccactagaattaaatggatgtttagactggctacttgccctaaaccagcacttggtgatgtctactgggtggatggttgtgatttgggggctgcttctctgaccattctttttgactgtaatgaatcctccacagttggtcagattcataaagtcttatatccccctctgtgccttttctgcaggtgctaataaatgtttattgaatgtaccagtgagattaccttcatagatctgaaaatctgatgttatccaggtttctgaagaacttctcgccaaggccatttgtgcttgtgtccaattctctgacctagattgtgactcaatctagtgtgtttcttaccaagtacataggcagagcagggttactgtgattgaaagaatccattttttttttggagacgtagtcttgctctgtcgcccaggctggagtgcagtggcacaatcttggctcactgcaacctccacctcctgggttcaagcgattctcctgcctcagcctcctgagtagctgggattacaggtgtgtgccaccatgcccggctaattttttatgtttttagtagagacgggattttaccgtgttagccaggatggtctcgatctcctaacctcatgatcctcctgcctcagcctaccaaag

SEQ ID NO: 38352 - DNA, 1021 bp, Homo sapiens
cactaagtgttcagtggacgttttgggcttttggaaacggaagtgatttgagggtctttgttccaagaaaggcggtgctgggcccggggactggaactcggtaggcgaggatcccctttgacgcccccctacagtttcccttcaaacacgtaggtctcagctggtaccctggctgcgctactggctttggcctcctggggccttatggttgaaaacagcaggaaatgaagctggaaaaagcgagagacaacagattgtctgctttcaggctccttcctttgtaatttcactgtgttgctttctttggacgctgcttgtgcaggacccagcctagctgtttcacaaattgcggagtttgcattcatgatttcattgcaatttaccgaatctttgagaaatactgattataaatcatgaaagaaatgcaaagcaacctgtctgtggttgggggtgtagctcagtggtagagcgcgtgcttagcatgtacgaggtcccgggttcaatccccggcacctccaccagttttgggagtgcgcactttctcctctcaatggaccgcctttccactttcctttctccctcccgttaaataaacctagtctcattcattcaattttctgcttgtctgtacagcctttgcagtgttaagtatctgtatcgatagcattgccacaccaggaaggtcttgaaccctttgtaaaagcattttcgcaaattaatcagcctggtttctttggatttcatgctatggtattactgaaaaacagaaaaaatataaaaataataaaagaccctttgttttattcactgttttttttttcttttcttttttgaattctgaagagttcttagagcaaagaacagcatggaggtggaatagcagaaacatatcttattgatgtctttcttctgagcttccaaccaccctataccttaccttttcttgaatcaccagatatggaagcagtgggccccgttagtattgtgcggtgataggtacatgaaggacaataaaatgctg

SEQ ID NO: 38353 - DNA, 1060 bp, Homo sapiens
ggtctacattgcctcgctcatttcttccctgctgagctctttgattagtttgctaagcagcatctcgggaacagcccccgtgctatgtgttctttcttgtcatggatatgtgttttttcttgtcatgctatgtgttctttcttgttcaaggcagagtcgcggctgggttgttaggatgctcgcgcccctgtacccggggcgtgcagggaagtgtaagaagggggcgaagggcgagaaacgctgaattctagcctgaattggtaggagagcctcgcaagctgagtcacggttcctgattccatttaaatagaacgttttgttcacttgtaggaatttccttttccatttctttcattaaatcgcgaacgtagtaatgacttaacgctggttacgcattcattacaatcgaagattatattaatttgcgatggtaagtgtcccaggtgtcaggatggccgagtggtctaaggcgccagactcaagcttggcttcctcgtgttgaggattctggtctccaatggaggcgtgggttcgaatcccacttctgacacaactatcttattctccttttactctactttctcagccatttctgtgttttcattctttctacctcaactttttttattctaactaaaatgatacactctcaatgaggtctgcccccttgcttttcagtcttgttcgctgtttagtagtgaatcacgttttgccccgctttggtcagttcgttaaaaggcgcattcatttaccacatgagcactcacccagaggcgtactgggaggaaactagactaggtaggaatagaaagacatgtatacagactccatcattacatactggccctgagctcataggttattgggaccgcagattacatgtttttcctcacggccagaaaccatcaaaaataaaagtgatgaaactgaaattgaaagcagcaaggttcacgctcaaggttatcggaaacaaggcaaaaggagagaaatgaaaggttccaccgagatttgaactcggatcgctggattcagagtccagagtgctaaccattacaccatg

SEQ ID NO: 38354 - DNA, 1031 bp, Homo sapiens
cctggaaggtaggagaaaataggaattttcactgagtttgagtgggaatggaactgactatatatcttacccttcctcctctttaactgggctcctccctctaaatctaggctgctgtatttatgagaaacctcgggcctttggcgagagctccacggaaagtgatgaggaggaagaagagggctgtggtcatacacactgtgtacgtggccaccgcaaaggacggcgtcgtgcaaccctaggaccgacccccaccacccctccccagcctcctgacccttcccagccccctccagggccaatgcagcactaaatccctctctcctccagcattcctgtgtctgtctggccctaaatgtatccatgtggctacttctccagccccctccttccctctcttctgcctgatagagggaagaggaagaggaggacgaacagagatcctgaaattctgacttgctgctattccagaacccagcctcctgggtttccccagtcctcatttttcctcccaatacccacccttctctctcgagggatctaggcaccttggtcccagtgtcttccttttgttctcactgccaaactgcctgtcctgggatctagttatcttggccctgcactctcaacatgagtagcgaacacttaaattgggttttcaacagtcccagctttcactgccagggtcccagtcagattccaggaatttgcgccctaactttgcttgctaatcctggtttagagctatcccactaaaatatttaatcctaattcttagtccttgcctgtgagatatgaggtcttacaggagacctcagagctcccagcccttctcctcctgctaacccttctcacaccctcaagaggagttagaaaagaggtccttgtcattctcacctcttatggaaaatggaataagaaataatcatatcctttcttcccacccttctcctgttatttaggatttctgacaaagctggcttgagattggtcacttagagccgactgtctcctctgccttttgtttttca

SEQ ID NO: 38355 - DNA, 1073 bp, Homo sapiens
aaaaatgttaacatctgaatagtcacttggctggagcttctccctaaccctgccctttcttcccctatctccctatccctcctagatgtgaaaaggtgaagaccatggaggtgacttcagtatccatagagctggaaaagaacttcagcaattttccccgacagtactttgccctaaggaaaatccttaaacagctaattggtgagttgttcccaaaaggaaactagaagaaaccactagagagaagaaagtttttaggtcctaccttatatgggtttcagttatcctatgtctcacttttcttactcccacacacacctacccctttatctggcttttagtctcaccctgagtcacagaacttggagtgagaggaagccttaagcgttatctactcttaggtccattcttttctaaatagagacccagaaaggttaaataatttgccaaagtcatcgggtagagtggttatataatttaccatgtaaacttgcataaccttcaaaggccgggtgcggtggctcacatctgtaatcctagcactttgggaggccaaggctggtggatcacttgaggtcaggagttcgacatcagcctggccaacacggtgaaaccccatctctactaaaaatataaaaattagccagatgtggtgttgggcgcctgtaatcccagctcctctggaggctgaggcaggagaactgcttgaacctgggaagcggaggttgcagtgagctgagatcacaccactgcactccagcctgagggacagagtgagattccatctcaaaaaaaaaaaaaaagaaagaaactgaaagggagtgtcattatattaatgtgaatatgcagggaaaatagtcataaaccaggccagttcctggaaaacacacatggtcaccctatccctagaccatatgctgtcttgctcggcatccttcttaacactttccgtttttttctgcccctcagactacaccttgtacttctctacatagtgagataaatgataatgtcagagggagatgaagagaggaccaggcgggaacctagattaccagccactgcagactcaa

SEQ ID NO: 38356 - DNA, 1046 bp, Homo sapiens
ttgccctgctccgcggcgctcctccggggcgggagccgcgaggcccgggcgagctcgggcgggaccggaggctgcgaaggctgccgggagcgggactcgcagctcctggatatgccagcgttcctggaagactcctgggtcctgacgaaagacaagttgatgagtgagttggtcgccattaaagtgaggctcccggcccggagcagcgcagagaccaggacgcgcagcctcgcctgcagcactcggccctacctctaccccgccgctacctctaccccgccgcggcgccgacagcgagggccccgcctcccccagctggctccagagccaagccacccacagcaggaaagccacgaagaaaacagttcaactcagaccaaaagataaagctgatctcgaggtaaccgcgctcactaatgaagatctcgtggacccgcttgcgaggtataaagagaaacctagtcctactggagaacaaccaggaagcgatgtgagaaaaaaaccttgaaaccgaaggaacgaggacgatctgtcgcccaggctggcgtgcagtggcgcgatctcggctctcggctcactgcggcctccgcctcccgggttcaagagattctcgtgcctcagactcctgagtggctagaaccacaggcatgcgccacctcgcctggctacattttttttttttttttttttttttttttttttttttttttttgtatttttggtagggacgggctttccccgtgttgtccaggctggtctccaactcctgagctcaagggatctgcccatctcggcggattaacaatttaatcttcagcagaaaatggaaggcagaattgaaataaaggttctaatagatactgtgacaatgaagaagactagagtaaagatcaagcttgagaagacagaaccactaaagggcagagcaaagactccagtaacactgaagaaaagaagacttgagatagtcagagctattctcacgctggaataactgaggctgaacgcacaagtggagcttcagaaggcggagctctgcaggcctg

SEQ ID NO: 38357 - DNA, 1046 bp, Homo sapiens
tttttgtatttttagtggagatggggtttcactatgttggccaggctggtctcgaactcctgactttgtgatctgcctgcctcggcctcccaaagtgctgggattacagtcgtgagccaccgcacccagccgcacctactcttttgtaaagcacctgtgacaatgaaggacagatttatcaccttgacgattgtggtgatggggacctgatcccagcagtcacaggtcacaggggaaggtccctgctgaagacagacctcagaagggcagttgatccaggacccacacctgctttcttcacgtttcctgatcctgccctgggtctgcagtcacagttcaggaaacttctctgggatccaaaactaggaggttcctctaggaccttatggccctgcctcctccctggcccctcacaggacattttcttccaacaggtggaaaaggagggagctactctaaggctgagtgtaagtgcggggcgggagcgtggaggagctcgcccaccctataattcctcctgcaccacatctcctgtgggctctgaccaggtcttgtttttgttctaccccagggagcgacagtgcccaggggtctgagtctcacagcttgtaaaggtgagattctgggggtctgaagtgggtggagggtggggcagaggggacaggactgggttgtggggattttttgattcagaatttttgagtgtgtggtgggctgttcagagtgtcatcacttaccgtgactgacctgaatttgttcatgactattttcttctgtagcctgagacagctgccttgtgtgcgactgagatgcacagctgccttgtgtgcgactgagatgcaggatttcctcacgcctcccctatgtgtcttaggggactctggcttctctttttgcaagggcctctgaatctgtctgtgtccctgttagcacaatgtgaggaggtagagaaacagtccacctctgtgtctaccatgacccccttcctcacactgacctgtgttccttccctgttctcttttctattaaaaataagaacctgggca

SEQ ID NO: 38358 - DNA, 1024 bp, Homo sapiens
gttaagtaaagacatagtgtattattccacttatctgaggtgtctaaagtcaaattcaggggctgggcatggtgcttcacgcctgtaatcccagcactttgggaggccaaggcaggcagatcacttgaggtcaggagttcgagaacagcctggccaatatggcaaaaccctgtctctactaaaaatagaaaaattagctgggcatggtggtgcacacctgtaatcccagctactcgggtagctgaggcatgagaattgcttgaacctgggaggcagaggttgcagtgagtcgagatcacgccactgcactccagcctggatgacagagcaagattgtcaaaacaaaaaataaaaataaagtcaacttcaaagaaacagtagaatgatggttaccagaggctgggggaaggaagctggaggaaggggagttttgtttaatgggtacagagtttcagttttgcaagataaaaaacttttggaggtcgggcatggtggctcgtgcctgtaatcccagcactttgggaggccaagtcgggcggatcatgagatcaggaattcaagaccagcctggccaatatggtaaaactccatctctactaaaaatacaaaaattagccaggcgtggtggtgggcgcctgtaatcccagctacttgggaggctgaggcaggagaatcacttgaacccaggaggcagaggttgcagtgagccaagatcgcgccactgcactccagcctgggcgacagagcgagactccatctcaaaaaacaaacaaaaacttggagatctgtttcacatcaatatgaatatatgtaacactactgaactgtacacttaaaaatagttaagatggtaatttttatgtgttttttaccacaataaaaaccgaacaaaacaaggcatgatgattcatgcctgtaatcccagcactttaggagaccaaggtgggaggatcacttgagcccaagagttcaagaccagcctgggcagtgtggcaagacccaatctctcattaaataaataata

SEQ ID NO: 38359 - DNA, 1047 bp, Homo sapiens
gtgcctgtgagtggagctctattcagacccccctttccctcccagcccccgttgtctgcctgcttcctctgaattctctctcacttgaccactgtgacacttacaccctgttctctgaaacccagctacctccagggctggcggaagaccttgctgatcgtctcccatgaccagggcttcttggatgatgtctgcactgatatcatccacctcgatgcccagcggctccactactataggggcaattacagtaagtaggattgtgtgtggatgcagggaagagatagaacctcgaaaagaggcctgagtgggagggcctatttagataaactgaatcctgtcagaattccagacagtgatgcctaccccatcaccaccagtccctggttgtccctttgctgggaagaggagcaaccactgatgcctggtcccctcttctgccccagtgaccttcaaaaagatgtaccagcagaagcagaaagaactgctgaaacagtatgagaagcaagagaaaaagctgaaggagctgaaggcaggcgggaagtccaccaagcaggcggtgagcacctgagggacttctgggctgggggccactgttctctcctggcagtggaggaagaaggagactctggaacgctggcctacatttcaaggactgccgcgcagggctcaggtttctcttttttcctcttcctctccaggaaaaacaaacgaaggaagccctgactcggaagcagcagaaatgccgacggaaaaaccaagatgaggaatcccaggaggcccctgagctcctgaagcgccctaaggagtacactgtgcgcttcacttttccagaccccccaccactcagccctccagtgctgggtctgcatggtgagtgccgcgggcctctgctgctccacaggaagcaccggaagcatgtatgtgcaccctaaattctccaccaaggctgagattgctcctgttctccaaggccagcacatgagagggactttgcagggactgaaaagaatataaattgcttcttttcgtggctttcaggtgtga

SEQ ID NO: 38360 - DNA, 1031 bp, Homo sapiens
gattacaggcatgacccaatatgcctggctttttttttttttttttttttttgagacagggtcttgctctgttgctccggctggattgcagtggtacaatcatagctgtgagtttgaactcccaggctcaagtgatcctctcgcctcagcctcccaggtagctggaactaaaggcatgtgccaccatgcctaatattttttgtattttttgtacagacctggtctccctatgttgctcaggctggtctcaaactcctgggctcaagtagtcttcccacctcggcctcccaaaagtgctgggattacagacatgagccactgatacccaacactaacctggctaaggtcacccaggctgtagagaggtagagctgggacaatggcctttatctgactccagcatcctcaggatttcctcccttatctgtagaatgtggataagatgaccaagaacacatcctagagggcacgatagccaggataggactgttctaggaacacacacgaggcgtgttaaagaagactcagaaagatgaaaaccaggaaagagccctgtggccgagatctactctgtatcctagagtattttatgtactttttgaagcattttttcaccagtacttaatagcaactgttagatcaagcattagctccagaggagtaaaaatcagattccacagatttgtactaatgtatctaacacaggtggtaatggcttttaaaaaaaaaaaaatgaaaaacagtccaggccgggcgcggtggctcacgcctgtaatcccagcgctttgggaggccgtggcgggcagatcacgaggtcaggagttccagaccagcctggccaacatggtgaaaccaagtctctactaaaaatacaaaaaaattagccaggcatggtggcaggtgcctggaatcccagctactcagaagactgaggcagaagaatcccttgaacccaggaggcagagattgcagtaagccaagactgcaccactgcattctagcccaggcaacggagcgagactccgtctcaa

SEQ ID NO: 38361 - DNA, 1011 bp, Homo sapiens
agaaaaagatgaaataaaatggtagttggggacatagttggctgggacttgacctgttgtggtctcgttgctccccctcggcagttctgggaggtgatcagtgatgaacatggcatcgaccccaccggcacctaccacggggacagcgacctgcagctggaccgcatctctgtgtactacaatgaagccacaggtaagggcaggagcccgggcagctcaggttcccttccctgtctcccacttatctgggatctctttccatttctgggcacgccttatcccctttgggtgaatctgtcattttgtccctttcgtgaaccaccgtcggggccaaagacgtctgctgccacctggtggcgggacctggaatgacaagtctctgatccctgctgtctcccatttccagtatatctataaaccttcccttctgccagatttcacagctcttaactttattctctgtaggtggcaaatatgttcctcgtgccatcctggtggatctagaacctgggaccatggactctgttcgctcaggtccttttggccagatctttagaccagacaactttgtatttggtgagttatacagatgatattagcagatgatataccatcgtgttcaacttatttgggtgcaaggacacagcaaaagttaggagatgattgttgtattggagtgctaatacagaaatgtgttctgaaatctaacggagggtagaggtagtgcctactattgctggtaaattatggggcagtagggggagaatatatcacagtgaaggagaaagaagatacatccgagggaattatttgaaaagttgaaagatggaaacatcatgtatcttccataccctgttaattgagcttttctcctgactgcattccaggtcagtctggggcaggtaacaactgggccaaaggccactacacagagggcgccgagctggttgattctgtcctggatgtggtacggaaggaggcagagagctgtgactgcctgcagggcttcca

SEQ ID NO: 38362 - DNA, 1652 bp, Homo sapiens
ccatgttccgccggaaggccttcctccactggtacacaggcgagggcatggacgagatggagttcaccgaggctgagagcaacatgaacgacctcgtctctgagtatcagcagtaccaggatgccaccgcagaagaggaggaggatttcggtgaggaggccgaagaggaggcctaaggcagagcccccatcacctcaggcttctcagttcccttagccgtcttactcaactgcccctttcctctccctcagaatttgtgtttgctgcctctatcttgttttttgttttttcttctggggggggtctagaacagtgcctggcacatagtaggcgctcaataaatacttgtttgttgaatgtctcctctctctttccactctgggaaacctaggtttctgccattctgggtgaccctgtatttctttctggtgcccattccatttgtccagttaatacttcctcttaaaaatctccaagaagctgggtctccagatcccatttagaaccaaccaggtgctgaaaacacatgtagataatggccatcatcctaagcccaaagtagaaaatggtagaaggtagtgggtagaagtcactatataaggaaggggatgggattttccattctaaaagttttggagagggaaatccaggctattaaagtcactaaatttctaagtatgtccatttcccatctcagcttcaagggaggtgtcagcagtattatctccactttcaatctccctccaagctctactctggaggagtctgtcccactctgtcaagtggaatccttccctttccaactctacctccctcactcagctcctttcccctgatcagagaaagggatcaagggggttgggaggggggaaagagaccagccttggtccctaagcctccagaaacgtcttcttaatccccaccttttcttactcccaaaaaagaatgaacacccctgactctggagtggtgtatactgccacatcagtgtttgagtcagtccccagaggagaggggaaccctcctccatcttttttgcaacatctcatttcttccttttgctgttgcttcccccctcacacacttggttttgttctatcctacatttgagatttctattttatgttgaacttgctgctttttttcatattgaaaagatgacatcgccccaagagccaaaaataaatgggaattgaaaaaagctgcgagatgtgtgcttatttagggaaacacggctggctgatggaggcatggggcctgagttcagttgcactgctctccttaaattgacacttaatattgagtccctgtcctacggattcaaccaactggatattgggaaaagagttgtactggacatgtatagacttctcattattccctaaacaataatagtataaattatttacataatatttgcattagattaggtattacaagtaacgtagagatgatttgaagtacacaggttatatgcaagtactacattttatatgagggacttgggtgtctgccgatttggtatctcagggaggtactggtaaggacactgactgctttatagaccctcacatcattgtttctggtacccaaactgctctgagcaccagtcagtctttactgtagtctctgacagctcactacagccttga

SEQ ID NO: 38363 - DNA, 1035 bp, Homo sapiens
ctggacaccccggctcagctctggtactttatgttgcagtatttgcagacagcccaggtgaggaggcagggccacttaaccagcatgctctgctcctctcaggtctcactgagagactcctgcctacagactgttccctgattttctcttctctgtccctttcttcccattgtctccctcccatccctcctcctttgtctctgcctctttctccctagagccggggcatggacctggtagagattctctccttcctcttccagctcagcttctctactctgggcaaggtaagcagggggctgaaaggtatagagatgggaaggggaaagcaagttgtggggcagtagagtagactgagaagataagaatgaaaacagaacgaacagagatggagaaagaaagaatgaatgtatggggttgggggtgggtgggttgtgttttggaccccagctggaaacctctgttcctcaggattactctgtggaaggtatgagtgattctctgttgaacttcctgcaacatctgcgtgagtttgggcttgttttccagaggaaggtatgagcgcctagataagtggcttccagggaagaaacagggtggtgtgttgcctttgcctttaaaaaggagtggggtcttggggcagtagcaggaagcagttgccagaactgaatacttgggtctctcgggggagagaagttgggggttgaggttctgcatcttgggagggatctgatatttcaggcaggaagatgtaaggcagtgacttctgagacaaggcatctgcctttctattcttttcagaggaaatctcggcgttactaccccacacgcctggccatcaatctctcatcaggtgtctctggagctgggggcactgtgcatcagccaggtttcattgtcgtggaaaccaattaccgactgtatgcctacacgggtgaggcgggacagagggcccctggaagaggaggttgggggtgagggaatgccagtttatgttcgtgtttacctggcagtctacagagctctctgacattt

SEQ ID NO: 38364 - DNA, 1031 bp, Homo sapiens
atgcgccggccggggccccgcccccatgcgccgcgcggctccagggccacgttccagggtcgggtttggtggattcctcagtccctgccgccgcggggcgccctgggatagcggcggggcctcctggtgagcgcgcgccggggcggcctccgggaagtgggagacgctgcgggtcctgggcccaggccttgggatgggcgggaaggcttggccgcgccgggctgtgggcactgcaggaggcccctgtgcaggtggagatcgccgcggccctggcgggactccttgctggctcttgggcgcgctgatgcccatcatctccctgagtttctgagccctatctctcatgtgtcagtggtcaccgccgaatccagacactccggccctgttccggaagagccctgatatccgtggctccatggcgctgtctgtcgataccatgcactctagctctcaaggaggaaaggttttgtggaagggaatagagacttggaataacagacctgtgctaattagagacaggaaagatggaacaaggggagtgacccttctccacccccatatcctaatgtgctctctctctatccagaacagatctcggcccctttccaaacactcctgatgcctcatttgcctctcgcctcttttcgaccaccattttgggggctgaggcactcacggggcctccccaggtttcactccgtttctacacagtcggagccccatggatctcccatctcccggaggaaccgtgaagccaaacagaagcgcctgcgagagaagcaggcgactctggaggctgagatagcaggggagagcaaggttaggggtcagacagcttgtccttgggtttctgagacttgagaggggctggaggagaccggctgaaatgcagtctggggtatactggatcccagcctcttctgctttctcttctcagtcacctgcagaatccattaaggcctggaggcctaaggagttagtattgtatgaaatccctacgaaacccggtgaaaagaaaggtaagtagaata

SEQ ID NO: 38365 - DNA, 1053 bp, Homo sapiens
gggtaggaagggaggcaggagctgaggccttgcccctgacagtttctttctttccagtgctgctgcagagctcagagcctggggaccagggcctcttcgaggccttcttggagcccctgggcaccctgggctactgtggggctgtgggcctgttacccccaggcgcagcagctccctccggctgggcccaggctccactcagtgacacggctcaagtctacatggagctgcaggtgaccagaggggatggggagggttagggcaggcttgggaagcatgctgggaggaagggaggggctgggctctataaagtaggggaagggaccttctaatggaggatggaggcctggcagcaggcggatgtctgagccttttctccctgttcttccccagggcctggtggacccgcagatccagctacctctgttagccgcccgaaggtacaagttgcagaagcagcttgacagcctcacagccaggaccccatcagaaggggaggcagggactcagaggcaacaaaaggtaaggctgagggaggcccccagaaggctccacccctgagggaatgtgggccaggaggggcctcattcctggatcctcacctccttttctcctcgtccagctttcttccctccagctggaattgtcaaaactggacaaggcagcctctcacctccggcagctgatggatgagcctccagccccagggagcccggagctctaactcatcatccccatcagttttcctccctctcagacctgtctttgaggacaaacagatttgtcagctgtcagggtgcagtgggacgtcagagactatgtggtccatcgccttcattgtgtaaatgaggacacagactggcttggtcgcagtgactgtggtgtccttgagatgctcacattactgcccggcctgcctcccacctggaagtctgggaatgaggagattgagataaacttttgaaatcccaaacatgtctgtttatggctctttggtcccctttgctcccagtggtgacttttgtgcttctgagttgtcccctgagagcttgg

SEQ ID NO: 38366 - DNA, 1033 bp, Homo sapiens
tctttgtatatgaaatcctcgttcttgtccctttgcccgtgtgcatttcctgccccaggaaggttgggacagcagacctgtgtgttaaacatcaatgtgaagttacttccaggaagaagtttcacctgtgatttcctcttccccagagccccacagtcttcgttataacctcacggtgctgtcctgggatggatctgtgcagtcagggtttcttgctgaggtacatctggatggtcagcccttcctgcgctatgacaggcagaaatgcagggcaaagccccagggacagtgggcagaagatgtcctgggaaataagacatgggacagagagaccagggacttgacagggaacggaaaggacctcaggatgaccctggctcatatcaaggaccagaaagaaggtgagagtcggcaggggcaagagtgactggagaggccttttccagaaaagttaggggcagagagcagggacctgtctcttcccactggatctggctcaggctgggggtgaggaatgggggtcagtggaactcagcagggaggtgagccggcactcagcccacacagggaggcatggaggagggccagggaggcataccccctgggctgagttcctcacttgggtggaaaggtgatgggttcgggaatggagaagtcactgctgggtgggggcaggcttgcattccctccaggagattagggtctgtgagatccatgaagacaacagcaccaggagctcccagcatttctactacgatggggagctcttcctctcccaaaacctggagactgaggaatggacagtgccccagtcctccagagctcagaccttggccatgaacgtcaggaatttcttgaaggaagatgccatgaagaccaagacacactatcacgctatgcatgcagactgcctgcaggaactacggcgatatctagaatccggcgtagtcctgaggagaacaggtaccgacgctggccaggggctctcctctccctccaattctgctagagttgcctcacctcccagatgtgt

SEQ ID NO: 38367 - DNA, 1027 bp, Homo sapiens
tccctagtagctgggactacaggcgcccgccaccacgcccggctaattttttgtgtttttagtagagatggggtttcaccgtgttagtcaggatggtctcgatctcctgacctcgtgatccgcccgcctcggcctcccaaagtgctgggattacaggcgtgagccaccgcgcccgacctcctgtctcctttcagtcctcctcgggatcgcgcatcacccgcattttctggtctctcctgcacttgctctcctcgcctctcctccgtctcctctcacttttcggacaaaccagtccttctgaggcccctgggttcccgggctgctcctgtgaatggcattggaaggccgttccagcgcggccgctgaggcagccacttcccccggtgctgggggcggatctcaggtccctgaagtcctgtcctctcccggagccgatgtgttctcagctcctgggccgcagctcctggagttggggccctcctttcttgggacccggaggtggtgcttcttgctgctgtggggactgtggggggtcctgactctcaagctgaggggttggagtctgcaggctccgggcagaggattcttcctgcgacttctgtcatccccagctcattctcccctcgcctccggctccgggggtcctctcctctctcgcatcccacccctactaatgaccaatgatctaaggacaccagattccctctcacctcctccctgcccatcttacggcgccctgggtcctgttgctctcccagctccctgctaccccttcctgtgtgctgttctctgatccatttctagggtgtcctctgccttcatcccccgcccccgccactgaaggtccctcctgcctcctttatgggcctttcctgcaagcagccttcactccgtgctgcccctatgcctccccattcccaaatgtccctgactctaactttctggtgctgccttttgtccgggggggtcttccctccatcccactcccctccagacccccaaggagagccctgatgctaatggcagt

SEQ ID NO: 38368 - DNA, 1068 bp, Homo sapiens
cgcctcctgggttcaagtgattctccttcctcagcctcctgagtagccgggactacaggagcctgccaccatgcccgactaacttttgtatttttaatagagatggggtttcaccatgttggccagactgctctcgaactcctgaccttagatgatccacctgcctcggcctcccaaagtgctgggattacaggcatgagccaccatgcccgacctaatttttgtgtttttagtagagatggggtttcaacatgttggccaggctggtctcaaactcctgacctcaagtgatccacccacctcagcctcccaaaatgttgggattataggcatgagccaccgtgcccatcccacagaatgtcttttggttttgtttttgttttctgttttgttttgttttgttttgtttgaaaaggagtctcattctgtcgcccaggctggagtgcagtggcacaatctcggctcactgcaacctccacctcccaggttcaagagattctcctgcctcagcctcccaagtagctgggactataggcgtagggactgtaggcgtatgccaccacgcctggctaattttttgtatttttagtagacacggggtttcaccatgttagccaggatggtctcgatctcttgaccttgtgatctgctcacctcagcctcccaaagtgttgggattacaggcgtgagccacagcgcctggccaaaatgtttttatgtttatttttcttagtatgaaactccagcgtattaaagagcattgagaacggttgatctggtaaatcgctataaaggcggcatttctttttttttttttttttttttttttttggcgaagtgggggatggagtctcattctgtcgcccaagctggagtgcagtagtgtgatctcggctcactgcaagctccgcttcccaggttcaagccattctcctgcctcagcctcccaagtagctgggattacaggcgcccgccaccacgcccagctaattttttgtatttttagtagagacagggtttcactgtgttggccaggctggtctcgaactcctgacctcatgatccgcc

SEQ ID NO: 38369 - DNA, 1834 bp, Homo sapiens
catttttaatgaggataggaaaacgaagatggctctggccttggccctctgttttctggcccatggttacagggtgctaaggtggctccataatgctttttctcagttcttcatatggtaaaacagtatttcatctggaggcgattttttccaggagccaatacaggagcaagtttaggaaaagatgggatatttcaaatacttgaggttcctatagcctgggagtatgtacagccctagttgttctatgaggatttctctggtaccaacccccattccggctgagcaagctcataaaatccttaaactcccagcataccttcctgcaaaccttcccagatggacacgaggctgctgggctgggagcctggggtacagggccctgggggcatgattagggagcttgtgtccaataaacagggaatctaaagtgttgtttcttcttctctgatggaattgtatgcttcttttttagttttctcttgcttgaatttgtcctgttgtaagtctctgaaacgattttggtggagagagaagagattattacttgtagggaattactctttgtagacaggcacaaagggcagagtgtttatactaggaggatgctggatttttacttagatttccttgacaaaggtgtctgggggaaaggagggaacatggcatttgagctatgagggagctaagtagatcatggttgcttgagaagagtgggcagtttacatagactggaggaaaagacaccagagggcctcatatctgagtccctaatgataatgcaatggagtttttaagtttctgttatggtctgtacaggggacagagactgagacacttgctgtctggcccacaggctctggcacgttttgggggaggtgcctgcaggacccaacatactcaatgagcttccagcgcaatgtccgatcgctcggggccgactgccaagggaaaggatggaaagaagtattcctcgctcaacctgtttgatacgtataagggcaagtccttagagatccagaaacccgctggtgagagtcctgcaaagatgcttctgatggttgaaagctaggcatgcatggggcatacgttttagagctctttaaagggaagtggctgtagtagaaataccaaaagactagaggagatttcccaactttacactgggtcctttaaagggggtgtgggctctgggtgaacaccagttatcctcctacaaaggcgtgtctgtggttccctgtctttggacacgtaagaattggaggaaaataaatgtggatttgggaaactttgaggccagcttgcttcttgcaggctcatgatcaaccaatctcacataaaagtattgaatgttacatatctcagccttcttgatagggatttcatagatttttttttttttttttttttttttgagaccaagtttagctcctgttgcccaggctggagtgcaatggtgtgatcttgacttaccacaacctccacctcctgggtttaagcgattatcctgcctcagcctcctgagtagctgggattacaggcatgcgccaccacacccggctaattttgtgtttttagtagagacagggtttctccattttggtcaagctggtcttgaactcctgacctcaggtgatccgcctgcctcggcctgccaaagtgctgggattgcaaagtgtgagccaccacaatcagcgcgatttcagagattattaagggcaggggaaggaatcccttctaagagaagtttggaggaagtaggtaataaaatattcaacatgtataaatgtgtcccaggataggaggccatcagatctcccacatgaggcatttt

SEQ ID NO: 38370 - DNA, 1374 bp, Homo sapiens
cttcaggcccaccccagttccctccctaccgcggaatgatgccgcctttcgtgagtcttggtgtcttgtcttggaacgattacactggaagctggagagctaggaatcaggacttagtctttgacctatgagatagaagggagggtgggaggatgattgatagcaggcttaaggagctagaagggtatatgactgtccctctgagcagctactgttggacccttttacagatgtatcccccatatctcccgttccctccgccctatggaccccaggggccttaccgataccccactcctgatgggcccaggtgagcaatccaggtctgggtttgtggctgggggcaggggaagcttattgggggaggagatggttttctagccaggaggctcagtctaggatcagtctcgcatgtggttatacaacatgccatatttcattttcttttttgtgtacagccgttttccccgtgtggcgggcccccgaggctcagggccaccaatgcgcttagtagagcctgtgggtcgtccctctattctcaaagaggataatctcaaagagtttgatcagttggatcaggagaatgatgatggttgggcaggtaagtggatattaagggtcaagaatttggatcttgaaaggcaaaacctaatgaggaaaaaaaaatacagggttatgtgggtgaaaggcagacattgaagtgtaggaagaccaggcccaatggctcacatctgtaatcccagtgctttgggagtgttaggtgagaggatcgcttgaagccaggagttcaagaccagcctgggcaacacagcaagaccccccacctctacaaaaaaaaaaaaattttttagttgggtgtggactgtgcatctgtggtcccagctactctggaggttgtggtgggaggatcagttgagcccaggagttggaggtcacagtgagctatgatcgtgccactgaactccatcctgggcaacagagcgagacttttaaaaggaaaaaaaaaaaagagtaggggaggatggatggggaataccaagtccttgcaaagtggtgagaggagtaagaatgacaagacttcattggtggatctagacttcggagggaaggatattggcattggtagtccatcttgttacatagttccagactacctcccaagattggagggcagaatgcttgggttactaatactcatatttcccctcaggggcccatgaagaggttgactacactgaaaagctcaagttcagcgatgaggaagatgggcgagactctgatgaggagggtgctgagggccagtgagttagggccatcaggggagaagaggagggggtcttggtttgtattttggtaatatactcttagaggagt

SEQ ID NO: 38371 - DNA, 1326 bp, Homo sapiens
ccatgaagtgctttaatgggtcttaaatgggaggggcttcaatagaatagatgttgaatagaatattttagtcttaagggagctagagatgagacgtgagattcctggggtgttcatggagtgtctattgttggactagatcactctgttgtgttttttccgatgcagtggaaccacaactgccctcaaaagagggtcctgaaccaccagaagaggttcctcctcctaccacacccccagttccaaaggtggaacccaagggtgatgggattggtcccacccgccagccccctagtcagggcttgggctaccccaaatatcagaagtcgttgcctcctcgtttccagcggcagcagcaggtgaaatcaagttgtttaccctctaagggctgcttttcttcctggcttcggtccctaattctcttcataagttaccttctgggtccctttgcttctttgtccagttgtctccattgtcacgccaatttcccctagtccaagttttttctttgctgattcctttgtccatgtgtgctttgagcctctctcatcttgtctttcctcctttcctaggagcagctcctgaagcagcagcagcagcaccagtggcagcagcatcaacagggctctgcccctcctaccccagtgcccccatcaccaccacagcctgtgaccctgggggctgtgccagctccacaggctccacccccgccccccaaggccctgtacccaggtgctctgggccggcccccacccatgcccccaatgaactttgatccccgatggatgatgattcctccttatgtggacccccggctcctccagggtcgtccccctctagacttctaccctcctggtgtgcatccctctggtaagggggcatgggaggagtgagaaacaggaaagtcccctcagtcttaggcattggatattagggtcttactgtgactctggtacgataggttttgcccatcatagtgatgagggaagggcatatgcttggcactgctgagatagctctgttgcaaaaatgggcttagttaagaaataagcagtggttggccaggcattgtggctcacgcctgtaatcccagcacttagggaggccgaggtgggcagatcaactgagttcaggagttcgagaccaccatggctaacgtggtaaaaccccatttctactaaaaatacaaaaaagtagccggcgtggtggcgctcgcctgtagtcccagctactcgggagactgaggcaggagaaacgcttgaacccaggaggtggaggttgtagtgagccgagattgtgccatcgcactccagcttaggcaacgag

SEQ ID NO: 38372 - DNA, 1054 bp, Homo sapiens
gagcagtcgtcgtggaatccctccagaggagccaggggccccaccccgccgggctgggcctataaagaaacctccaccacctacaaaagtagaagagctgcctcccaagcccctcgaacagggggatgaaacccccaaacccccaaagccagacccactcaagataaccaaggggaagctagggggccccaaggagaccccacccaatggaaatctttcccctgccccaaggcttcggagggactattcgtatgaaagagtgggtcctacctcttgccggggtcggggccgaggcgagtattttgccagagggaggggttttcgggggacctatgggggacgagggcggggagcccgaagccgggaattccgcagttaccgagagtttcgaggagatgatgggcgtggaggtgggacagggggaccaaaccaccctcctgctccccgaggccgcactgccagcgagacacggagcgagggttcagagtatgaggaaatccccaagcggcgccggcagcggggctcagaaacaggcagcgagacccatgagagtgatctggctccttcagacaaggaggctcccacacccaaggagggaacactcacccaggtccctctcgctcccccaccaccaggagccccaccttcaccagccccagcccgcttcactgcccggggtgggcgagtcttcactcccagaggggtgccatctcgccggggccgaggaggagggaggccccctcctcaagtttgcccaggctggagccctccagccaagtctctggctcccaagaaacctcccacaggccctttgccaccaagtaaggagcctttgaaagagaagttgatcccagggcctctgtcccctgtggcgcgcggaggcagcaatggaggtagcaatgtgggcatggaagatggggagcgaccccgaaggaggcgacatgggagggctcagcagcaggataaaccgcctcgtttccggaggctgaagcaggaacgggagaatgccgcaagggggtctgagggcaagccctccctaacccttccagcctcc

SEQ ID NO: 38373 - DNA, 1051 bp, Homo sapiens
ggtggagccgtaccaggtatttcagccatgtcccgcggagatctgagccagagagccaaggatttgagtaaacggagcttctcaagtcagcggccaggcatggaacggcagaatcggcgccctggcccagggggcaaggctggcagcagtggcagcagcagtggaggaggcggtgggggtcctggaggaaggaccgggccaggacgaggcgacaagaggagctggccctctcccaagaaccgaaggtgggtaggaacaaacaaatttattgtggtttaaaaattggaggagggggaaaaagcctgagggaaagataagtttgggtggagtggagattgtggcctgaggggccatgggctctagaatgtcagtaggatttccatgtctggctaaggcaactggaaagcggttggtagggtgttagagtcaagaacacccacctatgtattcattgctggttctttgctttccagtctgtgcatctgtatgcataggaatccttagaaggactcaaaaacacctggactttaatagggaagagaataggttgtaagcagaagttgggaaacataacttgtgggaaaaagtaacgatttagtggatactggagctaatgctctgttttctccagtcgtcctccagaggagcgtcccccggggcttcccctgcctcccccacctcccagcagttctgctgtcttccgcctggaccaagttatccacagcaaccctgctggcatccaacaggctctggcccagcttagtagccgtcaagggagtgtaactgcaccagggggtcatccaaggcacaagcctgggcttccccaagcccctcagggcccctctcctaggcccccaacccgatacgagccccagagggtcaacagcggcctcagttctggtaagctggaggggttatgggtgggaatatctccatccccagagaaggtcaagtgctggagggagcgggtggagaacctggcctagggaccctgctgctgggtgcgtttctgcagggagcaagggtagaagaattgggaggtggagtagag

SEQ ID NO: 38374 - DNA, 1390 bp, Homo sapiens
ggggccaatggtgagaggggtgggtgggactcctcgggactctgccggggttagtccctttccccctaaacgtcgggagcggcctcccagaaaaccagagctgctacaggaggtaagggatgggtttgagattgtgcttcactgcactcttactcgtgaaaattcttctgggttatgttttctctgttttctttcctgtttctttcactgtgtttttactccagaattctcagtattagtctcccatgtgtctcccttgttgtccccacaccctgtgtcaccccactctgtcctggcttcctataattcccaattcccacccaattcatgttttgcttctggcccttctcatctgtaggaatctttgccacctcctcatagctctggattcttgggctctaagcctgagggcccaggccctcaggcagagtccagagatacaggcacagaggccctgacccctcacatctggaaccgtttacatactggtgagtaaagctgagtgaaaggactatggtagaagggttaagaatgagaggggcttctgaactgtcatctcctcacttctcttctggttggtgctcccttctccagccactagccgaaagagttaccggcccagctccatggagccttggatggagcccctgagtccttttgaggatgtggctggcacagaagtgagtgagggtgggagggtgtgtctgagctgggacttttttgagcactggtcataccccccacctgctctgggttgagtctggagctgttctctcacttggctgtcccctttctgcagtttgtatgtgtgcatcagtcaggtattggggtgctttctaccctgacttaactagctccttctccactcctctcagatgagtcagtctgacagtggggtggacctgagtggggattctcaggtgtcatcaggtccctgcagccagcgaagttcccctgatggaggactcaagggggcagcagagggaccccccaagaggcctggaggctcctcacccctgaatgctgttccttgtgagggtccacctggctctgaacctcctaggagaccaccacctgccccccacgatggggacagaaaggtaaaagaccaaaaaaggataaggggaatgtttccaggaatctgactttggccctacctttttctgctttttctctctgcgtgtgtgttctgggcattccaatttggatttccctttccctcccccaatgcactttactgtgtgcccaatccaggagctgccccgggagcagcctctgccccctggccccattggcacagaacgatcacagcgtacagaccgaggcacagagcctggccccattcggccatcccatcgacctggtcccccagtccagtttggcactagtg

SEQ ID NO: 38375 - DNA, 1032 bp, Homo sapiens
tagggagcgccaagacttgggagtagggattctgtatttcaaggtaggcagctcatgatttttttcccctcagctgcatccagtggaactaaagccgttccaggattatcaaaaactgagcagcaaccttgggggacctggatcatcacggactcccccaactggaaggtgaaacggaatagggatgtggactttccaagtgcttccttactttggaaccagggtctggatcctaggcttgccttagacgcccttcttcccttaggtccttctctggcctcaattcccgtctcaaggccacgccttccacctacagtggagtcttccgcacccagcgcgtcgacctttaccagcaggtgaaggagaaacccttgtggccccaactctaaattcgagttgccacctgatttcctgtccttccgtctcatcgctgacctctcactgtgactcactgtttaacacatgcctgtcccctaggcctccccaccagatgccctgcgctggatacctaagccttgggagcggacagggccgccacctcgagaagggccctcccgacgggcagaggagcctgggtcccgaggggacaaggagcctgggttgcccccaccccgctgagggagttcctcttgccccctacccccggggcttgtatatagattataaatatataagggggaaaggggtgggcggggaggggttctggggctggggcctcacttcccctcctcccccttcccctggtcccctgtccctggggctgtttgttaaaaaagagtaataaaaggatttaaaaaaaaaaacttctacaatgatttgggggatgagttgtttgcattgtcttaaagcatggtgctgagtgatctgtagtttcagtcagggaaatattcattacttattccagtgagctgttgaaactaaaaacatgaccatcgtattggatctttaaatttttgtgagtctggaatttgggctgagctcagctggataaatctgcttttttgtgccagtgagcgaggtcaactggttatc

SEQ ID NO: 38376 - DNA, 1031 bp, Homo sapiens
cttaccaaccgtggcatcgcccagatggtgaggcctctctgctcctacctgcctccttctgagcagtaagagacacaggttcctgcagcaagaagtcatgtttaagccctgtttaaggaagctagctgagaagaggggaagaaccccagaacttgggcctgggaattgaattctgattgggggtcatcctgaagggattgttttcagggagggagacagaccttgaatcagagagttgtgatagactgcctcttcctcaaggaacaaacaacaaatggctctgatggtttgtagcctgcctaattggaagaaaggcaacacagaagtttgagagcccatctagtccagagaaggggcctctggacagaggtgggaggagtgggggacagagtggtatgggttgggctgcgaagggagttgcctcttctttacatctacctgccaaccccttccattgtattcacctcagttggaaaagtaccagcaaggagactttggttactgtcctcgtgtgtactgtgagaaccagccaatgcttcccattggtgagtgttgaagaagggaaaggaaagcaccgtgtggcagtcttatgggaaggagttggggctcaacacattggagcctgagtcctgaggggaggttaggtaggaatagggggatacctggcctgctgagtctggctgtctcccaggcctttcagacatcccaggtgaagccatggtgaagctctactgccccaagtgcatggatgtgtacacacccaagtcatcaagacaccatcacacggatggcgcctacttcggcactggtttccctcacatgctcttcatggtgcatcccgagtaccggcccaagagacctgccaaccagtttgtgcccaggtagggagcagggagagtcattaagggtcaaaggaaaggcccaagatcccccagagaggggaggacagggcatggccctttcttgaggtctgcttctcccagaatcagggcatctccctgctgagtgactgtgggaaagttatttgatta

SEQ ID NO: 38377 - DNA, 1039 bp, Homo sapiens
actccagcctgggtgacagaccgagactgtctccaaaaaaaaaaaaaaagaaactttctctttaaaccagaaagactcaggaactcagagccacatgccagagttacctgctgctggggccctggactcctgccattccttagttcttttcaaggattctggcatccaggatgccctctcgaggggcccaatttgaggggcaaagtgctgagagcactgatgttgggctgcagtggttggatcttcatgctaatattttaattttgaaatagtgcaaacgtatagaaagcaaggatggatacaacagccttttccatacactggataaacatgctggacataacgctgctctgagtcaggcttggtattgagcagcaggactcccagatgagtatagccaggtgtctgcccttccaagtcttgcagcccagtgcttgggttatgaaacctttttctgaaaagcagtgcagctttgtggctgggaggtccaatcccagcccctctaccacttggatatgtcagtctcttcagccccaccttggtcacctgtcaagtagggatagtgcctcagatgattgagaaaacacatgtaaatgtgcatacacaagtagaagttaaggccttttccccctcaaaaaaatatatttgccctagagtcaaatgcatacacaatgttcagcttttttttctaaggttcttactatgttgcccaagctggccttgaactcctgggctcaagagattcttctgcctcagcctccaagtagctgggactacagatgcacaccaccatgctcacctggctgatttacttattttcaaacctttttggtaaaacattcagaagcttgcacatatcacaagatggatttttgtaaaccacacatctgtgtaaccagccaccaaatcagcgtgaagacctttacctgcagccaagcctgcctctgttcccctctcccaggtgctcttcccagctctggggtagccgctgtcctgactggtagtagcttagatgagttctgtctgtgcttgatggaaa

SEQ ID NO: 38378 - DNA, 1856 bp, Homo sapiens
gagttgatgtgcaccttctttgtgctcacatagtgcttgtttatgtttttctagttgcactgtcacatcatgttagaattagcagtcagtgaatctgcttgcctccatagctatgaactctatctagtagctatacctgttacctcagtgtctgacacatggtcttgtacatagtagcactcaatgtgtgaacacaacgcaaatgtaaacgcactggtgacatcatctctaaacagagtggaaacctttgctagcctcaggtgcacaatccttcccctacctcacctcccgctgcaatatgtatcttgtaggagttaatttaggataatctctgaggtcatctccaggtaatcagcatctccaggaatcggcagggtaatttaattacccacacattcttcagtgcttcaggtgcagatctttaatctcagccacagatgggagggagagaattctcagtggagaagagagctggatttaaggtcggggaggaatgcgtattccccaaatggaatcagacagggcatgagatcatataacttgaagaatcatcatataatctaatgaactaaggacaggtgacatatttattaatatttctgtatacgaatttattttaatttattaggaaatacctctaacgtacaaaaagatgtaaataataatatagggccagatgtggtggctcacgcctataatcccagcatttgggaggctgaggcaggaggattgcttgaggccaggagttcaagaactaaaagctgtacaggcaccaagaatatgactgaatgtcacagtatgctctaaagggcactgtcctaggagtctggagacatgattttgagacttagctgttctcattggcggtatgactttgggcaagttgcttatcttttaacggtttcattttctcagttgttaaatttacagtttggtttaactaaagtctctcccagtacgagcagggcgtgagtcagagatacctaagtgtttagtgcagcgcatgtgctttctaaagtggggatggctatttacagactggcctacactgttctggtgggagccctcagtgaccaaggagcagaggtacctgaaacccacccttgaagccatctggatgctccgcttcattcaaatctggggtgttctaacccaaagtaactggccacagactgcaatgtaagatacaaatcttcaggacctagtgtgtgcacatgttggctcttatataagatggcatccttagtacttgttctatgtagaaaagaatttgtgggctcacaagtccctacagagtctcacactctcatggccaataagtatacagggatacccggaattagacaaacacagatgagacatttatttctgtatatgaatttattttatttatttatttattttttgagacagagtctcactctgtcacccatcctggagtgcagtggcctggctcattgcaagctccacctcccgggtttacaccattctgcctcaccctcccgagtagctgggactataggtgcccgccaacacgcccggctaattttgttgtgtttttagtagagacggggtttcaccgcgttagccaggatggtcttgatctcctgacctcgtgacccgccctccttggcctgccaaagtgctgggattacaggcgtgagccaccgcacctggcctgaatttattttcatttattaggaaatacctccaacacacaaaaagatgtaaataattagccgggcgtggtggctcatgactgtaatcccagcactttgggaggccgaggcaggtggaacaccagaggtccggagtttgagaccaggctggccaacatggtgaaacctcatctctac

SEQ ID NO: 38379 - DNA, 1856 bp, Homo sapiens; identical to SEQ ID NO: 38378

SEQ ID NO: 38380 - DNA, 1856 bp, Homo sapiens; identical to SEQ ID NO: 38378

SEQ ID NO: 38381 - DNA, 1047 bp, Homo sapiens
atatgtagacacaattatgctcacatctagcaattttcagtagatacatgtaaacacacctgaatgggtaggacactgcacttgccactacattcccatagcacatcgtggatacatattgccacaatccccagggactgcaagcacactttttggcaaactgagatcaagatgatagatgtaacttgtagtacccccacccaaaccctcacttccaggctatggttcacacgtccgactcatgacctgggggagctcagttctcgtctggacgtcattcagttttttctgctgccccagaatctggacatggctcagatgctgcatcggctcctgggtcacatcaagaacgtgcctgtgagcccagggtggagggcagggaggtggggaaggaggttgagggctgatactgggcagtgggcttcttgaggggcattagagtgagggaagagaaaacagcggctgtaaccttgtctgactgtagctgattctgaaacgcatgaagttgtcccacaccaaggtcagcgactggcaggttctctacaaggtaaggccttccttcttgaatcccaaaagtccaggtaaaggccctcagcctgtattccagactgtctgtaccctagacatgctgtccaattttattctaccctcttttttttttttttggagacagcctcgctctgtcgcccaggctgaagtgccatggggcgatcttggctcactgcaacctccgcctcctgggttcaagcaattctgcctcagcctcccgagaagttgggattacaagcgcccgccaccatgcctggcaaatttttgtatttttagtagagacaggatttcaccatgttggccaggctggtcttgaactcctgacttcaggtgatccacctgcctcagcctcccaaggtgctgggattacaggtgtgaaccaccaggcccggcctccctctttttttttttaactttgtattcaggaaaatgtaaaaaatatttagaataatataattaacccccatgtacccaccatgcagtttcaacactttaact

SEQ ID NO: 38382 - DNA, 1030 bp, Homo sapiens
ttttagagtttgcacaaccctctatcaaagcacctaccacctcacttttaaatcttctgcatgtatttctgtcttccttcctagactgtgagcacatctgggacagggaccatatctttttttgtttatttgttttgttttgagacagagtctcgctctgtcggccaggctggagtgcaatggcgtgatctggctataacctccacctcccgggttcaagagattctcctgcctcagcctcccaagtagctggaattacatgtgcatgccaccaagcccagttaatttttgtattttgagtagagacagggtttcaccatgttggtgaggctgatctcgaactcctgacctcaggtgatctacccacctcagcctcccaaagtgctgggattacaggcatgagccactgtgcctggccaggaccatatcttaattgtctttgtagtttcagtgtttggtacagtgcctctcactgtttctttttgcctttgagatcttccctctttgttactgtgatcttccctactggtctttgttcttctgagtctgtccctatcaccacctcaacccgagctggatgtggcctgtcctcctttttgtgtttctctcacagactgtgtacagtgccctgggcctgagggatgcctgccgctccctgccgcagtccatccagctctttcgggacattgcccaagagttctctgatgacctgcaccatatcgccagcctcattgggaaagtagtgagtagaaggaaaaagggagtgcacccagggaggtcagggagagagaatgcagtgtgcaagatggggaaacatggaagatattgaggtcaattggataaagaatgggatggtgggaggaggcagcagaacttcagggaagtatctggagggtgagagttaaaggaggactgcagggagaattggggcccaaggagagctgaggaacaggacagagggtgccaggtcctaagaaacagtacttatctcctcaggtggactttgagggcagccttgctgaaaatcgct

SEQ ID NO: 38383 - DNA, 1047 bp, Homo sapiens
ggtaattagctggcttcattatttttgtagtacaaccgatatgttcattagaattctttgcatttaatgttgatactgtaagggtgtttcgttccctttaaatgaatcaacactgccaccttctgtacgagtttgtttgttttttttttttttttttttttttgcttggcgaaaacactacaaaggctgggaatgtatgtttttataatttgtttatttaaatatgaaaaataaaatgttaaactttttcttgtctgttaatatgtgaagataatggatatttgcggagggatagtgtctgaataccatctatctttatagtctgaaaagaacagtactgctgaagagttatacgtgtaggagttagagctacacatatttttgtttgggcttaattgtgggccttaagagaaattgcaggtgcccgtcttgattagagtggggcttgtttcagggaaaagtcggatggcagctgcaaaacggtattggaggggtggttgaggtgggttcactggggcggggaggggaggggtggtgctgagatgggattatggtggttttctctccctcttctacttagtgagcggagtccacaaaaaaatgctgactttttttttttttttttttgagacggagtctcactctcactcttgtcgcccaggctggagtgcagtggcgcaatctcagctcacggtaacttccgcctcccgggttcaagcgattctcctgcctcagcctcctgagtaactgggactacaggcgcctgccaccacgcctggctaattttttgtatttttggtagagacagggttttaccgtgttagccaggatggtctcaatctcctgacctcggctcatattcatttatatgtggaatctaaacagtagaactcagaagcagagaagtggtggtcaccaagggctgtgggatgggggaatggggagacgtgcaagggaaacaaagccttagtcaggagaaataaattgtatttttttttttttgaaacgggatattgctctgtcacccaggctggagcacagtagagc

SEQ ID NO: 38384 - DNA, 1064 bp, Homo sapiens
ttcctggtctttctttcactttgttttatttctgtgtggacaaacaatggggaaaatgccgcgcgtctagccaggcagataagaaaacaactatacccgtcaggcccccaacccggcgccgccataaatggccccggcctcgccattttagttctttttgcgaagtgggctcgtgggttggcagtatgagagttgtaatggcccgactgttgagtgagggggagcaggggatcccaacggcttgcgctgcctttgcgcagcagccggcgggcggccacgtcgcggcctggctggggtaggagagggcggtccccagtgcagttgggtgaactaccgttgcacactggagtttctggtgtctttgcttggaactgacctagctcgtggcagggggaactcggctagcggccccacagcccctgctgactcaaaacaactgtgagtggggttgggcgagtgattgcaaaatgggggtggcggtcgcccggggataggaagggagtgatgatgaccccaggtaactcttgagtgtgtcgctgatgccatcaccgcagcgctctgaccgccccctcggtccagcatttctcaggctcaacgagttcatggccaagattcctaatcttttgttctgtttcatttccccgttaggagttgtaagacgttcatcgccgtgttatccttgagtaaaggtgagtattaggtgcgagagccttttgaatgcctcttcggaaagctttgttcccaagcaagctttcgttcatgggcattatgcgcctccctgcccttttttttttttttttttttgagacagtctcgccttgtcacccaggctgaagtgcggtggcacgatctcactgcaacctgcgccttctgggatcaagcgattctcctgcctcagcctcccgattagctgggattacaggcgcatgccaccaagcctggctaattttttgtattttttaatagataaggggtttcactgtgttagccaggatggtctcgatctgctgacctcgtgatccgcccctctcggcctcccaaagtgctgggattacaggcgtgag

SEQ ID NO: 38385 - DNA, 1689 bp, Homo sapiens
tcaagtggtctttccacctcagcttcctgggactgcaggcacgtgctaccaccacgcctggctaatttttagtttttttacagaagcgggcttttgccatgttgtccaggctggtctctactcctgggctcaagcagtcctcctgcctcagtctcccaaagtgctggaattacaggggtgagttgctgcgtctggtgttggtgactttctagagattactttttggtttacatcattttccttgtgactatttttacttttttggggggcggggggacagtcttactctttttagtttacatcattttccttgtgactattctatttttacttttttagggggcggggggacatgagtctcactcatgttggtcaggctggtctcaaactcctgacctcagttgatccacgcccttcggcctcccaaagtgccgggattacaggcgtgagccactttgcccggcctgtatttttacgttttaataaatccccgtatttttgttaaaggctgggtaacctgactcctcccctcatttctactgcaaaataggagtacactggggcctcccagtggagctgttctctgctgttttaaattactttctactcctccctttctaacgtccactcctggactcatttgttagatcaatatatactgggactgttgtgttttctttgagtgtactagatctctttccagaagagcttcccttgatccagatctccctaattgggaatgatgatttcacagactagagtctccgatgctggtcatgatgtcaaaactaagttctgactcatttagggaactggatacttgggtctccagaagggccaatgggagggccataattctgtttattttcaaattgtcttgttttcaccttgttagaatgaactctggaagcccagccagggacaatgcaccttcacagagattctgcactaatctgagtgaaggtctaaggtttggaatctccccctcatggagagaagctttgtatggctgtcatgcttagacagtgattcctgcaacttgaccttcaggctgggagaggtggagagccatgcctgttctccttccttgctatggtgagtatcttttgttttggctctcagtgggagtggtaatgatgatctggttggacaagagtctctgagcttttctctgaggatctttgaacccacctgatccaccttcatcctgccggcaatctcctgtaattcatgtttttatggccagttacttacatgatgaggtttaattggctatggttctgcaggatgtacaggaagcatggtgttggcatctgctcagcctctggtgggggcctcaggaaactatattgcataaggtacagagggaagcagggatgtagcatggccagagcagcagcaaaggcagggaggtgccacacatttttaataaattgatctctagagaactgactgtcatgagcacagcatcaaggaggatggtgcttaagccattcatgaggaatccaccccagtgatccattacaattcaatatgagatttggtggggagacagatctaaactgtattacagggtctcactttgtgcacaggctggtcttcaactcctgcctcagtgagccactgtgccccaccccaacatgttttgtgtgttttttgagactgtcttgctctgtcatccaggctgga

SEQ ID NO: 38386 - DNA, 1041 bp, Homo sapiens
cccaccccccaacccttcttatctcgagaaatgtcagaaccttcccctgggcagccttagccaggaataaaacatttttgtcttccctcattctataggacccttttccctccctccacatatacatgcacttctaagagaaggaaatctttctctgggaccccgtattcccctggcctccaagaacccttttcccagctccagattcttgcactctcaagagcaagtctctccaaggaatcatcttccctctctcaggatgtgtgcatctgctcagcctcccactcttacctttctgccccagaccccccaccccccaattctcctgggccaaagagccctttttccacgcagcccaggggccccagcctcctggcctccacgcctgcgcggctagcggatgaggacgttaatctcggccacactggcctccagcacgttctcggccgtggtcttgccgtgttgctccttgaggtgccgcctaatggcaggcttgtgggcgaagcgcacgtcgcagtaggagcagcggtagggccgcgctcccgagtgcaggttgaggtggtcgtgaagggtggacttctgtgtgaagcacttgccgcagatgccgcacgagtgtgacttgacaccacgatgcacgttcatgtggcggttgaggttgctgctgtggttgaactgcttgccacagcgagggcacatgaagatgaagtgctgcgcccgcatgtggaagaccagcttctccacgccctggaacacttccgggcacttggtgcacttgatgttctttaaggggtttccacctgagaagcccccaggcaggggtccccggctgccccccgcccccaggctgccccccgccccccgggcagccatggccaccgctgctgcttccaccaggcccgaggtggcccccacgctggcccggcctccgggaatcaacagcaggccctccccttctgcatcttccgacaggctatagcaggccttcaccacaccctgcggtggggctacagtgctggggggaacgctgctctgggccagctc

SEQ ID NO: 38387 - DNA, 1030 bp, Homo sapiens
ttgagaccgggtcactacgttgccaaggctggtctctaactcctgggctcaagcgatccgcccactgcagtctcccaaagtgctgggattacaggcgttgagccaccgtgcctggccagattctgcatttctacaagttcctgctgatgctgatgctgtctgtctgtggaccacagtctgagtagcaagcatccacatattcgtaagagtggagttgctggatgttgaggtctgcacctgttcagcttccctgctaatgctaaactattttctgaagcagttgtacaccagccatgagactgttgcttcttgggaaaaaagatataaaggcttcaaatttaatggatattattcagtgctcctcttacttgagctttctgcagtctgtgacatacttgaccacactgtttgatccactgcttttccctggtttccatgacacccctgtatccaggctcccttccttctataatttcagtctgttctataaaccctcactcctttcctgtcttgaccttttcctctgttgatgcctttggccttctaggcctttatctcattctctctgggtggtaccatgtgctctttagagattggttaccaggccgggcacggtggctcacacctgtaatccgagcactttgggaggctgaggcaggtggatcacctgaggtcaggagttcgagaccagtctggccaacatggtgaaaccctgtctctactgaaaatacaaaaaattaaccagggtgatggtgtgtgcctgtaatcccagctactcaggaggctgaggcaggagaatcgcttgaacctgggaggcagaggctgcagtgagctgagatcatatcactacactccagcctgagtgacagagcgggactctatctcaaaaaagaaaaaaaaaaaaaaagagattggttaccacattgatgactctgtgatggttaattttatgtgtcaggccaagcgcagtggctcacgcctgtaatcccagcactttaggagggcaaggtgggaggattacttgagccca

SEQ ID NO: 38388 - DNA, 1036 bp, Homo sapiens
cacctgtaatcccagcactttgggaggccaaggcaggcggatcacctgaagtcgggagttcgagaccagcctgaccaacatggagaaaccccgtctctactaaaaatacaaaacaaaattagccgggcgtggtggcaggcgcctgtagtcccagctactcgggaggctgaggcaggagaatggcatgaacccgggaggcggagcttgcagcaagccgagatcgcaccactgcactccagccagggtgacagcgagactccgtctcaaaaaacaacaacaaaaaaaaaaccaaaaaaaaaaaaccctagctatataccctcacaccctacaaaacaaaacaaaacaaaattagccaggcgtggtggcgcatgcctgtaatcccagctatttgggaggctgaggcaggagaatcacttgaacctggggggcggaggtcgtgcggtgaggcaagaacatgccattgcattccagcctgggtagtaagagcgaaactccttctcaaaaacaaaaacaaaaaaaaacccaaaaaaagacaggagggtcataaggggagggttgactgtgtgtccctccaggttgtgcagaggggattagaagtaagtaggttagaggggaggtggagggagtgtgctggggtgtgagcttttatgatgctgaaaggatcatgatatgctaaggacaggatagtgttgggttgtacacacaggtgtaggcaatcctggtggctagtatgtaaaagtgaatgtcctgactcccttagagggtacctgcagagtgcccttggagggactagtgctggagaaattaataggagaggggacgggcatccattaaccttttcttgcctgcagcctgtagggtccagcgtcaaagcgaatcatggggtccagggctgagctgtgcactctcttaggcggattctccttcctcctgctactgataccaggcgagggggccaagggtggatccctcagagagaggtgacaacagagggggtagggcccggggtgagctcttctcaggagccttctgctgg

SEQ ID NO: 38389 - DNA, 1026 bp, Homo sapiens
ttttagccaatgagttgatttggagccatacgctccaaagtccaatagcaatccggacattctctaaaagaggaagcgaaggaaagaaaggggcttatagtgggcgaggtctataggtagtcccgagcaaattgcttatggctttggttatgactgacaactactcagacgaataaagccctccttggccaggcgacagcgtgtagcgagttattaccaatcccttggcattgcacattgacttagaccgtatcagccaatagccattgtgcgaaggcaggactgcactaaccttttcccgcccctaccctttgggccaatcctttcttttgaattctttgtgactggcaggcattcagaccaatagtgattaggaaaccttgaagcctgcccaacgatcgtgggcaggaggtggtttctggtttgttggggcgtgtgtatgtgtatttggggggactgaagggtacgtggggcgaaacaaaaccggccatggcagcagcggaggaggaggacgggggccccgaagggccaaatcgcgagcggggcggggcgggcgcgaccttcgaatgtaatatatgtttggagactgctcgggaagctgtggtcagtgtgtgtggccacctgtactggtgagaatcgaggaggggggcgggaggtggtgggtctcgcttatatactggagaggctaggagcgaataatcatacagtcatacagataatcggagggcacgttcccataggtgaagcccgacaggagacataagactttgctggtatgtgtgggtgggagtataacggtcgagatctgtggaaagaaaggtcttaggaaccaggagctgaggcacgtgatgtgctgagaagagaaggtggggcggggagtggcaggacaatgtgagacccgagccaccttaccccagagaagtgaggggtcttagctgtgcaggtggaaacaagtgagacacaaaggttaagggaggcacgcatcagttgagtcggggagaaccaggaaatatggatcacattcag

SEQ ID NO: 38390 - DNA, 1030 bp, Homo sapiens
gatcacaccactgcactccaggctaggtgacagagcaagaccctgtctcagaacaaaacaaaaccaaaaacaccaaacaaaccaaaaaacacaaaaacccagcaaacaaaaacaaacataaaacattaaaaacatttgtagaaaaaatttgctcaccccagccctacaagaaactaatgtaataaaaatatattaggaacttactagtgtgaacttgaggtattcctgaaaatcaaaacaagaaaataggttaatggcagcatttttggaacagaagtacagttctttcctactcccaattccctagttgttttttctagggtaccataaagacttctagcagaatacaatgaaatatgatgagacaacagatcccttagtgtgttataagaacctgacagtttttaccacctttatgtggtccaacttattgttgtctctctaattgagctctctgctttcacccttgcctcccagtcagttcccagtacagcagttagcgggacccttttaaagtgtcagcaagactcctgcttaagagccaccaatggttccccatcttggtttaacaaaagtcaaaatcacaacagtggctttcaaagatggccctggaagatctgtccctccaaatctctcttatagcttctttttatgtcacttttcattctgttccagctatatggtacttgctatcttgcttttcctcaaatagtctggaaatgttcctaccctagggtggtttacttgttgtcttctctgattgaaatattcccccctcagatattgcctggctaattctctcacctatttcatgttccatctagtagttatagcaattgctgagaatgaggcattaaactttccaactgtagttgtgggtttttctgtttctcttcagttctagtacgtgtttttttttttcccagtgtgttttgaagcactgttgtttggttcatacatatgtagaatttctttgtcttcttgatgcattgatatttttatcatgatataatgtccctcttttgtccct

SEQ ID NO: 38391 - DNA, 1034 bp, Homo sapiens
aatttggagtcagaggaagttggtcattgtaggaaagtaactgctgcaagaaagatttcttagaatgtaactgtctaatatgaggcatttatgcctcttttcctccatgtttctagtttctgccttgggtttggcatttattgtttatcctgcttcaagtataagactagtggtttattcgagggcccacaacttccacttctaccctggcgtcacacagatcattttctcttctcaagtcattgtattttcactggtagtaaaagaggataatatcttcatcttcaaataaattagtgggagggattcaaattatgagggaaaagaaaaattggttcttctgctgtagggaagggttactgaaaattaaaggacaacctactgagctgaagagagctttggggtttggtaatttggggtgtgaggtggatcttcaggaatgccatgggcttcaagactagtgtgtctctcccttagtatgttcctcctcagtttgaaaggacttcctggtaaaggactgaaagaaatgtccactccatcatgtctctgctgacacctagcttctcttctccagttataagtccattttcctactggggtaacacaagaaggaggaagaatagctcaggggtcttcccttcacatctctcctacaaggattgtgaaatgtcatatgcctcctcccatagacttagatagacctaaaattgtcaacatgtgtccagatagttgcaaaaaatatataatttccaacatattctccatattaacactttaaaataaaactgttaatcactcatatgttcaattcaatctaaatatcataatgttttgacacccattatcattaatttaaaaaatatacaaacaacctctttcttaatggttggaaattttacattgctcttttttcccactttgaattcatatttttattctaccccccatgtagaatttttctttttctttttttttttttttttgagttctcaaccctggttacatcctaatgtaatttttttctttgttcttgg

SEQ ID NO: 38392 - DNA, 1051 bp, Homo sapiens
aaatctgcctaggttattgtttagagaaatttttattacaaaaacaaacaaggaaatacaagaaaggcaagttttacgtccatgctttataaaagtaaatacaacaacccaagtaaaatattaactaaataacaccaacagtaaatgagtaactataggatgaacaaatagggtttatcccaggaatgcaaagatgtttcacattttaaaaatctctcaatataattcactatattaggagattaagaaggaaaatacaatgaaatgagtcaattctgataaactattttttaaatgtaaaaaaccatttatgtttaaaaaataaacttttagaaaaccaggaataaaaggaaacctactaatttagtaaaggttgacagcaaagacttctggaaaaattgagtagacatactttttcctattcatctcactaagtacaactaaaaactctggacattatatatatataaaacaaacataagaagactctaaaaggtggaaatgagaaggcagaacagctagaatctcaggatctgaggaatgacatactagtgagttccctgggctttctttttgccacatatatgctgggcttggagctgaagaaagtgacaatttggaaagaccaactggcacaaacaaacaaacaaacagaaaaagccccaacaacacttacaacaaaagccctgatatcactagccaaaagaccaagacagaggcaggcaagcctgtcaagccttagaaagtaactgttcagttctaggcaaataccatagcaataactgtgactctactgccattcacaccagaaagaccaagtgggagacctaaactttcaccctcttgaagctgtaacaaggtgctccaacatcactctgcagtggtatccaagaagaccaattaggaagctaagaatttcatttctgcaagccagtaatggggccccctctctaagatgtcaatggagatgggggcggggggagaacacctgcccagaaataatgaaaatggctaaaagaagttatctaaacagaatggaaatgataaaata

SEQ ID NO: 38393 - DNA, 1029 bp, Homo sapiens
tgggtctctgcggcactcttctgcctggtgactgacaccttggaaatgaagtttatgacgtcatcgttgcggctggccaatagaaaaagctcccgcggagaggtgttccttccccttcgactcagcttcttcacccgcgtgagcgagcgcgcgcgcgcggagggggtggggaaaagctcaagcagggtggcgcgcatgagcggcgaagctcctcctccccgcctatatataaagggctggcgcggggctcggcggcgccatttcgtgctggagtggagcagcctctagaacgagctggaggattctgcctaccgatacagagccttcgagtcgtccggggccgccattacaatccacctccatccgcttggaaatggccttcgtcccggcctatgactggtcccagcgggcagtacagaccccctagaagcccctggagctcccctttttcgggccccgcccaatcctcggagtctgtccaccccctctactccgccctcaagaggatttcaaagatggaggcggcggctccctaaaccacttttcgtgttcatccgcctccatccgagatcgaaacgggacctcgtcggccccgtaggggcccgacaagaagagggaatccctgcagaccaacagcgggctatattgacgacggtgtctgagatcggggaccgtcttttgaagagtcagtccctccttagttgcccgcctcagctgaggccgccgccattttcttgctgtccgccgtctgcagagcgcgccaagctgcccggagctctccgagaggccccaaagagactgctttcgtgccggccaggcagggggtttgtcgcctggaggcccaagaggaacggcctccccccaacttagcgggttatgctggaccgggcggtgaggggaaccgaggccacccggactttccgcggctgagggcagcgccggttccttgcggtcaagatgctgcaaaacgtgactccccacaataagtacgtttccgcgagccgcgtgtgggaaggggatgttgcaggg

SEQ ID NO: 38394 - DNA, 1054 bp, Homo sapiens
ttaaccacctcactagggccagcacctggattcatcagactattgtgcagatgcactttttcctcatttggacgatattgccctaattttgttcccatctttacaggctccctggggaagggaatgcagggttgctggggctgggcccagaagcagcagcaccagggaagaggattcgaaaaccctctctcttgtatgagggctttgagagccccacaatggcttcggtgcctgctttgcaacttacccctgccaacccaccacccccggaggtgtccaatcccaaaaagccaggacgagttaccaaccagctgcaatacctacacaaggtagtgatgaaggctctgtggaaacatcagttcgcatggccattccggcagcctgtggatgctgtcaaactgggtctaccggtgagtagagacattggagccggggaggtgtgggatgagcaagaatgcgtgtgaatgggggtggtctgcctagtgtagatgctgcggcccctagggagttcccatttctcccctgtagggcagttagctaccagatttctgggtatcttggtcctttgtgattgatccgaccgcttgctgtaactatcttggcatctttccttgtgccctccatgtgtccttccttaacttttgtgccctggctccattttacagattcccacctcgggttgggagaggaccacggtggccaaaattcttagcttcttcctttccctcatgcagcccatggatagccagccccagaggtaatgtcacaggatgggaagtttccagagtgggtgggaggtgggtggttagagaaaggcagcaggggcctccctgtggatgtcaagaatcttttttatttatttatttattttgtcccacagtttaattggggccgcagtttaagtaactgttcctttgatgcatagggggggtgtgtgtgtgtgtgtgtgtgtgtgagagtcggggatcggtagtctccctataagcatttatttttctgtggttctgacctaacatttttttatttaggattatcacaaaattataaaacagcc

SEQ ID NO: 38395 - DNA, 1263 bp, Homo sapiens
ctgcagaaaaaaggcgtaaagcggaaagcagatactaccacccctacacctacagccatcttggctcctggttctccagctagccctcctgggagtcttgagcctaaggcagcacggcttccccctatgcgtagagagagtggtcgccccatcaagcccccacgcaaagacttgcctgactctcagcaacaacaccagagctctaagaaaggaaagctttcagaacagttaaaacattgcaatggcattttgaaggagttactctctaagaagcatgctgcctatgcttggcctttctataaaccagtggatgcttctgcacttggcctgcatgactaccatgacatcattaagcaccccatggacctcagcactgtcaaggtacccactgcatggggcagatgggatgctcaggcagtgatgggagcctaggtgcaaaacaataagtctccttatgtgggcacacagcagtctttggttcttggcattttacttttataaaataatagtggaacagaaggtctggtgttttgagaatttgtatttcttggagtttgaaacagtagggtggggtttctttgtcttgagaaaaatactgtctataattaagtactaatgtggcagtgttgggttaaggaagttatagggtggaaaaacaggcataggccacctctctgtcacttagaaatgatttctttttctagacataaatatttcttcaacccacccaaattcctttgacttcaaacttgaaccccagggcacagatccttaaggtcatccccactgtgctctcaagagagggctcttcttgtggtgtctggggttggcagggaaaggtgagtcttcctgcctgtgcagcttctgatgctgcctccttctgcagcggaagatggagaaccgtgattaccgggatgcacaggagtttgctgctgatgtacggcttatgttctccaactgctataagtacaatcccccagatcacgatgttgtggcaatggcacgaaagctacaggtgagtggaaaggttggagtttgaaaaataaatggtatggggagttattttgtcatgtgtgctgcatagcctcaacgtgagggtctcactgttctgtacagttgtaaattggagctatatcacttggtggctgggtatgtagggcactgtttatcagcatagttttgagtttgtgcctctttgtaggatgtatttgagttccgttatgccaagatgccagatgaaccactagaaccagggcctttacc

SEQ ID NO: 38396 - DNA, 1015 bp, Homo sapiens
tgctctgtttcactatacagtgtcccagtagcccacctcttacttggccattgaatggaaaaacagaagctccactctgggcaggaaataggatcactgaattataacagtgggaacatactggaagaggttaatgaagcttcttttgctgacaactctttttgcccttaggctccccaaaaaggccacaaagacagccccacctgccctgcctacaggttatgattcagaggaggaggaagagagcaggcccatgagttacgatgagaagcggcagctgagcctggacatcaacaaattacctggggagaagctgggccgagttgtgcatataatccaagccagggagccctctttacgtgattcaaacccagaagagattgagattgattttgaaacactcaagccatccacacttagagagcttgagcgctatgtcctttcctgcctacgtaagaaaccccggaagccctacagtacgtatgaaatgaggttcatctcatggttctgaggacagttgaggaaagatggtggggtctgtttgcattcaggattgtcagctcccaggataatgggatgtgttggttggcagctgacgttcaagaagggaacttgggaaccttaggggcccataataagatgcttggggcaatcttaatgtatcctgataaatttctttcattagccattaagaagcctgtgggaaagacaaaggaggaactggctttggagaaaaagcgggaattagaaaagcggttacaagatgtcagcggacagctcaattctactaaaaagccccccaagaaaggtgagtatatactttcatgccactacagattgactccatcctgccttcttgactgtcttttattgacaaatgaagattcagacttgaacgtctttaactttcgaatttgttctgcagcgaatgagaaaacagagtcatcctctgcacagcaagtagcagtgtcacgccttagcgcttccagctccagctcagattccagctcctcct

SEQ ID NO: 38397 - DNA, 1390 bp, Homo sapiens
ggggtcaggccagatggggcaggaaggctccgcaggaccggacccctagaccaccctgccccacctgccccttccccctttgctgtgacacttcttcatctcacccccccccgcccccctctaggagagctggctctgcagtgggggagggatgcagggacatttactgaaggagggacatggacaaaacaacattgaattcccagccccattggggagtgatctcttggacacagagcccccattcaaaatggggcagggcaagggtgggagtgtgcaaagccctgatctggagttacctgaggccacagctgccctattcacttctaagggccctgttttgagattgtttgttctaatttattttaagctaggtaaggctggggggagggtggggccgtggtcccctcagcctccatggggagggaagaagggggagctctttttttacgttgatttttttttttctactctgttttccctttttccttccgctccatttggggccctgggggtttcagtcatctccccatttggtcccctggactgtctttgttgattctaacttgtaaataaagaaaatattattcaagttttgagttaccttaatatttgcttttgtagtgtttcaaaaggaacatcataagaattgtcttgataattttgagggaaatattactgcagtgagaaaaggcaatagctaacctataattggattgtcttaatttttaaaccagtaggcttttgctgtgtttttaataaagtaaatatgacttttgtaaattgagtccttagaagtaatctttaggtctacaatttgctcttgtttaaatgaaaaatagtactgtggctcattcatgctttaaccaagaactcaaaattttgaggtaggctttaggtttttccctgtggcactggatgtgtgaattttctcctgagcagacttaaaatatgagaaaagggtgggaggtagccgaacataagtactttatgcattgagtttattgccttttaaaaggaaattggcctgtaatcccagcactttgggaggccgaggcgggcagatcacgaggtcaggagatcgagaccatggtgaaaccctgtctactaaaaaaaaattagctgggcgaggtggcgggtacctgtagtcccagctactcgggaggctgaggcagcagaatggcgtgaactcgggaggcggggttcagtgagccgagatcgcgccactgcactccagcctgggtggtagacactccgtctcaaaaaaaaaagtaattgggcctactacattgttaaacattgttaaattttgctgccatggtcacacacaaatttacagatagtttattagtagaatactaaagagtattccaacgattaaatcacaaaa

SEQ ID NO: 38398 - DNA, 1025 bp, Homo sapiens
cattgtaacactgaggctcctccaggaagggaatctcaggcatgaacccctctttcaatgtcagccttcaggcaagtggggaaagagcattgcttggctccattgctgaaggaagcagagatcaactctgttatttatcagcctgagacgcatcctctcaccataatttttctctcctggacttacaggaaggaggctggcaacctgggataacttgtcttttacccccacagggttcctgagctcactgaaaagactattgtgccttaggaaaagcatttgctgtgtttcgttagcatctggctccaggacagaccttcaacttccaaattggatactgctgccaagaagttgctctgaagtcagtttctatcattctgctctttgattcaaagcactgtttctctcactgggcctccaaccatgttcccttcttcttagcaccacaaataatcaaaacccaacatgactgtttgttttcctttaaaaatatgcaccaaatcatctctcatcacttttctctgagggttttagtagacagtaggagttaataaagaagttcattttggtttaaacataggaaagaagagaaccatgaaaatggggatatgttaactattgtataatggggcctgttacacatgacactcttctgaattgactgtatttcagtgagctgcccccaaatcaagtttagtgccctcatccatttatgtctcagaccactattcttaactattcaatggtgagcagactgcaaatctgcctgataggacccatattcccacagcactaattcaacatataccttactgagagcatgttttatcattaccattaagaagttaaatgaacatcagaatttaaaatcataaatataatctaatacactttaaccattttctttgtgtgccatcacaaatactccttaaccaaatacggcttggacttttgaatgcatccaatagacgtcatttgtcgtctaagtctgcattcatccaccagcctaggcctcctgtcttaat

SEQ ID NO: 38399 - DNA, 1081 bp, Homo sapiens
tgatctcttaagatttttcagaaattgtctattctagactgctccctcttctctttttattttgatgtttagtttccaaatccatgtcccctatacctataccccaccagccacttctaaaccactgataatctttagctattggtgagtgcctttttctcttttctgcccatcaggcgatgcgtctgcaactactgacagcagtaggggcactggcaggcacagcctgtgcccttctcactgaaggaggagcagtgggcagtgaaattgcaggtggtgcaggtcctggctgggtcctgccatttactgcaggtggctttatctacgtagcaacagtgtctgtgttgcccgagctgctgagggaggcatcaccattgcaatcacttctggaggtgctggggctgctggggggagttatcatgatggtgctgattgcccaccttgagtgaggggtggataaactacccctgccccaaacctctacccctaactccaggtcaggggtgcgtagaggttgggggccctggccagggacatctgccaaaggaaggaactgtagcctgggagaatggttactttggcattagggccttcaagggctggcagtcttacagaggctggagcggtgagaatgagaggccagagggaccatagtgttgggcactgtctgaccatgttgcatttggaaggctaaatggggccatgaagaaggctggaagggacagggggtgatggcagcctacctggtgtcccctaccccacctgttctcggagaaccaagttgctacacaggaagttctccaaggtccagtttcctttctcccaccagttggtggaggcttcagggaagaccagagtcctggacagagagggtaacaggaggagtcggggataaacatcaaacatcaatcgtgtgtcctgatttgggagtgattggggggatggggtgggagagggttagttggtattctcatggcctgattttttttgtttctattccttttatatcactgtgtttgaatcgagggggaggggtggtaaccggaaataaagacctccgatcttccgccccacatgcagt

SEQ ID NO: 38400 - DNA, 1045 bp, Homo sapiens
tcctccctcccattccaggtatgtgaagacaactgggaatgccacagtggaccacctctccaagtacttggccctgcgcattgccctcgagcggaggcaacagcaggaagcaggggagccaggagggcctggagggggcgcctctgacaccggaggacctgatgggtgtggcggggagggtgggggtgccggaggaggtgacggtcctgaggagcctgctttgcccagcctggagggcgtcagtgaaaagcagtacaccatctacatcgcacctggaggcggggcgttcacggtgagagcttctgagggcagtggtagaagaggggagaggagggagggtggtctgggccacatagaaccatgagcctggtctaactcatcagcactcttcccctatacatcctctatctctttctatgtcccctctcctttcccatcatccatgtccttttttgccttatcgcttttattattccttttttctttcctcctcccttggtcaccttttgcctctcattcatttccttttccatcttctccaactttcctctctcttttcccctctctcccttttaccccctcctcagacgttgaatggctcgctgaccctggagctggtgaatgagaaattctggaaggtgtcccggccactggagctgtgctatgctcccaccaaggatccaaagtgaccccaccaggggacagccagaggaaggggaccatggggtatccctgtgtcctggtctatcaccccagcttctttgtcccccagtacccccagcccagccagccaataagaggacacaaatgaggacacgtggcttttatacaaagtatctatatgagattcttctatattgtacagagtggggcaaaacacgcccccatctgctgccttttctattgccctgcaacgtcccatctatacgaggtgttggagaaggtgaagaaccctcccattcacgcccgcctaccaacaacaaacgtgcttttttcctctttgaaacctgcagttctgtgtgtctgtttatcaggggtgtacaag

SEQ ID NO: 38401 - DNA, 1061 bp, Homo sapiens
agcggcggccattccccgcagcctcacttccggcaactgtcagtcccggcgagtccgttccccggagtggagctacaagtcccaaagggtcttcctcagcgcgaaatcgttcccagatatttgagttaagttgtttgactccagctgtcccctttcagctctaaccacttcacccaactgcaaatggaaatatggaagtctgaaacacaaactagccccggaaccttcgctgttctcttacctatgaaccttacgaactgtaaagaaaggcgcaccggaagttgtggtacccaagccatactctcataaatccagccaggtcgcgctgaaacagtttccggaagcacttctcctagatcgcaccgcctcttcctcctggaagctatataatgatatcgcgtcacttccgctctctcttccacaggaggcctacacgccgccgcttgtgctgcagccatggtaagactggaatccgtgccgtgatccagcggcatcgcagctcgggcaaggaaagccggctgtcagggttctggaaacgtcctgccctgagggcctgcgactttctgtatggagccttggatcgcgtccctggaaagggacaccaaagatttccaattccggagagcgggcccgaggaagggtcactgctcgggcgcacgaaagctgtctaaggcttgggcgtatatggggaactctggcttttgccacgcacttttgggaatgggcaggagacctgcttcctctctccagaggttgcattttcccaagcttgaacgcttcatgtgcctactctgcaggactgaggagtttgctctgtggtgtgaaaacctaaggaatggggggcgggtgtcttgccacttgtgtgacaggcttaacctttttgtatgaagttcgtttgccttatcggccttactgtttgatagtttactgtgtctgatttcttcccccgtactttttcaactagtctctagtgatccctgaaaagttccagcatattttgcgagtactcaacaccaacatcgatgggcggcggaaaatagcctttgccatcactgccatta

SEQ ID NO: 38402 - DNA, 1051 bp, Homo sapiens
gccactgcacccagccacatttattttttgagactgtcgcccaggctggagtggcggaatcactcttcactgcagcctcgacctccagggctcaagtcaatcctcctacctcaactttccaagtagttggggctacaggtgtgcaccaccacatctggctaatctggatcttgctgtgttgtccaggctggtcttgaactcctgggctcagtgatcctccagcctcagcctcctaaagtgctgggattacaggcatataggcatgagccacggtgaagccaacccttgatctctttcttgcagataggaactgccatttgttttagtttcctggagcctactgtaacaagttcatataaactaagcagaaaattactcttggcgctggaggcacttaagaatcctaccttgcctcttcctgtcttctggtggttgtcagtaatccttagtgttccttggcttgtagctgcattactccaatctgttgctgtcatctcatggtcctcttcgtgtctctctcatgatttgtcattggatctagagcccaccctaatcaaatataacgtcattttacctaattatttccgtaacgaccttatttccaaatagggccacattctgatgttctagttggacaaaatgaggggcagggctcagtattcagttcctccttcactctccaaatcactttggttcatgagttcagatggcatgggtgctagtgctggtgttgatgtgatgctaccaatgtaagcattagtttctttttataataacttgggcagtcagttctgggcactgacaaaattgagtttgtgatcttggaatactttgattatggggatacagtgatttgcctaaataattgtgacccttagagattctgaggaactgacagcccaataccttaatcaaagcctgtaactcataagaccctggtttactgcatcagcttggagtggcaggccccttgttctcctaaatgcaagaatcagaaggcacttagtgacaactacatatgctgagcaatgggggaaaaaaaagatactgc

SEQ ID NO: 38403 - DNA, 1057 bp, Homo sapiens
aagttacttttttctttttttgagacggggtctcactgtcgcccaggttagagtgtggttgcgtgatcttggcttgctgcaacctccacctcctaggttcaagctattctgctgcagcctcccaagtagctgggattacaggcacctgccaccatgctcagcaacttttcttgtatttttagtagagacagggtttcaccatgttggccaggctggttttgaactcctgccctcaatgtcatctgcccacttgggcctcccaaagtgctgggattacaggcgtgagccactgcgaccggcccaaagttaaccttctgtcgaacggtttatatctggaaaggtgggtgaggaaagggtgacctaggggattgcaaaatagattattgcagatcctacctttgtgagctttttgaatgaggctataaaggaatttaaaaatcagattcaacactaattccgaaacccctcacttcattcagggtgtgggccgaagatatgctcatgtggtgttgaggaaagcagacattgacctcaccaagagggcgggagaactcactgaggatgaggtgaggacaaggaagggggctgggggtggggtcagcctcagaaaggggtccatctagatctgaccttggtctgcctgccaggtggaacgtgtgatcaccattatgcagaatccacgccagtacaagatcccagactggttcttgaacagacagaaggatgtaaaggatggaaaatacagccaggtgtgtactgaaatgagggcaggattagaggaagggtggagggtcctaacagaattgggcataggaggtcaggggataaaacatcccttgccccctcctctgaatccaggtcctagccaatggtctggacaacaagctccgtgaagacctggagcgactgaagaagattcgggcccatagagggctgcgtcacttctgggggtgagtggggggtctcatctccctgcctacctcgactcagcattcctcctactcgctcttctttttccccaaccttttgtttctgctgtgcatgacctgtgactctt

SEQ ID NO: 38404 - DNA, 1063 bp, Homo sapiens
tctctttcttgcgtttagcactctccatagtgagtcctactaatttctccctttctgcttgtctcccttgtctctccttagtaagcgatacgaatcccagcttcgggatcttgagcggcagtcagagcaacagagggagacccttgctcagctgcagcaggagttccagcgggcccaggcagcaaaggcaggggctcctggcaaggcctgaccccatggtggggggaggggaggggaggggagggaatgaggcagctctaggatctatactgtagctaataaaatgtaaaaacacctggctctgtttcctgaccaggcacttctgtcatatccccacagccccttccaccttaacacacaccacctgtattaccccctcaggttcaaactcttgcacttggaatctctttgtggcacagtgttctttcttgaaagtgaaatcctaaatgtcttcaaacctacttcttgcctgtatatacaacccttaactctccctcatcttggttggcatgattcttttggaagggcatttgcaacataccatattgctaggaatgtcggtttaattgaaaaagaatacacagttctctaacctgaggccccaggatgaaatgtggttaccctccttgccaacagccctggcatctctattagtacttttcagcctctgtcttcctagaatttgcttgaatgtagctttaaactgacttaaaatcccagcatgtaatgctttatggtattataagtcctcccaagtttatatgttgtccataaagttgttctgccatttccttgtcctaaaattgttttatacacatttgcagcaagggaccagtggtagagaggttactggagagaaactgttctgaggaaacttttttcaccaatacctcactttttgctctgttcatggggacagaaaacattgtgccccttcctgttccatggcatctaccttcagccaattccccacccccactcatagcagccagttcatatgtactgcaaggacaggggagtagaattcaggtagtgttttggtttattatcttagtgttgtcac

SEQ ID NO: 38405 - DNA, 1090 bp, Homo sapiens
accttccggccacagagagagaatatcccctctcttaaacacacacagccacatccaactcacaaccacttccctccagcctctctgactcttcgatccctccctgccttcctcctcaatctatcatggcctaagcactccacttgaccctttaaattgaatttctcaggtagacaacgagtctgctttgcagatgagaggactggatagtatccaattcgacaggattccttatccagagaggataaggaacttgtccaaggtctcagtatttgtttatttaacaaactctagcaatagagcaggagcccatcacaaaacctagatgtgcttacgtttcaggcacgttctaagcacttgacaaatacaaattcatttaacccttataacagatcaatgtagatgctatttctagtttcccatttacagatcactgaggcgacttggcacagaaacagatctggctctgtcccacactcagctatttgtgccttacagccccttgcaaggggcgggggggtctgtccgaccctgcagcccacttgttacatcattgcaatgacacacacacacaccactgacctccaactcatccttggaggctgcatccagcatcacaaggtccttcaggaaggtgccaaggtatgggaccacaccctgaagtcaggggtcagggtcagaagtgcctgccattgacgtgagggccctccatccctccgcacttgccctcctcattgcctcagagaacagatttcattctcctcacccctctgtgcctcccttacccatccttcaggctgctcccccaaaacatactcctcaccccttcataatcaccacccccacgcccaccaccccgctagtcactcaccccaccccgggagccagacctcggggccttcttggagtgtggctccagaggagactgcagcttcacctcctggtggtgacaaaataaaagagacatgggggagcagtagggaacaaggagaggtgggaatgccacaaaccaggctctcacctgcacgagcagctcccgactctgggaataattatcctcctcggagaaaatctggcagaggctggaaaa

SEQ ID NO: 38406 - DNA, 1392 bp, Homo sapiens
tcctatagaatatactattctggattttggctggttgcttcctctttcccccatactttcacttatttatcatatttgggtgttgtcaacctgacccatccatttacaagctccttattgactttttcacctagtgattttatccagcagtgaccatacctggatctttatttcattaaggggtttctaaatggggatttttctaatcttagttgttctgcattggttagtcacgattcttttatgaagacatttgccttgccatctacttggtttctctgaaattcaattcatacaggaaaaacaagataaatgctgaattatttattgattttcagtattgagttgatatcctagcagcttccaaaggtgaccaatgaatgtttatctgagggttatttttatttttattttttttgagacagggacttgctctgttgcccagactggaattcagtggctcaatcatagctcattgtagccaccaaaagtgttgggattataggcgtgagccacccagcccggccacagtcgttcttctttctgatgctcaaattgccccatctttagccaataggaacctcctggccgggcgcggtggctcatgcctgtaaccccagcactttgggaggctgaggtgggtggatcacgaggtcaggagatcgagaccatcctaacacggtgaaaccccgtctctactaaaaatacaaaaaattcaccgggcgtggtggcgggcgcctgtagtctcagctactttgggagtctgaggcagaatggcttgaacccgggaggtggagcttgcagtgagccgagatcgcgccactgcactccagcctgggcgacagagcaagactccgtctcaacaacaacaacaaaaaaaagagcctccttcagattggtgccagtgtcctttagacagaactctagtagtcttttcagattcaacttgtacatttccttccccagacttcaactgatccattttctaaggagtcctagttcctaaatgggtgttattactattttatctcggtttaagtgttttacagtgggagaggttggaggtctctagtacagggtattgctggaaatgaaagcctcctttctctgctcctgtattttcttctggggcttccatctcttctcaagccttttcacctcctccaaacctagtgtgcagaggagaacaaaccataactggcaccagcctgaaccagcctttggaggccttatttcggtatttctgagggcagccctagcattggaggatgggagatcttgggaaaaatgttgtattggttacgctgcaaacttttatcctgtctaaccccctgcccccaggtgaaccagtgtgttattggtactgctcaggccaacaggaagtgaagacgg

SEQ ID NO: 38407 - DNA, 1051 bp, Homo sapiens
cccctcccctccagccccaactggggccctaggagtctgagaaagagggcaggagggggagagagggagtgagagtgagaaaaagagtgtgtgtctgtgtgtgtctccccacctctttggtttcccccttcttggctctgcccccctgcttctgagaccagccctcccaccttctccaagctgtgtgtgtgtgtatatgtgtgtgtgtgtgtgcttgcactgtacccgtgggagcaaggaagacaaactggtattagggttcctatccccctttcctcgcctctggagacttcccttttccccatcccactttcatccaggggctctctaccagctgagggatgagtaggtagaactgaccctgccccaacccaccccatccccatttcccccccagcaaggcttcctgagccgacggctaaaaagctccatcaaacgaacgaagtcacaacccaaacttgaccggaccagcagctttcgccagatcctgcctcgcttccgaagtgctgaccatgaccggtacaggggctggagcatgtgggatgagattgatgtaatgtagggtctcctgtgtgagatgcagagggagggggttatctgtgtgcaaaggttgaaggattcaactcaagttggttgggggatgtcatggcacaggggacagaacagaaaagaactagaatagggatctgtgagcagcaggagaggggtagggtggcagagagaagacagacagacaggctggaaagggaatgaaggtgaagccaaggagggactcctcagggactcctcaggccaagaaggatgggctctagcccaggatcaaaggagctgtacaggaggagagtgaccctggaggaatgtttaaggaatgcagggaaggggttggtaggtgagtgagcaataggctgtaggtggaagggtgtcagggaaggtcaggaaatacaggggcagcaggttggagtggggctgggggtggctgaatgaatggatgatggctagggctcaaggacctcatcagtgagggaagagacagtatagagcatggcagaga

SEQ ID NO: 38408 - DNA, 1031 bp, Homo sapiens
acatagttttctggcgggataggggaggtaggatggatggggtttggggtgggtaggccatgggaggggagaagcccctccttggcaccccctcttccctgactgctgtcccctacccagccttgcccccttcatccttttgcgtttggtattgagactctcctagactctactcctctttcttttgtatggacagttccccttcagtcccatccccctacacatacacccagccggggccaaatttatacttatataaaagttgtaaatatgtgaaattttatccctgtgccctttccccacctcaggccctacccctggaccctccccaaccttccttctctcttctttggctgttgtaattatctggggtttgtactgtacatatccggggtgtgtgtgtgtgggctgggggcaacccttctgtacagagcttcctggccccctccccccccgcccctctgcttccctccccacccaccacctcaagggtagggagttgctcttcctacctgttttattttgttttctcgttctccctccccaccccactcccagccttatctatcccccctcactgtccccttttctccactcccagccccatttcctttttttctggagtgtgtggtgaaacagaaaaaaacatgtttaataaacggagattgttcttttatcgctgtgccgactttcttaggcagggctctccagacctgtacggtggtaagatctgctttctgaaaggaagctgacagcctgagaggaaaaccgtatatccccacctgatgccacactctcctcatagaatgtcactctcccctcccaatgagattttttatattttagagcaggagttttgcaccggccaaacttctccaatctaactctcccctcaccactgtgtcacttagtccgaggccaggaacagcggcgttatctgataaaagagttcatgtatatatccacatttatctcttttaaaaattacctagaaataaggtttctttaattgctggttaaaatgctcccgt

SEQ ID NO: 38409 - DNA, 1261 bp, Homo sapiens
ctgaaactcttgggggtagatggatttggtattcagattgtttttcattttagaaaggtaaacttgcattttgtaatcatagacattgagtatttttgtgtaatgcatgtgtttctatgaaatgtgtgcatcttgacattcaatgggataaatagttaaatagcctcatttgtccaaatgaattttggtcccaagtgtacaaacaagctttggttttggaagcgtggacaaggctgcccgtgtcagtgcagtggtcaggacggggcctgggcgcagggctagctctggctgttcttatctggcttcagcctcctcatctggaggggcaccagtggctcctgtcccacagctgttgagggtgtggagtagggtggcagctgtggcagtgttggggaggtaggccggcaggcagcatgacgtgctctgtggtgcactccccgagtcctttccctcccacccacctgcaggaactcgtacgtccggctgcggcacctctgcaccaacacgtggattcagagcaccaatgtgcccattgacatcgaggaggagcggcccatccggctcatggtgcgtgtccctggggtgggggtggggctggggccagggccggagcttgttcccaggtgccctgctgacccctgtctctgcagctgggcacctgccccaccaaggaggacaaggaggcctttgccatcgtgtcagtgcccgtgtctgagatccgagacctggactttgccaatgacgccagctccatgctggccagtgccgtggagaaactcaacgagggcttcatcagccagaatgaccgcaggtgggctgcagtggcacaggggttttctgagtgatcttgccctcccagggcctgcatttcatgaagaaaggagtcatgaagcagaagctgggcaaactggggagagagtaggggactggcccctgtggggccctggctgagcctgggaccctggagttgggtgcctcacggcttaggtactcccagaactaaccctatgatggagctggttactgtgttgagcctggtctcaaggccagttatgatgggtctgaggctcagagaggttacgagacttgctcggggtcacagttagtaagtggcagagtcaggatgcaaatgcagcccccttcacaccagactccccgccttgtgccctgtacttcctttccaggttgggatattctgagattctgtgtcttggggccactttggaatccagggtgggtggggctgggcgtgtttggagag

SEQ ID NO: 38410 - DNA, 1074 bp, Homo sapiens
gtccatgattagattacactaaattacagcatacagatatcaggcaattactctttgcttttaactattcaatttcatggcaaatccacatagcgcagtaatgctaaaatcacaccgatgtggttaccaagaaaatacctcatcatctccattttgtgaagctaggttcaagttgcactgtaatgacctgtagtcctgttaagtgtaaagtacattccagatgaacatggggtaatccgtacctctctgtaattgccagatatctggagagattcttgcagatgttgctggataagcctgggtgagatgtgaagaggaatggcatctttgctctcctggttactctggctaccctccctgtctctgatcctggttggtctctggtcctactcattctattgctttaaccaggagcatgtctccttttcttctgttttgtgaaaacatagtcattttctcttcactcagctcacagaatcctccccaacctcctcccaattttaatttcttccaaagctgtggatatcccataagcaatcaagtcggctgtcctggaaactggaggagcttgttggtgaaaaaagaattatttgagccaattgtgagaaatcgaacagtggcaggaggaggaaaacgagagaagaaaggagccgacacatctaaacaagcagccagggcactgtgcatacagatgtaggtggtagctgggtccctgttgcggctcattactgagaagcacatcagaggccgcggggtgagggttggggctgccgggcggcaatgctgagctttgaacggggcttttctgcagaatggacagcaccctctcccttccccagtgctgtagttgctgaacccattcccacctaaacagtgcagacctcctgggcagagtctcctgtgggccccatgtccctccatggtgggtgtctatttcagtgagaggctcttcaacacccagaatctcagggaaaattccccagccagtgctgggctcccccccaacccagaaatgggcaccccctctggtgataggggaaggcggtctccctacagaggcagattccagcagag

SEQ ID NO: 38411 - DNA, 1472 bp, Homo sapiens
gtgccccctctggcaggaagtggggccgggtgcacccgcgtggcggtgcatgcggtcggggtgcgctgctttcccgcgcctgcaggagcggcctgcgcccctccccccgcgcgccctggccccgggtcccgccggccggcctgcaacggccgggcgcagacacttgcagagtcaccctcgggccgggtctggagcctgatgcctcgggggtttagccctagccgctaggcgggtaggcaaagtgtcgggttgaaagggtctccgggaacctacttcttcctgctcgccaacttgctgtgtgaccttaggcaactcaaggcttctctgggctacttttttacgggggacggggaagaaaacaagggaacccccaagataatttcctagggcctttcctgcagagtccttaagtatttgaggagcacagtttgcatgcacagtgtatggaggagacaggcttgaggcccaagcgggcttattacaaagtgagggattggggttaggccctaaatgtagttcctccaagacaggcctctgatgttcagaaacaggtggaaaagacgaacgtttcttggcctcactggaaagggcctcgggccttcatttagttcgtggggggttggctgaggggattaaagggtccccagcagcaagaggtggggggaggcaccagatggtatgagagcttccagggagacccgccaagatctccaggcaggccgggccaggctctctgggattccggactggcttcgcccaactggaaccccctcgatgagggggccccaggcagaccttatatgaggtcagcactcgtttagttgattaattttgatgtttagtttgaagggggacctgtggtgtaatataagattctaatcactgcctgtaattgcagagcaggccaagccactaatgacggagcaggataaatcaccaaccaccttgtttaaaagggtctccaagtctgaaacattataagatagaataattaccaaagtcctgctgtctggagggtctcttgatgcttgaaaatggaggtcctgggccctctagaaatcacaagtttgcaaaaatgtttttttcctctcattggggtaaaaactctttttcttcttttttttttttcttttaaattagacatgggagtcccaccgtattgtccaggctggtctcgaactcctgacctcaagcagtcctcctgctttggcatcccaaagtgctgggattacaggcatgagtcacctcacctggcccataaatcattttcaaatggtctagttcttattttggttagagtgaagatttctttctattattttaagtttttctaaactattacctagtttgatccttgaagcagtcaggaggtagttcaggcaggtaccttataattaccttgatcttacagattgagaggggttcagaagtggagccgcttgtcccaccccttaccatggcaggcagggatt

SEQ ID NO: 38412 - DNA, 1044 bp, Homo sapiens
cttgtcctttttgacttttgaatgtcgttagatgtttatgtagctgaatccactgtatagattaaatgagcttagactctattttacataaaagcacaaaatatcgcacagctttattttatttatttatttatttatttatttatttattttttgagacggagtctcgctctgtctcccaggctggagtgcagtggcgccatctccgctcactgcaagctctggctcactgcaagctccgcctcccggttcacgccattctcctgcctcagtctccggagtagctgggactacaggcgcccgccgccacacctggctagttttttgtatttttagtagagacggagtttcatcgtgttagccaggatggtctcgatctcctgacctcatgatccacccacctcggcctccccaagtgctgggattacaggcgtgagccaccatgcctggcctgcacagctttaaactatagtgaatattttaggaaactgccatgagggaagatcgttttgaactttaccaagaatttgtcaccgttttggaaaatgctgttactcttggtattggaatcaccaatatgataaagttgtatatgcctgcatttttattatttattatttatttatttgtttatttttgagatggagttttgctcttgttgccacggctggagtgcaacggtgcgatcgtagctcactgcaacctctgcctcccggggttcaagcaattctcctgcctcagcctcctgagtagctgggattacaggtgcccaccaccaagcccggctaattttttttttttttgagacggagtcttgccatgttgcccaggctggagtgtaatggtgcgatctcggctcactgaaacctctgcctcccgggttcaagcgattctcccgcctcagcctcccaagtagctgggattacaggcacccaccaccatgctcagcttatttttgtagagatggggtttcaccatgttggccaggctggtcttgaactcctgacctcaggtgatccgcctgcctcggcctcccaaagtact

SEQ ID NO: 38413 - DNA, 1052 bp, Homo sapiens
agcgtacatgttggtcaaagttagggtcagttctgctcagaaactaacgacagccttactgtatgaattttcttatcctcagtttcttccttgggcagttttcaaagatatatgctacacttctctaaatagctctttgaggcagtaacatggataacctattctccccccctccccaagatggagttttgctctgttacccaggctggagtgcagtggcgcaatcttagctcactgcaacctcctcctcctggatcaagcgattcttctgcctcagctttctgagtagctggattacaggctcctgccaccacgcccggctaatttttgtacttttagcagagacagggtttcaccttgttggccaggttggtttcgaactcctgacctcaagtgatccacctgcctcggcctcccaaagtgctgagattacaggcatgacccattgcacccagcagataacctattcttatccaatagtgaataacaagcaatgcctgttagtggaataggccttccttttctgagcattagcaagtacattttcactttaggtaatctagagcctgcatgtaggttttaacactaggaatctaatatttagagtttatcaattattgtcctagatgtaagtttgggaatggtcaagaagcggaagtaaaggaaattaagggaactgtgttaggatgacaagaactgttcctaacaaagtgagacatgccaatacatgagtcatgaggtatagtatcttcaggactagtgtagggaaagaatttgggccctaaccaccgtgggagctgaatggtcaaatgaaagcgggtagagggttgctatccctgagatagagtcactgaggagctctaagttctaattctagaatgattacaggtgtgagccactgcgcctggcctgaagatattcacttctaggaaagaagactggctcaagccaaacagattattagggcttcagctaaacaggctgggttttagcaagtctttgtgcttagaggagggaattagaatgttcagcaaggctactgttgcgaatta

SEQ ID NO: 38414 - DNA, 1011 bp, Homo sapiens
cagaagacattgtggagtactttggttggcttcccttaatcacaggcattccttgggcctcagccctcctgtggtagccctgttgtttgaggcagtgctgttcagtctttagggtacagtagaaccacatgtcatacttaataaaatacagatgttgggcctctccccaaacacctctaaattagagtcttcagtggtagagttcaagcagtgtaaacttttttttcccctcaccaaagttccttaggcaatcctgatgcttatcagaggttgaaaacgactagggtgagattttaggaaagtaaattcaactatagaaaacctcagaatttgtagatttgggtcagtttaaatatttattgtgtgtaaatgttctcttcccaagcaaggttatgttgtaatctcgacatacttagaacaactgccattatatatgtgtttgtatttattcagaatgaaaaaaactaattgactgattgctttcctttatgagccctggggaaaccacttaattttctgcttaacctgtttgagtttccacattcgtgaaattgagttaaatgatgtctcactcattacctcaaaagttgttgtcaggctcaaatgagccaataggctgaatttggaggaccttgattataggctaatattaagttttattaccctgctgcttgtttcttcaaaactatctttgtgtttcctttaaactctccattgccatcagttcttggtttttgatgcttatatatgatattaaatagacttttctcttgctggcttatcttctctaaaggctttgtttaccttataataagatctagattcactggccaggcacagtggctcatgactgtaatctcaatactttgggaggctgaggtgagaggattgcttgagcttaggagtttgagaccagcctgggcaacatggcgaaacccgtctctacaaaaaatttgaaaattagccagagatcagctgcagtgggctcacgcctatagtcctatcactttg

SEQ ID NO: 38415 - DNA, 1052 bp, Homo sapiens
gtttcgccatgttggccaggctggtctcaaactcctggcatcaagtgatccacctgtcttggcctgccaaaggactacaggcatgcaccaccacaactggctaattataggcgtgagccactgtgcccagccagtttttttttttatttgaaattacgatgaggcttacaaataacatcttataccccattattttaaactgatgacaacttaacactgattacaaaaacaaaccaactaacaaacaagcaaagaggaaattaacaaaaactctaatttcatctccctggtttttaactttttgttgtttttctatatattttattataccgtctatgtcttgaaaagttattgtagttatttttgataggctcatcttttagtctttctattcaagatatgagtagttcatacaccataatcacagggttataatattctgtgtttgtctctgtaattattatttccagtgagttttataccatcagatgatttcttattgctcgttaacgtccttttctttcagattgaaagaactccctttagcatttcttataggacacatctggtgttgatgaaatccagtttgtttgcaaaagtatttctccttcatgtttgaagcatattttcatggatatactattctaggataaaagttttctcctggtcctgcgcagtggctcatgcctttaataatcccagcactttgggaggctgaggcaggcggatcacctgagtttgggaatttgagaccagcctgaccaacatggagaaaccctgtctctactaaaagaaatacaaaattagccgggtgtggtggtgcattcctgtaatcccagctactcaggaggctgaggcaggagaatcgcttgaacctgggaggtggaggttgtggtgagccaagatcgtgccactgcactccagcctgggtgacaagagcaaaactcggtctcaaaaaaaaaaaaaaagtttttttccttcatcactttaaatatgtcatgcctctctctgctagcagactgagaagtctgctgccagacatattgaagctc

SEQ ID NO: 38416 - DNA, 1056 bp, Homo sapiens
ctgtgttgtcactggaaaataggagctttttatctgttaataaaatgagaaacttttaggaattacctctgtaagttaaactggttctttcagtttattgaaataatagaaacttaggaaatgatcctttaagagtatctaggctgggcacagtggctgacgcctgtaatcccagcactttgggaggccgaggcgggtggatcacttgaggtcgagagttggagactagcctggccaacatggtaaaaacctgtctctactaaaaatagaaaaattagctgggcttagcggcaggtgcttgtaatctcaactactcgggaggctgaggcaggagaattgtttgaaccggggaggtggaggatgcagtgagctgagattgcgccactgcattccagcctgggcgacagcgagactccatctcaaaaaaaagagagaatgtcctatttatttatttattttatattgacaaattataattgtatctatgtggtattaatactaagcgatcctatgatatatacacacacacatacagtgtgggatttttgagccaaactaattaacatctccgtcacctcaaatacttaccatttatttctcctgtttaactgaaacattacacgttcactaacatttcctcctaacccctcccatttcccttttcagcctctgttaagcaccatcctgctctctgcttttatgagtacagttgttttacattccatgtgtaagtgagcacatgctatttttgtctttcagtgcctggcttatctcatttagcatattgtctgtcctccagattcatctacgttatcacaaatgacaggatttccctctcataaggctgaatagtattccattgtgtgtttgtaccacattttctttatctgttcattggttgatgaacacataagttgatcccataacttggctgttgtgaataatgttgtagtaaacacaggaatggagatagttctttgatatactttttttcatattccttggatatatacccagaagtggatatggtaactctatttttagctttgaggaccc

SEQ ID NO: 38417 - DNA, 1064 bp, Homo sapiens
ggcttgtcagcctgttggtttctctgccttttctcctaaaagtgaataggtgacacctaggaactgtttgggagttggcagcagtttgtcacttagaacctttacttgttttctccagctgctgctcaggacaaaccatcagctgaagtacttaaaagtgagaagagacagcccccaaaagaacaggtgtttttggtgcccacaggagaggtttttgaacagcaggtgaggacctaacagaacagtagctgcccataacccttgggggctatacttgtgaaactggtaaaacccggggttggggggcaaaaaggttgcgtgtgctgcctgcatgtgggtgttttgggttcctgtcacctagcagcggcttctagaagtgctgactagaggataaatgtcaggagctggagacgaatggttgctgaggacatactgcacctgccaatgaactatgaagagggaatcaaggtcttagaaaagatatggttatcttaatcattgacataacttgtggatttttctccttgaactcttcctccctgttccctttactggcggttgttgcaagatggtattaccgtatttaactgttaactacttattgttcctcaggtgaaagaactgcctatcctacaaaaagaacttatagaaactaaacaagccttggccaatgccaaccaggataaagaaaaacttcttcaggagattaggaaatataaccccttctttgagctctgaaaccagtggctcagccatctgtgccaaggagagaggctatcaccagcaatagcaccacctaggacagagggcactgtccagtgctgaataagtcactacggatgccagagggactggggagcactcacttcacttgtgtgggtgtgctttccactagctgttcttacttggactgaggacaagggcaaagcatgattgtatcccaggaaactggggcttgccctgtgtgtggcacaagcatcatgtcttgcctgtataaagccttttggtcctctgtgtactaggtggaatcttctcaacactgtagggccatttcacctcatggt

SEQ ID NO: 38418 - DNA, 1195 bp, Homo sapiens
aaaaagaaacatgtaattgcagtggtgtttacaactaattgatcacaaccaatcatagatttctttgttccttctccactctcaacacttcatttgactagaaaaaaaaaatgtattcaccaaggaacaggacccaatttgttcagacttttgttaagtttctttactaaggcaatttttgaaacaccagttactatgggatggtgggaatttttcatgcttaagaaatagagacttaggaacaaagaaacatctttctggagaagatgctaatgggaagttacctaaggcttgatgcttggttcaaccttatttaaaatttttataaatgacctgaaagtaggattttacagtgaaatcaaatgtcactacttccaggcagtgaaaggtaatctagaagaggtttaaaaaacacaaaaccggtcgggcacagcggctcacgcctgtaatcccagcactttgggaggccgaggcggggagatcacgagttcaggagatcgagaccatcctggccaacatggtgaaactttgtttccactaaaaatacaaaaattagctgggtgtggtggtgggtgcctgtagttccagccactcgggaggctgaagcaggagaatcgcttgaacccgggaggcagaggttgcagtgagccgagatagcgccattgcactccagcctgtcaacagagtgagactccgtctcacaacaaacaaacaaacacaaaaccacagaagggttactaataagcagggctgagaatactcagaaaactgacaggtgaggttcaacataatataaggaaatgtatttatggaagaattatcaactgatatgcctgaacactgttagaactcaggaaagaaacaagcattgctgagggggaggagagatcaatgtgctgctgtggccaaaagcctaattgccctgtgggcatcatcaggaagggcttttggagataacagagaacagcactttatacaaaaccatggatatgtcttgatcggattatctgtgtttctagtgaccttatttacaagatatatgataaagggaggaaaggtccagagaacagccaaaattatcaggggatggaggtatatccatatgaggacacatttttaaaatatagactctatcctgcaaagatgaaagcagaggggagttagatcaaatatccaatcaagagcaaggacccgg

SEQ ID NO: 38419 - DNA, 1042 bp, Homo sapiens
gacagaaaaaacagtacgcaggaaacattgtctccaggaacttttctctcttagagtgcatactggctctggggaagggcctgagtgagcagtgcccctcggggatcttctgcctaatcccacctcaaccaccatctagccgtatgatcttgggaatattttttactcttcctgtagctcagttttcttaccattaaaaaatgggtggcagggggcagtgtttttagcgtttcctggcagaggtccaaggaaaggtgcatcagtgtgtcttaaaacatctgcagagttagactggggaaaggagcgactgcttactgtcctcttactgtgtgccaggaactgtgcaaggccttttacatgcctggtgcgaaaggtcaagaagagaaagaggtctgtcttctcccttcatccatgggagtgtgtgagtgggaggttgctctctctgctcgtgaaactttcatcagcaaatactaattagtgcttaattactatatgttgtgcataccactgtagcagataacttaggaacacaaaacttgacaactcccttaagaaattggcttggttatctgtgagttttcactatcaatgactgaataaataagtggggcagaacagacaggtctttcttacagaagaattccaattataaatgtaggaataatgaggggaatagaaaatcaccattagcataccatagtaataattgctgcaggcaagatctaccagtgaagaatgaaattgggtgaaagctgaaggagaaacaatatttatatggcttcaaagtatcttccccagaatatttattaattcctatggcagcttcaaccgatgtccacttgttctttggtagtcctctctctaggagatggaatttaattctcttccctttttgagtgtgggctagacttagaaactggcgtccaaataatagaatatggagagagaacagtggtaactttatagtgggaaaatctggtagccactgcctttaccgagtaatgaaggttaacatcaccagtgataagtcatgctgatgtca

SEQ ID NO: 38420 - DNA, 1045 bp, Homo sapiens
ttacctacatacacatctgttatcatcatgaagataacattccagtgccccagaagtctcctttgtgtcacctgctagccaaaaatgccgtccttgaggttatcactgttctgaccttgatcaccataaatttttgcctggggacatgtttctttttctccaccgtacacccatgttcatgcagaacagtggagtgggagcagggcagggtctgtatgtgccaaatactacactagacacattcccagacttaaataaattctcccgtaaaacacagacctgggcttatataacttgtctaaactcaatcccatgtcattgatgccaaagtcagtgttttttccattgcgccatgctctatgtcttcaactgacatttgccataatcattatcattatcattaatgaaaagtcatctgacacttgccagtagtttatatgatcaaagaacatcagttaacacccagttctcatttctaagtgcgtttaaatggtcaagagcttttaacataactctcttgggaagcagaatgaattaagttaatttagaaccaaaagataatggcaatttcttcatttaatgagtgccttgtttgtgcaagatcacgtgctggccaacggagttatagagagaaaagaagtctcaatcccagctttgtgatcttctgatgggggagatagagaatagtgtgatgagtgctatgaaacagagggatgctggagcatcagagaggaaacaaggggcagggctggggaaatgttcctccccgaagggatgaggtctgggtggagtattagaactaaaaggagttgtacagacaaagaaggggaaaagcgagagttattttaagctggagtgtgtgtacagtgtggtggctcagtgtgtgcgaagaatgggtgtctggaagcattgtgcattgagacgactgcaggtaactgcctggtatgtaggagggagaggggttctgtggagtagaaagagattagctggggtagtaacagaggtgagatgcccatgtaaaggagttggattttacattgacagt

SEQ ID NO: 38421 - DNA, 1020 bp, Homo sapiens
tgattcttacactgggctattttatttttaaaaaatcattaaaaacattagaatttaaacaatattaattaaggactcattgtttgcccaataaaaataatcgtcacttcgtaaatcaccctaatgaacgatttagtcatcataatttgatttagtgttttcaggacgacattgttcagtgtatttttttattggtttggaaggtagtgagtaagatatttctaagggcaaaaaggaaacagttttgaaaattcttagctaatactgagttggccaggatgggtgaaacagagttaaaggaatgtgttggccccttttcttgtgcacctagaaatcctccagggcccagtaaccattttaggtttattttattaaaaaacaggcctttgggcttcctgtgttattgattcttcagtttctgcagaacttagaaggaaaatttaccccaagtaaagtgagaagagcattaacattgtaccatggatgcctaaaatggtatttattagacacaggcctgttcaaaggctctgagtgtgggagcaggggcagcagtaaagttgtctcttcctggtggtcttataagagcttctgggagcagcagtcagagggcagagctgacctgctgtgcttaagagaacgtggactttgaggccttgccaaactgaggtgattgttccaccttgggcaaattatttaatgtatctgatttctttcagctataaaatggggttatattttattctaaaatggaattttgcctatcgtatatatagaagaccattctgtttgaagtaggaagtattagctagctcatcacttatattcatttccagggtcatttgaagtctatctacctgacgagaatataaatcccatcagggctaaggccatgtctgtttgtttttctcactatgtctccttgcccctaggtcagtgccatgggcttggtaggtactcagatatctggcaagtgaaggagtccccgtaattagtactgcagctgtcgggaaaaagtgtaga

SEQ ID NO: 38422 - DNA, 1074 bp, Homo sapiens
gccttggcctcccaaagtgctgggattacaggcatgagtgctgctcccagccttatatacactttaaaagacttgatcctgaaaaagttttagttgtggttggtaaaccacaatgtttgtagttcaaaaagctggaaaacagttccttgtgaaggttcccccaggagattgttgtttctaacagaaaattaaatactgacctggagcaccttttcagtctcctggcttgccttgagtccaaacttactgtgtctttgagacttttgcagtctggctcacttctcttcccacactgctttgcactagatgcttcaatattaatttaacaaatattaagtgccttctctgtactgggaacgatgccatttgcaattcccttgaacctgggccctactctgtcttgcatctagacctctacacatgcctctttgcctacagaacttcccatgcttcaatctttaacagcttttgggctcattttagaaaatgcagttggtggtggtgaagtgcctagactctggaggctgtgtgggttcaaatcccagctctgctacttgctagcagtatgaccttgggcaagtttcttaacctctttggttcatctttaaaatggtggtaatgatagtagctgtctaactgtgttgttctgagaattaaatgaggtaatccacagtgcacttagtatattcttagcacatagtagcttcttggcaactgttagttagctattattatcatttttatgtgtcacatcctgcaggaagtcttcccagttctgcttgagggggcccttccaaagtactcccagagggcctgttctagaactcctgtcattgcctttattatgctatattgtaatttcctgtttgcttatttctacccacttctagatggcaagctccttgaaagtaggtaaggtctgtcagccacagccatatccgcttgaagatgttagggtaggttttttgttgttgttagtttttgttttttaagagttcctaattaaattgctattgatttattgatgagtgggtctgcttgcctgttttgtcataagtaaggaggtttaaaatt

SEQ ID NO: 38423 - DNA, 1050 bp, Homo sapiens
aattctcctgcctcagcctgccgagtaactcggattacaggcacccaccaccgcccctggctatttatatttttaacagagatagggtttcaccgtgttggccaggctggtcttgaactcctcaggcgatccgcctgaggatctggagtgcagtggtgcgatcttgactcactgcaatctccgcctcccaagttcaagagattctcctgcctcagcctcctgagtagctgggattacaagcgtgcatcaccacacctggctaatttttgtatttttagcagagatgaggtttcaccatgttggccaggctggtcttaaactcctgacctcaagtgatctatccgtctcaacctcccaaagtgctgggattacaggcatgagccaccatgcccagcagttcttcttttttattgccaaataatattccattgtatgagtataccatatgttcatccattcatcagttaatggaaatttatgttgtttccatattttggtttttgtgaatgatgctactttgaacatccatatacaaagttttgtgtagacctatgctttcatttctcttggagtgaattgctgagttatatgttaactctgtttaactttttgaggacctgctatattgtttttcaaagtggctgtatcattttacaatcccaccagaaatgtatgagtgttccaatttctccatatactcactgacatttgttattgtccattttattttatcctagtggatataaagtgatttttgatttgtctttccctcatgactattactattgaacatccttctgtgtgcttattagccatttgtgtatcttctttggaaagatgatttttcaaatcatttggacatctttgaattgggttacttgcctttctgttgttgagttgtatgagtagttcctctttggaagttttatttggcagtctggaattcaaatttatgtccgtgatcattctatcactacttttgtggacgaaatgtctttggcgaaatagattttttttgacacttgctattagtaatggaagcatagaaag

SEQ ID NO: 38424 - DNA, 1031 bp, Homo sapiens
gtcatactggggtaatgttggttcagggttggcaagaatctgatctggtaagagggaatgagcagattgctgaaaactgaatgttagaagttgcaccctggtggccctgggccaattccttacatagtgctctgttcttggaaacatgagggatttccctaaaggacttataatatatggtatgaataagcaggataaataattcactgtggctcaggatcagataggataaatattgtggtgaagatgcagtggatgatctggaatatctgagaagggtgaaattaatagcagccagtgcaatcaggaaagatgtggaggatcaggggacatttgagttgggccactttctgtgcttgacagaataaatatcccatttgtcttgcttttgcgattcttatttgatttcacagagactttaagcaattttacctcaagttttcgcttgagttttgctaggtctgaagagtggtaagtaaatttagctatgagtgttgatggatttttgaaatcagataggaggaaccctgattctctgttaagagacttagtttctgatcacctcagtttagcctttagagcctgtgcctccccttgttttgaaagtgctcccctttccttcaagtgtggactttatgtcctcctccgttttctacccctggcagtgaacactactaggtgttcagcggatgcctgtggaactgaactcacctcgatgtcctttgtgatgtcctctggcatctctgtgggcggagctccctgctactcccctctccagccacaggtcaggcacgctccttcccagggctcctgtgtttgatgctactctgcctgtctacctcagaccccctcacggctctttactttattcagatattctcaaagatcaccttcttagagaggtcttttctgatgaccttatctcaaatatcactcatttcctttttatccccttcctttgctgcctctgcttcctttgctcacttttggcccttatcaccacataggcatcataggatctatttgtttgc

SEQ ID NO: 38425 - DNA, 1044 bp, Homo sapiens
ctcgggaggctgaggcaggagaatggcatgaacctgggaggcggagcttgcagtgagccgagatcgcgccactgcacttcagcctgggcgacagagtgagactctgcctcaaaaaaatttttttttcaaatgggtttagatgaaatagagtttcatataatacttattattgaaggaggcaaccaaggataagagaacaggttgagctttttgctaataaatgggagtagaccagtatcagagcgttaacatttcaacaggaattaacatttttgtccttgattactttcctcattacttcctcagtaactttgatttgttagaacaaatttcacaggttgatttcttttgatccagtgtttcttctttctagagtagactgaaaagtgaaccactgattttcctaaggtaaagttttatgtatcagtattatgaaggaaattttctaacaaggcagttatgtgttctcagtactggcatttctcactgtggtctaggatatgaaagaggtgtttatgatctctgctacagacatcaaaaaccatagagcatgctaattgaattgtgtatgtatgcacagagttctccatctgttcagagacgaaaccttgactttagtctctcaggggagttccatacattatttttttcatttctaagggctaagatgagggcaaaccaaaaaattagatacttaaaaaagagatcgcaaaatatttatttttttctcttctgcagagggaacgtccaccacctccagcaaagccaccgcccgatgaagaggaagaagaccacatagataagaagtattttcccttgacagcttctgaggtagagggttgtgggtttattccccattgctgaaatttgagtttgttgaaaagtgcatcgatgtgtgctttaaaagactttgctttctcatcttctcatcagctctttggattataaatttgtattatgtgtactagtaatctggaataagaccttccaaactcacaaagaattttaatatagctctcgcagacaggcccagtattgatctgc

SEQ ID NO: 38426 - DNA, 1048 bp, Homo sapiens
cctccaaaaagtgcaggtgctgtgggtaaagatgatggcttaaagagagcagaagagatgaggaaatcgatcttacatagttttcaagagatgaatgaaaagctcactgagcctggtaatcaagctggcatttgaattattgctctagcacttactggatggtgactattatttagggaatcatttaacttctttaagcctcagtttctacatgtagaagggatactaattcttacctcatggttgttgtgaatattaaaaagaaaatgcttggcatagtgtctggcacagaaggagtagtactcaataagtagtagctgttggaagccagctgagttaggtgaattggtagaggactcaagtcagttgtttcttgagtatttaaaagggctcaacattccagcaactggagaagagaaagcaaatggctatgaatacccactacaagaactggcagaagatcaaggggagcaaagacagcaaatatgctattaaattaggcatggttagaaatcgtggctggttggaagctgatccaggcaaagctggtatattgaaaactagggaagtttgggggccagaggtcagaggtccaatgacaggtagagaacagacgctttaggagttcaagaagaagggggagatgtaatgaggtaatcaagaccaagtcaatgtgaaacagtccgaagtcccaaagctgggctatacctatgggccccaaggtgagtacagatggctcctaatctgaagattctccactgtgctattacatgtaatcccaaaccaaacttataagaatactggccttccctggcatttgagttttattctgcctctttaaaagggctactcagaataaatcagtctcctttgcagagtcaggagaagggaaaccagcctctctgtgcagtgttagcatgatgagctaagagttcagaaatgactgtaaatgaaaaatggtgataatgatagcagctatcatttactgaatgcttcccacgggccagctgccatgctgatttcctttatgttgattatgtcattgtat

SEQ ID NO: 38427 - DNA, 1070 bp, Homo sapiens
ggttctgggcactggtaagagtagtagaagacagaagagaaacttaaatttcttgccagcctgtgcctttcctctaactccaacccgcacccccatcttgtcctactgttgttttccattttctctaggctaagagaactgtcagaagcccatcagtctgggaagaaagggagcttcatgcctggcctccttgtgggtgggtccgctggcacattgtttgcatgccacagtggtgaagatggggaaactggaactttgcattcttactgagatagtcctcaatacagtttcgaccggtccacgatgaaaggagaatgaaaggagagagttaagggcagtgaagagtgctgtgatagtgctgatggtatttgattgccaaccacctttattctgattatgttcattctttccctttttttaattttattttttttagagacagggccccactctgttgcccaggctggagtgcaatggtgtgacaatagctcactatagcctcaaactcctgggctgaagtgatccttctgcctcagcctccccagtaggtaggactataggcgtgcgccaccatgcgcggctgtttttgtttttgtttttttgtagagacagggtctcgctgtattgcccaggctggtcttgaactcctggactcaagaggtcttcctgcctcagcctcccaaagcactgggattacaggcatgagccatggcacctggccacttttcctttttctgtgcttcagttgttctttcttttataaaacaaagggatagttttcatgttgattgttaaatgtttgtctttattaaatttattttgaaataattatagattcacaggaagttgtagaaatagtccagagaggtccttttttttagtacccctcacctagtttctgcccatggtaatatattatttaactctaatacaataccaaaaccaggcgattgaccgtggaagaatccacacatccacacaccttattcacatttcaccagttttgcatgtatgtgtgtgtgtgtgtgggggggggttatatgcatttttatcatgtgtaagttcatgtg

SEQ ID NO: 38428 - DNA, 1180 bp, Homo sapiens
cttacttgcacttagaggaaaaagcatccaagccctggtacaaaaggtcctcttttcattcctttggaaaaagagcagtgaatgagctcattatcactgcaacccaaaaaggaggaggaggggaagaagagaaggtggctgctccccactgcctagttctgcccctggccaggtttcctggggaagggggcctggatctggcccatagtggccaaggccagatggctgggacaggtggtccatactgggggcagcgctggagccattggatgctttgaaactagctttctctgctgtggtccagaagagggacaggtgtctgtgccccgtctcatctcctgaacgcagagctctatccaggactgctggactccaagaagcaaaaggccttccatttgggcctaagtgcctgcctcacctttccttcccagaggtttctgtatgcaggcgctctagaaatcatcctcactccccagagcttgtggtcatacagtatcagttatctgttgaatgcttatgatttgccaggcactaccctaggcactcagggtagcatggaacaaagccggcaaagtcttcactctcatggaattgaaattctagcgtgagcaatgagatggccaggtctggcctgtgattgcagcctctccccagtctctgctggtctgggagaactgctggggagtgacatagagatgccttgaaagggaggctcttcagtatttctagcagctaagcccagactgtcaccatctcactcccttcagagcagtacatcggaccctgtgggctggggccagagaaggcctctcttagacctgagcagcagagtcctgataccttgcaggctggtgctggtcctgggaagcatctgaaagagacctggaggtcagaccccactggcgctgtggtgagctggtaaggtttaccccaagcctgactgcctctcctctttgttctttcttccatttcagattgagaaaatcatgagttctattggagaagggattgacttttctcaggaacggcagaagatctcaggtaccgtactaagtggccattttccccacagaaactggcagtctggctcttttctggctcaggctttcctctaacacagaagacagacattcagtgggtgggagaggtcagcttcagaccacgtcatgctcctataatt

SEQ ID NO: 38429 - DNA, 1095 bp, Homo sapiens
ctgccgtgttctgtgctgcttgtgttgcatgtgctgggtcccggtgaacagccgccgctgctgcttccctcccggagccctcgctgtgtgcctgtgtccctcagctgcatgaagatgtgtgctctctcctgactggtttatgctgcaaggtcgcagaacttgcccctcgccacggccccacaggggctccagaagttgcatggatgagaggagcggcggggcttgtgggcacttaggagctccctcagccccctctagtgcctgtggggacagactttctgaaatatcttcagcacgcacgctgatgaggagttgacctggagactgttgggatttggcttcccccacccccgacctgtgggcagagatcatgcatgtgcagccgtggccctggagcagctcagacctgggggtgtgagtgggcagcagccgcccgaggctgggcagtgtgtggacagcaccaggtggtcctgtccttggctgtacacagaagaggagctgcgtgtctgctgctctctggtctcttgtatatagtttggctgtttgatggtaatgactatgatgtggcaatgccatctatcttcctctgagtgccgctgctaccgccttaatggtttttcccttttcaagcgtctgccgattcctctctcatcaggtttacggacgctggagcagagtgtcggggagtggctggagtcgattgggctgcagcagtatgagagcaagttgcttctgaatggctttgacgatgtccacttcctggtaagtggctgcaggcctcctcaatggcagggtgctgctcagtggaaacaggcctccctggcctcccctctggccccacaggagtctgcaacagtacgtagacccaaatcccagggaaagctcactgaggtcactcagacaccaggaagtcagccaggtggtatgtgccttcttcccaaactgtccctctccctctgccccagaaacggctccagagggagctctctttgcagatctgcttcccaagaaggagggtccctgattcagccctgtgtcccctccctggctgtgtatcccatcaaggctgggtacgaggagttttatttatttctc

SEQ ID NO: 38430 - DNA, 1055 bp, Homo sapiens
ctttcttctctgtggatacagggatgggggcgtggccacctatgtgctttatgtcaccttctagcctgagtcatcttggtttgagttagacccacccgctccgaggggatctctctcacctgtgcccgccttgctccgctgcctcagttgagggctggggtcagagtcagcatgcagctcgcaccacctgcactctgttctctaatgggggcttctgagggtttctcgctgatcgggttgtgtttggtgcctcctgaatagtggcctgcccagggagctggcctgaggcttccaggagggacccacctcacccagagccatctccaactccagggcaaaagatactgtggtgtgcaacaatgcaccctttccaagccagctttgggacagttaattttcagcttttagaaatcttaagttttaaaatagcaattttttttctttttaaaagttaaactgaatgtatttatggttcttatgacctaactcctgactcaccacgttcctcggggaaggatgacaaactcggggtggagagggggctcaggcaatgcgtggggacccaggttggcccctggctcggagtgttgaggggccttccttctctcaactcaccccttcctcaggctggccgtcagatgggcaagtgagggtggtcttagggtgttccctccctgtacttcaagatgctagaggctgagctgttgcttcccacctctccttctgctgattttggaaagaacaggattcctacccctcaaatagcccgagactccgtaggactggagcagagagcagctgagcaggcctttggagaagtgtggccttgggccaaagcttcatgcacagggcagggcctctgtaagatgcgtctgttcctatgctagaaggaccctcattgagggcggcctgcagctcagtccttccaggggctctcagtgctggcaggtggagtctatacaagaaggaacgtcgagcacccctcgggtgagccgggacctcagatacctagagtggcctgctgtgcacagcatcctgggtaaccacgtgtgaat

SEQ ID NO: 38431 - DNA, 1043 bp, Homo sapiens
cttgcatttgaaggactcttcgatgacatccttggcctgagactccttgccatagtccttaactactacacaactgcaaccaaccactttccagggtttcccctctctgtctattttacagaggcctgcccattcccctagtttcttgttgtcatcaaccttacttaggttgatttgccagacacctctttctattgactccaggcctttagataaactctttcaactagttgccaatcagaaaatctttgaatccacttgtgacctgtaaggccaccacccccaaacttcagctttgagttgtccctcctttccagactgaaccagtgcatacctcacatatatcgcttgatgtcttgtgtctccctaaaatgtatgaaatcaaagggaagggaatcctctatagaatgtaaatttcccccacaagaggcagctttgcagggccatttcaaaatatgctaaagaaatatatttgggggtaaaatactttgtttcggggctgctgtctgtcatgcgatgccatactggagtcaggttggcactcggtgtcttgttgctacagagtccgctgggtcagtcttaggatctctgctttaatgataatgtgggactgttgtgcctgaattccacagggaggagggtgtaatgaggcaggtccaatgcccctacccatcatggcctgaacctgtttttcaggtttctgtgggatccccttggcctagagggggggtccattcagtttcctggggggctgatggttttatttttggttcataccgctgaggtaccagatgctgtctggcagagccacaccccctgagctggccacacgctcccagtcagaacttctctgcggtttggatgtgtcagggtcctgtttccagaagatccgttaaagtcaaagcaaactcctacctaccccggcctcgtggagccttcctgcggtcctgccatttgccccatcctgtagacagggctgcaggaagcagcccagccagcaaccagtgtggagggagagggagtccaaggcccaggccggcccc

SEQ ID NO: 38432 - DNA, 1029 bp, Homo sapiens
gagcctaggaaatgtctactctcaggaaataaaagaacaccatcacctggcaagagacagcggagtatgggaagaacactggtggtcaggtgttaggccctgctctgccaccaggtagctatgtgatcctttgggactcctctggcaacgcaggcctctgtctcttcatctgcaaaatgactgctttattttattttattgtctatttcttttttttttttttttttttttgagacggagtctcgctcgtcacccaggctgaagtgcagtggcgccatctcggctcactgcaagctctgcctcccgggttcacgccattctcctgcctcagcctcctgagtagctgggactacaggtgcccaccaccgcgcccggctaatttttgtatttttagtagagacggggtttcaccgtgttaaccaggatggtctctatctcctgactttgtgatccgcccgccttggcctcccaaagtgctgggattacaggcttgagccactgcatccggccccttatctgtttctttgacaaggtcttgttctgtcacccaggctggagtgcagtggcgcaatcatggaggctcactgcagcagtgacctctccagctcaatcagtcctcccatgtcagcctcctgagtagctgggactacagagatgggcaccaccacgcctagctaatttttgtatttttggtagagagggtttcaccatgctgcccaggctggtcctgaactcctgggctcaagcctccacctgcctcggtctcccaaggtgctgggattacaggcatgagtcaccacacccagccaaaatgaccactttagactaggaatgagttgtgttctcagcccctcctattgtgggagttgatgaattaagtgcttagaataaacatgataatatatgtgtatctgagagcattttggaaactgctgagttctacaccaggtagtggtattggcaataagatttcttccttcattcgctgaagtaatacccagtgagtgcctgccatgtggtgggcactat

SEQ ID NO: 38433 - DNA, 1592 bp, Homo sapiens
tgtccaatttgtaggccattcttcttatctcagctttaatacttcccctttatggggctgttgacttccaggaacccttgggggagacggcgctgagctggatgtgtgccacgggtagccggaggctttgtccaattcttttccccttccaggaaccggggttttgtgtctttccactctggatgtgtggaatacacttataccatgataccccagcctctctctgccctcactcccaccctccaccctgtgctccatccgaaaggactaagagaattctccagaagctgtgctccagaaaatacttgtggtcctcaaccttttttctgtgtactggctccagaacttttttttttcccgtttgagttttgaaatagattgctggcctgatagccctggggctggcgggcatctgtccccttttattattggtggcttgaaacagctgctgattttctctcatatctctttgacaatctttggccaactgaatgtgcctctgatgttggtcactgaacatgttctcttggagtctcttctccctcttttttctttgttcttttctgaatctagggaatccaaattgtccctctttttccctgggagcttaatttcctctgtatccaggaggaacggcaatcccagagctctgttccctttgcccaggcatagtatgaggtatcagattgataactaccctggtgggctgtggggctgcagtagttagaccttgtcaggaacttgagcagacacatctgcttccagtcacatagatcatcttctctggggcttgagagcccaccaccttccatgtgtgtctggatgtttaaccttaccaagcagaagattctcgtcatatccttcagtttgagctcctttatttggcgttggttctctaaagaagtattcaagaaataacatatcctttgtttctacccagtctgatcttggaggattctgaaagcgtgacccactctcatgtttagaaatgaaggctcattgtttcacctggccccaggtttctaggggctcctcttttgatgattgtgctgtctttgagccagattggacatgggagttggcaacctttaggagctgcggtggagagccaaaggaaccagcttgaccagactttaaagttttgtaatcctcttgtacactgttttctgtgaaagcaataggattgtggatggcctgttgttgagccagtcccttctccactgacccccagaccccctttgcagcacttgcaaagatttgggtagactggaccagagggttttccttgttcctgtgaatagcatctctccagggttttagtggatcattctaaagaggtagaggtcaagtgttggacagatttttagtctagtctctggctttcaaggactcctccttactcttttgagcagtttgttacttctggccgtgcttaccccttagtagtgctctctgctgtggtggcaggtgagagatttgagaacaggtcaaggccagtccttgtggagcagcttgggcaccagcagccctagatggatagcttcttgcagtttgtccactctcattttctgagaaggtagtcatgattgtca

SEQ ID NO: 38434 - DNA, 1042 bp, Homo sapiens
ctgcagtgcagtggtgtgatctcggctcacagcaacctctgcctcccgggttaaagtgattctcctgcctcagcctcctgagtagctgggattataggcgactgccaccaggcctggctaatttttgaatttttagtagagataggatttcacaatgttggccaggctggtttctaactcctgaccaggtgacctgcccacctcggcctcccaaagtgctggaattacaggcatgagccaccgtgccccggttctcatacgaccattctgttttttcactttcagtacagtattcaattacatgagatattcaaaattgtaacataagctctgtgttagatgatgttgcccgtaggctcatggaaatgttctggcacatttgcagtaggctatgctaagtaagttatggtgttcggcaggttacatatattacatgcgtttttgacttgtgacgttttcaacatatgatgggtttgtccttataagttgaggaacatttgtagccatttcatcgtctgtgaagaggcctgagtggattttgtgctggagaccggtgtgactcagctccagtgttgactgaccttctaaccatgggcttgtgactgaatgtcctgagccttcattttcttccctgtgaggattaaaatgaacctcaggaaatgctggcttgtcctctttctgtcaagctgggttctgagggggtgagcccaggtaggagtgacttctgaaccagcccagatttacaggcttgggcatagggagcccagcctcagcctgggagcctcatcttccattaaatagctcctggcattcaggggagtgcgttgcagcaccccatttttttttcattgaagtcctgtcttccagccaggcacagtgaatcacttgaggccacgagtttgagaccagcctagccatcatggggaaaccccatctatactaaaaatacaaaaattatctgggcacggtggcgcacacctgtagtcccagcacaccagagttcaagaccagcctgggcaacatggcgaaaccccgtctctac

SEQ ID NO: 38435 - DNA, 1054 bp, Homo sapiens
gctagtctcgaactcctgaccttgtggtctgcccaccttagcctcccaaagtgctggtattacaggcatgagccaccgcgcctggcttgcagtaggcatctttgcccaacccacgtgaatcccattagttctttcttgacagctctcagtctgtggtcatatattaagcaactatgtgttcagtactgtgctgggtgctattgctgaagatacggaaatagtaatgccacaagtccctcttcttagagaggagagcttgcactctagttggagagaattcctagcacacagaaagctgcaaccagtggtgcccaacagtaatgctgtctgatgccactgcatgcaagtgtgtccctttgacaacttggtgcttttgcccaaaaggagctgttctctttctgaggcttggactattcgtttgttttttctcagatgacttgctggcactgttacagactggtctgaattaactaggactaccttttatctgtttctgaggaatagccccaaatgtgctctctcttggtctttatgaacttttcctttcttccatttctccaaattatgatagattaactttgcagtgtcatctgctaatctccaaggtcttctaggggcacgtcatcagcagttgctgcttttgaggtatcaaggtttgtcctgtggagtctcagatagtttctttacctgttcaatgaatctgattttccatttttctaggagagtgtatctcaaagtgattgctgaatcagaatgtctgggagtgtgacttggaatctattactgaagattagaggaaaatgtagcaaattgtgatctgaagcatttatggatggattgatggattgatggatagggattctgactgagttaggtagtctatagtctcagacagttgtggaagctccattaggtcatgagcaacccagactccttccaattctgtgccctgccattcttagggtgtggctgctgtcctcatggtccaaaatggttgccgtggttccacatctcacagtgagatagaagaagacagaagaatgatgtctcacct

SEQ ID NO: 38436 - DNA, 1049 bp, Homo sapiens
atatttgtcaggaggtgggggaaacctgctttcccccacctcctgacaaatatataaactggaaattgatccagtcctggatcagtttgggtcacacaacagggtcggcagtgttggcccacagagggccctgggccccttatttcccctttggccctaggctctgagctctcaggttttggctaccaagcaaaaggtggagttgcatcagttgttgctctttaccaggcccccaggggttgctgtcggtgagctcacaggatgttttcttctctctgctttgacttgtgctgaatttctgactgaccccatgcagcatctgcgtggcttctggggcccgagcccaggtttcagcaagctgcccatggtttaccctcaggatgaactctaggaagctggggagcactgtggtggtggtataagttcagcccctcattttagtttatttttatgttaaaatgtttattaatacaaaataacacatagatcagaatgttgtatgacagaaagggactgactggactcaggatctcccaccccagccccaggggtgaaggtgaaggtgattggtttcctgggtatcgttccttccacggtttttccatgcacgctctcatgtgcgtgtgtttttatcctcatcctgctcttcaccgtggcagtggggagcacactaaattgctctgacacctagttagttttttttttgattgagtgtatcttgggaatctttccatatcagcatatacagatacactgcattctttttttttttttttttttttttgagatggagtcttgtgctgtctcccaggctagagtggaatggcacgatctctgctcactgcaacctccacctctcaggctcaagcgattctcctgcctcagcctcccaagtagctgggattacaggcacccaccaccacgcctggctcatttttgtattttgggtagagatggggtttcaccatgttggccaggctggtttcaaactcctgacctcaaatgatctgcccacctcggcctcccaaagtgctgagattacaggtgcg

SEQ ID NO: 38437 - DNA, 1053 bp, Homo sapiens
atagatcagaaaattgagactcacacaggttaaagtaacttgcccaaggtcacactgccaggactagtagcattttttctgtacgtcatggtgaggagctgtatatatgtatgtatgtatgtatgttttgagagacagagtcttggtctgttgcccaggctggagtgcagtggcgcgatcttggctcactgcaacctccgcctcctgggttcaagtgattcccctgcctcagcttcccaagtagctgggaatacaggtgtgcgccaccacgcccagctagtttttgtattttttagtagagatggggtttcacaatatgttggccaggctggtctccaatgcctgacctcacatgatccacctgcctcggcctcccaaagtgctgggattacaggcatgaaccatggtgcccagccaggagctttatttttaactttatcttgaaagtcaggtattctgggctattgcctttgtacccttatgtcgggggtgttacaggcccatttgatgatttgatgtagaccctcccagaaagatggaagtatgaacatgcttctgttgcacagtttcaggggagctcctgaatcctctggagatctaggcagaaggacctccaatgtgaggcatcaggagtcattcaagggccttcaacctgggagtaacttcatcagatctgtactattaagaagcatctggcttctgtgaggagtgggattggagggtgaagatacagggcctgagacctgtcaggaggttgtagcaacagggcagaaagagaaagtgtgatccaaaaggaaggtagctgtcacagtagagtgtctgtgaacctcagttttctcctctgtaaaatgggagggtcttgaggattatatacagcaatgcatatatatgatgtatatgtatgtttgtatatggattgatgcatataaagtgctgccacatagtaaacacacaatgattgtcaactgttactaatgtggccggcttagtaaattgtgcagctagtatttggctccaggtctacctcgttaaccatggtgaaataatgagatt

SEQ ID NO: 38438 - DNA, 1350 bp, Homo sapiens
aaatctttacgctgcgttgtttaggcagtggcattagactgcttttacaggtaggaagcagacattcccagttgtcacgtgtccagggtccacagctaagaaataggcagaattcgagcccaggcagtcttgaccagagcatccgttgtacagcggttatgccatggatcatgggtcagcctggttttctgagagcatgttttgggaccagtgaaggtccagaggactttctggaaaccgtttgggctagggaaaagactgaggcggggtcttagagagggtgctgcttggaggtcacttacatgattgattcaagtgcgtttctggcctgccacatttgaggtgtgccttggtgaccaggttctaagcaatgccaatggcttcctctctctatcagccaagaagtatgatgcgtttttggcctcagagtctctgatcaagcagattccacgaatcctcggcccaggtttaaataaggcaggaaagttcccttccctgctcacacacaacgaaaacatggtggccaaagtggatgaggtgaagtccacaatcaagttccaaatgaagaaggtgagtgggtctggcgggttgctatgggtgaaggtgttggcagggtctaaatcttatccaagtctctaaatatgccagtaagagcacccaccaggattgaaacttttggagtaaccctggtcttggcccgggtccaagtacctgctcaccaggccactgggggaggaaggacaggccatctgctattcgtccaccaacctgacttgatcctctcttccctcctcccaggtgttatgtctggctgtagctgttggtcacgtgaagatgacagacgatgagcttgtgtataacattcacctggctgtcaacttcttggtgtcattgctcaagaaaaactggcagaatgtccgggccttatatatcaagagcaccatgggcaagccccagcgcctatattaaggcacatttgaataaattctattaccagttccctctgtctgcctgtgattgagggtggggggtggtttgtcagctgacaagtgagggccttggcactgctgatggctagttgtgtagtttgtcactttgatgatggatagttgggtactatagggaagaggatgtttttctgccatcaaaatcaggcagtcttgcatatgtgatagggttgctaacggcattgaagctttttgacaggattggtccatgtaaatttaaaataaggattttagtcagcatttctgtgttaagaagaccacatgtggagtatcctatgctttgggttagtaatgagtaaatgttaaggaaaacaaggcacagcaaaccagtacaaaagtataa

SEQ ID NO: 38439 - DNA, 1068 bp, Homo sapiens
attagttgtgtgtgtaggtatataaagagaggtcacacacacacacgtttattcttataatatattaataatagatctaaattactgacctgctttcttccctccaaaattcataaaaaaatgaaaatagaaatgaaatcagcattctttatagctcagctgatatatattattacccaatctcaggaataggaatgattcttagacagtaaataaaacttacacttatttttaaaaattcagcctcttagccaggcacggtagctcactcctgtaatcccagcactttgggaggccatggtgggtggatcacttgagatcaggagttcgagaccagcctggccaacatgatgaaaccccgcctctactaaaaatacaaaaattagccaggcatggtggcgagtacctgtaatcccagctactcgggaggctgaggcacgagaatcgcttaatcccaggaggtggaggttgcagtgagccgagcttgtgccactgcactccagcctgggcgacagagcaaggctctgtctcaagaaaaaaaaaaaaaatcagcctttttagaaccgatctactttctatgtttccatagctgtgtaatacagtaatgagtgggttaaggcattgtgtctagaatatgtgtggtgaacctgttggacttgaatgtaatcattccctaatcttaccacataaagatgggattaataaccagcaccacacctgtgaggagaaattctggaatgcctcatcttgcctccagataaaacatgttcctccttcctttaaggtaaatgcaggaatattgtcaatgaacaaaatcctttcactagtcattcctgaaaaagaattacagttggaaaataaaaaaaatactcctattttagaacctgtaatgtggaagacttataatgaggtgaaaatgtagcggtggatttaaaactacaagatacttaattatagccatgcagtaagttatactatatatttgtcatgcaagaataacatttgtaagaaaactgatactgacacatgtatctttctaatccctacctttgctgtttttgttttctt

SEQ ID NO: 38440 - DNA, 1034 bp, Homo sapiens
tgctagattacaggcgcgagccactgcacccggccccattttaaccattttaagtttacaattcagcggcattaattacattcatgatgtacaatcactactactacctatttccagaattttttcatcaccgcagatggaaacactcagcccgtgaaacagtaacttcccattctcccctctggtaacctctgttctttctgtctctgtggatttgcttattctagaaatttcatagaagtagaatcatattatactgtatttgtccttttgtttctggattatttcacttagtataatgttttcatggttcttccatgatgtagcatgtatcagaatactattccattgtaagtatttaatatatcccacattttgttgacctgttcatctgttagtagacagttgagttgtttttacctttggctattgtgaataatgctgcagtgaacattgtcatacaagcatctgtttgagtccctgcttttgattcttttggttatgtacctaggagtggaattgttgcatcatatggtaactctatgtttaactttctgaagagccaccaaactcttttccatagtgtctgcaccattttacatgcccaccagcaatgcatgaggattcctgtatctccaaacttgttctttttttttttttaatagtcacccaagtagttacaaagtggtatctcactgtggttttgatttgcatttctctcatgactaatgattttgagcatcttttcatctgcttattggccatttgtatgtcttctttggagaaatgtctattcaagtcttgcctattcttaattaggttgtttgtgtttttgttgttcagtggtggttctttatatatcttagacccttatcagatacatgatttgcaagtattttcacctattttgtgggttgtcttttcactttcttgataatgtcctttgatacataaaacatttttaattttgattaagttccaatttattttttttctgtccttgctcatgcttttttgatgtcatattttagact

SEQ ID NO: 38441 - DNA, 1029 bp, Homo sapiens
aattcacacataaaaaatattaaccttaaatgtaagtgggctaaatgccccaattaaaaaacacagaacggcaagctggataaagaatcacgacccatcagtatgctgttgtattcaagagacccatctaacatgcaaagacatacaaaggctcagaataaagggatggaggaaaatttaccaagcaaatggaaagcagaaaaaagcaggggttgcaatcctattttctgacaaaacagactttgaaccagcaaatatcaaaaaagacaagggcattacatagtggtaaagggctcaattcaacaagaaaagctaactatcctaaatatatatgcacctaatacaggagcacccagatttataaaccaagttcttagagacctacacagagacttagactcccatacaataatagtgtgagactttaataccccactgtcaatattagacagatcatcaagcagaaaattaacaaggatattcaggacttgaactcagctctggacctgatagatagctacagaactctctatacagaaacaacagaatatacattcttcttagcagcacatcgcacttaggctaaaattgatcacataattggaagtaaaacactcctcagtaactgcaaaagaactgaaaatataacacacagcctctcacaccacagcacaatcaaattagaactaagattaagaaactcactcaaaaccacacaattacgtggaaattggacaacctgctcctgaatgactcctggataaataatgaaattaaggcggaaatcagaagttctttgaaaccaatgagaacaaagagaacataccagaatctctgggacacagctaaagcagtgttaagagggaagtttatagcactaaatgcccacatcaaaaagctagaaagatctcaaattgacaccctaacatcacaactaaaagaactagggaaccaagaccaaacaaaccctaaagctagcagaggacaagaaataaccaagatcagagtggaactgaaggagatagagac

SEQ ID NO: 38442 - DNA, 1064 bp, Homo sapiens
aagtcaagaaacaacagatgctggtgaggctatggagaaatatgaacacttttacaccgttggtaggaatgtaaattagttcaaccattgtggaagactggtgaaatcctcaaagacctagaaccagaaataacatttgacccagcaatcccattactgggtatatacccaaaggaatataaatcattctgttacaaagatacatgcatgtgtatgttgattgcagcagtattcagaatagcaaagacatggaatcaacccaaatgcccatcagtgatggactggataaaaaaacatggtacatatacaccatggaatactatacacccataaaaatgaatgagattgtgccctttgcggggacactgatggagcttgaagccattttcctcagaaagccaaacaccacatgttctcacaagtgggagctgaacaatgagaacacatggacacatggaggagaacaacacacgctggggcctgttggtggggtgggggtcaggcggagggaacgcatcaggataaatagctaaggcatgcggggcttaacacctaggtgatggattgataggtggagcaaaccacgatggcacatatttacctatgtaacaaacctgcacatcctgcacttgtatctcagaactttaatttaattttaaaaaaatataagaaatactcatttttgtcttaaagccaataatgtgttatcagattagaaattattcttgtttgtgactttgcagaacccttccatctggcctaatgatagcattattattttttaaagaatgaagccctttcttaaaagcctagttgactagggatatcaagtggacacagctgacagaactttgtactagaaaggagggaggatacagaatgtctcttcaggtacagtactaacttatttcaaataccatagatcttgaaatgaataagccactttgaaaattctgttaccaacgcttaacactctgcagcttaaggaagagagaaagttttatagccctgttatgcatcaaataccgtttttctaccagagatcacagccttggcttgctgtt

SEQ ID NO: 38443 - DNA, 1032 bp, Homo sapiens
cgatgtgtgtggtacagtttgacaaacctgggtccatatagaccactggagaacattcagcagcgtcccctttgtagccagtttcttcctcaagctcccaaagagcagctgctcctggggtttcaccatcttctatgagttccctgcagggaactctatgcagtagccacccattggtggtcaggactgtttcaccagaacgatacactcgtagtgaagcgttctctgcagcacagggatgaccgctacatcatcaccagtctgttctttcctggttgtatgtttcactgagtcccaagttccagttttaccaataggagccatgtatgttgttttttcaagtttgacccattttccttctgaaattaactcctctgaaataatatagtgtttccattctgagacaattcagttggttcttggctctcccttttcaaactagtctttacagccctcaggagagaagttcacctccaaagtgtaggggtgacaaagggaagaggacaaaagaactactggaggcagcagtgtcagcatacgccggtgtcacgactcaagacatcggcacctcccgaggtgatgaaaggatgtgccatggctcatcttttcaagtcaactagtatttatcaagctgctctgtggaaggtgctggggacaggatggtacctgtccttaaaaccagaatgatcagactcagtggaaagagagttacaagagttacttgaacaactgtctctgattataaaataagatggagtgataaatacactagaatagagttatagataagctattgaaaaaaatccaagaagacttcatggcagagttcttgtttgaataggacttcaaagtgtaaataggaatagaaaaggcttggaaggacgggagaagggggaggtattctggtttatgagtacataaataagtacttggaagcttagaagtgcctggaatatctgatgtgagttgaagcattgagtgcattaaagaataataatttgagccagagtcaaactaggcttgattcttcag

SEQ ID NO: 38444 - DNA, 1025 bp, Homo sapiens
cagacagggtggctgctgtgctcgtggggcaagatagggtctgggtggccaggataggggacatgacagtctcatagttatgtggggcttttgtctcgatctctaagaaaccagtcaccaattcccacaccatgtctctgcctccagaggctcacaggctagctaggaagacaatgcaacaacagcagccacttctcaggcacttgctgggcaccaggaattctagttgacagttaaatgtgcagacttaggagccagatgccaggtatgaagatcatgttcaccactttcttagttatgtgcgaccttgggcaaattacataacctctccgggcctcagtctctccatctgtaccaggggaataattatattggaatagactagaccaaagcagccctgacatctgggagctgcctggtcctatcagccaggacttggttgctcagagctgtccagcctggtgcaattcggtcttgctgtgctgaacatagacgatttcacagacatcagcatagaacaaggccatccgcgaccagggcagactaagacaaaaatgaaactactccttaatcatatctgaacacagacaaaacatgaatattgtcaaatcacagaaatgacccaaatccccctgtagagctaagctgagtggaggctgctggtttaccagctgtagcttcagccttgctctagtctgctttccttctaggcaagatgtattaagactcccaatcatagtgttagctccacttcctgacagcatcaacccagaacaaagcctcacttccttaacctctccccaatcacctaacacaactccaaacattagactaagtcctttctaacgcccccttcctgggacgccccatgatccccatggtgcatgctctcccttgttgcaacgagtcatcagctcagcttgttcacccacacgtgtgtttctggtgatctctggttggaggcattgaaagttcctacctcattgggttgtcgtgaggaatatgtacttgaaatgatacaatcc

SEQ ID NO: 38445 - DNA, 1057 bp, Homo sapiens
ttatgcagcggcttcacaattattggctgttgaagcggcaggcacggaatggtgtccctcttatccggcgcttgcactcccatctgcagtcccaaagaaacgctgagcaggtaggtgcagtggtgatttgaggctggtagagggaggtggagagtgaaggaaaaggaatgatggttggggtggggctggcaccccttcttgatccctccatggagcctttgcctacctgtctgggtggcctatcccaggaacaacccccagcactacagagatcttcaagcagctccttctggatggatgaggcttgactttgtagagaattctaggggagagtggagagcatgcgtagctttccatatatgtggggaaaatcctctagatgtagcagaaagccagaagtaggctgaatgagagccagggtggccacattgtgttaattaggaaaaggtgccctttcctcaagacattatactgccatctgccaaaaaatgtttcatagtaaatacacaaatttacgatctaagttgtagcacacagcctgtccaattgtggtggctgttagccattagcaactggagttgctgcatgtttaatgttttctgctcctaatttctcttattttaactctttagttctttctccccctttacctgttctattctttctgtctttaagtgttcccacactgctgctccagagatgaagcaaagctttatgtgagtctggtgccttctgcattctgtctgatctcacttttgccttttataactaaactcctgaagtataagcctgtatctggcccgccttgaaccttttggtccacctgctccactgaagcctcccctaaaacatcagctaccttctcccaggaagtctttccttatattctcacctgattgatcattgggctgcatttgacaccacaaatgactttgtctaagagcttctctgtgataccacttccggctgcttctacctctctgactgtaccctatgctgatcccacttcttgctctttaatggtaacattcccagtggctctgctatctgctcgttt

SEQ ID NO: 38446 - DNA, 1056 bp, Homo sapiens
ataggatcctttgccatacaaatgtttttaaatgttttgtggtcagatttgtctttctcatttcgcttttgggttttgggtcttgattaaaaaggcctcccaacccctagattgtaatctcctgtaacattcttggaaaagaatattgttgtgattcagcttctcatctatgaaatgaaaagactatactgaaacagtagttcccaaacatcgccagtcagtgggagatcacttgaggagcgtgttacaagttcagattctccagacccaactaaagacttattgaataagaatctctggggaatggggcccaagaagatgttttaacaagttcctctaagtgattctgattatcagctggatttgagaaccattggacaatatgatcactgaggtctcttctgattctaaaatatcatttctgtattatgtaactcttaaataatacattatctcaacaactagattgtaagctctttgaaggtaagcaagactgtgtcttaggtaatacccttttcttcgctgtcagcccactaagatacttactacctcactcctagacaattttagtaaccttctcttatagcccctccagtctgtctgtggtcttatttatcttaaagcaacattttgaacatgacaccttcctgcagaagctttggctacaagacagaatcctattttaccttataatctaagtgcctctgtaaactagccccaactttttgtctttagctttacccaagggagtgtgtacaattatctaagctgtgctttatacagctccttagatgatgatgtgcatggtcttccctggaattgtatgatatggtggtaaccttgacttttcccacccttttgcattaatccttcactctagcctgattggtttactttctttctctttcatatggtaataaagccttgtttattcttattttcctgccagttatttgtcattcatcttgcctggaatgccctttttcccttttctgtatctaatctctccatattaatagctacacagtggagtattatgcagacataataaagaat

SEQ ID NO: 38447 - DNA, 1060 bp, Homo sapiens
tgaaggaacctagctagcccttctccttccatcatgtgaggacgcctggatgccatcatctttgaggaacagccctcaccagatacccaatttgccagcaccctaatcttgcttggatttctcagcctccagaactgtgagaaaagaaatttctgttctttatgaattacccagtctcaggcattttgtttatagcagcacaaatggactaagacaactggttatctgtagggaataaataggaacagattgagagggaaaaaggggaaggacagagacttctctgaacattccttttttatgagtcttcaacttcggaaccatgtaaatgttttacatattcaggaaatacattttaaaaataatgggaaaatgctatgattgaataaaaagagaaacaaaagaacctaccttacagaacatatagagaaaaaatacacagtaacttttgaatatagcatgctgactgtacatccttagtgggatatgctttaaggacaaaaagaactgctcccttgaccaaaacacctaaacttagtaggtttattgttactagtaatttgacattataattctgaaactagtctatgaaccaagaatttcaatgtgaaggaaaagatacactaatataaaatgagttaggaaaaaccagtattaaatttgaactgaaaacatcagtataaactctatttatgaatgaatgagagagactgggtcttgctctgtcatgggttggagtgcaatggcatgataatgggttactacagccttgacctcccaggctcaagtgatcctccttccacagcctcctgagcagctgggacaacaagtgtacaccatcacacaccagctaatttcttatcttttgtagagactcagtactttcggaatatgatagcctcttactgtgagttcataatagtcctagaaggaggtcttgtagacattttagattttccccatccccctctgtttcccctcccccaaacttcatcccattttaacctattcccagaaattctgggtgtcaccagagagcattatgtgcagcaaaacagaa

SEQ ID NO: 38448 - DNA, 1046 bp, Homo sapiens
caccatgttagtcaggctggtctccaactcccaacctcaactgatctgcctgcctcggcctcccaaagtgctgggttacaggtgtgagccaccacacccagccaaaacctttttagttttcaagagccattgtaatttccttttttgttaatagtgtttgtgccttttgcccattacaaaatcagattgttagttttttacttagtgatttgtgaaagctctatttgtggcagctctttctaattaaggaaattaaccttttatgagttgcaaatattttcttattcagtgtctttttagctttggtaaacggtttaggctatgcagagatgttgtatttctaaaatcatcagtttttcttttatggcttctaggtttaatgttgtacccagaaagtccccaccctgagactataaaaatttctcttacggtttatgtattatttaacatttaatctttgatccatctggattatttgggattaggagtcaagtatatccttcattagtttgattttgttagcttctctctttcctcttaggtctttactccatggctaaccctatattttttctttttcagttctttatagctccaagctctacagattcttcaaatatattgagaatagggatgttgcaaaaacagtgttaaaggaacggggcctaaaaaacattcgcattggaattgaaggtaaaaaaaaaaaaaaaatcccagtcaacattcaggttgggtctattgccacagcttacatcctcaaaatttagcctccagaggcctagaaaataggcatacatgaaaaccacattcttactcaagtttgaatgttcctgttttttcctcatttttcttttcattttatctccagttgaaaatggttcaaagcagccacagaaacaagttcgagtttactacttcaggataaagagcagcaagggcaaaggacagtggtagggagatacagcagggcttgtgggctcaccagatgagagcgtcgttctgccaccagtcttggtgaagatgtttctggtatctggaagggtcct

SEQ ID NO: 38449 - DNA, 1057 bp, Homo sapiens
gcggcgccagattgagacaaagaggcgccgccgccattttgtgacgttcagcacggggcggtggcgggggctcccggcccatcggagggtttcctagtcttggagtggaagtctttatattcctcattggggcatgagccaggatgggggttacctgggagttgggaaccacaaaggggagccgatagccgagttgtattccaggtcacggcctttttatttttatggcgccttttttttttttggcccctcatttaattgggaagcttctcagaatgtttttgtaaagtcactaaccaagaccggacctttcagttcatattaaatggcccccgtagtcaccttactttcatgtagtttcagattttgcagcctgaatctaatcacctttttctaagaccgaaagatcttccttgaacttaagattcgttctttcatcgcttcccattaaaatggaggcttaagacaggtgccagcagtgtttttaaaaattttcaccagtggtttggtcttagaacttactcctgggcacagggtgtggtcacggcaaataggatgtgtctggactggatattttaattagacaagcccagagtaagaagaacgtggtgtttatggaaagcacttcagctgaattattgagtagatggtttttatgtaattgaaactggtctacaagtttatcagattcatcgtcgaagtgactcagtaataaagctttatcaaatacaagtccgccaaggaagaacaaaaaaataagtccccaaagtgcagtaaattttttagtagcaaatatctctttgtaattttttattaaagtgaaattatctttaagtggtatttagtatattcagtgttgtgtaatcatcacttacacgtagttccaaaacatttccgtcacctccccccgcaggagactactacccattgagcacttactcccagattccctgtcccccttcctctagtccctagcaaccactaatcttcctgtctctctgaacttagctattttagatatttagtatttatggaatcgtgtacttttatgtctggc

SEQ ID NO: 38450 - DNA, 1854 bp, Homo sapiens
gggcattttgtctttagtattctcacatagcctacaacctgttcctgttaggaacaagccaagatagctaagaagttacggaagccatgcaatatgtcaattacattgctttttataaatggacaacttatgtgggcatttttgggcagtatatgacttccttgcaggctcttaagttggaagggtttctgtaaaaaggacagttacgggtataatatggctaagagaaataatacagaacctgaaataaaagtaacttcaccagggagttatcctgacttaggtgacatacagtcccagttggcagttactttaaccaggagccctagcataacctcaagactcttagaaactttagaacatggaaattgttaaaagctttgaattgcacatttagattgtggctattaggaatttttaaagttgtaattcctaaaataacaggtcacactaaccggtcttgtccatattcagggttgagtgtaaaaatgaaaggaatcacaaaactgaacttagacctgtggtttaaggatcaaggtgttcactagaagtcactgttactaatacttgatgacaatgtaaagaaacattaaggattatatttgattgttttcaaagacactggctggatgtggtggctcacacttgtaattcctagcactttgggaggctagggcgggtgggaggatctcttgaagccaggagttggagaccagtctgcccaacatggcaagattcacatttctattaaaaggaatatttagtttgatctctggttcacagttcattgtgggttgcttctgacctccatgtcttaagcagaaagtagggaagttgtagttttaccaagcacaggtaccctgtgtctaccatttgagtatcttagagatccttacaaacgtgatcccgtcagcgtccatgacactcccaccctgttagactgctgtcagtggctttcacacaaacccatatgtggatggaaaatccaggttattactacattcattttagtacagtgctgcctaattagaaattttgttgaagaggtatttcagaatagatacagccagactccaggctcattgacttagtttttcagggtgacctaaccctgtgtaattttgaggagttctacatgataaatacccttggtgatgtgagaaccactagtttagtattttgtccaagtatgctttttttcagagttctgaatgagatttagttgtcatacctagttggtggtaatttcttagttgtatatttttgtactaccagattgttgccttctggttttccatcttttcgagaaagatttctagttaaagttactgaagaaaaactgggttggaagtacatttttctctaaataatccagtagtgttgaatttgattttatgtccactctaatttttttcatcctgttttattagggggattcatcgggtacctgaagataattcagctgtagaccccttaaggttctgagacaaggtcattgaaatttgttttggctgggtgtgatggctcatgcctgtaatcccggtgcattgggaggttgaggcaggtggatcacttgtggtcaggagttggagaccagcttggtcaacatggtgaaaccccgtctctactaacagtacaaaaattagctgggtgtggtggcaggcgcctataatgccagccacttgggaggctgaggcaggagaagtgcttaaacctggtgggtggaggttgccatgagccgagatgtagccacttcactccagcctgagtgaaagcaaaacttcgtctccaaaaaaaaaaaaaaagtttgttttggtaagcctagtataattgattagttttgtccatgcaact

SEQ ID NO: 38451 - DNA, 1049 bp, Homo sapiens
atctttagttttcctcatttctgatgtaaggcattgtatagttgttctactataaaagatgtagaatatggccatgtagtgcctcactgtaagttagtacatgtgtcttgagcaagtggaaatatcaaaacattgatactttgcttctccctaatcatttggaatgtcctgagatggatactatttccagggcaaaattaaaccttccagaaaagtagtctataggttgaaggagtcctcctcttttgaaagccttgttcatttgtggttgtgcacctttatttcagtatatacttcattcagatttcatctggggcaagttagcattcctgtttttgttttgttttttgagaccagtggtgacatagcttactgcagccttggcttcttgggctcaagcgttcctcccacctcagtctcccaagtagctaggactacagtcacacaccaccatgcccagctaattaaaaactttttttaagagacgtggttatgtttctcaggctggtctggaactcctcaagcgatccttctgcctcagcctcccaaagcgctgggattacaggcctgagtcacctttccctggccaagttagcgttgttcactgtttttttatttgctcacaaagccccaaaatgtagagctaaggggaatgttgttgaagttgttgcctaatgctgcctggagctgggcagtggcaatggggggtcggggagggggtggggtggagatgtgaagtttatattggtcatttggagaaggaaatatttgaatattttaaaaaaatgttatgtaagtcttgagatacagaagtttattttttatttaatgttatttatgtatttttttttttttttgagatggagtctctctttgtcacccaggctggagtgctgtggctcgatctcggctcactgccaccttcgcctcccgggttcaagcaattctcctgcctcagcctcccgagtagctgggactacaggcgcgtgtcaccacgcccagctgctttttgtatttttagtagagccagggtttcaccatgttagcca

SEQ ID NO: 38452 - DNA, 1050 bp, Homo sapiens
gaggccgaggtgggcggatcatctgaggtcagtagtttgagatcagcctagccaacatggcaaaacaccgtctctactaaaaatacaaaaattagccggacatgatggtggacacctgtaatcccagctacttgggaggccaaggcaggagagaattgcttgaagccaggaggcacaggttgcagtgaaccaagatcacaccattacactccagtctgggtgacagagcaggactctgtctcaaaaacaaaaacaaaaacaaagaccaacagcaacaacaaaaaaacaaaaagtgcaaggtgaagcagcaagtgctgatgtagaagctgcaagttatccagaagatctacctaagataatggatgaaggtgactacactaaacattttcattgtagaaaaaagccttccattggaacaagatgccatctgggactttcatagctagagaggggaagccaacgcctggtttcaaagcttcaaaggacagtcttactcttgattttttgttttgcttttggtacaggctcttgctctgtggcccaggctggagtgtagtggcacaaacacggctcaacctcctgggctcaagcgattctcctgcctcagcttcccaagtagctgggaccacaggcacgcgccaccatgctcagctgatttgtaaaaatttttttgtagagattgggtctcaccatgttgcccaggagaccagtctggtgagaccccatctttacaaactcctgaactccgctgggattgcaggcgtggagcttctatgccccgcccaggctaactcgttgaggactgaggcagctggtggaagccaatgctcatttattgttctgaaattcccaagacccttaattgtgctgaatttactctgcctgtgccctataaatggaacgaagcctgggtgacagcccatctgtttataggatggtttactgtttttttttctttttttctttttttttcagacaggagtcttgctctgtcgcccaggctggagtgcggtggtgctatctcggctcactgcaacctctgcctcccag

SEQ ID NO: 38453 - DNA, 1034 bp, Homo sapiens
atatttttatgtatatatattatatatatttatatatttttatgtatatattatatatatttatatatattttatgtatatatattatatatatttatatattatgtatatatattatatatattttatatattttatgtatatatattatatatatttatatatattttatgtatatatattatatatttatatattttatatatgtatattttatatatatttatatattatatatatttatatattttatatatatacacacacatagagatatatgtacatatgcatagagataatacacatatattttgtaatgtgtatatatacaccatatatattatctattcaaaagtaaataaagttgaacattttaaaataatgctttgcggcgctgcggcagtccagatcaaaaatggcggcagttggtgtgttctcggtttctcggctgctgggtcggtcccgcccacagctggggcggcctatgtcgagtggcgcccatggagaagagggctcagctcgcatgtggaagaccctcaccttcttcgtcgcgctccccggggtggcagtcagcatgctgaatgtgtacctgaagtcgcaccacggagagcacgagagacccgagttcatcgcctacccccatctccgcatcaggaccaagccgtttccctggggagatggtaaccatactctattccataaccctcatgtgaatccacttccaactggctacgaagatgaataaagagaatctggaccactacccgggcaccagggaccacagcactggtttggaccattactctgcacatggaccagaaaaagtatatgggaccttaagctcaccttctttacttgtatcaaatgatgactggtatactggtctcccatccctttgcttgtggcgggagatggcttaaataaataacttaaacttaaaaaaataaaataaaataatgctttgtctttaactcagaagtttcgcttctacgaatttatccttagtaaatgatcatggcaaagatttagcttaa

SEQ ID NO: 38454 - DNA, 1003 bp, Homo sapiens
cgacgcttgctctgtttgtggggtgacgggactcaggcgggacagtgctgcagctccctggcttctgtggggcccctcacctacttacccaggtgggtcccggctctgtgggtgatggggaggggcattgctgactgtgtatataggataattatgaaaagcagttctggatggtgtgccttccagatcctctctggggctgtgttttgagcagcaggtagcctgctggttttatctgagtgaaatactgtacaggggaataaaagagatcttatttttttttttatacttggcgttttttgaataaaaaccttttgtcttaactcgtggcttctaatcgtctgtgcggaggcattgctaacctgcatttattgagcatttggtaagtgccaaagaattgtaggagaaaggaattctcagcctaaatctggcttccttcaacattgggatttctaggatagtcatcttcctgaaacgaatgtatggtcaaggggtaggaccagtattgtcaaaatttgggcaatatctggcatgggaggcctaataaaataaccttttccagattacaattttaaagctatgcaaataggatagatgtgacaattttcaagtgttcaatagccatttatggctagtggccacctcatataaaacatcattgcagaaagttctattggatggggctgatctagagataacaaatacatacctattaccaaactaacccttgaagcttttatcagttgtctgccactgatagtaaaacattttgagcatgtccccttggtacacgtgaagtttattgaaaaactattgcctctattactctcggttcctgattcaagtttccttcacctttagtgtgaggtttagtttcttttcgagactgagtctctgtcaaccaggctggaccagctggcgtgccactgccagtggcacgatctcggctcactgcaactttcacttcccgggttcaagcagttctacctcagcctcctgagta

SEQ ID NO: 38455 - DNA, 1088 bp, Homo sapiens
atatgtatacacacacacatacacacacgtgcacacacatatatatatattataattttttggttttttttttgagacagtctcactctgtcgcccagactggagtgcagtggcacgatctcagctcactgcaagctccatctcccgggctcaagcaatcctcccacttcagcctcccaagtagttgggactatagccttgcaccaccatgcctggctaatttttgtattttttgtagagacagggttttgccatgttgcccaggctggtcctgaactcctggactcaagccatttacctgcttcagcctcctaaagtgctgggattacaggcgtgagccactgcacctggccaaagacattttttaaaacacacagccataatgcaattatcacatctaaaaaatagtaatagctcctttatgtaatctaatatacagtcgtattcataaatctattcaacagtttgaatcagggtccaaatcagagctgcgtattatagttggttgtctttcttaatcctccagctcccatccatctctctttcccttaggagtttgtagctgtagcccttgtttttctggccaagcagtaacattacactggtttttaaagtactttactatttgcaaagaacttggacatactgatttcctttagtagggcccaatatctctttaaggtagatgtatcaagccattttataaggtgaaatatccaagattcaggggtctaatgagcttcttgaactcaaatacctgtgcttggctttaatacctgtgctctctatatgacttggtggtgtctcaacttcaatccttgtccttggacttctaatggcttcacctattatatttaatgctctaaagcaggcagtgcctttcttattgcttatctttctaaaaaaaattgtagtagaagtatgtttattaaaaaatcaaaacaacattctactgtaaagatatatgcacatgtatgtttattgcaacactgttcacaatagtaaagacttggaaccaacccaaatgcccatcaatgatagactggataaagaaaatgtgacacatttacaccatggaatactatgca

SEQ ID NO: 38456 - DNA, 1051 bp, Homo sapiens
ccatttcagcttcaattatgtgttgaatttcctcaagtggacgcttaatgatccttctgaacagattgtttatgctgaatgaagcccttcagagagcatttgctcctccctttctccactgctttttgctggtgcactcagctcacagtttttgactaaatgtttgaattttatccacccagcaggcagaaaaatagaactaaaccctccctcccactctctgaagtgctggggaactatctcactggctgtgaaaacaaagggctaatgggcaaacaacagcccccatttcagtgccccaaaatagggttcagcaccttgtctgttgttccctttgctccctagatggctaacagtttggagtgggtacagttaccgagcatggcaccttaccaacttatgacctcatgttgttagtcaggttttcctccttaagacgaaagacagaagtagagaacttttaaaattgacttatttttaaggtatattttgggatggcaggtatatcagttaggattaagtttggctgtgaataatagagatccagaatttcagtgctggctgggcatggaggctcacacctgtaatctcagcactttgggaggccaaggtgggagttcacttaagcccaggagttcaagaccagcctaggcaatatagtaagatcctgtctcttaaaaaaaaaaaaaaaaagacagtgccagtggcttaaataaggtagaagtgtatttattcctttggtaacaataataattatgccagctaacttttatgtaatgcttactttatgccaggcactgttgttagcacttttcatatattaactaacttatttaatccataaaatatcctatgacactagtactgatattaccactttaacagatgaggaattgagacacagaaagtaaagccatttgtgcaaagtcacatagctactgaatgacagagccaggacttgagctctgcagcctggcttcagagtctgctcttagccatgtgcttgctattctgtctgacaaaaaagccacaggtcactagggctggtgtg

SEQ ID NO: 38457 - DNA, 1045 bp, Homo sapiens
gatttacttaatgcagaatttctgttaacttctcaaacccttttgtgtgctgtgatctttgctaatctccaagatggggatatctaatgcaacatttctcaaccatatttgtctgtggaacccccccttttttttgagtgttctgtaggattgatgttttgcagaacccatcttgagaaataccatcttgttggaattaagtcctagaagcactcacaggcttgactcatcttcctttacatgcataccttctcttttgagtggcaagactgtgggtctgccttatcagaacttgggaattccatctttaaaataaactgtgggggctttctgatcctagctgttctccctatatatgagtgtgagtgtgctagacagctcactgagctgaaatcaaagaaattttccaggccatcttcagggatctgagtataattcattgaacatgagacctgaagtatcattttctaaaactgaacgaacaaatgccaaggaagagaaagatatgttggacctgatgggactagcatgagaaatggcctgtccagtgttgtagtgagatcttcaagaacaaatatgttcttgaagggacatatttgcccacctgacacagacagtagaggggcaggcccttgtttcttaacatcaggttagcctggtcctcacttggccttaaagaccccattgaagacactcgaatctatctttctctctccatttttagataagacctctggactttcttcaccttttgttttacagaagaggatgtggagaactttgacgtgaccaacttgtctcaagacatgctgcgaagcattgaggctgacagcttttggtgcatgagcaagctgctggatggaatccaggtgagctgcttctgcccttgtgggaacaaacgtctaggtccagaggctcccagcagggctttggtttctttcttgctcttctgtatcaggcaggaccacccacccacccactatggctcctcctccttttcatccatctctatccttcttcattggctttacagctttcaaacagc

SEQ ID NO: 38458 - DNA, 1085 bp, Homo sapiens
catgaccctttccagcgcactgagtgctgctggcagcaccgggatccttccacatctcagcaggaaggtgaagtgagaactgtgctgttatatcaagttcttctttccccttggtttcctatcaccaggctctatcggttctccttcagcagctctcttcagtacgcccgttccccacttccccagccacagctctggtccagcttcctcctcagagggcttgccttctccatactcttctcttccaaactatctgtcacgcaattgcatctttctgcagctctgttctggccacgtccctcttctgctctgaagcctcccatagctctccattgccttcagcatccagcctgtcgtccggccttgtccttcacgttatgatgtaactcataactcctgggcttgatatggggtcctcaggcctggctgataccccagcaggactttatacagcttcccaggacttgtgtggggtggggaaattgagatgtggctcttcctaaggcacatgtctttgaggaacagccttacaggaattcctcagctttggcctagagtcatagaatgttagaacgaaaggacaactcaggaagctctgctgttgactgatgtttaagtgaggcatggggagagaagtcggtgggatctctaacactagtgaagttgtagtagctcccataggactctgcctgtcctgacaccagctaacaaatgttattcccaggctttcctactcattggattttctgcttcacccaagcaaagcctttctcccttacctgctgcccacccccacccccaacattgtatatctttctctcttctttcccaggttctcttttcatgaaaaccttcattgagttgttccactcactctattttatgacttagcatttcaatcttctgaacccatttgtttattcacagttacttcccgtatgtcacatgtggaattttttttccgctgtgtcttatcaccctggcccagctgttagccctcacgtttgggccccttgtgcaggtctcttgacatccctcaaccggagcctagcacagagtgtatgctgccctcttctgggggataa

SEQ ID NO: 38459 - DNA, 1075 bp, Homo sapiens
gagtgctagagagaatattgagcattcagcctggaaaagttggcaggactgggtcatgcagggtgttacagacatgttgcagagttagtctaggggcagggggaaacagaagatatgaagtggagatctgactgttgatgtttgtgtttttctggataggttagtctggctgtagtgaagagacgacatggtgctgggaacaagaataaaggcagtaatcatggccagtgatgatggtggctaggttagagaagtagcagcagggatggccagagtggatagattcaagaggtagttaaggaggtagaatccacaggtctgtgggactgatgtgctgtggggactgcaagggagctcagatcatgtctaggtttctttctattggggcacctgagttgatgatgatgcatttactaaaataggagtagttggagcagacaaatttagttttcaactggaaagtttaaggcacctgaggacatcaatggagctgttcagtggttatttgaatgtgtggatctggagcctgaaggacaggccaagttgagattctaggtttggggatcatgagccatggaagtggatgaaccactgttaccgtctctgtggtattaagagccaaagggcaagttcttagccatgagaaacaccaacattaggggatgagtagtagaagaggggcctgcagggcagactgatgaatggccaaagagagagatggaaaaagagggatgtggggcagggatgtggggcaggcagagctggcacatgcctgtcctcacagctacttaggaggctgaggtgagaggatcacttgaagccaggagttcaagaccagcctgggcaacatagtgagacccccatctcaaaaaaaaaaaaaattaggcatgatggcatatgcctgtgatcccacctactcaggaggctgaggctggagcatcccttgaacccaggagtttaagtctccagtaagctgtgactgtgccactgtactccagcctgggcaaaagagccagaccctatctctttaaaaaaaaaaaaagacattacatggtgtcctttgagccttcctggc

SEQ ID NO: 38460 - DNA, 1034 bp, Homo sapiens
ctgtttgtcagagttttgtttttttgttttgttttgtttttttgagatggagtctcactctgtcacccagactggagtgcagtggtgtgatctctgcttactccaacctccacctcccggattcaagcgattctcctgcctcagcctcctgagtagctgggattacagatgtgtgccactgcgcctggctaatttttgtatttttagtagagacggcgtttcaccatgttggccaggcatgtcttgagctcccaacctcaggtaatccacctgccttggcctcccaaagtgctgggattacaggcatgagccactgtgcctggcctgtcagagttttaaacatgagtgactccattttgattttgacaactttctctggctgtttttaacatagtttatttggctttagtttccagcagtttggttatgatgcatttggaagtggatttctttgggcatttactgtttgggaaattctgagctttttgagtctgtaaattcatgccttttgccattgtttggaagtgtttaaccattatttcttcaaatattttttagcgccaaatatttttttctacctccttttctttgtagggactctgatgacataagtattggatcgtctggtattgttccctgggtccctgaggctgtattcacttttttttcccatttgtttttcacgtttgatacttttcattgatctatcttcaagtttagtggcttcctccacccccatcatcatcattctgctattgaacctatctagtgaaatttttgtttttgttactgtactttttaattctaaaatttccattcggttctttctgcagagactcactatctttctattcattttttaagagtcttactcctgtgttttaggttatggttataatggctattctttaaattatggtaaaaaacacaacataaaatttaccatcttaaccatttttaagtgttgttgaaagaaaaactttacataaataaagtttagcagagattatttgagaaaagaatcaattcatgaa

SEQ ID NO: 38461 - DNA, 1782 bp, Homo sapiens
gggaaggcccagaggaagatcagtgccatccacatcctcgatgtccttgtgctgaatggcaccgacgttcgggagcagcactttaaccagcggtctgacctgggccccagggtagggagggtgggggtaggccagggcagcttgggaggacagcggcctcccgaggtgtggccccttatctaggccttctctgcttgttgacatcctgagagtttccccctcccacccactgactggtcccaaagtcagggtgagaattggagttgccacttcagagtttgctagggcttgggccctggttatcagagataccagcacactccattttgccacagctgctcaggttgaggtatttatgttaaggttgagcaagagggtgaccttgcgggtagagggggtactccttggaagaaatatcctgtgcttgagtggtcccatttaagttgctcatctgagtgggtgcactgtagtttccatgctttggggtgacagggcagacacatacaataaagatgatacttgaagttctagtggaggtgactgagcacagctgaaggcacacttcaggaaaaccaaccgacatagtgaaattagaggtcagaatccacaggggcggggcatgaataaagacgtcggtggagaagggcagggcgggcttcctgggggacatgggtgctgcctcttagagcagtcttgccgcagattcagaaggttctcctactggagctgtgaaaatgccctgggggtaggggtgctggtggaggcatccttggcttgcctctcagagagactgtttggattgtagaattcagcttgccgagaaatttgtgaaagccgtttccaagcctagtcggcccgacatgaatcccatcaggtgagcatgtggtccctaccctccatgcttctttctggccagtacctgctgctcccgtccagtgagggacaggagggctcagtggagggcactaggcaagtgggtgttagagacaagaccattcttgccatgaagtttgtttgggggtgctaggtaggtgacttgccccagagcatctccccatcctgcctggcagtgggtgaacttcattctgaggggttaaggcatccttgtttaggatgcacgtgcttctgagagtgccagcccacctcatgaatacccgttcccacttgagcattgttagcacattacctggccttttaattttttttcaggtaagaaatgggtgctgagggaataggaattttgaacatgaaaaagagaaggattgtttgagggaatgggacccccagtgctgagggagaaggaggccagggttgtaatgttagatagtgggaaagttccaggaccctgagagagaaaggaggaagagaacagagtcaggaggagacagatggaggacacacttttccagggtaggctgaggtctgaggttattgccaaagggcactgcttagccctgctctcgggagcttcatgcggctggagactgaggtatctatttacactttatccacattgtttttgttctttttaacataaatttacttagttaaaattaaatccagtattgagaatgcactttatagatggcatgtgaaagtttcaaaggaatttctttctgcactttaaaatgtcctgtctgctaggtcctgaaagacagctcccagggggaaccctgccttcattgcttgtggtttggttgctcgatttctgggaacgttccccactagcagttccaaagacatgttcagggcccccaagagctgagcatgggcatcaaacaa

SEQ ID NO: 38462 - DNA, 1026 bp, Homo sapiens
agatccagtttcctcagttggctctcaaattctcctctttctcaatttaagtaaaaatgataaaaatgttgacagtgggtagcatatattgtttggccatcatgtgttaaggcgaaaaaaatgtgaggtgggaaatcagctcctcttcctccccccattactgtttaaattctcctggtaacactttaagcttcatggattgccacctaacaggtgcctccatcataccacatgactgtagttctgcagtaagaaagctggagactttgaaggctggcttttgtgatttgagtcccttttctcttttatcgttttgttttagttttattttttgagagattccgtatatttggagacatagaggcaggaaggaagattgtttctggtgaggacatcttgggaagaagtatggaagtagttttccctttgctatctcccatattgtaggaatggttaacagaaattaagagtaattttgggagtgcagagaaagattagaaagtggatcttaatgtagacttctgtggaagttgtcgtatctcaaggttatgacaaagaagtggattttcattttctcatttttctgcctttctcaaaaatttccctgtggaaggacattagtcaaaaataagttgtggcatataaaaagtcctaaaaatgtgaaaatatttctagtcttcccttcattttgatttgaaaataattggtttgcctgtgaagtgctttcatggactgtctaattcccacaagaatcttgcgaggtaggaaccattatctcattattagctggggaaactgaggctttgggtggataatttgccgcttcacacagggagtgtagggtggagctggtgagctctttagagtgcgtagtaccatcatgtttatggtatcagtctgctgccctggaaaaatcttgtgtcacaagcctcagattgtaactcattgtaagacatatgtcctaaagaaagtcgctgccagtggcagctaatgctcaggatgtatcaggtctctttcctggcaaca

SEQ ID NO: 38463 - DNA, 1014 bp, Homo sapiens
ctagacataaatgttcagtctggtatttagagaataatggaatagttaaatatggggcttattaggtaaattattcattgttttgattttaaaaaagaagctcttctaacaagtcatgacaaagcaaatatcatatgggttcattttctttagggaaatagattttgttagtatttcatttttataatcattgctgttgaagcattttgcctacaaactaaattggctggataaaagatgtactttaagatagggatgggtagagataaggataggggtaatctcctaaaataaatttcatttctgaaatcggtaataatagaaagttgattgaaaacataacatgatttgttttattccactttatttttggcaatcataagatactgactagtttagaatcaatgtatatattttttccctctgagcccaggcttagtgaattgctgtcaaacatcacctttgttactgtcactgtgtagatcatctagctagtgtgcttggctcctcatagtgtgtggacttcacactcattttgcctcttcagtctcagtctcccaattgtaacatgttgccacactttaaccagcttaacttgggctttcaagatcatgtgaacacagtatgaattactaatcagtagaatgttcgttccattgatgtcactacttatcccttgattataaaacccccttaaacattctattaaaaaacaaaatgcttgcttgtggagttttactttgcatctttgagtattgtgtgcatctgaagataaaacatgatttaaattaagtattcactgtcggttcatttatctgcttgccctattttcctcattacatttgggggattcagaaaataggaaactcgtccctttgatgtgatggaacacagggaaataatttttttttttaatttaaagaaacatagtcttctttctattggtttgaggcaatagctttttagagttaggtccagttagcatatggctcttttggttttatcatcttctct

SEQ ID NO: 38464 - DNA, 1054 bp, Homo sapiens
tccagtctgggcaacacagtgagactccatctcaaaaaaaaaaaaaaagtgtctaataatcagaatctaaaactgtatcctagaatggcactgcccagtatggtggccattagctgtaagtaataatttaaattcagattaaagttaaaaatgtggtttctcagtcacagtagctacttttaagtactcactagctcagtaactagtgattaccctattgaggaacacagatatacaacattttcatccttcaagaaagttatgttggacagtgctgttctagaatgttgactgatgggcagccagaattttcaagcctgttttcttgtgggctctctagatccctttttttcttacattctgaacatgagggacttagctaatttagctctaaatttctttccggccctaacatagtttatttccactgggagaagcaatgctattgttaatccagattactgggatgtgttcctttggtcaggaatgggaattaacatttcagtaatgggaattataatgtagtctgtaatttgaaccttttttgaagtgttacttttgagtcagacattttagctcttttagcactgttaaactggcaacctcagcggcttgtacagggaggtattggtctaacaatcagtttctttttggttcaaagaatttttgaagctactcacctttttgaaagttgataggttgtagataggctctagttagcttttatgacttttgtggaggaaaaatatttgttttcacaaatgtaaatctcatggcagctttttatatgtgattagggataagtgcattggattttctggtaaattcaggttaccatatatagagaaaggtggggtatattggaatttccagcagtagtggacaaaaccaaactgatctgtgatgcacccaggctaatagaaataagtgaatgaaaatgcatgtcatccatgaggctgagggacagagctgcaacagtgccaggcacctgaagttttggctacagctattaactcgagggatgatgtactagctaactacatctgttcattta

SEQ ID NO: 38465 - DNA, 2819 bp, Homo sapiens
tcgctgtgtcgcccaggctggagtgcagtggcgccatcttggctcactgcaacctctgcctcccggattcaagccgatttcttctgcctcagcctcccgagtagctgggactacaggtgcctgccaccacacccggctaattttttgtatttttagtagagacggggtttcaccgtgttagccaggatggtctcaatctccttacctcgtgatccgcccgcctcggcctcccaaagtgctgggattacaggcatgagccactatgcccggcctggatggtattattctttttcttcagttgctgctgaaatctaaaaaaaccaggtttttcaagtccttatgtgttcgtgtgtgaaactttgcttgtacatacaaaatttttacattgtttaactttactgcatgcagtttagtttgccttttccttttaatataacttaaaggtattctcttacgaagtggagaactgttctgtggactgatcagcagtgggtttgagcctgtaaatcgccactgcactccagcctgggtaacataatgaggctttgttgctttaaaaaaaaaaaaagtggaggatgccagacttggtggctcatgcctgtaatcccagcactttgggtggctgaggtgggcagatcacctgaggtcaggagttcgagaccagcctggacaacatggtaaaaccccatctctactgaaaatacagaaattagctgggcttaatggcctgcgcctgtaatcccagctactcgggaagctgaagcaggcgaatcacttgaatcaggaggtggaggttgcagtgagccaagattgcactactgcactccagcctgggcaatagagtgagactccggctcgaaaaatgaaatgaaataaaataaaataaatggagaagtgtttttgtatattgacccacaaaaatacttgcatgtagaaacttttaattttttttattgatttgggaggacatgttcatgtagtctctgaggcctgagttccctgtttctgtggatcagtcactgttaactagctcaccctgttcccccaacctcacccatgctgtagcacttccaatatgtgcttaaaaccgtgcattttatttgtaaggctgatgatcttcttcagggaatattgagcaggatctattaaggaacagttgctttgacttaaatgaaaaagtctttgcaactgacagataaaatcttgagtgaaaatgtgtggagtactgcactcttgtatagtaggatctctttaggggatctcaaaaatcctgatctgtggaagtgtatgtccctacaaactgcattttcttacccttggttttaaactttctaggattatatattctaatatgatagttgaaagccaccaaatttacctaaatagttttcattctaaataaattagatttttacattgtgtgtgtttttggttggagttagggacaggaagagtagactgttggttttgtgtttaaagttgcggtgcagaaaagtcattggacagagatctgtgtaatttggaggtgagttggaagggaaaggacacagaaggtggtcaaaggggaagactggggcaagggggatgaggatggggacacacagaggaaagtagaatggtgggattataattgggaatgaagttgctttgtggccaccatcgtttagtcaaactgtgagaggtggtctcatctgtaaggctagagtaattaatgtgaaaaggtggtggttagggtgaatgagatgttctgtcttttcttgaagtgtggtatgtgagtcccctgggaccttacaggaaagtgctaatgatcacaggatgacagctgagatacagattccaaactaaagtttagtggaaatagcagcagctttcagcaaaattggtgttccatcattttagaaacccacgggctcttctgctaagaccatagataccttcttagccagttaaagaaaaatgcttcatggtttctctttgcagcaggccatggagactcaacctacctttcttttattgatattgccacaacctattaattccattccttgggattgatttttcttctctcctctttcccccatgcctggtggggaattcaacagtcttgcccatcgtctgtttaacttgctcttcttagaaaaacaactcacacaagcccttcttttttaaaagattttacagtgaatacatatggggaagttacattagatcttaaagaatttaacagtagtatttcctggggaatgggaccttttcttatttgctgagaggctgatgaagggccccctttctcgtctatcccaaactcctccaaaactccgaagatgaagggcatactgatctcttatctccagaaaaccagctgaaccaagtggctaggcatgggttttggaatcaaagatctggattggaatcaaagacgtgagtttacctctgtgtctctttatctttaaaaaaatagtatcttagagttggctttgagatttaatgagctctgatgcctctcaagcccttgccacagagcctggtcatggtaattacatttattaaaggccagcttcccaacttgaaagaaggagcactgatggcagattagtaaatacagaactatcttacctcatatgggaaatttgcatttatagtgatctccagactgatgccaccttattaattggtgaagtttctgaccagcttttggcccctttggccattttccagagccagtcctttttccagcaagtgttaagcactctattgtgtgtcttgagctatgctaggcaagagataccttggtctggcttctgccctgagaaagctca

SEQ ID NO: 38466 - DNA, 1046 bp, Homo sapiens
attagtcaccaaattgattttcttggttttatctgtcttgtctctccctccttgccatcactgtcaccctaattcagtgagcctctgcttcctgcttggcctcttgcctcttttttttttttttcttttttgagacagtgtctcgcactgtcacccaggctggagtgcagcggtgtgacaggcacatgccaccatgcctgactaattttatcgttttcttttttttttttcaggtagagatggggtttcaccttgttgtccaggctggtctcgaactcctgacctcaggtgatccacctgccttggcctccttacgtgctgggattacaggtgtgagtcaccacgcccagccattgatctgttgcctcttactagagcttcttgttggattccagttttttcccactctattttattcatttgtggcctttggaaaatagatctgttcatttcatttacccaccaaaaaaggataagttcttactctttgaaataaaaatcaaactccttagtctgcctcctgaaataaaaatcaaattccttagtctgcctccaaactatcttgtttagcccagtctcccaccctttcccacatatactgtatttgagctacgtaaaactaattgttgttccctacttacagtattctctgaagatctcaaagtgttgttgcacagttatgaatggatttcataatgaccctgaatcctaaaatagaattatttttaaaatttttgttcaagaatgaaaggcagtatatgtatagaagtaaagatttctgtccaagagagttaaaattggaaaaaaataccttatatctaaggggacagattttcagccattaggaaaaattggctacttagagaagatactcaggtgcacagaaatttgaccagctattatagtgtaagttgcacattgcctgtttgagctccctcagtagctcaatttctgttgttgtttttgttaattaaagattgattctttaaaggcacagaaacaatagctgatacattgcagtaaagtgttcatcttaggcatataaa

SEQ ID NO: 38467 - DNA, 1808 bp, Homo sapiens
cgctaagggagtcattttggattttgtggcaatttaatttttttttttttttttgagacagagtctcactctgttgcccaggctggagtacagtagtgccgtctcgtctcacggcagcctccacctcccaggttcaggcaattctcctgccttagcctcccgagtagctgggatgacaagagtgtgccaccatgcctggctaactcttttttttttttttttaagtagagatagcgtttcaccatgttggccaggctagtctcgaactcctgacctcaggtgatccacttgccttggcctcccaaagtgctgggattacaagcatgagccactgcgcctggcagcaattgaaatttgtgtccataatttagttcagggcaacacctccccgccccatattctttggcagaggtttgaaccccatattctttgacagaggtttgaacctaatgaaagagggaaggaatttagttttgatgttagagacttttttcttaccagggacacttgaatcaatatgttaaaatttgaagagaggagtgagtactctctctagtatcttttctttttggggggcaggtggtgggactgcattgatttaaccattgtgaaatctaggttccattttgaaaaagaagagcatatgtagaccttcatgtactttgcatatacacagtgtacttcgttggtgcctcagtctttaaggattaactaggaagaattttctttctgcatagaaactttataaaataacgacattgttaataattcaggcataatattacattatacctttcttgaatgctgacgttgcatacaagggtgatctgtaaacctccatcatttccttgctctcacttttagacctatttcctgacataaaaccttggtggtagttctggttttttttttttcttcttctttttttatttttgagacagggtctcactgtgtcgcccaggctggctggcatgcagtggtgctcaagtgatcctccagcctgtgcctcctgagtagctgggacaacaagcacaagccaccaggtctggctaatttttatatttttggtagagacccagtttcgccatgttgcccggccggtctcaaactcctgagctcaaagtgatctgccccactcggcctcccagattgctgggattacaggcatgagccactgtgcctggctggttctgtttcttctctagtcttacttctgtcaggctcacttacctgacttcatgtagaagcattcttcctggatccatgttattctcttttctgctaacctgatattctctttctagcagtgctagttacttgtttctttcagtattcagcatatatagcttttcgtgactgcttcagattacactcaaaattccacctgcacaatgaagcagataccacctacggacttccaccttcccttatttccccttccatttagtcaggggcaccctccactccacctgtgtatggtttgtatttactttaggttgtctttaagttctaaactcctcaaggcacaatttgattttgttctcttgatactgtgcctaatacctttgtatttcataaataataaaatatacatatttcttattttttatatacaataattttgtgaggatgtatttaataatgctaattaacaaagcaaatactgtacctaaaacaaaatgcatggttataattgtccgtttggttttttatttttattttttttgagagtgaaagtttattacaaatgaaagatttgacaaattattaaaaaagctgacaacccacataaacatcgcaaaatctag

SEQ ID NO: 38468 - DNA, 1123 bp, Homo sapiens
tgttccatccatcttcagggtacttctcatgacatttcatttgagcaactaggctttgtattttgttactgcttgcatttagcactcaattcttacttttagataataagaaaaaacaggtattttaaaaaaggacatgtagctgctaataatagcatgagtcctatggttccttctctgttcatatcctagctgacaacacatacaagcattgctttgctggaatattctgaaattaacaattttgaataagtttatacatgtatgtttataaatcctttcccagttaacattttttaattttgtgtttttaagtaaatagcacttcagtttgagtccctataggttgactattatcaaatttgagatgcttacatgagtgatccccgattgctgatatttggacatttgggtctcaatagagagattgcaggttgaatggaaagaccatgaacctgagagccagaagccctcagctctcttgttctgacactgttactatctgaatggctgcgaagaagccctttatttctttgagatgtggttgccttttctgtaacatgtgatctgtattgttctacctcattgggttgtgtagatagagttaatactctaaacaatttcacaaatatatagtggatattattattaatagtaagttttatggagtaaacatattaaaaggtactcaaagtgtcggaagtatggccagactaacactatcacattagttataattgttgctaattcacaaaaccagattgctttatcagtttatttcaagataagcacacagttctggtattgtagagttcttgataatctgagatttgaatatcaacatatagaacagcagtagttattctaaattcaatttttattttgaaacaatttaaactatcttgacaattcatcctagttttcagtatgttaaaagtgactctagccaaatggcagagcaggcagctccaaacacactaatctctttacagaaacatcggaagatgagcagaaactgtcagaaacaactttatcgaaactctcaaaatagtcaaagcgttatagtaactaaatgttttcatcaccacacacacacaacaaccctgtatgttttagctatcac

SEQ ID NO: 38469 - DNA, 1050 bp, Homo sapiens
gatgcataaaaagaattgtatcccatgactaagtgagataatctcaggagtataaggttggtttaacatctgaaaatcaattaatgtaatacatcaacagaatgaaaaacaaattatatcatcatctcaatagaggcagaaaaagcattttatgaaacaacacttttgataaaaacattcaacaaactatgaatcgagtggaacttcctcaatctgataaaaggcttctagctattactttttaactgtgttattttagtggttacttttatctttaacgtatgacagtctgccttcaagtgatactatacaatttcaggatcttctgtttttgtttgtttgtttgtttttttgaaggtggagtcttgctctgttgcccaggctggagtgcagtggcacaatctcggctcactgcaacctctgcctcccaggtgctagcgattctcctgcctcagcctcctgagtagctgggattacaggcgcatgccacaatgcccagctgatttttgtatttttagtagagacgtggttttaccatgttggccaggctggtctcgaactcctgaactcaggtgatccacctgccttggcttcccaaagtgctgggattacaggggtgagccaccgcgcccggcccaggacctttgtttctatctcttcaactttgtgttattgttgtcatgcactttcacttctccatatgttataaaacccgtactacactgttactaattttgctttacacatttgtcttaggctgggtgccgtggctgacacctgtaatcccagcactttgggaggccgaggtgagtggatcccttgagtccaggagttcaagagcagcctgggcaacatggtgaaacctcatttctacaaaaatacagaaaattagctgggcgtggtggctggtgcctgtagttccagctactcaggaggctgaagtgggaggactgcttgagcccaggaggtggaggttgcagtgagctgagatagtaccactgcattccagcctgggcaacagactgtgcctcagaaaaataaagcagttgt

SEQ ID NO: 38470 - DNA, 1050 bp, Homo sapiens
attatgtctgtaaggttcatctttgttgttgcttatggtagtaattctcatcccattgtgtgaatacagaacagtttatggatttattcacttgtgggtagacattggcttatcttccgtctttgttaggtgtaatgctgctgtgaatgttgctttatatgtctcttggaagaaattcagcttcgtatttcaagagtatatagatgagagggaatcggtgagtcataggttatcaatgctaagcttttgcggtagtggctataccagtttactctcccagcatcagcggattagtatttcagtgttccacacctttgccagaatttggatattttcagtcttctagcctctggtggagttatattggtgtggcattttaattttaatttgcattgtctgatgtctactgatgttgaactgttttccatttttttattgaccgcatagatgtctgcatttttgaagtgcctgttcaagtcttttgtccaatttaaattgggaatcaacagtcagcaagtagtcagaaaagaatagcaaaaacacacaaaataaataaattgggagtcagtcttcttattgatttatagttctttttatagtttacgcacatacccacacacacaccccatgtatgtgtattgcagctatcttctcccaatctgtggttgacttttttattcccttagtgttatcttttgatgaacagaagttctcaattttaatgcagtgttatctatcattgttttatgtggtcaggactctttgtgttttaagatatcttttcctattacagagttaaaaaagacattcgagttcattcttctagttttattgttttatatttcgcatttgggtctactgtacacatttacatgtgatgtaaagtaatggtgaaagttcatttttttttcacactgatatcaagttgacccagctccgtttattgaaaagaccattttccctagtgcttgctgtggtagtgttaagccacatgcaggtctgtttctggacttttaattctgttccattggtctgtttgtctgtttctac

SEQ ID NO: 38471 - DNA, 1060 bp, Homo sapiens
agcagtcaacatagattttatagaaataatgcatcctttttgcacttactggtttgggttgtaactgattatattatctacagtaacagaacaggcataattataaggcagatttggaaacagaaaccactgattcttgttagacattcagttcaacaggtgggagtggagatgagcttgtatattgaaaaatagctttgctgcctgagatggcatctggcaagctgtggttatgtcatcctattttatggggggcctcactagcataggttactacagtcagttgagtagagtgttgccaagaaaacttaatgctgctttctttgaagatgagtatgatgcagattcaccatcttagggtgcctaatgtaggttggttgctatggatctgtcttctgccagtcttttatctgtgtgtgtgtgtgtgtgtgtgtgtgtgtgtgtgtgtgtgtgatggtgtaggtagcatatgtttgtgagaggtggcaagttttgtggctaagaagatagactgacctaggactatcaagatcctctgagaacaattacctgtggctcatcaccagtccccagcactgaggagggggaccatgcactctgagttgaattctgtcagtcggatcctgatcccagtgctttttaatacttccgccagagtcttagatggtagcacacagagtatgctcattaagattgtgaaatggcatcaaattgaataggtggctcaatagaaaacttgattaaatttcagaatacctgatggttcaggaaagttggcgaatatacatatggcatttagctggatcagggcaagataattttcttaaggaaagtaaatagttgttgaaatttggtatgggagtagagtttttgtactacacatgatagtacaaagtatcccaaagtgctgagaaaaaccagttaaataagggtcattgataatgcttttgtagttggtccaagtgttgtgggttattgttaagctgataatgcctttgcattcaaaatcattgataagaagtcatataattggaatggtgcttatggaaattacagggct

SEQ ID NO: 38472 - DNA, 1037 bp, Homo sapiens
tgcagtctgttaaatgtataatagcattatgtctaaaaaatgtacatactttaattaagatatatttttgcttaaaaatctgctaacaatcatccaaaccttcagtgaagcacaactttttgctggtggaggattttcccttgatcaaggtggtggttgctgaaggctgggtgggggctctggcagtttcctaaaataagacaacaatgaagtttgctgcatcaattgcctcttttttatgaaatatttctctatagaatgtaatgctgtttgatagcattttacccacagtagaacttctttcagaattggaatcaatcctctcgaaccctgctgctgctttatcagctgagtttatgtaatattctaaatcctttgttatttcaacagtgtttacaacatcttcaggagtagatttaactcaagaaaccattttcattcattactcattcatttcaattttattatgacattgcagtgattcatatcttcaggctctacctctgattctagttctcttgctgtttccaccacatctacagttatttccttcactgaaatctggaacccctcaaagccatccatgagagttggaatcaacttccaaactcctgtgaatgttgcttttttgacctcttcccatgaagaggtatcacagatgttcttaagggcaactagaatggtcagtccttcccagaaaatagtctattatttactttgcccagctgtctatggcagctatattctttttttttttttttttttgagacagagttttgctcttgttgcccaggctggagtgcaatggtgtgatcttgactcactgcaacctccgcctcccgggtttaagcgattctcctgcctcagcctcccgaatagctgggactataggcacaggccaccatgcctggctaattttttttattttattttttcatttttagtagagatggggtttcgccatgttggccaggctggtcttgaactcctgacctcaggtgttctgctcacctcagcctcccgaagtgctgggatta

SEQ ID NO: 38473 - DNA, 1056 bp, Homo sapiens
tgaatgaaatgggaaaaacatctttaaagtcttaccgagagaatacgttgtaggttaggaactaggggtgtgtgtgtttacttggagaactgttttgctgctggtgaaatattctgctaagtggtgagcacacacctgacccaatagccatcattacttaagctgtttctcctttataaaatattcttgggatgtttgaatttagaggaaaggaataagaaaggagaaatgagtatatgcagagtgacagttgctaaaagccattgaaatgttagttgctggtaaactatataccaaattataatgcttctgtgtattgttagaatgagaaatgtttgtatcagacctttgcatgtatgtggaagagggcccaacctggctgggctggatttgctaaagactcgaagctcaaccaaaattcctctctttgaaatgagagaggtttttttgtttgtttgtttgtttgttttttaaactttttgacaactatcttatcattaaccctggtttggcctctgttacctttaaaggctaaaatcatttaagactgtttaaaggatctctctctctcatttttttttttttttttttttgagacggagtttcgcccttgttgcccaggctggagtgcagtggcgcgatctctgcttaccgcaacctccgcctcccgggttcaagtgattgtcccgcctcagcctcccaagtagctgggattacaggcgtgcgccaccacgcctggctaatttttgtgtttttagtagagacagagtttctccatgttggtcacagtggccttgaactcctgagctcaggtgatccgcccaccttggcctcccaaagtgctgggattacaggtgtaagccactgcgcccggcccttttttttttttgagacggaatctggctctgtagccctggctggagtgcagtggtgccatctcagctcactgcagcctctgcctcccgggttcaagcgattccaaaggacttttcttcacaaagacatttaagtatacttctttctcagtcttaagagaaaggccttgacctagaaacc

SEQ ID NO: 38474 - DNA, 1048 bp, Homo sapiens
tgtaattgcacaaattacaaatgtttaaaaagtgaagtgaatttatacaatctagaagtggtttgtttctttctggaatgagcaaaataaaattagctatcgcctgcagcattgggaatctaagtgttgacatctaaggtgagtgatataacaatgctgggcgcagggtgaaatggtagataagccaaaatgctaacatttttcttgaaagtgacttgagtttcatgatagttccagaagaggataacaaattcccatttcataccaagtaaattaaaatatttccttatgaacttgcaacttagtggttgcagttacatactaatctctttcctgctttcatttcctgttagaataccagagtaaaagtggtctgattctagtcacttttgaaaagcaaagagttgtaggttacagctgaattttgaggctttacagtaagagaaacagagtgagtctgacaaattttaagctcatatattttccttttagaaatgtaggaactctgcacaaataatgtagaaacaaattaccaatttcaatacaaaaaattttgcaggatagtggaatttgtaagcttgtcataccttgattttttgaattcaccttttcccaaaagaaagcaactgttggccaggcacagtggctcatgcctgtaatcctaacactttggaaggctgaggtgggcggatcatgaggtcaggagatcgagaccaacctggccaacatggtgaaaccccgtctctactaaaaatacaaaaattagctgggcctggtggcacatgcctgtaattccagctacttgggaggctgaggcagaagaatcgcttgaaccagggagtcggaggttgcagtgagccgagatcacgctgctgtactccagcctagcgacagagcgagactccgtctcaaaaaaaaaaaaaaaaaaaaggcaaaaaaagtaactgctgctcttaagacgaagtgtttgaatagagtatttctgtttttgtaatctttttgacttgattgcttttgtatactctttgatttcttctaagccagacgc

SEQ ID NO: 38475 - DNA, 1031 bp, Homo sapiens
atcctgtgttttctctctctctttttttcagcacttgcttgactatgttaaaagaatgtttctgtaggaaactctgttctttatggtgtagcctcccttactctgaaatgcaagcaagactcgggcaacagttccttaacggattagcagtgctggactgtggcagccttttctaatctcttagtctatagcagtttgatgtcttactaataagcattcttaaattgtgtggttaattattatgctagtcaagatacatgaagcagtgtgttaaagatgatgatgatgatgatgttatggaaattatgtcaaaaataattgttgcatttctaacgggaaacagtgctcagtgctgtgaaatagctgagaggtggcttctttcaggcctcaagtgggaaaattgtgaccatgtgttagagtatgatagggaaaatggaagaaatttagtagttactaggtcttttaagatagtttagtctgtcacttggctttatttcttccctcttgttggtctaaagctgtagtctctttgtggtagacaggattatccattgtggcatagagagaaaatgttagaattcctacttgtgtttatttttgtcctgtatacataatctcattggtatctgtattagtttcctagggttgccacaacaaattgccatacacttggtggtttaaaacaacagaagtttattctctcacagttctggaggccagaagtctaaaaccaaggtaatggcagggttggtttcctctagaacctttgagggagaattcattccatgctgctgcttgtttctggcttgtcaatagttcttggcattcctttgctcatagacatatcattctagtctctgcttcatccacatggccttctcccctgtgagtctctatctttccctcttctgtctcctctaaggacagttgtcattggctcagtcttatcccggattatctcatctggaaatccttaacttaattacatctgcagaagctttttttcccaaaattatcacattcacagattc

SEQ ID NO: 38476 - DNA, 1023 bp, Homo sapiens
cgtggagaaaggtgcttcatataacttgggtagcaatttgagaacttaagtaatgacaatactaagtatttaatattttttcttttgggctgataccagtgggctgggggaggtccctaaatgccagtgggacatcaactctgatcaatggtcaggctcttgacagtgtcttcagtaggaattcaaggatgagttggaaaatagtgaaatgtactaagatttattgcaaaatgaaaagtacatgctcaagaaaggggagtgcgagcatactccagacagggtttggcttctatctgtatgggtttctttaatcaaggggtggagtattcatgaagatttctggaaaaaggtgaaaatttctcaactttagtgccacccatttttacaccagtatgggtgctcccggaactgtcttggcattggtgggtgtgatttagtatgttaatgagcatataatgaggtcctaggtgaaacctaggtcaaatccagtgccatgttgggtccacttcgtcttagctagcttaacccacactctgcttttcagggtcttcttggctcctagcttatgtatgtatttcaacagtttcctttttgctagtcatgtgaaactgctgcctggaattttcttttccccttcaaccaccctgtattattcctgtctcagggcttgggggaaactatatggtattctggaaaaataccacgtggaggcagataattttggacaatgggaaattttgcattggaagatcattgacatagtctttttttcaagacagagtctcgctctgtctcccagggtggattgcagtggtgcagtcttggctcactgcaacctctgcctctccggttcaaacagttctcctgcttcagcctccctgcaccaccatgcccagctaatttttgtatttttagtagagatgaggttttgccatgttggctagtctagtctcgaactcctgaactccagtgatccacctgccttggcctcccaaagtgttaggattataggtgtgagccatg

SEQ ID NO: 38477 - DNA, 1696 bp, Homo sapiens
ggtttgtaaatgcagcaatcagcactctgtaaaaacgcaccaatcagcgctctgtgtctagctaaaggtttgtaaatgcaccaatcagaactctgtaaaatggaccaatcagcaggatgtgggcggggccaaataagggaataaaagctggccacctgagccagcaagggcaaccctctcgggtccccttccacgctgtggaagctttgttcttttgctcttcacaataaatcttgcagctgctcactctttgggtccgcactgcctttaagagctgtaacacttactgtgaatgtctgcggcttcactcctgaagtcagcgagaccacgaacccactgggaggaacaaacaactccggacgcaccacctttaagatctacatgtaacgctcactgcaaaggtctgcggcttcactcctgaagtcatgcgagaccacaaacccaccagaaggaagaaactccgagtacatctgaacacctgaaggaacaaactctggacacaccatctttatgaactgtaacactcgctgcgagggtccgcagcttcattctttaagtcagcgagaccaagaacccactggaaggaaccaattccggacacatgtagcctatggaacaccaagtagatttaacccaaagaagactacttaaaggcatttaataatgaagctccaaaggtcaagaaatggaaaaattccttgaaacaaatgataatggaaacacaacatacccaaacctgtgggatatagcgaaagcagtactaggagggaagttcatagctattagtgcctacatagaaaagaataaaaacttcagataaataacaatgcatcttaactaaaaaagcaagagcaaaccaaacccaaaattagtagaagaaaaagtaaagatacgagcagaaatacatgaatttgagatgagaaataatacaagaaatcaatgaaacaaacagttggctgtttaaaagttaaacaaaagagacaaacctttagccagactaagaaaaaaaaaaagatccaaataaataaaattcgtttctagttcttcagcttccatcctgcttcaccagcaacagtaataccttctctttatgatagtttccagtctgcttctgaatgtagaagccttctttcctccttttctttctttgactttctgctgtttttcctctcaatctagaatttaaagatgttctattgatctaggtgtcaagccctcttaagatctctctattggatatagtactctctcatacagcaacagagtaagtaaataatgcaaggtacattatagataaatagctgtgcgttttcctgtactattcccaacatctcaattatgagtctgttattttacaaatcctacttttctggaagaattgtcaactgtttttggcttgggctagtgttccatatattataatcctttccatattttgttctgttgtaattctatttctccttctgtttcattcttttttcccccctcaggttttccttgtcctcccttctcctaactcctgcaaaataaaacaaatctttgagtgcaaatctttcctcaagacttctggactattgctgtcttttcaaagatcaggtaataaagtaaaagagatatgaactttgatgtcctgctctgatgcctagctgttacaggtgcatttacctaggttctgtatcacatgactaccctacca

SEQ ID NO: 38478 - DNA, 1024 bp, Homo sapiens
tatgtcctgatttttattattatattcagcaaacttattctgtcaagttattataaaattttctaaattctacccttaatttctctacttactttgtttagaccagtaactacttattgaccagttactggtctatttttttagaccagtaacaatttccagaccggcactgatctgtggactgtgagtagcactgtcctggtgtatacagacacagtctcatggatgtcagaatatatatgcgcacacatgtaattggggaaaataccccaaccatttctataaggttaatagcgagtagccgggagttcatatatccatttcttgacccggacagtatacaagggacatctgagacctctggaattccttccttatatgattgttattccactgcttcccaggtgagggttgtcattcttttttttttttcctttgagttgtgctgttcttcccttcttgtccttcacttcatgaggaaactatactccctgaaggccaggtaaatatatgttgtcttagacaaatcagctgtgctaagtagttgagaataggatactgaatactgctgccttatggactgaagtgaagcaatcactggcagtgtggccagaagaataactttttaaatttgagacaggatctctgtaacacgggctggagtgcaatggcatgatcatggctcacttcagcctcggcctccctgggttcaggtaaccttcccacctcagcctcctgagtagctgggactataggcatgtgctaccatgcctggttaatgtttatattttttgtagagatggggttttgccatgttacccaggctggtcttgaactcctgggctcaaggaatcctcctgccttgacctccctaagtgctgggattgcaggtatgagccacatttcctggcccagaagaataactttaatgatcctttacacaaccgcaaaccagactgcatggtttgtagacaaagggggaatgaatcatagaagaggttggcatttgcattttccttctatg

SEQ ID NO: 38479 - DNA, 1025 bp, Homo sapiens
tgttaccatctaatcctcaggtttaataatatcttttatagcacacgtccccataatgcccctttatttccttctggaacagttccctagtcttttcatgattttcatgaacttggcacttttggagatgacaaaccagttataagttgtattttccttgatttgattttatctgttatttcctcatgtgatgcaagctatgtacctttgcaggaatatcatgtaaattatgttgttctcattgtactctgttgttacagggcatacattttcagtttgactgatgactaatgatgacctctctaactgcttcattagggtgatatctgctgggctttagtactgtaaagttactcttcttgtttttgtaattaataaatgttttgtgggaaagtattttaaaactaggtaagtatccatctttgtgacactgtttactcatttaatttgtatctacttatactcatggtttcctattttattcagtggattatgatcttctgtactgttattggttttgatgctcaaattgtcctagatttggcctgtaagagcctcttcaggcattctatgtctattttgagtagtttcagtagtttcttgctttctggcacaaaaaagatattctaagctcaccttgtactttctgcatcccagccctagataatcagtcatttctccaaggagccttggttctttttaagggaaagaagtatttagaagccaggatctgggtaaccagtgtgctcattaccattggggtgttgctacttccagatcctctcagtggatacttttacatttacctatattttctatgtttatttctatgtttaaatatattgaaaattgtgaattaatactgataactccagttccaactcaatacctcaggattcattctagttttctcactttcttttatagtgttctcttacagcaagaaacttggtttccattatccttgatacacatgctaaatgattggtcttctcttgtatgttgccaacctcccatctttgaca

SEQ ID NO: 38480 - DNA, 1047 bp, Homo sapiens
tcagtgtcaaaatttacatttcctgaatatagggcaatgatttatctctgagaattaatagccttgaaaatatttaagaatatttaggctggagtgggactttactttgaatcagattgtgttacctgctgtaaagtgtgaaatttaatcccagttctagaaaacattataaactcagaacaaaggagtggagttagaagtgagtggccagtggaactctcagcatgagagaaattcatttttgtgatctgatgagtcagaggttgcgggtggtgatgttcagaggaatacatttctagattttggaaaaaatgattcagttttgaatttgctcaagaagtcctcctagtaacaatatctagcatttctttcaattggtgagtattaaccaaaaatgtttacaatcaaataagaagttagtagtaggcatagaattcattttatagaaactttagaccctggagtgaattattctgataaagatgatgatacctataattgtgtgtgttagtgggactataaatctgaatctataaatctaaaaatgtagtaggcatctcagtgaagtgattgtaccctttcaaatggttgttccaactcacctgcagaacctttgtaaactttaaataccctggccctgccccagacttagtgactctaaatcttaacccctgtgtaagcactgctgttctgccacagaatttctgagatcatttgctagcactttgttgaatcaggatggagagaggggagaggagcaggagccagatactcaggttggggtgacatgccaattctcctcactggaaagtggcacagatgtagtgaccctcggtcatggtttgtttggtctcagctgccctttctttagaaagttgcattattactgttggacatgccttcaaaatgaaatatcctctttaaaataagctcttttgaatagatttagtattttccgggaataaattctgagtttctcaggcaagtccagaactaaactaattacttgcatattcttactcttacagaagcatgctttaaaaactg

SEQ ID NO: 38481 - DNA, 1028 bp, Homo sapiens
agtttgtatcccagaacatggatatattcaggttgagatcttgtgattgtcaaaaactcttgtgtattttgaaggtgatttctgatagtacatatttggtagaatcttaccaaggaggcatttgatttccaacacgtttgctcatagcattatattgcttgccttggtgataccgtcagtgttcctcctctgcaggatttttatttcttttaaatttttcttttcttttttctttctttccttttccctctcccttcccctctcccccttcccctctccccctctccatccctctttaggacagcagtgtcctgatagagttaacacacttggaagtgctaaagctgtctacacacacacacacacacacacacacacgaatgaataagtaggtcttcagattgaacggtattaaatgtaacaatattttcatttatactttgatcctatattttctaaattttcaataatagaatatgcagaatataagtttataatcttcagacttgaatttttagcccaatacatgatgttattgtagagtaggaatggtatggaaaaatgaaatcgagagataattctcaacctttattcttaatcatttaaagtcagaatttttgtctcttccattaaatgtctggctataacacagatcatcatcatgtggcaaaggtatgtcagactgagaaagagagtggcagttcttttggggggctcagtaattagagcttacctaaaacccaaaatgttgaactagaaaatcactgtggtctcttctgattctaaaagttggtgattttcttgacatcacaaattcatgcagttgcgtgtgtgaatagtgagatgttaaacctgtaacaagaagagatagatcttcttcagtgagataatcagcttctgggtggctgagaagtttttatatgagtaagatcaaaaatgagagtctgctcagcagatttgcagagagtctctgataaatttctttagtgccatttcaaaccccaggagctccacatatgatggtttta

SEQ ID NO: 38482 - DNA, 1055 bp, Homo sapiens
tttaattgattgaaaagcatcagctaacaggtaaaaggtatacatgctttaatgtaggtaaagcaaacaacttattcatgcccagagtaggagacataagcagcacttccattgggatggggccacacaaagggtgcacatccacgactaactccttgattgggctgaagacttcttgggccctttaaaaaggctcacctttatcattctaatgaaaggcgggcgtgtaggttatgcgctgttctggagaccagccaagtggatgcctgttcaccaagtagaaataactgataacaatcccatcatattcctgaatgtttactgcaaagttgtatgaatcaaagattaattttccatgctgcacatttttaatcctttcttgcagtgagtgacttttccttcacatgatcttggtatgtattatatatgagggggttatgtggaagaagaacgtgagctaattagccaaagaacagagagattggagggtaaaagcattaaggagccacactcagctccttcatggcagtctgcgtgtagggcctccagggctgctgtgcggcccagcaagtcagtcttcaaggattaatcagctggcccgaggcctctagtctttcacatcttctcctgtccttctcttagccattgagatattgaataccctaaaagtagaagtagctctgttagagagctttgttaccctctagcatgttgacgatacattttgcttcctcctctgtggtaaaggcagagatgatggatgcagtgcagccttttgattgcaattaaaaaggagattctgcttagcatggtggtcaattagctctttatgaaaaggattctgaccttttatttcatacagatatttaaaaatatgtgagccttaaatgaatcttagcaactaaaactgaaacaaatgtaccattttaattgggtttggaaatactgtacaagataaattgtttataaaatgagatatttttaaatggcagggttcaccttaggcccccaggaggatattctgaggcagggtctctaaagacattcatatagga

SEQ ID NO: 38483 - DNA, 1034 bp, Homo sapiens
tgtatactaagaacaaggacattctcttaatttaaccacagtacaattatcaaaattaggaaatctaatattgataaacttctgttatctgatccacagtctatattcaaatttcatcacttgtctcagtaatatcctttttaaagataactattccctgctgccgcctgtgcccctccccctgccatcaagttctaattcatttctggcatttagttatgtctccttagtcacctttagtgtgtgacagtcccttagcctgtttttgtttttcttgacctttgatattagtaaggggtatgggccagttattttgtagaatgtccctcagtttgtgtttgatgtttcctcatgattagattgaaattacgcattttagggagcaatatcacaaaagtaatgtgtgtctgtagtgcatagtatcaggaagcatgtgattaaggtagtgtgctcatgtctctccactataaaattcctgcattcccttactaattagtaagaaattgtggaagatactttgagactatataaatgtccttttcttcatggaaatttcacttactagttttttttagcatctattgatgacttttgttaactgcataatttcttctgtgtttattagtttgctttccactgtaagagctttttcttctccctcattcttaaattatatcattataaacccatggatttctattttatttagtaagctatccattactaatttctattgttattactattattgatgctcagattgtcccagatttggctcctgggcatcccttcaaactgatttctgttttgtgatgtcaccactgtttttttatctactttttcttcttcttcttcttcttcttcttcttcttcttcttcttcttcttcttcttctccttctccttctcctcctcctcctcctcctcctcctcctcctcctcctcctcctcctcctcctcctcctcctcctcctcctcctcctcctcctcctcttctttcttcttcttctcctcttctttcttcttcttctcctc

SEQ ID NO: 38484 - DNA, 1052 bp, Homo sapiens
tttaatttaacggtgtttttttccccagtgcatttattcattcatcccaaagctggttctgcaaagcatgctgcttttattagggctgtgttctgaaaagattgatactttgcagtacagtataataatgtacagttatatgctatattgaagtgaagagccataatttatcaaaaatcaatgtgtgagatcattaagttaatctctgtcaaaatacaggagttgagcagttcagcagtgttttcttatagaaattctttctgttccataatgtcagttggataggaacttgtttaagtactggtagtatcatctgaccttccatttgtagtcaaaataagaaccagattaaagcaaaaccatgatttttaagttattcattttctggcttgcttttctttttcaaaacttttaatcctatttttaagtatgcaagtaaaacatgactacattctcaatttttgaattacaaagacacaggtttagatagaatagaacatgaaaatattctaacgtcaccaccatcaatcaccaccacccaattcctactttttacagaaataaccgctgtttattcattatgggttgtattttttctatgcagctgtgtacatgtttacatacaagattttatcttggctgggtgctgtggcttgcgcctgtaatcccagcactttgggaggctgaggtgggcagatcaccaggtcaggagttcaagactaacctggtcaacatggtgaaacccccacctctactaaaaatacaaaaattagcctggcatggtgtcaggcccctgtaattccagctactcggggggctgaggcaggagaatcgcttgaacccgagaggcgaaggttgcagtgagccgagatcactctagcctgggcaacaagaatgaaacttagtctaaaaaaaaaaaaaaaagattttatttttatataaatgacagcatactgtatatattgttttataactgctttttaacttaatatattttagagctctttccaagtctacacatggagatctgccttactcctgcataatattct

SEQ ID NO: 38485 - DNA, 1027 bp, Homo sapiens
aggtagcagtcaaggagttgaaccttgaacacactgggtcatcctgagaggtttgggaaggagactcatgtactcagatgctgaaacaagcaggaaactctggtgaatatcatttacttgtgtccatcttctaggtagatctgtttcctcctctctgatcctatactattttgtgtatctaaaactaataatgatatttattgtatgcttactacattgccaggtattattctgtatattttatatacatggtaatttaattttcagaacagttcttcaagatagttattatttttcctcttttacagatgaaaaaaatgtaggcactcataaacttaagtatattttctgagataatattgctagtaagtgatggagccaagacttggacacggatctttaagacactaaagcctgcgctgttttcccctatatcatgctactgcttttcacattttattgtaattgtttcttctcctaaccagactgtggaaaagcagactgttgaatgaaatatggaaaaaatgaaacatatatttggaaatatagcatacactaaagtagtttgaaaatgtgagttctaaaatcacatctggtttcagatctaagcttagccacttaccagttgtgattttaagtaaataagttaacatctcaaaattttgttcttcatctgtaaaatgggatgataaatctctcaggtttggtgtaagaaaaaaataatatgctcacctaatagaccttcaattactggtagtttccatcatcttaatgaggattatatctttatagtgagcacccattagatggtgttgataaatacatcaatgagtattttaggcagaaagaagagtaaagtagaagtactggcattctttgctgtactcagttttattaactgattttatattgatcacgttctttgttacatgtcagtattatagtggcagttgaaggtggtaatatttttagatctccgttagtgaaatgacaggcattgagctctcagtcatacctttgtaggcct

SEQ ID NO: 38486 - DNA, 1091 bp, Homo sapiens
tactccagaagctgaggggaggatcgcttgagcccaggagtttgaggctgccgtgacctgtgatcatgccactgcactccagctcgggtaacagagcaagacccagtctattaaaaaaaatttttttaatgagtttggacacatgggttgtgtacacactgtatggttccatgtatatgttcacatatgtgacattcttgaaatgacaaaattctggaaatgaagaagaaattagtttgtcccaggttgccagggatcagtggggaacagagggaagtggacatggctataaaagggcaataagaagaatccttgtggcgatgggaatgttgtatgtcttgatggtatccatatcagtatcttggttgtgatgttgtactagagttctgtgagatgttacccttggggaaaactggatgaagggggcatgggatctctctgtattatttcttgtaactacatgggaacctacagttacctcaaaataaaacatttaataataaaaagaaaatgggctcggaacattcctaatagagaaaaattggcagtgaaagccatgtgtatatctgaacagacagaccaatattaggtaaataaggcaaataaatatcacagaaggaaaactgagctgaccattgacattttagtgagatgttcatgggcccccaagaaaaaaattgagccccgtgggttcagagggagggagaagacagacaacagcttcatttccctgaaaactcatcaaactggcattctccaagggcctttgcttcccagactgtgaaatgttctatttagtggatggtttttggtaaagagaagaaggtagatgagtagcaacttacatacaaatgacattctttttttttttttggagacagaattttgctctcactgcccagtctggagtgcaatggtgcaatctcgggctcactgcaacttccacctcccaggttcaagcgattctcctgcctcagcctcccaagtagctgggattataggcatgcaccaccacgcccggttaactttgtatttttagtagagatagggtctccatgttggccaggctggtctcaaactcccaatctcag

SEQ ID NO: 38487 - DNA, 1033 bp, Homo sapiens
tcctttgactagatctgatgtgatatctttctcattctattaaacattggcagagaaagcaggggtctggtgagtaccaagagttgtgaacgtggaatgggggagcggcagctctgtgtgggtatatctactacactagattatgttctcaagtaaaagcatactggaaaaaaagaatctgctttgttggccctttatgaaggaccttaattagaagtcactgttaactcctggggtgggaatggtttccagcttggcacgggagttcctcctgctactaatgagcatgctccttgcaaggactcgctgcttctgacagttaaagctgcattgtaagagttatttcttgtcacctctctctccacatttaactgttactgcccaagttcagagtatgtaagtagactgttaggtgttttcaggaaattggcaatgcttcacggtaacagggaatgatatttgtgagtaaaagtaaatcattacaggttaatttattcaaatatgggtagtagatggttgctttaatgtcaaccatgtttggatttttttttcctggtagtctttttctaattgacataaaacttacaaatgaatagttgaattatttaattcattatcatgtcgttagaacccctgccctggacatctgtttctcttatttaagcaactcgccctgtggcacaaaggtttcattaactaattagcagaggaaatgtaaatttcttatgcaagtgaggatgattctatagattactatttatttcattagcttctcattaaaacactaagttgacttgtgagaaaatgccggagaatggtttgcttctcgaagaaattacacatacacagtcaccttcttgggcaatagcttgtggaggatagtgagcagttttggaagcttatttaccctcgctcttggtggcagggagcattagagagcatctaacagatcttcatctagggaagggtaagtgggcatattccagagcttcaaaggtgtggatctcttgctatctggaatagttctttgatt

SEQ ID NO: 38488 - DNA, 1044 bp, Homo sapiens
ctagattcatcatccattgatgattcttgcctaagccagtctctgctaggagggttgcaaaatgatgatttactaactctagcactccctcagcatttactatttggcactcagcattcttctataagtgaagccacctcctctcccccatttatttatctgttactggcatggactcatgggctcttatcttttttaatggtttatgatttgttatggtacagttgtcccctggtatctgcggggaatcggctccagagcctcccatggataccaaattcaaggatgcctaagtccctgatataaaatggtgtagcattgcacataacctacgtacatcctctcatatactttgtcatctctagattacctagaatacctaatacaatgtaaatgctatgtaaattgttacatgctgtgttgtttagggaataatgacaaaaagaaaaaacctgtgtcagtgcagacacaaccatcataggcctaactacatttttgatctgtggtcgttgagtgcggaacccatggatatggacaaccgactgaacttaattattttggtgctcaaattgtcctggatttagccagtggaagttattttctgctggctcctgtgctcttgtggcatacttcccatctttcttcagtggtggggggaggatttgggagcattcccttattctttggcgtaacagcatgtgtccctaaatttccccaatcctggaatcagccacttctccaaggacccccaaagtgattttaatatgcactcaagtaggtatttgctgggcccaagaggaaggcagacatacataaaataactggaacagcctaccataagcatttatcaaggtataggtataaggtataagcctatgttatagtgatatggagagggagagattaattgcaactcaagattctggacaggctttcacaattggggctttaaaggaagattgggactcagatatgggaaatgaggggatgcttgggcaaagctggtatttaggagatgaactctgttcagctggatgaagtctt

SEQ ID NO: 38489 - DNA, 1049 bp, Homo sapiens
caaatgtatggggtacatgagaaattctgttacatgtatataatgcatgtgatcaggtcagggttagggtgtctgtcacccgagtgcagtacatttttgctaagtatagtcatcctactccactatctaacattgaatttattccttctatcttactatgtgtttataccctttaatccacttctcttcatcctcctccctctccacattcaccctcccagtctctctcttttcactctctacctccatgtgtttaaattatttagctcctgaatataagtgagaacatgggatatttgcctttgtgtgcctggtgtatttcacttaagataatgacttccagctccatccatgttgctgcaactgacatgatttcattctttttgactgaagagtattcctttgtgtatatatactacattttatttatccattcatcccttgatggacactgaggttgatttcatatctttgcttttgtgaatagtgccacaataaacatgcgaatgcaggcatccctttgatatattgactttttttcctttgggtagataccctgtggtgggattgctggatcaaatgataattcttagttttttgagaaatttccatagcggtttctatagtggctttcctagttgacattcccaccaacagtgggagtccttttctctgcatcctcgccaggatctgttatttttttgtctttttaacaatagccatactgactggggtaagatatctcattgtggttttgatttgtatttctctgatgattaatgatgttgagtattttttattcacctattgactgtacatcttcttttgataattgtctattcatgtcctttgccagtttttaataggattttttttttcctgttaagtaccttatgtactctggatatagtcccctgtcagatgagtgatttgcagatattttttcccatttggcaggttttctctttacctgtttgattatttcctttgctgtgcagaagcttttaatttagttaagtctcatttgtctatttttgtttttgttgcct

SEQ ID NO: 38490 - DNA, 1051 bp, Homo sapiens
aggctttgctacaaaaagatgaatttacttgttagatggaggatgcatattgaggccatccatgcctctgctgcaaaatcctttaggagaaagacaactggtatccaatatcttcgagtaatgaacttatcagtaaatgtaacacatgagctcattaatcttaactttgcttttggaccaagtgggagctcggcttctcgggagacagaaattgcatctctgttcttttccttaaacccaatcccaatttagagtcaaacatactgccctgctctccctgggaagcagttaataatgtttcctcacacaatggatggcccaagctcagctgggtcactccagccccctaggctgtgtacatgtcccttgcacacagcctgggctcaagacttcctagtagggtgtgagtgccagctacatccttgagactggttagtccccagccattgagtacatcacacacttttcttccctcaggctgaggaatataggtgaagttaatcttagaagttaaggctattgaatcttaaccttaaatcttaaggctgttgaaactcttcatcctgtggccacttcgtccttgcttgggctcttgctgttcttctaaaagcacagcctctacatctctgaaaagaagttgaggatgtgaggagggatgagtcagtttgcaaggggtggctgcctgttctttatggcctggatgagggcttaaaagaaagaagtctgaaaagagatgctgttggttggaaaacaagtaaggagagtgtttgcttgggcaggctgctgtgggatgcctgctccagacagggagaacaggtttaggaatggatctagatttacctggaagcttgctcctgtggacctgatccaggcccacggggcctggaggtgtggtgagataatgctgatgggatgagaaggtgatgaggagccagccagcactggcaggtgtcttcctagccctgatcttgttctccccagcgttttgaaagaggcggccagcagactctggggacctcagacgtctgtgctccacatgcgtatcggccgc

SEQ ID NO: 38491 - DNA, 1029 bp, Homo sapiens
catgcctgtaatcccagcactttgggagaccaaggcgggaggactgctggagcccaggagttcaagagatcagcctggggcatatagtgagaccctgtctctacaaaaagtaaaaaattaggtaggtgtggtggcacatgcttgtagtctcagctacttggaaggctgaggtgggaggatcacctgagcctgggggatcagggctgcagtgagccgtgactgcactgctgcattccagcctgggcgacagagcgagccctgtctcaaaaataaacaaacaaacaaacattaaacatcaaataaaattacactgagaccttgaaggaaaaaaaaaagtaaatggggagaatatatatacttgtttatgcataaactatctctgaaggaaaaggtaggagggaaacatttcagtctacagttttagatttttaaataacattaaatatattttttggaatatatagtttttttcaaaattactttttaaaagaggaaaaagaaaagcagttgctttccgagaatgggacttggggtagggaaggatgaagcagaggactgctgctttttgttaaaagtcttgtggttttacttcactctcaaaactgtccatgtataactttgataattttttttaattacaattaaaaaaagcagagcctaagaaagggagcagagcctatggtgacaaggagtggaaaaggtacatgggaagcatatgtatttacagcctttgggagcagggctggaaggcaggcatgaacctttggaacagattctcgaaaagggaagaaataataaaagctgtcccctgtcaactgagcttacggcagtgacggcggtgccctctccaagttgcgtggcactgagacgtgacgggtattaaaggccttgagtgagcatggagacttgcctgaagatccctctgacagttctttatgagtgagcctcttgagctgaccccacagctgcccactgtccctccaagcatgctgctcttattgtctggcgcattgtagtgatgggccaagg

SEQ ID NO: 38492 - DNA, 1003 bp, Homo sapiens
ttccctggccctaaacttactaatgtcctcctgtggaaccattcctttagtaactattaataaaaaactgttaatatgtgccaggcattttataggtgctaagaatgtagatatgaacaaagcagacatggtctccacttttaaggaacttaatgcctaatggaaaaacttaagttataaataacttaaaattataaattgtgacaggtgctatgaaggaataacaggggaggccaactctagcttggctggaaagggtcacttaaccagccaggcaagggcaggggtacgagggactacctatgagaggaaaaagaagcatcaggggcaacccaggacttcaaggtgcttacaatctagtcagaacgacctaatgacatctgatgtttgtatagagttttaccacttacagattactttcattgcatcaatttatttaaggcagatatgacacacacatagagaagactaacaatactggtacttgatgactgagcacgtttcattggcaaggcttaactatgaggccaaaggccaaaggtggattagcttctctactttccagggttcccaaatcctaaggcacactagtcttttttgctccaaagtacttagctcttcctgtgccttgcttattttcttataataacacttgctctcacctgccctctctgtttctttgctccatccataggaatgttagttaggcttgttcaggttactaggataggtcaccttaggtttcaaaggggggtgggagtgtgaaaccacctcttttgtggagaactgataagatactgatccccgcgcctgcacagttcaaagcatggcaacatatgtataagcaactgtctgtggccacccttctcaagacagaacagggaaccaggcaggactcagcagctcttacagtaactgaacagagcactacagtgatgacagagtgggggcaggggttccttgctgctgctccaactctgcaaaaggagtcaggaaatggggc

SEQ ID NO: 38493 - DNA, 1056 bp, Homo sapiens
tgtgcttgcaatcaataattctatttactatttaatgagttaaagactttaaacaaaaaagagctcagaagtgtttggaaaattatcctatgaaaattgacaaaatttggagtgttacaattggcactgacaccattactttttctcctaaacacaacacattcagttggaaactaaatggaaactaaaactctgagaaagtcccatttatgttgaataaatggctgaaggcaactctgattctgatttccatagcagtacagagcaagcacttcatttccagtggtttctcacttgatgtttgggctgatagaggctgtgggtcacaccgggagcactcagtgagatttaggacaagtatgtatgtctcccttttcctcccatgaactcaatttctaaggccaagatgtaccctgttattgtggcttaaaatgtttttgaggaaactttttggaaaaagtactgcatatacaaggagaactccaaaaccaaccatactctggcaaaaagaaagttatttacttgtgaacacaataaagtccattcaactcagagaggttgcaccctttgagcaggtgtgaggtctcacagttatggccaaaagagtaattataatgctgcatggaatttgtggaaccaatgtaggctaattaaggtaaagcaagttaccaaatggtttcccattccatctctgtcttatatattgaaaccgagagaggggatagggatataattgattaccaacactcacatggatttctattataggttttaaattactatattgctaagtatttatttgtatgctttgctgttctgctggctaacatgatagtcctgcctacttctcagtcattcatttatcctcattgtctaacgtaactcacagcacccagtaaacattcaatcacaatttgttgaatgaatgaatgaatgaagctaattaaactaaattgtgttacacttccagtctcattagtgccataataaagtactacataaagagaaattgattaacaaaagtccttgaattttgttattcattaaacatcttcc

SEQ ID NO: 38494 - DNA, 1025 bp, Homo sapiens
gagcgtagctatgaaagagacaggggcatgggttggcgaagatgccgagaggactctgtggttgagtggttggaagaaggctgttggtgcccctcttggtgcctaccctaatgagatggccaggctgatgctgacttggaagggccctgtcttgggagaagggagggtggggaactgagggaagtcatacaaagacacaggcccagagagggcttcccccttatattctgcttcctttcctccagaacttggagacattactaagattccttgaatccctagggcagggttgggggtggggtggtagtgggggcagttctaacaaatgagtctggacagaggcatgtggagtgtggcccagagaaaaggggaggaggggaaacatatattgcaagcttggagagaaggaagttctattttgggtgactttaaatcccagcccctctgccggccagattcacagcagacctcccccctgtgcagaagattccctcattctcagttctgtgcactggctttggctccattttggctcacatcgctgcatcctttaagacttagttcattcatactttggtgttctatctcttggtatgcttgcctgcatctaaaacctccccccagccttccagccttcttaaagaaggcatccctaaataacagcagcaaaaatgacatctacagtttatccacatttctgctatggccctgcaccaccctgggtgccttatgtgtccttcaactcacaagaaaaacgcgaggtcattattactgtgatctctagttgacaaatgaagacactgagcccatgacaggtcaagtaaaccaggcaaggtcatattgttagttggtggcaaagctgtacctagaacccaggtatgcctaactccaaagctccattgtcatctcttctcacagctacagagccttctctctaaatcagaaactctggggtggggcccagcaatctgcattttaacaagccctccaggaaattctgatgcaggataaagcttgagaacggc

SEQ ID NO: 38495 - DNA, 1027 bp, Homo sapiens
aggctgtgagtgccctgttcttatccacccagggccctaggctgctgtcaattcagctgaactcaggaatgcagaataactcgagaagcacatcattcagagagctgtttgcagggtggctaggaaagggggaaatgagagaggttggccctggtctcagcacgggatcacgtggggctggtttggagcctggtatttgggaataaaacaaatgcatccaaggcgttttagaaaaaggtgctgagaatcattcacaggatggggcattagggattgaagacaaaggacaaaagggactctgagcttgggagactatagctctgtaagggcaggagctgtgtctgatgagtttacctgcacgtacccagccccaagagcagtgccgggcatacagtaggtgctaaaaatcaatggtggttggatgaataaatgagcaaatgagtgaatgatgaactaaagggagttcatgggataggattcaattcaaacagcatcatttaacgcctcatatactgtctgacacagattctagtgatggggtagaagaaactactagacaatatgtagtttgactggctcatttacagacagggcccaaagtacttatgttctcttgcccaaggtgttttcaatctcctatggcatcaataaccctatgttggacttctgttcttgatctttggtagcatctctgagtattcccagctctcattctactctacgacgcctcctctaaaccatgtttatgagcagaaggtttagggtggactagaacccccgctgggctacagttctgcagacattccgcagattcaaacctttgtacttcccttatcataaccacatccacgctttttttttttttttgagacggggtctcgctctgttgccccacatccacactttattatatttatttgtctctcttcccaaccaaactgaactcatgcttattttacatttttacagctcttagcatggtacttaggggcccaacaaatatttgtttgaaagaacgaatgaagtg

SEQ ID NO: 38496 - DNA, 1066 bp, Homo sapiens
aacagtaaatatgaagtgtcttagcacagtgcctggcacagagtaagtccatagagacatgaactgatgttacaaaccccatggtttattgccaaaaactgggtcctgactctgcagaagacggaaaagggataaaagcagtgtccataccataaatgagctaggcagggaatacatatgagctgtaaacagctggagcacgatgataaagcagcactgaagcactgctcaaccatgtagaccaagccccaaaggctgagtggagaggaagtgaggcagcactgccactgaggtgagaggcaagggaattttccaggcagaggtgaggtttggggcagcccagagtaaattggacagacctgattgggtggagagagcagatggggcattctaggtagtggaggcgacaggagtaaagatgcaaaggccacacctgttgggaactcagccctctcctcctgctctgtcctgcatttccacctagaccctgctgaacgagctagaccgaagtctgggccggtaccgggatgaagtgaatctgaaaacagccatcatgtccttcatcaatgctgtcctcaatgctggagctggagaggtggggtgccttctccttgcccttgctgttccctgactttctggacctggggtagagtgtgtgagtgtgttgcttccccaataattgtttttgctattaaacctgggagggctcctggggagttgcctacataggtagcatcatgcacggtggacagacccagagctgagctggctgatgatggctcagggtggcagagaatcattggtgggaggagggcgagtttgggcccttgtttatggagagctgtttctggactgttttctcgttggctggtcatgttcttctagtgccttctgttaggtgtgccttctggtttcccttcctttggggtcagaatgggattcttgaagtataaaaatagcaacaggctgggcgtggtggctcatgcctgtaatcccagcactttgagaggcctaggtgggtggattacctgaggtcaggagtttgagaccagtctggtcaacaggg

SEQ ID NO: 38497 - DNA, 1050 bp, Homo sapiens
ctcaaatcatttatcatgtgcacgaatagcacatcaattggggaggaaattaagatgatgaatagatagaaaattattaatagctgtatcttaaaacttgtgtttcctacttacatagattttatttaaaagaagtggaaacactttatggaaataatagaaacctttcctctagggatctgattattttgggagaattttaaatagttattttggttattcttgctatatgtattctgagaaatctttcttgatacagaatatgcaagcatttggtgtagcaaaggggatttgatttggaatggggaaataagggaaagagatagcatgagagagtcaggctgtaaagtccttaaaaaagtaaagtaaaggttctcaatggacagtttaacaaaacttaggatttcaatgttcctggtgattctaatacattagtggtggtggcagtggcggcggtggtggtggtgattgtaggaggaccttactatctaacctactcatctaggacagaatgatctgttaactaattgctgttacttgcacatactttcattaagtgtgaatatttcagtcatgaatattctgttctaagtaatttctgtcaaagatagagtctgaaaatgaaaattttggactattccatggatcattacagtttacttctaaagcacttttaaagtgcttccagaaagcattctattaggtatttttgtattgggacttaagatgtgacagagcacttgtagtgacctggctcctacagtagtctgtttactcataggagcttgaaatttgtacacttgactgctctgtgtaatttcaatatttgttgttgcttctgataaagctaaaataaccatgtggatattatagaggccagtgaggaattccaccatggagactgcaaactgaccagaaagtgcttttaagaaatctttagtagtgagtttaaacaacaaacatatctagaattcacagagtaaaatgagcaggataaaggtatacatttgacatttcattttagcttgagagactgtagggaaaaaaggg

SEQ ID NO: 38498 - DNA, 1094 bp, Homo sapiens
acatttcatggattcggatgatgcaaggagacacatgccaccccagcagtacacaaagcacttaccttgactggtgaagtcagccagccatctcagcagggaagaacaaccttctcaaccaaaactgcaatcaggaaagcagcagcccactccttcccatggaatctagacagcatttatccctctggtgggggaatctcacactgactaactgaatggacgctttgtattcagagatggcttccaggcaaggaagttctatcttgtgatacggaaacaataaattcctgagatacattcttccaatctgtggtaataataagaattcctctctgcccagatggtaggttgatatttctggactctagccaagaaaaagctaattctggggatagaatgataaaagactcaagcactaaaaatatacattgccgaatctctttttctagctttgaaaagttgtggcctgcttgtccctctgttgactggtcatctggaccatcgtacttgctgtggctacttctaagacaatgtagagggttattaaaccttgaaactgcctttcctaagtagagaacaagactattcaacaacttctttgctgaagcactgaggagatttgtaatactcctaaaggaagggccaaactagagattttcaatcatagactttgtgacagcatttggggaactaaaagattcatgtgtttcagcctagtgggagagagtgggggagaggaagagagagagagagcatgtatacccgtatgttatcatagagcacgattctccagtggatggatacctggaatggatcattaagatgaagagagtaattcacatttactctagaacctttaacaagcactgaaaggaagaagcctgagatttgatccttgacaatttctggaaagcactggtcagtcacactgtcctggacagagtccaagttacccactaaagcttgaggtggatgttggcttcactcctgcagcacaatgctggccctagaaagcgagcattttcattcttcccatggcagctgattctttggtgccagttttcatgttttctccataggccttgtgcagaaag

SEQ ID NO: 38499 - DNA, 1020 bp, Homo sapiens
acacaataattgtagcttatatattctatcaaggaaataaacatagtatagtggtaaaaaaaaaacacaaaaaataattttagggtaggggagtatatgagacagggtggtcataggctcctctgaggaggtattatttaagctgacacttgaaggatgaggggaacagcttgtgaagaactaggggtaaagcatttcagacagaataccaagtgcaaaggtcctgagacaggagaaagctcggcatgctctaggagctaaaagaaggccagtgcaggccaaaacgtagctcgcagggtgaagagtggtttgaggcaaggttgggggatggtagctatgagaccaccacgctctgtagtccatagtgaagagttggaattatatatttctgtataaaggaaaactgtggaaaggtctagcaggggagtaatatgatctgattaacactttaaagctgattttggctaccttgtggagattgaatgctggtggaaagtgaatttaagaatagaagctggaagaggcaattgtcctggaaagatgttggagatttggtctagagcagtggttctcaacctcagctgtggttgcctgaggagctttttaattgttttttcttttttctttttttttttttgtaagagactggggtctcagtatgttgccaagtttgtcttgaactctagagcttaaaagattcttctgcctcaacctctcaaatagctaggactgcaggtaccataccaccttgtctaacaaaaaatcttaatgcctaagcttcaccccaggccatttaaatcggactttcttaaggttggcccaggaataagaccttttaaagtttcataggcaattccaatgtgcggtcaagactgaagattgttggtgtagaggtatggcaggggagctgtgtggggtagattaacctgaaatatattttgcaggttcaacagacaggagttgctaatacgttgaatttcagtgggaagtggtgagaaaaaggactcagttttttggctt

SEQ ID NO: 38500 - DNA, 1064 bp, Homo sapiens
aagggctgttccctttttctcaggtctgaacaaagagtccctgtgggggtatctgtgttcagaaaggccatcaatatcatatatcaaggggttctctcattcgtttgtttaaagatggagttttgttatgttgcccaggctgtaactcctgggctcagtgggcgcataccaccacacccagtttgagggtctctctctcaaagcctatggctaagaaacagagagaaaattatcatttaaaccatgaaagagccatggatagtgaaaaaatatcctgtattttcagacttgtcttcatttcaggaattctagcgcctttttaacccaggtgttggtatttgtgttttgatttttggttctgaaaatattgacataatcttttattggcttctaggtgcaaagaatgagataaaaggataaaccatccccaattttagaaactcacaaggaagacaaacacatgtggcattgaaacagacatgaacaaagcaagatataaatagcttgcaatctcgaattatccacatgaaagaataagatggtagcatggactacccaaagcacatagaattcacaaatactttccctttgagtttgaaatatgtttgggccctatatttgaacagagaatttcctatgatttgacatttgtaataatttgaagtaaaacctcaatttaggagaaacaattaagaaatcagtggtaatcccagcactttgggaggccgaggcgggcggatcacgaggtcaggagatcgagaccatcccggctaaaacggtgaaaccccgtctctactaaaaaatacaaaaaattagccgggcgtagtggcgggcgcctgtagtcccagctacttgggaggctgaggcaggagaatggcgtgaacccgggaggcggagcttgcagtgagccgagatcccgccactgcactccagcctgggcgacagagcgagactccgtctcaaaaaaaaaaaaaagaaatcagtggtatagaagtacaggatttttttgtaccactgatcatttcttctctgttgtactttatacaagatatggtcagtatcac

SEQ ID NO: 38501 - DNA, 1034 bp, Homo sapiens
tttcacattggcaataacaatagcaggtgcaataacatctgctctgcccaccacaatgcttagttcaagagcaaatgagaaaatggacatgaacgacttttgaaacggataatggaatgtacaaatgtagagagtatggttgttacgtatttattgagggtctacatgtgtccagcctaaaggcttacaattcaattggggaggcaagacaggagtatatgaaataatttgaggaaatgcaagaatgggaagtgatactgagctcttagctcattgggaacaaggacctaatggtgacagggctaagtgctgtgggcctgtcaggacctgattgatgacattcctagtggggcagggtgagactgaggtggctttcttgagctcctttccttttccatttcctcttctatgccattatctctggcatctccctgaggttctacaacctttctctgacccagcagccaagccctttttcctccaaccaatgctcaatgttttctgctggagctctcccagtaattgtagaggactgtttctgcaggagcgctactgcctggcccttggggaggaggagcgggccgagctgcagctcttctgtgccaggcggaagcaggaagccctgggacagggggtagcccgcctggtacttcccaagcttgaaggacacacctgtgagaaggtatgtagcacccctccccccaaattccccttcctctattctttgccctctcatttctgcagaaggggctgggctagcttctgggattctggttgggaaacaggaaaaacagaaaccaagtttgcaagctcttggtataggttgcagtggatgtgggcttgctagggtatggcgagaacaggttgggatcggattgcaagagcaaggagggaagttaggatggtagtgcttactccgaccacctcagcacctcccctctgacagtgtagggagctgctgaagccaggggagtacggagtgtttgcagcccgggcaggggaacagcgctgctggcaccagccttgctttgcct

SEQ ID NO: 38502 - DNA, 1099 bp, Homo sapiens
ggcgggcgcctgtaattacagctactcgggaggctgaggcaggagaatcgcttgaacccaggtggcagagattgcattgagccaagatcacaccattgtactccagcctgggcaacaagagcgaaactccgtctcaaaaaaaaaaaaagaaaaaaaaagaagaagaaattttgaaaataagaatgtacaatcacatattctgttattcatcagacccatgttgtcatcaaaagtcacatagactcaggaaaactacctgagagaatgagagtgaaaaagtcaaataacaacttaattttattatgaaaatagttttgacctgtggactttagaaaagattttggggcctaccacagattcccaggctactactttttgaactttgtcctaaaggaatgaattaatagttcccaagagataagaatgcagttcttggaacaatcttggaatttagagtttaaaagtcatgtctagaggctggtattagtgacttgctcagtatagcaggggggttggtggtaggtggtaggtctcttgttagacacccttccctgtcaagtaccacttgcttttatcttctgagccactgggcccctaaagtaggagttctttaccttttgagacccctttgtacatttgataaaatctgtggacccattccccaaaaaatgctttttttgtgtttaaaattcagcacagcttcagagtattcatgaaacctcctgtccaccttggaagctcattcacagagccgagcttcaaaaactccatcttagaaacctttcccctttccccaaaagactttaacgtgactcttaaatagaggttcagcttcaggcagaagaaagaaaaattgcccatcagagaataagacctttttgtgtgtgtggtagtgagatattcataaaaaaatttatcattttaaccatttttaagtgtacaattcagtggtattaagtacattcacaatgttgtgcagccatttacattatttccagaactttttcatcattctaaacagaaactctgtacccataaacaataactccccattctccctccccctccatcccctggtaacttctaatctactttccat

SEQ ID NO: 38503 - DNA, 1018 bp, Homo sapiens
tctcagagtgctgggattacaggcgtgagccaccgcacccggcctggatttcttctttaaagtcacttttttcttgttggcatttttttaaaaactccctctcaacatagcagtggaaggtgccattttcaatcccctcttgttatgattaagctcacacttaatgtccccagctcattgttcctttttgttatccaaggtctctgaaaagagaaccagcagcccatgtaacctgcgtagctcctcagcatgctgttttacgtagttactgtggccacagccacccacctctacctaagaggcttgtgggcagattgttgtcaaagggaacgtcaaccaagattagccagcagggctgggcattgtaagccatcaaagaccttttatcgattgaaatacaaaatgcaacttgtttagaaaattgaggtctggcatttttttgagaaaaggaggctttggggagagaccataatctgtagaaatcagggtcttgggtggaggggtaatcagttgtgactctgttgcagctccggtgaccaatcagccagtgacccccaaggccctcactgcagggcagaaccgaccccacccgccgcacatccccagccattttcctgagttccctgatccccacacctacatcaaaactccggtgagtgatgaagcactgggactgcgcgtggtgtaaagcacggagtcagttcctactgactgtcacgtggcagagtccagtccaaaagcttgttgatgaaagagtggttcaaaactcagaatgtggccgggcacattggctcacacctgtaatcccagcattttaggaggccgaggcaggaggatcacttgagcctgggagttcaagaccagcctgggcagcagagcaagaccctgtctcatttgaaaaataaataaataaagaaaaaaaaaagaattcagattatctttcataattgagaaacaatttggcaaatgagaattatgttctcaagtttgccagctaaagtataattaacaaagaaat

SEQ ID NO: 38504 - DNA, 2077 bp, Homo sapiens
acccgatctctactaaaaatacaaaaaaaaaattagccaggcgtggtggcaggcgcctgtagtcccagctatttgggagcccggggcaggagaatggcgtgaacctgggagatggagcttggcgtgagccaagatcgcgccactgcactccagcctgggcgacacagcaagactctgtctcaaaagaaaagaactgaaaatcagttccttaacctcactagccacattcatttcaagtgtctgatagccacatacggccagtggctgctctactaggcagtgcaaatattgaacatttccattggcacagaaagtcgtgtggtgttcctgcagtacagggagggagagtgatgcagtggtaactaaaagggggaaaatgaaggaattaagagaggtgtttcgtgtttttattttttaagataaaagaaataacgtgtttgtatgctgttgggaatgatctagtcaaaagggaaaatggatacaggagagaaagaaaagtctgggaatgatgtcatttggtagacgagaggggatgggcccgtgaccaaatggagggactagccttcttctggacatttcatacccaggataggagacaacatgtgggttcagagacaaaggtgggcaaggaggtgttctagtcctagtttgttttagggtatactttcttttctgctcaccggtgtgtcatactcagcgagtgaaaggataagagccccctcttgttcctgcacccttggagaaagtgccaagtacaatcgcagaaccgccagaagctggaatgcccttaaggctaatagggttatatagtcaggttgccatattcaaccatcctttaaaatcagcactagtttggatgccttagtggctgtagttggactgagcatcccttatgttctctaagatgtgataccccaaatggcagccagccaccctgggttgctagtggaatatgcctgtgtcatctctatttgctgaaggtcttatttgcctggacatactttttttttttttttttttttttttttttttttagatagagtctcgctccgtcacccaggctggagtgcagtggcaagatcttggctcactgcaacctccgcctcctgggttcaagcgattctccagcctcagcctcctgagtagctggaattacaggtacgcaccaccacgcccggctaatttttgtatttttagtagagacggggtttcaccgtgttggtcacgctggtcttgaactcctgacctcatgatccaccctccttggcctcccaaagtgctgggattacaggcgtgagccaccacacccggcctggatatactttttttttttttaaatattgaattattcctttcagaattagggctgggagaccatggctttaaataaagcagaggaaattgttattgtacgcttctgttaatttgggctgagatatggtgattgggtcatggactaagttgaggttcaccttatgagaaagaggaatcatgtaaacaaacgtcatcatacctttgtaagtacaatatagttaaagggcttggacatgcattcactgacggtcccgtagtgatgtgaggtcatggtggtaattgaacctaaagagtgtcagcaaccgcctgaggactcttgaataccatgaggccaagccagggttgcagacagcaggagtgtaggaaggcctgagtcttagagtcagacttgcctagcttcaaatccaggctgtgctgcttgccacatgtgtgaccgtgattgtgttactttacgccttagtctattttcttgtaagtagaaacagaaacacctacctcaagggacagggggagcgtgagacagagctggtatctatcaggtgcctggcatgtggcagctcctagcacacactgctccctcccctgctgttttaggctatctaaccatatgcccttctgtgaaaaataaaatcaaatgactccaagacaaagattctagtgacaatttactacagtcagttggacctaatgttattttgttagactaggaaatacaatcatatgtttcaaaatgcagagtgtgcaaaaagatgtatggtgacaa

SEQ ID NO: 38505 - DNA, 1051 bp, Homo sapiens
tcaggctcaagcagtcctcccacctcagcttcccaagcatgcaccactactctctgctaatttttaaatttttcttgtagagatgaggtctcactgtattgcccaggctggtctcaaactcctgggctcaagcagtcctcccacctcggccttgcaaagtgctgggattataggcatgagccaccatgttcggcctagaatatattttggaactgacattttaattcaaataggacatctctaccatgccctgggatttttgtaaaatagagtttggaaactgttggttaggattctcaagaattggtggttgtctctgttccaggaccattaaagttttataaaccctgtttatcaaactcttcaatccttaaatgtttttgtcttatgggctataactgtaagaaatggaatgactgtttggtgagataatagtaccaggaaagctgaattttgattccactttctattttggtgtagtatgaggttcatattattattaatacctactcttgtttgaatccccaggagggaccagctctgattctttctgtatacaagtgatttcaccatgtcagttatttctaaagcctccataacaaatagtaataaaccttgctagcagaaacaataaataaaaaacttcgctgggcgcggctgctcacacctgtaatcccagcattttgggaggccaaggcaggtggatcacctgaagtcaggggtttgagaccagcctgaccaatatggagaaaccctgtctctactaaaaatacaaaattagccaggcatggtggcacatgcctggaatcccagctactcaggaggctgaggcaggagaatcgcttgaacccgggaggcggacgttacagtgagccgagattgtgccattgcactccagcctgggcgacaagagcgaaactctagctcaaaaaaaaaaaaaaaaacctcaatgggacatataaagcagcctgtatgagaagagttataggtaaaaggtgctataaacatttgaaaaatctgcttcttactgagaaaaggaaatttaccttct

SEQ ID NO: 38506 - DNA, 1387 bp, Homo sapiens
aattgtaaaggacattaatatgctaatgcaatgcaatgtacatttcacaaacaatttttttttaaactttttttagtggagcattttgcagaactcttctactgagtaagctggaaaaatgctgctgtaaataaaaacctaagtgattagctgtttaaacgataaaacactaatgttgatttatgtgatttgactccaacaactttggttaccaataatttgcaacactgaaaatttgtaaattggaagttaccaatttgcgtttttaaaaaatttttggccaggtgccatggctcatgcctgtaatcctagcactttgggaggccaaggtgggtggataacctgaggtcaggagttcaagaccagcctgaccaacatggcaaaacctcatctctactaaaaatacaaaaattagccaggcgtggtggcatgttcctgtaatcccagctactcaggaggctgaggcaggagaatcacttgaacccaggaagcagaggttgcagtgagccaacatcacgccactttgctccagcctgggcaaaagagtgaaactctgtttcaaaaaaaaaaaaattccagagtctagaaattcggtcatttttctctttatgtaatggtaagaattaagaatcctcacatctgcaaccaaaaatacaagcctggtgtgtaacactaaagggtaaaacagggatagatataagctgttatgctattcttcaggcaacactgtggataagtgacattcagatgtttactgtaaagaaaaatttgaatacatttgtattgaagggcttttagaaaagagcattactacacagaactgagagttgaaaatatgaaggtgtggaagattaagagaacgcgtttactttaaaagataatttaaaagttatctttccaggctgacacggtggcccactcctctagtcataacactctgggaggctgtggtgggacgatccctcgagcccaggagttcatagaccagcctgggtaatatagggagaccccatctctatctaaaattttttttaaaagaaaataaatatctttacagttatttttcttagtcctatgttctttattttggtgttttccattggatacctgcatgccaagtgttgtgctacagtattactgaagagtataatggaagtaatgtcctgctgaaaattttctttgagatattaatcattaataatttatatattgctatttaatacttacataggtctttagccttttaaaggatttctgtttgacagcttttataattgaaagttattccattttttttttaattttgcatgcttgaaaaagatgaaaacagtgatttaaattatgaagtatggggccaggtgcagtggctcatgctggtaatcccagc

SEQ ID NO: 38507 - DNA, 1061 bp, Homo sapiens
acctctgcctcccaggttcaagcaattctcctgtcttagcctcccgagtagctgggattacagacacctgctgccaccacgcctggctaatttttgtatttttagtagagacagggtttcaccatattggtcaggctggtgtcgaactcctgacctcaggtgatccacccatctcagcgtcccaaagtgctgggattacaggcgtgagccactgcgcctggcccccattcttcttttgttagatttatttctaggtgtttggtttggttttggggggaggggagacattgtttttgggttttttggtgggttttttttttttttgagacagaacctcactctgttccccacgctggagtgcagtggtgcaatctcagttcactgcagcctccgcctcctaggttaaagtgattcttctgcctcagcctcccaagtagctgggattacaggtgcgtgccaccacacctggctagtttttttgtacttttcatagagatggtgtttcaccatgttagccagactggtctcaaactcctgacctcaggttatctgcccacctcggcctcccaaagtgctgggattacaagcctgagccaccgcacctggcctgtttttggcttttgattctatgggaaattttttttaactttactttgtatttgcttatagaaatacattcatttgtgtatatcagccatgtatccagccactttttccacattcatttattctaatggtttatagattttttttttttttaagatggggtctgtgatgctcaggccagtctcaaactcctgggctcaagctatcatcctgcctcagcctcccaaagtactgggattacaggcatgagccactgtgcccagccagtttgcagattcttttggatttttctgtgtacataatcatatcacttgtcattcatgaataacagcagttttagttcttattttgaatatttatatattttatttcattttctttattatactggctgggacctcaactacagtgttaaatacaagtggtagataaaagcagaaatctttgtctcatat

SEQ ID NO: 38508 - DNA, 2111 bp, Homo sapiens
tccaggctggtctcgaactcctgacctcaagtgatccacccacctcaacctcccagagtgctgggattaccggcatgagccaccgcacctggccagtttttggggttgtttttttgtttgttttttgttttgttttgttttgttttgtttgagacatagtttttcactctgttgcccaggctggagtacaatggcacaatcctggctcactgcaacctccgcctcctgggttcaagtgattctctgacctcagctttttgagtagctgggattacaggcacctgccaccatgcctggctattttttgtatttttagtagagacgaggtttcaccaagttgtccaggctgatttcaaactgctgacctcaagtgatccgcccacctcggcctcccaatgtgctgggattacaggcatgagccactgcgccagccacttttatatttctttggtttccactaatgttctttctttagaggttacaagtttatttttttaatatgctttcttggaagtatagtcaagttatttgagaaactgtagtggtttttgattttgctttttaatgtttccatgtttctttttctctccttcatgtggtatttatataatacagtgtagacctttttcccctgtttaattctctttttaggaaacatccctatatacaaaacagaatctagaagtagaaacgaacaggtatatttaaccagttataactgtaagaagataggtgacgtctctaaaaatctgagcaagtactattatgatttctttagtagccacctggctttcttaagaaaaggaatgaccaaagttgacttaccatttttatttttatttgtttgaatttatttttatttatttatttattttggaggtggaggtttgctctatcgcccaggcgggagtgcagtggcgcgatcttggctcactgcaacctctgcctcccaggttcaagcaattcttctgcctcagcctcccgagtagctgggattacaggtgcacgccaccacacctagctcatttttgtattgttagtagagacagggtttcgccatgttggccaggctggtcttgaattcctgacctcaagtgatccacccgcctcggcctcccaaagtgctgggattacaggcgtgggccaccatgtctggcctgacttaccattctagttcctaggttgggtggtagttcatgggtgtttattataatactactatgtttttcatgtatctgtgaaaacaatagctactttggtcatttttgatacttgaagtattctgtattctctattgtttaataagttctgacatactagaatagttaggctagtttctgaacagtaattttaattaaaagctatttattgttttgccttctttcaggctctgtgaaaacttctaattgcatattaggacataatattaaaactttattataaaatacagttataaattcaataacattttaaaagcttgtcacatttcttttaacaattttttctatagaccatagagctaaaaaggaaggattattgcagtgaaatattgaagtattttattgcctaaaacagatcttagatgatacctctgaaataatgtgtttattgggatttctaaatttatattttagagaatgttatataaacacataattttaaaagctattatttctcatagtacttgaagtttcctgttaaaacttataccttctatgtttttataatcaatatatatttctcctacattacttcttaggtttccatataaaagaacaactattattttcattcatatataattttttcacttccgttaagggaatggatccaattacacgtcaagtaggacaacatattgaaatggaaccagagtgggaagcagccttcacactacaaatgaaattaacacatgtcatttcaatgatgcaggactggtgtgcttcagatgtgagtttcttctgggtgcggggaataggaggaaagtggaagagggaggaataagcagaatcctaagtaaatttcaaggagatctggagaaaatagtggtgatacttagttcattaaacagcgtattttccttctccacctataaactcagtaaaatttta

SEQ ID NO: 38509 - DNA, 1026 bp, Homo sapiens
gcacattatgcatgcccattgttggcaaaggtaatgtatattcttaatatttgtcaagagaagtttatctaagggctcaatattttttaaatagaggaaatttcattctagaaaaaaggaaaagaactaaaaatgttgaaaaaatccgtatcattgcctaataaataacaaaagttatttgccttgtcatagatgtaaagtgtatgtcagatatgttttttaatttagctttatatccaagtctcttctatatcttccaaagaaggaagtggatctgtatcagtctgtggatgaagaaaagggtttttacagtaggataaactctagaagggtaatgttgtctttctttgggtccagggtggacaacttttgattccatagatgttagtacttgctttgttacttcccaaaattgtaatggctccctgtgatgagatgtcctgaatttgttctaccttggtgtttcctatgcttctacaaaaccaacaaatcaataatactattattctagaactatgctcacccagttatcatgaactacccctaacaactagccaccacattgtagtcccagctacttgggaggctgagacaggagaattgcttgaatgtgggaggtggaggttgcagtgaaccaagattgtgcaactgcactccagcctgggcgacagagcaagactccatctcaaaaacaacaacaacaacaaaaaaaaaacaaatagccaccagccttggggaagtggcaagagaacaatgacaccaagaaatttttgttgctgctttgtgaatgcttttttacatggcagtctttttttttattttactcttttagaacttttaatccatttggatttttaaaatcactcaaaaatcatgttaaaaataatttagtttaagattttcatttttgaactatttgtggaaacaaattattttaaatgttgaagcttatggctgtcatttatgtaaattaccattgttttgatacctcatgttctctaattgtaaaggtattttgattccgtt

SEQ ID NO: 38510 - DNA, 1051 bp, Homo sapiens
gtggacaggttggagcttgctgacttgtaagcctcacaataaggtgatcaggacacctccagtcttttgcttggtgacccccgaatgtctgtgtaaaaacaactttcccctgaggattgttcactggaaaaactaatctctgtggaagtgggtatacattgctgatgttctcaggatgggaaacagggtcaaggatctcattgtgtagtgtgtaggcttgtgcccagcaccctgttttcagccctgtgcctcacccctgctaagtcaaagagtctaactcctcttgggcaggggcagtttgcattatctctgatcactgcatacaattatctctggatatatgttaagtggttcaatttcaatatagcaaagagctgttaagaaaccgaaccatttgattgatatgtgcacattgttctgagctaattttatacatgtttacttcaggatcccttattctgagagcataaaagaaatgctaacgacatttggaactgctacctacaaggtgggactaaaggttcatcccaatgaagaggatcctcgtgttcccataatgtgttggggtagctgcgcgtacaccatccaaagcataggtaagagatttacagctgtttctctataagtcacaagcattcattgatatgaattaggcatagaatcttgtttttaaatgaaatgtttgaagtgggtaacaacgtgaagaaataataaaaagacttagaagcaagaaatgtaatgtactgacaaaatactagattgatagttcataaattaaccacagcaacagagaactcttggtggtggtggttatagcttcttgtcagttgaaggaatgtactgttcgtttttactttgtaaccaaatttaattcttgtgaaatgactttgaagattctgaaacttgacaatattgtactttctgtaggattggggtttttttaacctttttaagaaaattatattaaaatatacataacataacatttaccattttaaccatctttaatctgtagaaagaattttgagtgatgaagataaaccattgtttg

SEQ ID NO: 38511 - DNA, 1032 bp, Homo sapiens
agtatacgggaaggtgagttagttatctttacataacgcatttccctaaatattgctagatgatgatagcatgagaaaggaattcgtttgttaattaggggaatttgttgtctgttgacatgtttttaaaataagacgtggagtgatctgcagagcctttctgaactattcatatactaacataattggaaatctgggagaaaggtgataatatgcagagcttcccacatttatttggctgtggaacccttcatttgctcagggatctggcagagactagaggatagatcaaatgtactttggaaagttgatactctaaaacttatgttgtctcattcagaatgggaatttaaaactgcaagttaaattggcataatttatttttaaggtaatattcagtagtagcaggaataaaatgaaattattagaattccatgtatggttagagtcatgatttgctacaaatagcaattcagtagtttgcttagctttcaacagtatatatgtcaagaatctgtagtcaggaacctataaaaatgtctgttttttgactatcccatttctgagaacctacattaacaaaataattcaacatatagaaaaaaaacatataggcatataaagatggacactccagccaggcacggtgtctcacccctataatcccagcactttgggagaatgaggctggcagattgcttgagcccaggcatttgagaccagcctggccaacatggtgaaaccctgtctctaccaaaaaatacaaaaattagccaggcatggtagcatgtgcctgtggttctatcttctcaggaggttgaggtagtcagatcacccaggcaggtgaaggctgcagtgagccatcacaccactgcactccagactggacaaaagagtgagaccctgtctcaaaaagaaaaagatgtacactctgatattatttatattagcaaataattgaaagcaatctaagtgtttgcaggggaatagtttgatatagtgatgaatgtgttccaaaatattataaatcta

SEQ ID NO: 38512 - DNA, 1010 bp, Homo sapiens
aaggtaatttatactttctttcaaaacgtagggagagttagtaatcctttactccagcaaatataaagatcacttgcaaaaatgaaaattgactaaaagttcaaagaatagcttattgactatggtgatgtacacatttatagcataaaatgtatgtttatgcatatgtctccatttatttggatctcagtaaatgactgttaaacttctgtgtaaatgtttttacacctgcaaagcccttctcccgtaaagatcatagttttgctttcagatgttaaaatgttcagttatgtattattcataaacaaggttcctcagatttgaaaaggtgaaaactgacaatttcaagtgatttttaacttgaaacatgcatagcattaaaatttagaatacccataattgcacataaatctgattttaatctgggaattgatttgctctttcatagttgttttccatgttctgttttgattcatttcataaaagtagtatgaatgtggacttgactgtatctctgtatcccacagtgcctggcactggccgtagagtacctgcatgcagtgctactctctgaaagtttgtccactggcatttccatttagctagttgcctaggaaccatataaaagagtttagtcttccagattatttgcagtgatgattagagttggtatttaaatctgtgtctcgtggtaaaaccatcttgtatttctgtattggttgatccttttccagagcacccatacatttttatcatttaatgttcacaataaccctgtgcagtagattgtgcaggcacaccattttgcaaatgataaagccgagacaccaggacattgggaccagtttgatgtaggagtcgcctgactgcacttgacgcattgcgtcattttccatggattccttccatgtgccattctgttaacttcctacaagttacgtacctggcaaattggaagtctttcatcctttttttttaaactctgctattgcttaactctcatgcagaat

SEQ ID NO: 38513 - DNA, 1050 bp, Homo sapiens
acagtcctccgtcctcagcctcccaaagtgctgagattacaggtgtgagccaccacacccggctcctcatttctcaatcatttcctgtgtatggttttccatagttatcaaaatgccctcacactctcttagaaaacacagtaaagaagtataaaaacatttttgtcagggcatctggtttttaatatattgtagagttgtcttttctttaaggtctagtgttggtatactcactagaccttaaacccatacctggctgtgccagaaattcttcaacttagacatttacttccgagtcttttaatgaaccacaactattattaatataataaattactgtgctaaatgtttggagacttcaactaattattttatatttatgttcagcacataaatccctttataaggaggtttgttaaatattaagtggattatcttggaaggacacacaatcttttattctgtggatctttaaaacttgtatttccttacgcctgagagaagtgaattgtctgatttggagcagatgtggggaatcagttgattcctcactttttttacactggcttgatagatgcctggctggataataagggtccagcattagtcagtggatcctggaccatggaggaccaggcctgcatcccaaatcctgtgctgtaccatcgtcaaaaagtgctcacatgtagccttggtgcatattcttggaaagtaaattagtaactgacattaaccctaaaaatgtcctttggaaaccagaatcttaggaaagtaattgcattgggtaaacagttattaggcatgtatgtatcaggcattgcactaaactctgctaacacagaaatgaaaggaaactcatccagttttcatggaacttgtaagccagtggggaagtcagaaaaaccaagtatactcatatgttgcttaagaaggaggatacgttctgagaaatgcgtcgctagacaatttcattatcttgtgaatatcagagtacacttacacaaacctagatgatctagcctactgcagacccaagctatatggtatagc

SEQ ID NO: 38514 - DNA, 1032 bp, Homo sapiens
tggtacagaaagatgtgtactacaatgaagagtttccctcctcgtctcgttgcccacccacccagttgccatcaggcaaccagtgaaaccagcttttatggtgtgagcttaagttccttcctcacttttgtattgggaaaactttcaaacccatggacaaattggaagagtacagtgaatacattgacgtggtatcaccagtcatttctgttttgcagtatttgctttattggtgctaaatgtctatagtctctatgtgtatgtacacacacacatttatactttatttatatacttttttctcttaaccatttgaaagtactctgcaaacatcacaactttttatccctaaatacttcagcaggtgtctcctaggaacaaggaccttttaatataattatatcaaatttcttccatttggcctaataacgccctttacaaaaacagtttttcactttagaatccagagagcactgatttcatttagttgtcacatctctttagtctgtaacagcactgatcagttgtcttctagagtggccttgtctgactggacttgtctgactggaagtatgtttcctcatgactcggcttcatcaggctaaatggtttgggcaagacacatgttggtttgtcccattcgtggtgatgctgagtgtgggcacttggttaagtggcctctcccagatttctccgcaagggtctcaaaggtgtcttgttccctttgtaaagaagaaatgatctccaggatagaccatgtgactattctgtttctcagcctctcaccctttgatgcctctcacctgaatattatattgatagtcacaaaataatgattttataattgtagtatcctatctatatttattgcctgggatttttccagaaagaagagcttttttggccaggcacagtggctcacacctgtaatccctgcactttgggaggcagaggcgggcagatcacttgaggtcaggagtttgagaccagccaggccaacatggcaaaaccccatctctactaaaaatacaa

SEQ ID NO: 38515 - DNA, 1084 bp, Homo sapiens
tacttaacaatacatcagaatcaactggaaagctttaaaaagttatagattcctggccgggcgcggtggctcacgcttataatcccagcactttgggaggccgaggtgggtggatcacgaggtcaggagatagagaccatcctggctaacacggtgaaaccccgtctctactaaaaatacaaaaaaaaaaaaaattagcttggcgtggtggcgggtgcctgtagtcccagctaatcgggaggctgaggcaggagaatggcgggaacccaggaggcggagcttgcagtgagccgagatacactcaagcctgggcaatagagtgagactccatctcaaaaaaaaaaaaaaaaaaagttatagattcctaggccaggcgtcatggctcacacctgtaatcccagcactttcagaggccgaggcaggcgcatcacgaggtcaggaggtcgagacgagcctgaccaacatggtgaaaccccatctctactaaaaatacaaaaattagccgggcgtggtggctgtaatcccaactactcaggaggctgaggcaagagaatcgcttgaacccgggaggcggaggtagcagtaagctgagatcgcgccattgcactccagcctcggcgacagagcaagactccggctcaaaaaaataaaataaacaataagttaaataaataaataaataaataaataaagagttatagattcctaaaccccacattagatttctgaattgatctttgtggatggaacccagaaattctccaggtgatcttgacgcaacctgaatttgagaaccactgcctcttgatatccatcccttaccccagcttcaaattctccagagagtctgattaggccacttgtggttgagtaaaccatgactggaggggtagtcttctgggcggcacaaggaagtagttttccagggcctctgctgctcaatctggagcctttgtacaaattaggaaaaagtgcccctcagggccaaagtataaaaaggcacccctctgggtagacaacctgctttactggtaggcttggcacttttagagggtgtgtagcggttgcttcttccctggacttt

SEQ ID NO: 38516 - DNA, 1048 bp, Homo sapiens
ctggggagggcgtgggaggaggggcaagtggtgctagaaaaatgatgtgcctgcacagagtacaggacagaagaggggagggagcccagatggtcctggatggagagctggggaggtgagacatccccagttcattgcagacttgaagatcaccagcttattacttggaatttgtatgtgtttcaaattctccaagccattgattaatttcaccaagcaggcctccaggggatgtatttatttttgtggtaaattggtattctagcagactgtgctgtcagtgttaaaactgctgatggcatttagccttcagactggtattccattcagaggcatcagaagacggtctctatcaacaagatttatcgagcgtccagcatatatcaagtcccaggctaaggaaatacgaaaaaatctaatacataatgcacattttggggacccttgtggtctatgtggagagacacatcaaatgactgagggtccttagggagagcatggatcctgcagaggcccagagtgaaatctagagcaattggcattagtgcagaatggcttcctgggggagaggcttataatgcgaggtgggcaggatgggcagagaagcccttagaaggcattaagtattttcctagggcctcaggcacttcacaccctcggtggtagcactgtagcactctatacagtggtagttatttgtctacacctttatctgctgcattagactgagtatctggaagggaggggaccttgttttcatctctgtatccccaggctgacacgtaggagttgcctaatacctatttgaggaagggtaagaggaaatgaggaaataaatgtgcggagacagtaggaacaagagctctctggagggcatggagcaaattaacttggtagaaatagagctgatgttggaacacatatgaaatcaagtaatctaacaaccataaaagatgttttggggacaattaaggaaatttgaatatggactactgggtgatgttggaattgttaattttccaagtatcataattgttctatggttatg

SEQ ID NO: 38517 - DNA, 1093 bp, Homo sapiens
agggcagtgcactgaccttacgctgctccctcgtgtcctggacacctggctgccgttccctccctccctctctcctgctgctcctcttcccaaggcctcccatttgttgtgtaaaatgcagtgtttacctggccagctcccgcccctgttcctacttccacctggccttgactgttggtcctgaaccttgttttctgatgaccacacttgatcactctgaggttcctagctgttgtacctggagtgcagttgggaggacacccggttcccaacaccatctggtcacaccatgttcctcagggccaagggaggagcagagaggctggcctctagggagaaggggtggggaagctcaggcacctcccagtttgtcctgaaggcagggatcggggcaattggtacagtagtgatgacaattgtatgtattcaaattgtatgctttaacttttactattaccacactcttgtgaggtgtgctgttaacctcattgtgtagaggagaaaacaggctagagtcaagtgatatgcttggagtcaggtgaccttggagtcaaggtcctgctgttaaggagtggtatagctgggacgcagacactggcgttcagattacaaatccatggtacttccactctccacagctgccagggcctcttcccccaacccctggcactgacagtgtgagttgtatcgaactggtttagtttcttggccttaacctgtcaccaccaccaagattctttttgttttgttttgttttgttttgtttttttgaggcggaatctcactctgttgcccaggctggagtgcagtggtgtgatcttggctcactgcatcgtctgcctcccgggttcaagcaattctctgccttagcctcccgagtagctgggattacaggcacctgccaccacgcccagctaatttttttgtatttgtagtagagacggggtttcaccatcttggccaggatagttttgaactcctgacctcatgatccatctgcctcggcttcccaaagtgttgggattacaggtgggagccactgcgcctggcctaaccaccaccaagattcctaaaaggcgaataggaagcagct

SEQ ID NO: 38518 - DNA, 1015 bp, Homo sapiens
ccctctagtgtggagacttatgctgtccagatgttgaccgcagccctgcatcactatagttcccaaatatgaacaaaattccccttattttttgatcttgaaagaaaagcctattttttatgacagatatatatgggtccatgctaagtcacttgtttcaatgagatggaccctactgccagctctggtaatagcaatatgtattagcaccaactgcccctaagtggaaaagattgcccaaaaaagacattaaaaagccatattggctgggcatggtggctcacgcctgtaatcccagcactttgggaggctgaggtgggtggatcacgaggtcgggagatccagatcatcctggctaacacggtgaaactccgtctctactaaaaatacaaaaaaaaaaaaaattagccgggcgtggtggcgggcgcctgtagtcccagctgctccggaggctgaggcaggagaaaggcgtgaacccgggaggcggaccttgcggtgagccgagatcgcactactgactccagcctgggcgacagagcgagactccgtctcaaaaaaaaaaaaagctacagaaaaaatgttactaagaaggtcataagaaaaatatatttactgttcgttaagtggaagtggatcatcttaaggtcttcatccttctcatcttgggagaagctgattttgaagtctcggggtggcagagacaggagaaaatccacatatatgtgggcccacatagttcagctccatgttgtgtgtttgagggtcaatggcaatctggcttttttttttttttttttgagacggagtcttgctctgtctcccaggctggagtgcagtggcacgttctcggcttactgcaagctccgcctccttgggttcacaccattctcctgcctcagcctcccgagtagctgggactacaggcgcctgccaccacgcccgctaattttttgtatttttagtagagacagggtttcaccatgttagccaggatggtctcgatctcctgacctcg

SEQ ID NO: 38519 - DNA, 1056 bp, Homo sapiens
ctggagaattgcttgaacccaggaggcggaggttgcagtgagaggagatcgtgccattgcactccagcctcggtgacaagagggaaactctgtctcaaaaaacaaaaaacaaacaaaaaaagaaatacattctctctcagctctggaggccaaaagttgtaaaattagtgtcggcagggccatgtccttctgaggttctaaggaagaatctgttccacatctctctcctagattctggtggcttttgacaatctttggcattccttgtagatgcatcactttaatctctgcctctgtcttcacacagcattctcctccatgtgtctctgtctctgtccaaattttcctcttctaaggacaccagtcatattggacttaggtttcaccccaatccagtatgatctcattttaacttgattacatctgcaaagaccctgtttccaagtaaggtcacattcacagattctaggtggacatgaatttggtgaggggagggggtaggggactggatactgtgcaacactatgtaccaggcactgtgctaagtactttgcatacattgtctcatttaaccttcacaatactcccctgagattcctttattattattattcccatttcacagatgaaactgaggcttagaaatgttaactgggcacagtggctcacgcctgtaatcccagcactttgggaggccgaggagggcagaccacctgaggtcaggagttcgagactagcctggccaacatggtgaaacgctgtctctactaaaaatacaaaaattagcctggcatggtccagctacttgggagactgaggcaggagaattgcttgaacctgggaggtggaggttgcagtgagctgagattgtgccactgcactccagcttgggggagagagcaagactcttgtctcaaaaggaaatgttaagtagcttttattcagccagtaaggcagtaaggcagagctggaattcaacccaggtctgtgtgactctggagtctcttgtggtcttgaatgaagtgatactgctggctctaagattctagaagtgaa

SEQ ID NO: 38520 - DNA, 1032 bp, Homo sapiens
tgagagcttctaggacctacacctcacctcccttctacctcacacctttgcagctggcatactgtgtggtacaattcctggagaaggagagcagtctgactgagccggtaattccccttccgggccccaaggcccacctcttactgtcagcatcacttgccagtctgtacctactgggggtgccataagggggaactcaggagggctgtgacctgaccggtaacatggtttcctctctgaaggggaagcaaaacctatatacacctaggaaacagatccaaggcaaagaaacgggtagctggctgagatcacccaaactgtgcccaccagggtgggggagagagcaggtaggaaaacttcctggtgacctaggcaggtgcaaagaattttcatccccatgccctccttgtctcccaggtaattgtgggacttctcaagttttggcccaagacccacagccccaaggaggtgatgttcttgaatgagctggaggagattctggacgtcattgaaccttctgagttcagcaaagtgatggaacccctcttccgccagctggccaagtgtgtctctagcccccatttccaggtgagactccaacctagcatatcctagcccctgccagaaactgaggtcttgagtgaaatgagcagcacccaccgagtctgcctctccccaccaggtggcagagcgtgctctctattactggaacaatgagtacatcatgagcctgataagtgacaatgctgcccgagtcctccccatcatgttccctgcactctacaggaactccaagagccactggaacaagtaaggcgctggggtggggctgggtggtggggatccagtttgggaaactttgagggtatggaagaactaaagagccaggggtctcacctagtcacccagcaagtggggctgatgtcccctgcatgttgataggaccttgaggggctgactggagcgaaaagatgcctgtgtgcaagatctctgtgataccaaacagcagggcagcggcctgttacaccgctc

SEQ ID NO: 38521 - DNA, 1031 bp, Homo sapiens
aagaatagagaatataagggaggatggaagacttccattcttaagcccatcgacctcctaacagtctccacaagcccagacccaagatattttggagagcgggagtaatgaagtgagagtagcttcctgctggggctatttcaggatgggtcccatggctatttaaagcttagggtgtggagttgggggaggttgggtgggtgggactagcaagccagctgaaagccatgtctctttcctgcaaggggcctcccttatttgagctgttttagtgcctgaggttttgcctggccctttcctctgccagggcttcttaaacagggagcagatgatgatacacccaaactcaggagatgcttgccagcaaaagcattgtcagttgcaaggatttgcctgaaaaaacctcagatgtacccaggtgtacgtgccactaggttgacaggttgtgtttaagagaccatgaccagctgggcatggtggctcacgcctgtaatcccagcacttcaggagaccgaggacggtggatcacctgaggtcaggagtttgagaccagcctggccaacatagtgagaccccatctctactaaaaatacaaaaattagctgggcatggtggcaggcgcctgtaatcccagctacttgggaggctgaggcaggagaatcgcttgaacccgggagggaggcagagtttgcagtgagctgagattgcaccattgcgctccagcctgggggcaagagcgagacttcatctaaaaaaaaaaaaaaaaaaaaagaccatgacttctcatgctggatctttctcttgtcctgcccaagggcattttttgcctcccttcccctttttttttgttttgagacagagtctcgctctgtcgccagactggagtgcagtggtgtgatctcggctcactccaacctccgccacccgagtgcaagcaattctcctgcctcagcctcctgagtagctgggactacaggtgcgcgccaccgtgcccagctaatttttgtatttttagtagagacgggtttcac

SEQ ID NO: 38522 - DNA, 1071 bp, Homo sapiens
ccttacaaaactccagcctccaaaactccgcccttcgcgattcttccccgcccctcggcgtccagacagatagacagacgacctgccccgccccctgcgccaccgactgactcagtgacctcggggtcgttaggcctccacgtcctcgctggagctgcggacctcagtcgtccatccacacctcccccctgccgcccccgcccatctcactctcccaaccctgggcaccagggcaggtcgacagcccgaggcactcctctactgcgtttccaggcccaggagacccactccagcgccgcggttccttgcgacccggcagccgttcagcagacctcccattctttcctgcatcatcgggcattgtggaggcaccctacggtgattcctctcagagcctgtttgtaggtgaccgtgacagagacaaaaccatggaagtgactgggtttggagtgaccaggtgttcctccctcccctttcccagacacgcctcttgctgtaggtctctggttaagtctctctctctcattcccttcctgggagacagtagctccctaggcctgcaatgagggaggctggcttggggaaggagacgggaattgggcgtctttgaagacctgtgggcagagggagggagggagggtgtttgtcctgggtggggctctgggccaggtcctctgggtagctgtgaagtggtgaaagaaggggtgggaacgctggacttctggactttgggcagggcagatcctctgactctctggctgcagaacagtttcttccgtgctctggcctgagtgccacagccagggcctctgctctgtacacaggtaagaaggcttcaaagatgagaaacaagacccctctgaggaagtgggaacacagtctgagtcctggggggtgggaagtatgggttgaaggttagtgggaaaatatgcagggctgaccaggtttggagatgctgggcttagttctgcaggtgatgcagcctgaagaccttgagctttctgggaccctgtaatgtggatcctgcaaggaaggctcttgttttcttcttttccctttcttccctgattt

SEQ ID NO: 38523 - DNA, 1047 bp, Homo sapiens
ggtatgtgttgagtgaacgctcaggtgactagaacgtcatccaccaggtgtcctgcagatcccaagcccctgttagaagtgtaagccttgataagcgggatatgcactcacaggtttaggtgtgtatgtaatttctgaagacaaagtcccgagtcgcagggtagggattgtaagttacatattaggaaggtgtagatatgtgtttctcaaattagagtggagagtatagggcaggtcaccaaagtattgatgaaaagtttagtttcctgggccttactgcagacctgcccatcagaattattgagggagaggccagaaaatgcattttatttatttgttagattatgttgctgtttttgaatagctgatccagttacataggccagatttcaaaaggaaactgcattttaatttttatttatttatttttgagacagggtctcactctgtcacccaggttggagtacagtggtgcaatcacagctcactgcagccttgtcctgttgggctcaagtgattctcccgcctccgcctcccaagtagctgggaccacaggtgcatgccaccatacctggctagttttttaaatttattttttatttttaatagaggcgaggtcttgctgtgttgcccaggctggtgttgaactcctgggctcaagctatccttctgcctctgcttgccaaagtgttgggattacaggcgtaagccatcacgcccagcctggaaactgcatttataaagagcttcctggagattcttacctacgcttaagtgtgagaaccactgggtagccataaggagaatttatcagtctgaagcggaggtgtggtgttgagaaaaagggtgatattaatagtggggggcttaggagggagttcattcaaagtgcttcagtgtcttctatgggtgaagctgtctgaggaggcatggaatgcaggaagaagacaagatggagaaacgtgaatcagatgaagtatgaaagacaccatttggtaaagtgctaagtagaatagaagaacattctagaatgtgtgggatggtaag

SEQ ID NO: 38524 - DNA, 1050 bp, Homo sapiens
ggcgtgagtcactgcgcctggccggatggaattttctttaatgagagagagaagttgattgatagaatcaaacagtgatgtgtggcagattctgaggcctatataggtcctgggggtgtttttcctaaaccaggagttctagctcctgagagatgggtagttgagtggcccagatggatccttggattgaagcagccaaaattacttagagtgggagtgcctaggaaaaacttcctgctgctccctgctctctgtaacaattgtgtttacacatatgtgtgtgtatacacgcacacatatgcacacatgggctggctgggcctgagcccagagagcaacacggagggtgggcaccagaccagatgctggcgggggtgggggtggagggcaggcacgggagacgcaggcagagtgagtgtctgcatatagatggctgttagggagccaaggaaatggcttggaaaatgtccttattgggtgtttgcagctccggctttgttggggtcggcgcctggtgtgggcagatggccctgtctgcctgttgttgctgagggcttcttgcctgctgagcccggtacggcaggctcataccggggaagcagcaccctctgcgttttgtgccgtgtgtgggctttgtgaatgtgaacccgttagcccttactcaggtggggtggtggccgctgtccccatttcacggcaaagaagggtgcagaggccacactaaggtagcgtcactagggagcagcggaggcagggctgtttggcagcagcaaagctgcacatggagctggctgcctccggggtcacgtggcctgcatctccatgggggcttgtgtgcagtggagggggttgcatggcatggcccggtggcaaaagaggaggcagcctcgggaagcccaggacctttcccagaccacagtcctgggggcatactcaagtcagggggcggggacaggaatgtgctggtgactacatcaccttgaggcaggtaccacctcaatcccgaaccgcctgccttcttctctgtcattgctgtcctccatttcttgt

SEQ ID NO: 38525 - DNA, 1032 bp, Homo sapiens
taatatcaacttgattctgcccctgaatcagaattactgtgtgcccttttgcaagtcccttcccttcctcaggccgtttctccatgtataaactgaaaggtctagccctgaccctctgatactgtatcctctccactggccactgagtacccctccccaccactgctgactgtgtctgccctgcaggcccacctaccaatggttccgagatgggacccccctttctgatggtcagagcaaccacacagtcagcagcaaggagcggaacctgacgctccggccagctggtcctgagcatagtgggctgtattcctgctgcgcccacagtgcttttggccaggcttgcagcagccagaacttcaccttgagcattgctggtgagcctggggtgggggcggaagggatgaggtgagcacaggagggcctcaccacccaggctgcatgctcccccatctttccctctccagatgaaagctttgccagggtggtgctggcaccccaggacgtggtagtagcgaggtatgaggaggccatgttccattgccagttctcagcccagccacccccgagcctgcagtggctctttgaggatgagactcccatcactaaccgcagtcggtaaggcatctggctgggagcattccagtaccatgtaccacacacatgcattctgtagaagggggtgcgatttgtatcacagacatcacagatttgtacatgtattatttcaaatttccaagagacacagttgaatgttttgcttttacaagatgagtctgacacagggaagagtctctgggaagagcccttttccagtttgcacaaaggcactctgagctagtgatggttccacttctctctccccaccacccacatgggtcttctgggatggaagggtagagaccccagggatgagagagacacaagagacctaggtagtcaggtggtcatagtctagatagcgtgatccagtgtggcaaagacatcacacacacacacacacacacacacacacacacacacacacacaca

SEQ ID NO: 38526 - DNA, 1035 bp, Homo sapiens
tttgaaagaaaacgtagtagcccagccccctcatgcttatagaagaggaaaaccgaggttcagaaaaggggactggttatttcagggtcacttagatggtcattaccagagctaggaacagaccttggtgtcctgactccccagccaatgggattaccacagtccgctggagcagagaactcaggggattataataatgacaatgataataattatcataagagcagcaaatatttattttggtttttttatgtgccaggtagtgttttctaagtgatttacatatgctaacctacttaatccttacagcaacctagggggtaggtattatcctccttttaccgatagaaaactgtagctcagtagatcaataacttacctaagagtcaggcatcaggtaaatggtggcgttgggatttgaacccaagctcactggtttcagtctgggttctcagtccacacaaagcttctgcaaaggcaggatctggtaggggctcattgcttcatctttactctgggtataggacacactgaagccggcgttcacagtcaccaacctgccgggtacaacctccaccatccaaacagcacctagcacctctaccaccatgcaagtcagcagcggcccctcctttcccatcaccaactacctggcaccagtgtctgctagtgtcagccccagtgctgtcagcagtgccaatgggactgtgctgaagagtacaggcagcggccctgtctcctctgggggccttatgcagctgcctaccagcttcaccctcatgcctggtgagtcacgaggggcagggagagattcgtccttcctggggcaaatcaagcatgctaagagtgtgtttagggctggcaccaagagaacctctttccctgctcagaaggaaggtgaataggggccagagcctgagcgaagcctcttatatcccgttggcaggcatacctctgcccactgagacccctgctgtccttgtcagtaagtttcaaccatatattctggccctgtctagctaccccagccccgtg

SEQ ID NO: 38527 - DNA, 1106 bp, Homo sapiens
gatttcctagctctgtaagaacacctagtatttggtgaatatcaatttgatgcaaaggaaaaaatatagattaataggctatttcaggtatataaagaggctaaaatgatagcctctggcttatctgttcattctcagtgcattgaccagagaagagaataggacttatctgtatttttgaaactggattgagatttattagttggttttgaaatcaatttggtgggttacaaccaacatttttttaaaaacttaagtcattagtgtgtagcacttagtaggggtaaattttgtagcataaaatatatgtttcagttatatgtatgtatgtttgtaacaggttaccatgtaaaatgtatttctttctgtgagccttagtaacaaagtttgaaagcgtctggggtaggagatagaatctaggaaaggcagggagaaagtactggggattgaggagaagatatggattgggtatggattacagggagtcgggctcacgtccttctatcactgagccagcaagatggcatcgagcagcacatggattttgacagtcgctatacattgctggagctgtttgcagaaaccacatcctctgaagaacactgcatggcctttgagggcattcatctgcctcaggtacactgccagctgtagggaaatgctgtgtacaagggctaagacattatttatgaaaacgtggttcaggactgaatgttagcaccagagccacctgggaacttgttaacatgaaggttcatgtcctccctcccagcccctctccattcagaatttctgagatgagaacccaggaatctgtgttttaagacactccctatgcctttcttacacaaatcaaagtttcagaactacaggcctggggagaaggcctttatatttttctgtagaggaggatacttcagggaaggggagaggctaaagccaggaagagatgaacctgtcccaaggattgtgtcttacagatcccaggaaagctgcttttctccttggtgaagcgctacctttgtgtcacgtccctcctggatcagctgaatagcagtccagagctgggagctggagaccaaagctccccatgtgccacaagagag

SEQ ID NO: 38528 - DNA, 1044 bp, Homo sapiens
gcccccgcccagatccttcaccttcctcaatgatgcctgccagggactggagcaggctcggaaggtggtagcgggtgggggaagagagcaggggaggggtgtgccaaatgggtctggggggcttggctgctttcatcggacttgcctgggtgaagggaatgaggagagggcaggcgggagagctgatgggagcccctgcaggtgctggcctacgcctgcgtgtacagcttctacagccaggacgcagagtacatggatgtggtggagcagcagacagagaacctggagctgcacaccaatgccctgcagatcctcctgggtgagccacccctgccagccaggccctcctcctgcctcctcccctctgttgcacagcccggcccctcccagacaggtcaagcggcacccttaccttccctctctcctcttcctcttcattcttcatggccttctcactgcctggctgttaaagctcaggtcgaaagcctacattgtaaggtgcccaagggcgcagatgttcgtggatgtttcttggtttctggtctttaccctgctcccctagggagcttcatgagaatgtctagagctgcacctggtgcttggtagacgttccataggtgtttgttggaggaaggaatggatgagaatgagaagggagggagcctctgtgcctgccccctctgcagaggaaaccctgctgcggtgcagagacctggcctcctccctgcgcctcctgcgggccgactgcctcagcacgggcatggagctgctccggcggatccaggagaggctgcttgccatcctgcagcattctgcccaggtactgcccggcccagaccccttctgctcctgcattctgcgggagttgaggtcctcctgtcccagcacagcccctgccctggggcgagtccagaaggaaaggcagcaaagcgggtgaatggatgttagacctgggcgcacatcccggcttttgggccaacctgcctgatgctgctggaccctatcacttcacctcctggggattcctacaaaataaaggggttg

SEQ ID NO: 38529 - DNA, 1027 bp, Homo sapiens
gatttgtacaaaggaattttgctaatgtgttagttggggcttttttgggtataagttacagaaacacactagagctagcttaagcaaacaagaatttataataaggatgtagagatacattgcagaatccaaaggcaggaacgcagctggatcttagaaacagcccagaaccaggcctcaactcgcagagctctctgcttctgtgtgcctctctccctgtatttgcctggttctcttctctctgtggacacaccctccactgagcagaagatgtgactacagagaatgctcgagtttacaagttacagccaacaaggagaagctgcctctgggacctgatcccaaattcccatggaaaggtctcagaagtggtgcccacttgtagctgggtcaaccctggctggcagggttggggcatcacaggcagatagagcttctgagagcccagtcccttctagagaaggaactaggacttttttttttttatatttttttgagcagggagatagctccatgaacatatgaccaaaaaaaaaaaaaaaaaaaaaaaaggtaaacagaaaaatttaagccacagaaatagggatctatgcaaagctctgctttttcccctgagatatggtaactctagccacaggtcgacttagccaacccatcatccaggccctaaagcctggaattctacccttccctctcccgttctggagtgcctgtctcagagtttaccttggaagttcttgggtggtttcctcccattctctctggcatgctgctccccttcagaggcccttcacatagacagtgaaactgatagccactctgagtggagaaaaaaacaccctacttttctagagcctgatttgttgatcagcctgtgaagcggagaattctttccctacacactaaagaaagaagaaaagagaagcctcagtgggaggactggcagcccagagtgtcaagagggagaccactgccacctctgtcctgtctcctaccaatagcagatgcttgtgtggcttccttgcag

SEQ ID NO: 38530 - DNA, 1055 bp, Homo sapiens
gcccagcctcttgcctccgcaccacctccttcactgagatccgcagcagaccagcccctgcgctgtggggggctggccccgtggcaggtaccactacagctgaggtgggccctagaggggtgtccactgtggttggggggtctgggacaggtaagacaagctcacaggtcttgccaccatagccactggggcagaggcagtcgaagtcgtggacacggtcccgacagcgggcccctctctggcatgggcggctggcacagtcatccaggttgatggtgcagaagcgtccagcaaagccctcaggacagaggcaggagaagcggtttatgccgtcaaggcaggtggcaccgttagcacaaggccgcatcaggcagtcatccacatttacctcacagcgggcacccacaaagcccaccaagcagcggcacgtgaagttgagagcaaagccctggtcgtcctggcactgcccgccattgcggcatggggagctgtggtaggggtgagagaggacatgataaccaacttaccaacacctgtagggcagcccaggtcagtatcctgaccactgcccgccatgtcatcttgggctacacactccgagcctcaaatacctcattttaaaaatgagaataaaaatagtacccagcttccctaattgtgagggttgagtgaaataatcaatgtcaagccattagcacagggcccagccagaaggcagggctcagggtaagtgtgctattattatcctcacaggctcctgggcctgatgcagaaatgaggacaagtccagccctgcaggctgtttcctcatccctactgtgacacagaagggtgcaagccagcgttcaggagaggatgaggagagacccaggcccttcagtctccccacacccaccctccccaaccagaacagtcacacgtttgttacccctctagctcctatagattgttgaagaaatggctcagaaggtacaaaaaaaaaagttgagaaaccctgaactaggaacactttggcatgcaggggttttatctgagtgtccccgtgtgggtctgac

SEQ ID NO: 38531 - DNA, 1046 bp, Homo sapiens
agtccccacaccttggcagctcagggtccccagtccaagcccttgacctctcctctatccagacccgcacagctgtttcctgtgtggatggggtcaggttgtgggccatgccaggcctgtcagctgcgttgactgactgcagcagcttgcctcatggttttccctttttcttagaatatttattcttcagaggtaacatgcagttgggtctcaagacctttcctccaatcagcccaacccagcccagactgggcttttctggggagctgaggagtttatcagtattcatcttccatcctttcatagtcacaagttttgttattttgtttttttttgggggtgatggtgtaattgttaacctcatttccgtttcctacctgtttgcttccccccccagtcctccgcatgagctgttgccctccaggggcctggcacagctggccttggggacgagggagaggactgattcagggccccctcagctgtctcctccctccctctggaaaggagggtggggctcaggggcctcaagctgggctctgtgtgaggcctggcccccactcccaaccttggctctagactgttactcttaagctttgagaaattttcacattgatgactattttaaaatcaaataaaactattttactggtatggcctaacttgtcttaatgacctcccctctcccacttttctccccattcataagtattcccagtcctagtctcatcctagtcggctagtgactccccctcgccccactctgcctagggtttccctaggcacagagcatcagggagcgggaaagggggcaccttaagtaaccttagcagggttcctgagtcttccctcggaggcagggaccatatctttatggggctagtgtaaggtgttgcctcagaggcctgggttctaggcctggccaggcctattttgagatcctggaccaggtcacgcagcttagagcttgggctgtgcgatgctactgccccctagtggtgcttactggtagttccaattcctcccctactgccggccccaagtga

SEQ ID NO: 38532 - DNA, 1030 bp, Homo sapiens
tccagagagtcatgatcaaaccactgcatgcagcctgggcaacagtgagatcctgtcaaaaagaagatgaagatgaagagatatatagagcaaggcatgtgagaaggggtgcggagctttcatgccctccctgggtgagccaccctccaggaatctctactattacagctatttggaacctctccggaccctgtcctcttgggtttttagggaggctccgttatgtactcatgactgattaaaccattggctatgggtaatcaacttgacctgcagtatctctcttcctctcccctccccagaagttgagggggtggggccaaaagtcccaaccctctaattatgccgtggtctttttggtgacctgccctatcctgaagctattagttaacattagcatacaaaaagacaaaacttgggtgattccaaggatttttggagttgtatgccaggaaactgggatgaagaccgaatatatatttcacaatattataagtatccttttctggctgtgtgtatgagtatattgctctttcttttctttttttttttttttttgtgggtgggggacggagtttcactcttgttgcccaggctagggtgcaatggtgcaatctcggctcaccacaacctccatctcttggattcaagtgattctcctgcctcagcctcccgagtagctgggattacagtcatgtgccaccgtgctggctaattttatatttttagtagaaatggggtttctccatgttggtcaggctggtctcgaactcctgacctcaggtgatccacccacctctgcctcccaaagtgctgggattacaggtgtgaactgctgcgcccgatcttgctctttattttctttgaggcctatcctcttcctagttcaaataatgatttaaaaaaaaaaaaagtcaagtatttctctaattctctaatttgagagtgttttagaacaataattatattagtttttatgggtgtcatggtgaagaggtaccgatgttttcatttttatggtaaatataaa

SEQ ID NO: 38533 - DNA, 1039 bp, Homo sapiens
ggcttcctgtgaccttggctgtctctgggagcagggctggggtacctgagtggggtgcatttggggtgtgtgggaaggagagggaaagaaagatggacagtgggactctcccctagcagggtctggtgttccgtaggctagagtgcccctctgctctgcgagtgctgggcgggaggggagttggtgagagctggagacccccaggaagggctggcagaagcctttccttttgggtgctgtcaggtccgcatgtcttggcgtgttgaccttcacagcttctggcgaggggaggaatgatctgatgcgggtggggagggttagaggaggcctcaggcctaaggtggtgcagggggccccctaggggctgggcagtgccaaggcataaaagccttccctggtccctggtggcatttgaaggtgcccaggtgagaggggcttggcacctcctcaccctgggagggagaagaaaccagggaacaggtaggagtgggagacaggtgaggctttggaaatctattgaggctctggagagatttgtgtagagaggaaaatgtggttctcccccagggtctcctcctgggtttttaccctctaagcaacctgtgggcatgctgggttattcctaaggactagaagagcttggatgggggagggtggttggtgcccttcggtcctcggcacccccctccgtctccaacaccagctcaccctggtatttgtcatgtcagcaggagaaggtcaccatgttgtttttctcgcccctagtccttccttcctgccccagtccaaatttgtcctcctatttgaccttaatacttaccatggctttggaccagggaactagggggatagtgagagcagggagagggaagtgtggggaaggtacaggggacctcgacagtgaagcattctggggttttcctcctgcatttcgagctccccagcccccaacatctggttagtctttaacttcctcgggttcataaccatagcagtccaggagtggtgggcatattctgtgcccgtggggacccccggt

SEQ ID NO: 38534 - DNA, 1027 bp, Homo sapiens
gggttccctgctcacctcttctggaggcctgggaggagggctgcccaaggagccccccagtctgggcttttttgtcactttgtcatctctgtctataggattggagttggagttgtaacagctgttggagtcagggaagagggaggggagcggagggtagggtcccacccaggagaccttccagtctccccagcccttccaggttctcctggtccatcctttcctccacctcctcattgctctttgcataatgttggctccgttgcccgcccccggcccctgccagtcaactctggaactgcagggccctctggcattctcgcttcagcctccttagggagatgatgaagattacctcctccctcaagtccccactgcccaccatcagtgcccacctccgctcccaccctgagtccccctgaaaggaagaggcatatttgagggaagcagggtagagggcagtcattcctctctgcttcagcctctgcgcttcctgtgccttctgtgccttctgtagccctggagctctggagcactcagcccagcttcccgggggctcagactcaccaggctctctgatctctcatctccctcacccccagtgtggcttcagctatgcacggggacagccatgaccggtatgagcgtctcacctctgtctccagctccgttgactttgaccaaagggacaatgtgagtgccctccccccaaacttcttagtcccccaccccacccccagggcacatgggctgagaagtccctcactttcagtgatgtggagtcagggatgctggtttggcctcctcctcagcaaagaaagtgattcaaccaaggagccacaggatgaccccccaggccctgaactcctggctgctgtcctctatgtcacagtctccaaactagcacagccttaacattcatgaattcccaactttgtttgccataaagagttttgtgcccacttctgctgattaatcctaaggccaccttttttccgtagtcatggttttagaaataataataagc

SEQ ID NO: 38535 - DNA, 1030 bp, Homo sapiens
ggcctgccctcatttgctttcattttagtggggaggggtggacagggaccggatgaactagtaatagagactgtgtcaagaagaggtaggtgctaagaaaaccacagcagggaagcaggcagggtaagaggggttgggaagggttgctatttctgatgggatagacagggagggactctgacagcgtggcatttgaacagagacctgagtgaaccctactagtcaactgtctattcattcagcccacatttattgtatacctactatgtgcttcatgcctgggagacagagtataatcagacctgatcagtgcccttgggaagctgaagatcctagttgtgtttcaggggttggtctatagttttgtttaggagaggtcagcctataagcaggggtaagggagactctagtcctaattggagttttttggatcactgggatgagcattatggagtagccatttcattgatccgctcatttaccacatgtgtattgaacacctgctatatacaagctgttgggacagggctgggtatatggtgaggactaagagacagcgcttgagctcattgtcaggattaggcagggcttgtggtccaagtctgcagtctgtctggattggaagactgtctcagcacaattaggaaatatcttgcatgcaaatcaacgggcctgtgtggttggatttagaggattagagatgagtttagtgagaatgagagctcacccttccaaaggggaaacctcaaatggtttgaggaacaatatcagaggaaaggtctctagcctcctgggaagtacatctcaaggaccctatcccagatttaagtttctaaattctcatgggtttatgaggactatcttaatactttagaacagtaactcatgcattcaatacttggtggtccttcatttaaaaaaaaaaacaattttttttgagacagagtctcactctgtctccctggctggagtgctgcaatacaggggcgtggtcatagctcactgcagccttgacctcctgggctgaatc

SEQ ID NO: 38536 - DNA, 1043 bp, Homo sapiens
tgactgtagtggaggggggcgccaagcttacttgggtggaggtggagacaggtttgcaggaaggagtgaaagacaaccccaccatacacgttccctcaaggaggagaagccaggttggggttaggcagccaggatgggttgatcaacagaatgaggttcgacagtcaagttgctccaccccacccctccttccacccagaggctctgggctggggtacagccattctgaggtagccttgcccttccttccccgcttaggaaagtgaagccagctgaggcagagaccgcaggagccatcatggccttcttcctgtgtctgggtctggcactgggggctgttttctccttcctgttccgggcaattgtgtgacaaaggatggacagaaggactgcctgcctccctccctgtctgcctcctgccccttccttctgccaggggtgatcctgagtggtctggcggttttttcttctaactgacttctgctttccacggcgtgtgctgggcccggatctccaggccctggggagggagcctctggacggacagtggggacattgtgggtttggggctcagagtcgagggacggggtgtagcctcggcatttgcttgagtttctccactcttggctctgactgatccctgcttgtgcaggccagtggaggctcttgggcttggagaacacgtgtgtctctgtgtatgtgtctgtgtgtctgcgtccgtgtctgtcagactgtctgcctgtcctggggtggctaggagctgggtctgaccgttgtatggtttgacctgatatactccattctcccctgcgcctcctcctctgtgttctctccatgtccccctcccaactccccatgcccagttcttacccatcatgcaccctgtacagttgccacgttactgccttttttaaaaatatatttgacagaaaccaggtgccttcagaggctctctgatttaaataaacctttcttgtttttttctccatggctccctgtgtcctccagccgtggcttcatgccctggagtgggtagagggctg

SEQ ID NO: 38537 - DNA, 1811 bp, Homo sapiens
tgggagtcttctgctggaggttccttcactgtgcgtgctgaccatggtaagttagcttttctgttacaaggtagttgggttaggattttctgggctcacaccagtagcagaaattttgggcatcctgtctgtaaagcagttcttcacagcagttctgctgatacttactaattgctggtctcaactgcatatactttttaccctgttacacgcttgtaattgactcttctaggtgagcccattggcaggggtaccaaagtgatcctccatcttaaagaagatcagacagagtacctagaagagaggcgggtcaaagaagtagtgaagaagcattctcagttcataggctatcccatcaccctttatgtgagtatggacttttaaatcttttacacttaacgtgcaggatgtttcctgttctggagaatctcattgtccctggcttttgctttccctggtagtgttttgtactccaaggctaacttctgtttttgttacttagttggagaaggaacgagagaaggaaattagtgatgatgaggcagaggaagagaaaggtgagaaagaagaggaagataaagatgatgaagaaaaacccaagatcgaagatgtgggttcagatgaggaggatgacagcggtaaggataagaagaagaaaactaagaagatcaaagagaaatacattgatcaggaagaactaaacaagaccaagcctatttggaccagaaaccctgatgacatcacccaagaggagtatggagaattctacaagagcctcactaatgactgggaagaccacttggcagtcaaggtgtgagaagcctttgcatgttggctcaacatgcacatatggagaggaatgagttaggtggaagagtgttgggtaatagacacacggaacttgtccaactgataacagaaatgtgatagccatgtgatttcacttactgattaccctgtcatagtgaagtgccatcatttctaatgacctcactttctcttcttatggaaatctgggtaatgtctattggcagccttacacatccagggttctgatcagaggggactgttttctacatacagctagtacccatctagatcgtggagggcattaaggctcagttttctcaggagctgcttgttgtgtgtgctctatcccttaggcttagggaggatcattgttccacttttagataatttggtgttggggctaaaaggtcctcttttgaaatgtaccacttatttttggtttctttcagcacttttctgtagaaggtcagttggaattcagggcattgctatttattcctcgtcgggctccctttgacctttttgagaacaagaagaaaaagaacaacatcaaactctatgtccgccgtgtgttcatcatggacagctgtgatgagttgataccagagtatctcagtgagtatctccttggcctaatttagttgggtgaagtcttgggaggttttaggcattctgctaggatattctaaggtaacagttttctgcaatacatagtaggtgtaagggttcaggaggctattagagccttctgtttgaatctggggaccaggtctggtctagctgttttttactgagctttctcaccctggttgatggcagattttatccgtggtgtggttgactctgaggatctgcccctgaacatctcccgagaaatgctccagcagagcaaaatcttgaaagtcattcgcaaaaacattgttaagaagtgccttgagctcttctctgagctggcagaagacaaggagaattacaagaaattctatgaggcattctctaaa

SEQ ID NO: 38538 - DNA, 1104 bp, Homo sapiens
aagctcatgaaagaaatcttagataagaaggttgagaaggtaagccattctggggctaggatatattttgtaacatcttcgaggtgggctccctcacaagcatgtttctatacaattagtggtttgaggcagcctatttactgtttcatgccttcttgcctcttgttctcttctctagtcaggtttaaggctattttaataaaatttggcacagattaggcattgcttcagttaacttctgagagtagataaaataccatcattttcttttttttttctttttttgagatggggtctcgctctgtcacccaggctggagtgcagtggcacgatctctgctcattgcaagctccgcctcctgggttcacgccattctcctgccttagcctcctgagtagctgccactacaggcgcccgccaccacaccccggctaattttttgtatttttagtagagatggggtttcatcgcgttagccaggatggtctccatctcctgaccttgtgattcgcccacctcggcctcccaaagtgctgggattaacaggcgcaagccaccatgcctggccgattttttttttttttggactggatctcgctcactgcaaactcaagtctcctgagtggctgggattacagatgtgtgctaccacacccggttaattttttgtagacagggttttgccatgttggccagcatggtctcaaactcaagtggtctgtccacctcctccccctgctggaattaggcttgacaatgcctgttttctctttcaaagtggtaatgtcaatctaaggcttttgtgatcgtccacaggtgacaatctccaatagacttgtgtcttcaccttgctgcattgtgaccagcacctacggctggacagccaatatggagcggatcatgaaagcccaggcacttcgggacaactccaccatgggctatatgatggccaaaaagcacctggagatcaaccctgaccaccccattgtggagacgctgcggcagaaggctgaggccgacaagaatgataaggcagttaaggacctggtggtgctgctgtttgaaaccgccctgctatcttctggcttttcccttgaggatccc

SEQ ID NO: 38539 - DNA, 1049 bp, Homo sapiens
cgtgttgtgcgagcgccagtaggacagggaccgtgatgtcaccacctggctactcggctccaagctcacttgttaggccctgagtgaacatttgttgacttgaatacgccccctcccaccccgcccccccgccccccccggccccgggaagaactcagagttccaactcagccagagttggtcccccggggcaccatccactcttagtccaggcaccacgactctgtctcatactcagaaataaagaagttgccgtggccacaactttgtgtctccattgacttccttgcagaggggaagcagtttgagtgccaggttcagagagcccgtttatgcccgcatctctctggttatctgttatcagggcataacctgtctgccatctcgacagatcccaaggtctgtctctttctgtcactgcctttgcctagatagaagccagaaaggaaaaactggcctaggatagtctctgtttccagaaacgtagtggatagtgccattggtgagccaaagggcagtagagtgggagtgaaatagaaattagattttagtgcgttttgtgttcagagtgtaccgaatttatcagtttctggagcacatcatgtcttttcatgctctgtgtctttttttcgttacattttatggcttctttttttttttttttttacatcttttgccttcctagcgcttgacatctttctgatcatccttcaaacctagttcggaaacacttcttggaatctctgtaagaattaattgcacccccgatattctcatgatacctttttcttccgtttgttaaaacttgctttgtctttttgtaagcatcacatcctctgtgtggtactcggtaagtttcttaacttctgaaagcctcagttttctactttttctaaattgggataataatacttaacctctcttgaggattacacgagttaatacgtttggaatatttagatcagagtagggcacatagtagcctctgagtaagagctagttgctctttcacctcaccagacagcatggcgagaggaccaggtcttggt

SEQ ID NO: 38540 - DNA, 1034 bp, Homo sapiens
tggccaacatggtgaaaaccccgtctcttctaaaagtacaaaaattagccaggcgtggtggctacttgggaggctgaggtgggaggatcggttgaacccaggaggtggaggttgtagtgagctgagatgctgccactgcactccagcctgggcgacagagtgaggctttttgaatgtagaaattggctgttaagaggaagatgatttttaggctgaagaagtcgttctgatttctgtttgtcttagtggtaccagttcctgctgtcatatttggtaggacttaagtcctgtttgcctgcctgtcatccagctaagtagactggatggaaaaggtgggctgggtggggaattaggaaagacagagggaatgtcatagtagttttacttaaattttaaaacatatcaaatgaaaggttacggtgaatttagtgagtgtaagtcaaatgcttaaagaaataagccatggtgtgagaatcaaagcatgagaaaatagtatgaaaactggaaacactgtaagaaacgtgattttgtattgtcttccaaatatttcaaaatttctagaaaagcgtaaataaataaaaacatgatagatgagaaagaaggcttatgatcatgattcagtgaagtaaccttttttaaccattactaatcttgcataattaaaataaaatagaatgtgatgagatggggaatattgactggggtaagtgtaaccacacagcaaatattctgttgtcaaaaagaacagtttttgtaattgaaggatgagagcacaagtcagtgtatccattgtgcaaattggatatttatgccaggtaactgattaatatataaaatgatctatgtttaataggtatgaatggctggatccaagcattaagaagacagaatggtccagagaagaagaggaaaaactcttgcacttggccaagttgatgccaactcagtggaggaccattgctccaatcattggaagaacagcggcccagtgcttagaacactatgaatttcttctgtaagtgagtcttcagaaa

SEQ ID NO: 38541 - DNA, 1050 bp, Homo sapiens
tatatctcaaagctattcaatgtatagatgagtggattaaaaggaaaaaaaagctgttgatttttttcatttgccatttatttaatttatatttagtaagtacatttccatccagagataagatatgtatttacttgtagttccttttggtttttctttttgccttattatgtgtatgtgtgtgtgcacctttaaattaaaactaggatttgttttggtgaatggtgtgaggtaaggatttaaataactatttcttccccaaataaatagatactttttttttaactgtatgggataatttatccctgtcacatggcatatgattttcaaagtgattttgcattcttttcagacgtcttgctgccctccaaaaaagaagagaacttcgagcagctggcatagaaattcagaagaaaagaaaaaggaagagaggagttgattataatgccgaaatcccatttgaaaaaaagcctgcccttggtttttatgatacttctgaggaaaactaccaagctcttgacgcagatttcaggaaattaagacaacaggatcttgatggggagctaagatcgtaagttgcctttctgattttggaaatggaaaggaatagtaggaggagtcttacgaagggccaagtattatccttgtcagagccagatttttattatttatttattttacattttttaaaatcaattttttttttgagacagggtcttgctgtgttgcccaggctggagtacagtggcacaaacacggcttactgaagccttgacctcctgggctcaagcaatcctcccacctcagcctcctgagtagctaggccttcaggtgcacaccaccacacctagctaatttttttttattgttttgtagggtgggatctccttttgttgtgcagactggtctcaaactcctgggctcaagcgatccttcttaaagtgttgggattataggcatcagttactgtgcctggcctagatttttattagtacaatgtggcctacatatggttttatttatttaatggattcatctttctgagaaaat

SEQ ID NO: 38542 - DNA, 1426 bp, Homo sapiens
aattggacagatttaatggtgcagaagaaaggacttaggagaccagaagaactcttttcccacatgagcacattggctgcatcaacacaagattcttgggcataaacgagttttgtcatatcctgacattcctagtggggatatttattaaactgaaattttgtctttaatttttttcttagtacaccttaggatatttattttggtaaaattactaacacaacacctttagattttcttagggatcttgtggctcgctggaccctttctgtgtgatattttaattggttttcagtcttcctcctccaattttgtataaatactgctattttacattcttggtacgttaatatgttgatttgaaagaatttcagtatagagatacagcctttgtagcttgattctatatcatatgtgaattttcccctcacattctgtagggaaggctttctaaagctatattatggaaactttcaaagccacaaaaaagatgagtactactgtgaacttgtgatattaatcacacagcttcagcaattcatttttctggaatatggaaatttaaagctgtgtcagctctcagttaaaatgttggtttttttttttttttcaatagagacagttttgctgtgttgcccaggtaggtcccgaactcctgggctcaaacagtttgccctcctcggcctcccagagtgttgggattacaagtgtgagccactgtgcccggcctcagttaaaatgttgcttactatgataattgtgtccttttagatttcagatgcagaactccaggaagttgtaaaagtaggccaagcgagtgaaattgcacgtcaaactgccgaggaatctggcataacaaattctgcttccagtacacttttgtctgagtacaatgtcaccaacaacagcgttgctcttagaacaccacgaacaccagcttcccaggacagaattctgcaggtaacgtgtcacgtagtagaatgaggcttttactttgtttattgtccttagaagtatcatgcaggagaactaagcggtttggttgtgtttcttttagtgtaaatggtttgaaactgagtcctgaatgcatagatcttgcaatatttctgtagtagagaagctaaatagattcagcaatcaggtagttttattttcacatttattaaaattcgtaattttttgaagccagcccttctaccttcattagtcttttgtacctgtcagtaaagcatagttttgtaaaatttcacattgcctgccaatcctagaaagaaagaaatacttccttgcatttctgtacttagcttcacatagtgtgcccgcagttctactttcttccctctctctaacacgtggggtagacacagctttgtgtgttcccagggtgtctgtataccagagaatatccaaacctacaaaacatagt

SEQ ID NO: 38543 - DNA, 1033 bp, Homo sapiens
tccctcatttcctatgtttagtcggctctctgtatctgaggattccacatctgtgaattcaaccaactgtggataaaaaatattccaaaaaactcaaacagtacaacaataacaaataacacaaataaaaatacaatgtaccaactatttatatagcatttacattgtattaggtattataagtaacctagagatgatttaaagtacatgggaggatgtgcatacgttatatgcaaatacgatgccgttttatatcagggagttgagtatctgcagggagttgagtattggtcctggaaccaatccccggtggatacttagggacaactgtatgtcttgtctctcacctagattgtaaaatccttgggggtgggaaccatgtcttatgtgataacaccttacctatcaggaatagctgtctggcagcatcaccgttctgcaacacaccaatatacaggaaataggcaaccaggaaaaaaaaagactttgaataattaaaatataggttgctgcaaaatctgtggatcttattcctaggagaatctcttaggcctcactcaggaacttactcatgtttagatgtgatttcaaaagtgtggtgtttggtttccaaacaaaatgtaaaaggaggaactatttaataaagtgtgtacatttgtaataatgacagtgatagtgatgtgagaaccaacagcttgatagggagggaggagacaaatatacacaaaactcaaagagtcatctggggtcattgagtgtggtggcccacctccctgcccactgcatgttcttagtcgccctaatgtgccaagaaaaggttgaaataatgtttagtggacgtagtttaggaaggcaagaaaatatcaaatgtagtgattattgtaagtcagtaaaataaaaataccatgctagctagaccaaacattgattttaacctagagatcctaacaaaaccagctggacagaattttgaaatctttattcttttttttttctatatttcctgtgaaataatttatgtgaaaaacatttg

SEQ ID NO: 38544 - DNA, 1041 bp, Homo sapiens
attttttaggccatacgagatgcagagcgtgtaaaggaaatgaaacgaatgcataaagctgtccagaaagatctgccaagaccatcagaagtaagtgttagaatttctggtttaggaagttttaagtttctttttatatgattgctgcgttttacatcattcataaagactataaaacaaaatttcatctactttctggaatatagcaaagtagttctcaaatccaatctttaaaatgtttcagtagtaccagaaagaatttagaaggaaaaaaatggaaattgcttttgaaaatgtaaaaccgctgtttaattcatgctgtaacaggtaataacattaatatattatagtgatatgtttggtaattgtatttgttttaaaattttaggtaaatgaaactattctaagacccttaaatgtagaaccgcctttaacagatttacagaaaagtgaagaactaatcaaaaaagaaatgatcacaatgcttcattatgaccttctacatcacccttatgaaccatctggaaataaaaaaggcaaaactgtagggtttggtaccaataattcagagcacattacctatctggaacataatccttatgaaaagttctccaaagaagagctgaaaaaggtatgattgagctggaatatttcttcttgagatttaggtagttgttaggtgctgtgtatcatggacaaataatgaacttatttttccctgttggtattcataaacaactgaaatgtatgattaggagatgcatgtttagattaagtgttatgaaaaggacatgctttaaatacctccatcccccgtgttcagtgtgatagacctttagcaaataaacaccgccagggtgtttttggttcatgggtattaatggcttcgttgacagttgttacagttgccgttttctgtattcagctctgctatctctgaataaaaattagatgcctttagtacttaaacatcacttatttagaataatatgaagaggtgagagagactaatataaaaatgtttatagattaaacctttta

SEQ ID NO: 38545 - DNA, 1026 bp, Homo sapiens
tacatgcattttattccttctgttttgacagagcaaacaactgtgattgtaaatagaaatctccataattgtataagaagatacagtgggtctcatcgttggaagcagagtggtcattagcttaaaagtctttttttctttagccttcagccctgaggagcagtgatagacctatggatttggaatgagctgctgtatacttaggataaaacaaacaagattcttacaaactctcctgtcttctctcctgcattcttcctctttcttcgcttttcacaatttcttactttgtgttttctttattgcataagtaatacattatttattataggatttttagaaaatagagaaaggaaggagggtttcgatttatatttcaataacttgtccctgatttcagaataactgagtcactcattttttagtaagtgcagtagggaaactaacatctgttgagttgcctactctgtcgagcacatttaatcattgaactgggattgagaatcaggctacgaaattgatacttgcacagtttcctcttttgaaagtgaaaatatgaggggaagaggaatttaggaaataaattttcctaaattgtatgtatggaaacctaaaacaaggatcacattgttgcttttggagattctgtagagggtaaaccctaacacaatttttgaaaaataataattctaagtattggtttgtaattgtttgaaacaaagtagcttaaatattctctcatattttatctgtgtatatctctctttgttccaaaaagaatttgaagcagctatttagttagcagattatttatggatagtttaaagataacttagccatattctctcgtaatgattataagatctgaacttgtaaatttttactctgtgcagtttcagagtgaaatagcatttctcttttaataaactgtcagattttctttttctttaatatactttaagatatgttaacattgatttgtttccattatttcccttaaggtattaagtgtccattttttcttct

SEQ ID NO: 38546 - DNA, 1017 bp, Homo sapiens
ttgtatattttggatattaaccccttatccaggccgggagtggtggctcacacctgtaatcccagcactttgtaaggtcttgttctttttttttttttttttttttttgagacagagcctccttctgtcgccaggctggagtgcagtggtgcgatctgtgctcactgcaacctctacctcctgggttcaagctattctgctgcctcagcctcccgagtagctgggactacaggcgcccgctaccatgcccggctaatttttatatttttagtagagacgggatttcactgtgttggccagaatggtattgatctcttgatctcatgatagacccacctcagcctcccaaagtgctgggattacaggcatgagccgccatgcctggcctactctatgccttttgattggggaatgtaatccatttacagagtaattattgataggtgaggacttaaccagtgccaattgttttctgtttatagatcctttgttctattcctcctctcttgcttgtgtgtgtgtgtatgttgtgtgtgtgtgtgtgtgtgtgtgtgtgtgtgtgtcttaatggctttctgtagtggtatgctttggattttatctttttatctcttgtctgtctgttacagacttttgctttgtggttaacttgaggcttacataaaacagcttatataacggtattttaagttgataacaacttaattttaattgcatacacaaactatacacttttacacccctttctcccatattttgtatttctgatgttatacttaaaatttttatataatatttattcccttaacaaattgttgcacttcagttgttaatagttttgccttttaacctttatactagagatataattgatttactcactgccattagagtattagaatgtttggatatgacaatgtatataccatgccctggcctggataaggggttaatatccaaaatatacaaaaaaagttttatactttaataaattttcatgttattaattagtgttct

SEQ ID NO: 38547 - DNA, 1056 bp, Homo sapiens
tatgttgctgggaacatagctagtccttccaaaccatcaaattcctatgaccaggtttggattgaatttatctcccaaatgtgcataatagctcctgtccagctaaagggcagtcagggcttcttgaagtgcatttgtgggtattgataagacagtagtggtttgtttatttgaagtagcagcaggatttcatatgaccaaatcaaagaatggctgtgatactggttttatagcaaaagtatttgatatgtttgtttctctttgagaaatatttaactcttaagaatcatgatttaactcagctggtttttaagataataaagtactgtagatttttttcagtatagttacatctaaaataattacttaattttttttctttaagtgtctaaaagaagacgttcagcgacaacaagaaagagaaaaggaacttcaacatagatatgctgatttgctgctggagaaagagactttaaagtcaaaattctgaagtacagtttatattctgtcacaggattaattaattgccggttttcatactctagaaggctgaaactgatgtttatcttcattgacaaatttacccaccatctgtggtttttcagttgtttattttaaatgatatcgatcttacacattctgtgtataaagaccttaactccacaggacggacattttagagtttaaattattaaggctatcattcttttagtaatgtcatatttgcaaacttttttagttttggcctttaatttaaaaagcctaattttaaagtgctgcctgtgagtaactcttgaataaaaacaaaatataaaaaattgagaatgtagccttttgtttgaagtaattagatacttaagagtgcctgcaaaccagcagctatgtactctgtgtcatatttaatgagtaactcttgggtaatcaaaatggtgatgcagtatcttaaacacttaagaggcagttctttgtggctttgttagtttcagcaaagagtggtcatttctgtatacactgacaagttagattaactttttagtacctcaaattttttttttg

SEQ ID NO: 38548 - DNA, 1040 bp, Homo sapiens
caaggaacaaaaatcataccaagggtgacttgagctctaaataaaagataaatgtttaccttgattagatgattttcatcttttaaatcaactgcccacaaaacaaggaaatctctgacatatatacatacgcaatttcgataatgtttgagatatttaaaaattatcatactgatgttagaaaatttaccaagttaacattattcccagaaatatatctaagattattttggcaaacagtttaaagactcttttatctctactattcctattgccaattctcttaattatacattagttacatcagattagtgacatttctaaaaaggtatatctaaatatcctatgtaaggcaaataattttcaccacaaagtcaaataaggtaattttattttacatttcagttacatcgattttttacatcaatgatgtctaccagaatcattatataccatcaactataaacatatatttacataatagactaagttaaaactcaagaacttaaatacacatttgtaggttcccctaaattacatgaaccataccattatttacatattccttatagtcatgtatcttacacctacatctattttgtgcttcaggaaaagcaaaaaaaaaaaaaaaaaaaagacaaagttaaatgctagccaaatcacaataacaatcatcaataaggtttgaatacatatatatgcagtctttctttagaaatatcagaataataacgtgatattccacagaacttcacatgaacacgatgtatttttacaccgaaacaaaatacgtgtcatatatgttcaacttaaatttcttctggctatgtttgtcttaacatttttatacatggcatatacacatgcatgagtgtgaatgcattcacaccaatgactacagaacttgtaataatgattataaaccaggaaaaaaattgtaaattatgtaactgaggtactatagttctgtcatgaaatataatcaaaatttttttgcatgtaagttaacaaatgtcaatctataaaaccagtaacaggga

SEQ ID NO: 38549 - DNA, 1068 bp, Homo sapiens
tacaatggaagaggcatcctgtccatctgaagtgaatcattttacctcactcacatgtcctattttcttagagaccaaagaagatagagagcaaaggcagggagatttattagggaaaagctgtttttgtcatcagtgaattgatttaaagaaagaacaaaaaatcagagatagctttaagcctagggtattagtgaaaatagttgttgatagctaaaaggaagtttaagagggatgtggtaataaaactcatttcaatagctattggatttcttcataagttactggagcatccatgtccatgtaggctttgcatgtttgttaatcaacttcatgtgactattggggcacatacagactgatgggggcttttttctcaatagcatttatttcttattcccccttttttatagcaatattttcaacaagaactggcaataaaccaatatggtagaatttccaccaattatttctgtgggttaaagaaactataaagtacaatttattaaactggaaaaataatcatcatctctggagcctctgaaagcttggcattaacgttatgttttacaaaagaatcattttagtgtctgcatctatttttattaagcctttcgaagaatttctaatgtggcaaatgagctgacagcctagaaggagtattgatgtggagtataaaaatggcccatatgaaggatagagtagggcatatatataaataggaaattggacaagacaattttttttccaattttagcttttagttatttttaaataaatggtattatttaagttaatataggtaaagctggcatataaatgttggttctctcctcctgtgggctaaaattctaaaacttaacccaaatgaaatagaattactacttatgagttgtgtttttacattttaggaaccctgattgctgtccttcaacgtgttcattatgaagttattagtaatacttttgttttctggacttataactggttttagaagtgactcttcctctagtttgccacctaagttactactagtatcctttgatggcttcagagctgattatctga

SEQ ID NO: 38550 - DNA, 1418 bp, Homo sapiens
gctttaattgaaaggatattgagcttatgacccttgcatataaaagacaacattataaactccattacatcttctgtatctcaaacattatgtcagtcattcatctgcatgtgaacatcacccacgaaattatagagttcagcttcatctagcatttgttatagtacataagaatatatagtgcagtattctaatgttacattagatctcaaataatcatggctgcagtcaagaggatagcacacaatatggtactttaaattatttcccattgaaaagcaaaaattaatgactaacagatattaaagttaaatttctgaatagaaagaacccaaggcttgtcattttaatttttattgttaatgtttgttttttttttttttttttttttttttttttttttttttgctagtgatccaggatgctcttgcgtagtgattcttaaatttgggactgtgtgagaatcaagtttctaaaccctcttcaacctactgaattagaatccatgggcacggggctaggaaatttctaatttttaaaatctccctagctgattctgatatattctaaaatttgagaacaaccagtcttgggaaaatattactcctatgattttagatttttgtttgtttctctgaatgttgtgggtttttccctgcatttgtgtttttgttagcaacctttcccctggatctcacaaaaactcgactccaaatgcaaggagaagcagctcttgctcggttgggagacggtgcaagagaatctgccccctataggggaatggtgcgcacagctctagggatcattgaagaggaaggctttctaaagctttggcaaggagtgacacccgccatttacagacacgtaggtatttatcttgattctagctggtaagtttgttatgagttctgtgtttgtctcctgtgcttttctgtttgtccaaaaacaagttagtttttttatcttactgatacaataactgaacacatacagcacatagtctttttttattattatttaggttttttttttgagatggagtcacactctgtcgcccaggctgtagtgcagtggcgccatctcagctcactgcaacctctgcctcccaggttcaagcgattctcctgactcagcctcctgagtagctgggactacaggtgcacgccaccacacccagctaatttttttttttttttttttagagagtctcgctctgttgcccaggctggagcacagtggtgtgaccctggctcactgcaacctttgtctcccgagttcaagcgattctcctgcctcagcctcctgagtagctaggattacaggcacatgctaccaaacctggctaatttttgtatttttagtagagatggggtttcaccatgttgatcagactagtctcaaactcttgaccttgtgaa

SEQ ID NO: 38551 - DNA, 1050 bp, Homo sapiens
ttcttagtctgtcattttttatgagattaattgttgttaatgtcattatttgatgaactctaaaaatttgcaggtcccttccatcaccagtaaaattaacccagaatctgataacctttggttttctcctataattaatacatgtactgataatataaaatatcaagaaaggtatttttatccatttaataatctgagaagaggatgatacagtgtataaagattttgattaaaaatatttaagtcaaatgttggccttttttctaaaggattattatgtttatctgtaaattagacttgcatagattgcttcatttctaataattctggataaattatatctggatgttatttactccagattataagagctataagtgaagcttatccagttgaatttcatacacaggaatacatggagttttcacatttaattattattctccttagatttcgtggtgtacatcatgcatttgcaaaaatcttagctgaaggaggaatacgagggctttgggcaggctgggtacccaatatacaaagagcagcactggtgaatatgggaggtaatgaaaactttgttaaattctaaaaagtcctaattgccttaatagctgtaagcacttatattagggaaattaaaatttatgttttatttttaatatattggtgaccatatattgttgactggctgtatagatgttctaggtcataactgaatattttccacagagcatttttgcttcattctatagtgatgtatgaaaaggataggatttactaaaataggcaaattgtgacaataaggacacaaggctaaactatttgtaaggcctcccctccagtccagaccttcctttaagattaaaactgatatatacagctatctgatcattattatatccagactgtccaaatctttcccctggcaatcctgctcctattcctaaataatcaatttttatacagtctcacaccccaggctggaaacctcaatgttctcttaactcatccctacccctcacttctcatattcacataccaattctgtct

SEQ ID NO: 38552 - DNA, 1303 bp, Homo sapiens
taacatagtctttgcactggaggagcttacaatgagatgtagaagttaaacatgtaagtagttaaaattacagaaataataaaaattactaaataaatactactgaatcacttggtatatggccaacactgtgctaatcattttcatgacttaactcgttgaatttccccaacaatctgtgcagcaggttactatcatatccctcttttatagagaaggaaacaaaaagcatcaaaagtctaaatagcttggccaggtgagtggttcagggcatcaaacccaggtggcctgacacccaataacacagccttattaaggaggttgtattcttgctttaccagtggtatgaacagtactctgtgggaacacagatagtggagtggaaatggctatgaccatatttgggaagtcgcaagaggcttcacagagctgatatttgatctgggctttgaggcatcaataggcgtttgtcaagagaaatataaaggtgcaacatgagcataggcatcatgtcatgtgtaggcctgttatctttgaagaactacagaaaattcagtctggttgaagaataggtcctcataggggaggtggtaggagataaggctagagaagtacttaaggaccaagttgggaagaaccttgtgggccaagcctagtagtttagatgaactctatggagcacttgcttaagcccgggaacaatgtgctaaggtttgtttgacagcaagattactttggaagtcgtatagtagatgcattgaaagctaggatgtaagaaaggaagttctagcaatgatctaaccagttagatgactgtagaaatggagaggagataaattttagggacatttatggttaactccataggacttagtaactgattatatgtagaaggtgagggacagaaaaaagcaaatgggacttcctgtgtttctaattctaatgcaggaaactaggaggatgagtgagaccattgcagaaacacaaactcagggtcaggagggatgaggggcaagtagaatatttaagtacaaaggatgggaccactttgtttaatcctttgtctttatacatatgactcaggaagtataaataaggaaaaaaagagtacttaatacgtgcaaagctctacatacattactttttaaaactgtataagaacctagcaaaacaagcagtattatcctcatttttcagataagaaaatcatggctcagagtataagaagcttgcccaagttcatgtagctagtatgtggcagagctgggaactgacctcagatctgttccactcaaaaccctac

SEQ ID NO: 38553 - DNA, 1061 bp, Homo sapiens
cctctttaggaagacacctattccacagagactgatttatagggggcagcactttatttttttctggaaacccaagttctctttgactcctctttttgtccaaaagtgatctggtcggatctcacaaggccatccaatgagaccccgcacagcattttctaaagaagaatcgaagcctgaccactttcaccttgggcaagaaggtttggcctttgagttgctattctatgctgaagagcctgcttagaggaggagtaccaggagggagccagcatttcagatctgaagtagacgataggaatgtggaagaacacatacatagtgcttaagaaatacatttaacctgttatgtcagtatttatcaatgaagtttgataattcacttttctgtcattgttaaagcgtacatactgtaaattaaagggaggtgaatggaaattaatgaataaacattttgagtttccctagtgttgaaggaaggtgtactttttcttgtcagaaagataaaaaaaatcaagttgagatgatgtttgaatttcaagaaaagaggctgctttctgtcagtgccctctcattagatctgtgttaattagttagcactccactgcacatgctaatgacttcctctgacagccacacaccgaatcttgatgaaaaaagagaagagcatttgccttgttacatagtctgttacaagccagatatgttgctagctctcaagagttgtaatatattaagaactacaacttatttgattaaaactcagctgtatagatccttttataaagcaccttttgttaaacatcagcctttcattggtattttaaaagcaaggcagatagatatgaagtcagccaactctgacatgcgtcctttcttatctcccttacctgacactaggggctctagagaggcagagagagcactcacaaatcacactaaaactgccagcggcctgactcttactcagtttagcaaaaattcttgcctaaaaagtgataagtaaaaatctgtttatggtatacagttatgtctcgaatctttgaatcaaatccatgttc

SEQ ID NO: 38554 - DNA, 1008 bp, Homo sapiens
acagtccagcactggctaggcatcgagaacataaaaataaatgagaagtgttcctgcttttaagatgttcctactgtggcaaacagagagctacaaaatataataatatagaagtatgtaaaaaaaaaaaaaaaaaggaataaccaattctgccaggttgaatagtagggtcacgaggaaacgacgtttgagctaggtcttgctagatgtttttaaataaaatgtttttcttccataatgaatatgaaacaattagaaaaaaaatgggaaaattgagttttcaaggatgagttcttcaggaaaagaaaagctttggcttttagagaaattggattcattcattcattcattcatattcatttagcaaatattcattgccttcactccaagctagattccgagaatccaacaaacggtacttgccaaagggaacctgtcggctggtgggatgatagagatcagacagttgccacacaatgtgaaaagtgccgtgaaaaagtaagcatagggtgatgtggaagcacatggttgcctctaatctggacagactgaagacactgagatttacagttaggccagggtcatttgaagcactgccttgttgtatttgtatgtaatgacatttcgaaacgtggaatgaaaggaaaagtacaggcagactataagaagcttccacggatgtgtctaactttgcaaatgaacaaaaatctaatgtagacatatcctggaaacttctagtttgcctgcacttttccattccaaatggaggtttggacatttaacagaggcctcaaagggttatcctgttaagattttagtatatacagcaggggcttgaaggaatgttgattccattcctcttggcctccttttatgaatccagttctgtgctagctctgtgagtaaatgaaaatgccttcaaaattgggatgccagagttagacagcaaaggagcaaaggaacccgtatcagctaagtgtgggaagggaaatatgtaccagttgctat

SEQ ID NO: 38555 - DNA, 1085 bp, Homo sapiens
atttttgtatgttttttgtttttaagatttattattttaggacaagtgattaatcacatgtacgtggtaatttctttgtttttagaactgtctcaggtaatcagtctttgagataaaaatcttttttgttttttaaactttgattaagtttttttggtggatatctgtcacttattctaatttagtaacattaggaagaatataatactgtgtaaaaatttccttatatcaaatttccttctctttttctctttggatatgtgctaagagtgtattgtactatgcaaacctttgtatgctatttgaagtacaaagaggaagggtgggttttgtgtgcagtttgttcactatcttaagaatgactagatttacttatctctgttgaaaaacatgtaagaaatgctgcttatcattccatatttaacaagcttgagaaaataaatgacggaatttctaatatataattaaaaggactttaggatgatattgtgctttttattagtagtattttgactaatggatctggtacctaactttagaggacttaaataatgaaatgttattagttaatgacattaagcaatgctaatcagttttgcgtttctctatttatggtaaagaataaatatttcgttctgggaataatttatggtaaagcctttttgtttgtggtaagaaatacttagccctgggaataaaaagtaaatacatatatttctttcttcctgatatgtgtgtgtgtatgtgtgtgtgtgtgtgtgtgtgtgtgtgtgtgtaatatatataaaatcaggaaataagtggaaccattaaagtattttcatcatattcctactactttgagagtaaagcttgtaattttttatcttatactgaaatatatttttgttaatttttgtgtaatttttaatattttgtcatctgctataataaaggttaacactcaatagtatactgtgatcagtgatataatatagagaaggttaatttgacagactcagttagatgccattgtgatatttatctgtattgtgttgaccagaattaaaagtaaacattctgtagtcaatgcccatacaacttat

SEQ ID NO: 38556 - DNA, 1045 bp, Homo sapiens
ttatgcccatttcattgtccctttgcagtgtgtttgtcttccagttttaaaagtattttacaaaggatattgaacacaaggatctatgaacttaatgtacagaatattatcattttgccatcttgcttaagtgttactttttaataaagagaacattacagatgagattgagttctcatcacctccttctcatttctcttcctttgcaggaccacctgtgttcttaagttgtatgtatcctttagtccatagttttacacctatttgcctgtgcataaacaaatagtattttgtgtgatttagacacttacataattgtttcacattgcaccttttctttatatttaatgtgagatttcaacatggatacataatgtagttgcatctgttacaaatgggttttataacactagttagcttataggtaattagtagagagaaatgatgtcaggacaatgagaaagtgtgttagtttattttctaggtaagaagagctgtaataaagattgtaggattatgacttcagcaagaaaatggaagcagcttggagttcttttgaatctgaataccttttttttttttttttcttcttttaaagtaaccatctgtatctctaagggtatcttcctcaaagtttacagttctggcattgagggctcttaaatcctggtgctcactttcactgtctcagcatccataagccaaccaacattcccacttaattgttttttgttttacatttttaatagctactgaagaattcttcagtcatgactgcttgggcagtctaagttattgcctatctatgtaggttctagttattatttgttttcgtttatagtgttgaggtcccaaactgcataggtttttgcataaattgagtggtctgcaaactctattttttatatagtcactggtatttttagtgtttgattttgaagttttcacataataagtggtattttagtgtttttttttctcccagaatgcatggtgtttaagactgcacatacagtattataggagagacacctttactactact

SEQ ID NO: 38557 - DNA, 1031 bp, Homo sapiens
aatccaaaatgagcaagtactctttggcatgttgaggttgtaactactagtcttttatgtagattttgtttttattagtatgaaaaatacttagtgcagtctgaaaactgtgaggttgatgggtgttattaatagcaaatcaaagtaattttcttatgtgcattaccaataaaaacagggaaatatttgtgtatctttcatgttttgtacttagtaatttttcaaaattctctacccacttaactgtttttccaaaataaaagactcccccccgattgaaaaatattcattgttcttttaaaaaaagaaaagtttttttgaacagttacatgaagaggtcatgttcatcagaaatcctacgtgtggtaggcataaatgcctggagaagtctgtgaaggtgtgctcctacactcaatgaagaagtatacctgttgttgctgctcttggtctgtctcccttcccacctcccatggatcaactgaaagtataatgttgagacaggtatacaaagaactaggctgtaaatttcttatatccaagagaccaaagtgattccaataggagcaaagaggcattacaaggagatcaagaatttggtgaaagaaaggaaagggagaattatactgtggagagtaaaagggagtgtgaaaacaaggtacacttctctttcagtcctttcctgaaggaggtaagtttcatataaagtagattcttatttcctgtggacacagtgcaccataatgaatgaattgatatgctagcttgaagaggctgcccagtagaagaaaaagatagcatctggtatgtggtgatttggtatgggacatggaagtaactatgttgtcagctgtgccaggaagctgcttggagtacgttgagtgatacctgcagattagttgtttgtccccaaccagagaaagtactagatactgcttgtgccagtggccctgccctggatttcattatttttgaaagtgacaaggtttagttttctacccagagttacatgggagttcagagtcaagaaaatt

SEQ ID NO: 38558 - DNA, 1377 bp, Homo sapiens
ttgaaattagaattttagtgtctataaataaagttttattggaacatagttatattcattcatttaaatatctgactgcatttataccacacataggagtgttgatggttgcaacagaaagtgtatggtctgcaaattgtaaaatatttactatctggcactttatagaaagtttgtttacccctgactttgaattattgtttgtctttgtatctcagtgtttctttgtagttggggtgagtggtcggggtggggtttgagcctctctttcctttatcttcatctccagttctgataaaacttaaactcatgagtcactgttaccaaaatgtgttttattcttcagatatgtttgagcagagcaaaggttggaaactattgatattatgatttatatagtaattactgtagctattttttggtattttacatttgaggatttaatataaaaaatataacttaacttgcctctttatttattttcccttttgtaggaaattaaaagagagacggaattcaaggatgacagtttgcccatcaaacgggaaaggcatgggaatgtagcaagtcttgtacaacgaataagcacctatggacttccagctggaggaattcagccacatccacaaaccaaaaacattaagaagagtatgtaaataattcctttcctgcataattacatcaaaatagaaggatattttataactgtgtctaaattaagaaaaattagttcagtcttttgtagacaactacagtaacttcctgcaaagtctcatgttactagttattgccctgtgtagtcaatcttaatttttagtcatgtgcaatcaataacaaatcaatatcattataaattaaagcatgaggctctgttttcttatttatctttcagactctgctgaatgattaccattttaccttaactatattttaataccatttatttagtgggattctgaaatatctgctgattcttagcatagatacaagaattttgatagtgctttttcttcagttgttaaacatctgaacataaacatttccaaggtggttggccttgcaaattaccttgtaaggatttggtactgtgtaaatatgttaggggaacaacttggcaaagaaggagagcattacatttgaaatcagataagggtttgagtctgtcttatgacctcagaaagatcatttaaactgttgagttttatttgctgctagtgagaaagtggttaagaaaaaaagcaaaacaaaacaaaaaacaccaggtaatattgctgttctcaaagagcttacattcttggaaaagaaattgttatttaaggccaagtgcagtggctcactcctgtaatcccagcactttgggaggcctaggtaggtgga

SEQ ID NO: 38559 - DNA, 1038 bp, Homo sapiens
tgagactacaggcacccaccaccacgcccggctaatttttttgtatttttagtagagatggggtttcaccatgttagccaggatggtcttgatctcctgacctcatgatccgcctgcctcggcctcccaaagtgctgggattacaggcatgagcctccacgtccagtctgtttgctttctttggcttcttttattataaaaactacaataaaaaatcagatacaaattattaattgctttaggaaggggaaaaaaccttacacagatgtaactttcttatttggagactcaattattttatctacttgatggttatctctgttttgtacctttccatgctattggttgcatgtagtgtgcttcttttgttgttttgggggtgaagttagattactttttgtcttgataaacaatttcgtagattcacagaatgtcagagctgaggtaactgtagtggttttctagttccgcattgtaattttatggcccaggaaattgattcctagagaatttcagtgaaataactaggtaatgacaactgtacaagaacataagtcttctgacttccagtacagctgatatttctattgtagcatgacatctttctttacaaagagtttatttggagatcatgatttgatgcagtgaaattcttcctgtccagattacttcttaggattctcctttgttgtcctctctccttagagtccttgtatcaccaaatcctactttgttagtaaaactgttttccttgctctagaatatctgccacatctgtcccaccttcttgtatcttactcatatttcattgtgtaactcttatttcttctttgaagccttccatatctgctccagttcaaacctgtcctttctaatttttgaaatatttgtagtttatattaaatattttactctcattatgtattcaagttttatcactaatttttttctagtatgcatgttttcttctcaagttctgttaagtgtgcatttaaattattaagaaaaatcttgttaggattgttggtgataggctac

SEQ ID NO: 38560 - DNA, 1065 bp, Homo sapiens
ctccagaacgactgcaggaatatgttaggaaagccgagagaacccacagaccctctgaaggaagcaaactgctccagtaggacctgggagacaccccaaatgctcagtcacagcaagatccacccaaggagagtctgagatcagaaatgcctagccccgcccgcacctaatggtcctttcctacccaccctagtaactgatgacaaagggcatatactcttgggagctctaaggcccagcctatcacctgttcctccccatactacatagctgatgctctcttgaaagtgccatctcccagcaggagaccaaccagcacaaaaatagtgcattaaacagccagagctaaggaccttcacagagttcatttcaataccccgcccgctggtcccaaccaccacttccaccagagcaggtgctggtatccacggctaagagacccacggatggttcacatcacgggactctgtgcagacaacccccagtaccagcccggagcctggtagacttgctctgtggcagaagagagataatctctacagttcaactctcaggaagccacatccctaggaaaagagggagagtactacgtaaaggagcaccccatgggacaaaaagaaactgaacagccttgagccctacacttccctctgacagagcctacccaaatgagaaggaatcagaaaaccaactctggtaatatgacaaaacaaggttctttaccattccccaaaaatcacactagctcaccagcaaggtatccaaaccaagaagaaatccctgatttacctgaaaaagaattcagaaggtaagttatttagctaatcagggaggcatcagagaaagatgaagcccagtttaaggaaatcaaaaaaatgatacaagaagtgaagggagaaatattcaatgaaatagataccataaataaaaaataatcaaaacttcaggaaacaatggatgcacttacagaaatgcaaaatgctgtgggaagtttcagcaatagaattgaacaagcagaagaaataacttcagagcttaaagacaaggtttttgaattaacccaat

SEQ ID NO: 38561 - DNA, 1057 bp, Homo sapiens
ttattggaggtacaatttacatacagtaattgtgtccctttaaaatatacaatctgatgagtttgacagatgtataaatccatgaaaacatgtacagaacatttccatcacccccaaaatattgctcatgctttttgcagtccatttctttttctgcccttagtcctaggcaatcatagatctggtttgtcattatggattagtttgcagtattatgtcattttgacatgtctccattattttctgtgaacttccttactctgtgatataagatattccaagctcattttgaaccttccctaccctagtcttggaatcagctacctatcaaggcaaactttttttttttttaagagaggaatagtgtttgggcatcaagatctgggtagaggtgtggtcattgctactggggtaatgcttctgagcctgcttagtggattaagctgggaaatgcttacatgcacatacaatcccatacctctacccatatgtcttgatcattcatctatttatccatctttactagtacctctaattccaatttaataccagaaggtatattttcatctctaatgattttatttctaagcccattgaccatagaaatgtgtgaaatgagtaattgagtttgctttacatttatttatttatttatgtatttattgagacggagtctcgctctgtcacacaggctggagtgcagtggcgcgatcttggctcactgcaacctccgcctcccgggttcacgtcattctcctgcgtcaacctcccaagtaggcgcccaccaccacacccagctaatttttttgtatttttagtagttacagggtttcaccgtgttagccaagatggtctcaatgacctcgtgatccgcccacctcggcctcttaaagtactgggattacaggcgtgagccactgcacccggctgagtttgctttacttttaaggaaatttaatttttcttccaagttttagttatctaaacatcgcaagctacaattgtgttgccttgttcgtttgctttttagtataaaagccatctaatattaggcttg

SEQ ID NO: 38562 - DNA, 1050 bp, Homo sapiens
tttaaaatggctacaaatccctctatgatctggcatccccatatccctccctccacctttcttacctcatctcttatttaactttcccctttgttcacattggtcaccttaggtttcttaaggatgttaggaacattcctctctcacagcctttgtgcttgttgtatacctttgtctggaatcctcttcttcaagatgtcctgatggctacttgtctgattcaggattctctcagaaatcaccttatcagtgaggcccttactgacagctctgtgtaaaacagcagaaagtccccattatccactttttaattctcttctcttttttttttaacgtttcaaagaagaatttgttgctattgcttattaagcttattgtctgtctacctgctcattagaatatatatatatatatatatatacacatacacatatatatatatgtatgtatgtatttgtttactcattgtctagaatggtctctgatatgttgatgctcagtgaaacagtgaatagttttttgtggtatatgtagaacttttcaaacacttttgtcaagtgaaatcctcttgagtttttgttgttgttgttgttttggtttttgctttaagttctgggatacatatgcagaacatgcaggtttgttacataggtataagtgtgccatggtggttcctgcacctatcgacccatcctctcaattctcccttcccccgctcctcacccctcaacaggtcctggtgtgtgtttccctacctgtgtccatgtattctcattgttcaactcccactaatgagtgagaacatgcagtgtttggttttctgttcctgtgttagtttgctgaggatgatggcttccagcgtcatccatgtccctgcagaggatatgatctcattcctttttatggctgcatagtattccatagtgtatatgtaccacattttctttatccagtctatcattgatgggcatttaggttggttccatgactgcgatattgtaaatagtgctgtaaatattgtaaacatatgcatgcatgtgtctttatagt

SEQ ID NO: 38563 - DNA, 1026 bp, Homo sapiens
gagaaatatttgttacaggaaagggtgcaataaatgtatataagtgggctaatccagacttggcaagctgtgaaggaatgtgccctagaagaagtcatagattgagatcccaaaatggctaggaaatttctaagcaagtttgtggcagagggtgaggaaaagcatagcactgcaagatcctgaaagagatttaattcagaggcattatagagtatataattagatgtgaatgttgagcctggagaaattattgggtcagacataagaaaacattacaaaagtgttaatcaaatcacagagaagccatagagcaaaatcatgagattgtttttcagataaattggtggcagtatggagagtgaattgcaatgtggggagtagattggagaagagactgagctgctgacgccagttgagaatgttttgataatgaggtagaattagcctaaactagaggagtgctatggggatggagagacacgtgtagaataggatctatataagtgatagcacaaagaacaggacctagtgataatgttatttgggggatgaccgaaaaagaggagccaactgctaccaggtttttggctttgtaagatggagatgtcatttgcagagataggatattgggagatgatgatgtatcgttaaaatagatgcctagatattgaaaataggcagtactaattggtaggttaattatttttggatcattgaaaattaccaacttttactaccatgttggctattcacttttggagatattaaatttgaggcttgtagggatgtgagagcatccaaatgaagatatttggtagtcagttgtctatgggtctgaatccttagaaaaattcggatgtctgtgcaaaactggggcttgatagtactttaggtggtataagaaacgatgagtaggctgggcgcggtggcttatgcctgtaatcccagccctttgggaggctgaggtgggtggatcacaaggtcaggagttcgagaccagcctggcccacaagttgaaaccccgtc

SEQ ID NO: 38564 - DNA, 1017 bp, Homo sapiens
tagacctaaaatggactgtttttaaaatggatttagaaaatattaaattacttgatattttggcactacttaaatttcctctagattgtcaacattcattaaatttactaaacttctttgaatgtgtggagtattttatttcattagcattttgctggcattgtgaaatgaaaccaagtaagtgagccataaattataagaactaaaaagaggctttaaaataaaaccttaagctgttaatttggtggtaaaatagctacagtctgtagaacattttttcacagttccttctatcagtcctatctctttaactctgaagaaattatagtatttcagtatttatttgattcgtgtagctacatctcatttaaagactgtgttttggttattgagatactattaagtttcctcctaagataggtggtttcaactttttttattcctttcctaacttgctacgtattttcttatgtagcagtgaagagttgggttcaggaaagagaacttccactttctatcctacatattcctagctctgagactatctggcattaggattgtggggtcaaattgattcttggttttaaaggtaaagtttggaattctcatggtttttggggtggtgctctatagccatgtaacagctaggaatgttggacaagcaattcttggcattgtgatagaaattagactagatgatcttgtgccccttctaactctaaagcttaggattatattgaataactttagttgattaatgattatattatcttttaatcatccttgataatgtctactactcaagagttgttattagtgactgtagtctcagggttaccctatataatggtctggtcaggcttgctttgatcactgatccaggaattgataaaatagggagcacatttgctgtgtttgtaggtgcaccacaatatggtgtttagagttggggaaaactaaagtaagtattttagaagataacagaagacacagtagtaggtaggtaagttagcagtg

SEQ ID NO: 38565 - DNA, 1951 bp, Homo sapiens
tttttctgaaacttccttctagtggtatttagctagataatggtggtgtggatagtggaaggtggtatgggtaaaaggaagctgaagtgtttcaagagcaaagaacagaaaatccttattgaaactgacttaaacaatagggaaaacatctcacataattgaaagtctagaagtaggagtcatatgacctgccactcagtgattctgttatggacctgaattatatctttccattctgccatcctcagtgtacactttatcttcagactgtctcctcttgtgatcacaagaatgctgagagtggcaatcagggcgacatgatttcttgtccatttgacagaaaagagaggaaaacctctccccaaccatagaatgtaagtcctttcagtttcttggaccacttttgagcacatttacctctagaccaatgaaacttataagaagaatactatttactgattgtctcagtgtaatcatatgaaagtaggattgatttgggaggactcaactgcattgtctgctgaagactttgagatatatttaggatctatcataaggaatgcaatttaggttctactttgacatcttgttgactaatgagatactaatgattatgacgatggggaaatgagataggaagtatggaatagagacagtttctggaggaaaccatgtgaattcagcttttgacatgggatttgatacgaaatattggctgaacttttactaagagtttgtattaagtgtttagttggaaggtgctattctggaagttaggtattaaatttacaggtatgggtaagattgtccaagaagattgcttagcgtaagaatgcgaagagagctttctcaggatatatacatttaagaagttgtttgatgaccaggaactcttgaatatacacacacacacacaaatgtatatacacacacatatatatacacaaatatacacacatacacacacacaaatatatatacatatatacacacacatatacacatatgtatgtgcacatatatatacacatacgtatgtacacacatatatacacatatgtacacatatatatacacacacacacacatatatatatatatatttgtcagagtcatctgctagaagtaggagagctacaaataaaatgaagaatcataagatcaagatagaggggaagaggagagcccagtaaagtctggcattggggctcatatttcctgttggagcatttgccaatcttgaaagtggtagcttagcctatgaaaagaactttcgatagacttttgggctcaaggagacaaaaattagagttcaaagctcatgaaagaggaggtatcctagtgaactaggttttgatttagttcctaaagggatttactgttggaggaagtatgaaatggaaatagacctaactctgaggaacactgaagttcaacttctaataatctcaattcttgatgggaggaaggtgacctgggatttttactatccctaccttagcttactgaaagaatgaaagtaaaccttcattgtctagagaagaagacatcatctagagttttaaattatctctatgttttcctgtaaatcttttgtgtcttgtactcattcagagataattaggcatactgatagatatgacacatggctagaaaccaagaacaacagacaatggaacctggcctttaggggatctagatattagagatactagatataagctttaaagtaactgtgcttaataaatgttagaagtaataaaagatggggttgataattttgacagaactagaaccttgtaagtatatatgaatatgagtcagtctaagcttaaatgaatttgtttacatatataagtatatataaatatatacacacaaatgttaatatatgtgtgtatatttttaaaagaaaatatctgaactgaaacataaggagacaaaaaagata

SEQ ID NO: 38566 - DNA, 1109 bp, Homo sapiens
agagcttattcatgtaaccaaatgccacctgtttctcaaaaacctgttgaaataaaaaataatctaaaataataaaaaaaatttaaaaaaaaatacaggagcattctgtacattttgatttagctctcactgttgcttaccttccagagttgtccttctattgttgcaatttaatttttaagtattatttttaatattttctgtatactaatatctgttgaatgttaattttatgttataataattttctacacttaactaaactgttctcacattttttattttattgtgatcagccttaggagagagttttgcgtttatggaaatggttttacagaacagaaagtaatcggtattaggccatacaatctttaatgtcattaaatcacaatttaaaaaaaagtcgtgtttcatactagtgatttttgcgtgtttttttcttatttcaggattaatggggaagtttctagcatttcatcaaaatttgaaactgagccagtatcaaaactaaagctagattctgaacagctgccccttagaccaaaatcagtagactttgattcacttacagtaaggacctccaaagaaacaggtaagtcagcatggacagcggtggtgcatttaaaaaaaaaaattgtcaaagaaactctttaagagatatatttatgcaatttgtgtgtggataaagttggataaagttgaaattacacagttgaaatttgtttaaaatttagcagccaaagtagaaataataaaagaagataagtaaaatttttatggtccttactgatcagactttatggtttcttactgatcagaggactgaaatagatgttaaaagatgacccatctattactccctctttatagtggaatgactgtactacccaacggagatatgaatacactttagttttaaaagtttaaaaatgagatgacatagactttcagtgccagcattagattatatttcataggactttaaatttctcctcttaatctagagatacttttatttccagtggaggaaaatatgctttttctaacccttttgctaatttttttttaagctttaggactggtttttcagcttactgatatctttgtct

SEQ ID NO: 38567 - DNA, 1068 bp, Homo sapiens
tgcaaacactttttaaaaaattgtttgcttgaaaatactactgaatataaataagaatgtgcacagtagtttttttattgaaacttgtattatttttaaagagatctatactataaatatggtgatatatttacaagtaatctgttaagatatactatttgagagggacagattagccttttagtaactatagtcactactttttccataatgcataagggatataaactctgtgtgtgtgtgtgtgtgtgtgtgtgtgtgtgtgtgtgtgtgtatatatatatatatatttttacttttatcctcttaccgaaggttacactgttgtgcctgtttgtctgcaatgctgtttatattttgggtgatgaaataggagtttcctagctatataaaccagattactcacccatgcatatagtaagaactaatgaataatcaaaataatttcatcaacttttagaatattttatgttgcttgcactataggagtcataaaaggaacttagttaaaatatgttggattgttaaacatttggggaaatatgaactgtattttaaatttgttaggtctgaagaatctaaaactgttaatttaacccttaacttgtgcctagaaactacagcacatataaaatatgtaaacaccagcctgttgctgtacttttctgcttattttacagcctcaaatatttctcattatcttgtcacttagttcttcatgtttctccttctgacttttaataatggtaataggaaaacaaaacccaaagcttttcagaacttcagtgtgaggtttcctattttgacaagttaacttgtaaatactcaggttttacgatgtataatttacctaatagaccaaactaactcatggagatattttgaactattatttaggtacaaactttataaagaatgttagtatgtcataaaatataacattacagcttatttaaaaccaaatatagttgaacatatttaaaatacattttcacagaatggatgaattagttgtttcttcagagttacttatgaacagttgaatgctttaaaatgttctgtctgtag

SEQ ID NO: 38568 - DNA, 1050 bp, Homo sapiens
aaaatgttcatcatcactggccatcagagaaacgcaaatcaaaaccacaatgagataccatctcacaccagttagaatggcgatcattaaaaagtcaggaaacaacaggtgctggagaggacatgcagaaataggaacacttttacactgttggtgggactgtaaactagttcaaccattgtggaagacagtgtggcgattcctcaaggatctagaactagaaataccatttgatctagccatcccattactgggtatatactcaaaggattataagtcatgctactataaagacacatgaacatgtgtgtttactgcggcactattcacaatagcaaagacttggaaccaacccaaatgtccatcaatgatagactggattaagaaaatgtggcacatatacaccatggaatactatgcagccataagaaaggatgagttcatgtcctttgtagggacatggatgaagctggaaaccatcattctcagcaaactatcacaaggatgaaaaaccaaacaccgcatattctcactcataggtgtgaattgaacaatgagaacacctgggcacaggaaggggatcatcacacaccggggcctgtcatggggtggggggagggggagggatagaattaggagatatacctaatgctaaatgagttaatgggtacagcacaccacatggcacatgtatacatatgtaacaaacctgcacagttgtgcacatgtaccctagaacttaaagtataataaaaaaaaaaaaaagaaaatgttctgtttctcagtttcaagtttgcctagaaatatttgtgacctattttaaggaattcttttgagtacaaattctatttagtttttctttaaatataattttcaacccacaatagccaagtagaaagagtgaatcagatgggttgggtcagggtgggagtttgctgagaaaggtttaacaaattaaaaactgctagaagcaggcttgtaaattgcttaaaggtatagcagcctattattaaagaaggaagaagatattaaaaagataataagctaata

SEQ ID NO: 38569 - DNA, 1040 bp, Homo sapiens
gtaaattagttcaaccattgtggaaagcagtttggcagattctcaacttaaaacagaactaccatccaacccagcaatcccattagtgggtatatacctgaaggaatataaattgttataaagacacatgcacacttatgtttaccacagaactattcacaattgcaaagacatagaatcaacctaaaggcctatcagtggtagattagataaagaaaatgtagtacatataaaacttggaatgctatgcagccataaaagaatgagatcatgtcctttgcagcaacacggttggagctagaggtcattatcctaagcaaactaacacaggaacagaaaaccacatagtgcattttctcacaagtgggagctaaacattgaatatatatggacacaaagaagggaacaaagataccagggcctacttgcgggaggagagtgagggttgagaaactacctatcaggtactatgcttattacctgggtgaaaaaataatctgtacaccaaagccccacaacatttgcctacataacctgcatatgtattcctgaatctaaaataaaagatttttttttaattaagatttttaaccagatcccaaaagtgggatagtgggttccactattgttcagatttcttcaaatcttaagtagtagaactttttagaacccaaagatactgctgttataaagggaatcaaatttagcttttcctcctcataaaattcaagaatcaaatctgggaaagctattttgcagtctgccagatgtgatgatagaaatagatgtttctactggtgatcaactcaaatttgtaaaagaattttttaactttaatattaaatgccattcatgtttatagaatttttgagcaatgcactttgatcttagtgttttatttgccttaaactctatagaactcagttttctttgaaatcatttagaataactaatgtaaatcttctctatttttgatcacattctctaaaataattgagatttggggtccagggtcatagttaagacttctagactagtgt

SEQ ID NO: 38570 - DNA, 1034 bp, Homo sapiens
tgcagctaccctttcttaaaaaaaaaaaaaagtcatttagaagccaaaatatatttcttgaggaagactactctcccagcaatagttctgcatccagtatttggaaaagacatagatatagcatcaactttattgctgaacaagatttaagagttattacttatgtatattttctgtgtggcttatttacttgttccccaaagcatacaggcaatgttatcattgactgttgctaggaccatatttgaaagcagtgccatgtttaataccctttagaaacctggaggcttgctaattttaattttatacttggcctgcacacaacacatccttgatgtgttgtccccatacttgttttattcatttcttattttcttttcatcttcctctctaaattatgtattcctttaatgtgggaaactgttactctttttttttattctccctgctctaatgcccaacattacttccttttgacaaattaaaatagcaggctcttaaatgttcctaaataaatgaaaacaattcagaatttctccactacatgaagttttatgctgcttaaggaaggttgctgtatttgttgtcatcagttctgggctctgctagatttacacttggatcttccaggatctctgaccctaccagcattggtacgttttgaggaagtgttcatgtacatctccttattccagggaaattagatatccttataacacattaataccttgacataccagctttccaagaagtctcttttttgaaagaaacaaaagtaaattcaccagttgcttctaaaaatgttttaaatatatatggtgtttttttaaaatgtgtatgtataacaatatctattaggatttaatataataatgtgtttaagttaaaatgttttttttctctttctgactcaggaagaaatagataaaatggtagagaccacagagttaatgactgggaatattcagagcctaaagaacaaaattcagattctggcaagtgaggtggaagaagaagaggagagagtaaaacag

SEQ ID NO: 38571 - DNA, 1033 bp, Homo sapiens
taaaatgttaacaactacatttaatactatctttcccacagaaagaaattttggcgctaattccaaaccagaatgctcttctaaaggacttggatattcttcataattcatcacagatgaagagcatgtcaaccttcattgaagaagcctataagaaactggatgcatcttaaagagtgttttttttttagattgttccatattaatttaatgttcgtgaatttgtaaaactgttaacctatgattatatgtacagaggctaaggcttctgcaggatttattatctcctgatatgcactttaaaattagtctttgtagttctatcattagcatctaatgtagttctgaagactgtttttagcagttgccaaatctaggaaactaacatttatattgctgtatctataagtatttgcctaaaaccataaaataggaattgccttaaggatctagtagtttataatgcctgaatggaactcatttattggttaacagctcatatcaggagctgtgataagtaagtgtttacatacactgtctagtgcataaaaaccttagtgtttgctatcattcattctgtagccaatggcttacagtttctgtctggtcatctggaacttgaaaaatcctcaaatgccttcactcttttacctaactccctagtctttttgggaagtagttaagatatgcctgctatctttaactttggaggtagtatcaaaattttacttctttggttgtttagtgaattaatgttgaatattttctactgtcatcaaaacatattcccaaaaagtattaaaaaggaaccttagcacatttattttattaaaacaagaaaacccaaaatatataaaccttttcttattatgataataagcttatatatgtgaataagttataacctagtgtataaaaaattatttctaacaaactacagtatactgtcttgggtttttttttttttttttagtctgtaaaataaaatgactgcaattacttttttatgtgacctataatatcagttaatttg

SEQ ID NO: 38572 - DNA, 1050 bp, Homo sapiens
ctgctttctttttttagcctgttgctcaggctggagtgcaatggcacgatctgagctcactgcaaccacctgcctcccgggttcaagctattctcctgcctcagcctcctgagtagctgggattacaggcgcctgcaaccacacccagctaatttttgtacttttagtagagatggggttttgccatgttggccaggctggtctcgaactcttgacctcaggtgatctgcctgcctcagcctcccaaagtgctgggattacaggcttgagccaccgagcctggcctctactttttattactgtcatgtagttagtgataaaatgcttctatctgaaaaaaaatttgttgttctaaattctaaaaaattctcgtgattattgcttaaattttaataaagcagatgtgattttcaaattaccacatttttatttttctttattttttctgtgtggaaggtcattgaaaagcctctatgttgtcctcctaatatctctgtctctccatcaccgtctctctctctctctctctctctctctgtctgtctcacacataaactcaactaaatgcattcattgtgagagtaattttttttttttttgagacagagtctttctctgtcgcccaggctagagttaagtggcacgatatcagctcactgcaacctctgcctcctgggttcaagcgattctcgtgcctcagcctaccaggtagctgagattacgggtgcgtgcagccaaacctggctaattcttgtatttttagtagagacggagtttttactatgttggccaggctggtctcaaactcctgacctcaggtgatccccctgccttggcctcccaaagtgctgggatcacaggcatgagccaccgcgcctggccaggttcagaatctttagagctcgctttgagtgtaccttgtgtcttcaatccttatatataaatacctgcacttcaagaacagatttaacacaaacaataccacagcaattgtggtgtctgaggaagagaacttgagttacttctatcctgccattatatatgacttat

SEQ ID NO: 38573 - DNA, 1090 bp, Homo sapiens
ttccccatgctgttctcatgatagtgagtgagttctctcgagatctgatggttttttaaggggcttctcccattgcttggcactcattctctctcctgagagaaagatttttcttttctcaatgtcttggagggtataggcttccaaaccatctgggtggcaaataaactgttcatattttcctatgtgaggaatattcaataccatatcagagcaatattttttgaatgagcaaataataattatgataaatgttaatatacaatggaggtaataggtgacttcaaaatttcaagacaagtacacctagggaagacccaaggctggttcacctctctttccagggtgacctggttcctgactttaatcaaccctcagttcctagggctgtaagaatttgagaaagaccagagctagggttattgatttaagagctttttgttgattttgagacacagctaacagtagaggtggtgacatttatccttttcaggtccaagattaaaaggagcaaagaagaagaaaaaaatctctattctcaaagaatagagaattgagtactttccaacaatattgtgaaactctgtatttgccctgtccttaacacctgctcttttgactccaagagaataccaaaaggttcaaaataaatccgtagtcaggaaactggaggtgagctacaaaaccaggcgaagatggacataaaatatacatactctgctgaataatgtctatggatcataattttgggagaaatgactgttggtgaaaactataaagagaatttggtaaatctgtataaaatatggaagagcagatagtatatagtcagtgatggagtttaatggctctcaaattagaaaatttatattttccatggtgaattcattccagaaatcccatcttagcttttttattcctgcacttaagcaagataaagtcattactattattcccttgagttgtcagagaccctgagtactttagaaagtggaattagtttcatgggctaatactcaattgcctgcagtgctaaaatgttacccagataggttcaagaatgtcactgaaaccaggtggcatttcaaga

SEQ ID NO: 38574 - DNA, 1060 bp, Homo sapiens
gaagtctcaactgaatattggatatggggtgaggaaaagcaggaagaaaaacccatataggttagacaaaatattagattagccaagtatttttaaagtattttctaaaaattagataagatttagagcttacccccaccccattaattgtatacttttgtctagtgatgcgtatgtaaaaatcatacttaagctgaaatcacttctggcttactgttgttctttattttctgcatctttttggatgtcatataaaaagaggccccccaaatcatcatttgcttgttatttgggaatgcgaaagtaattgaattctctggagggatgagtggtggttgaggctgaaatagcaagttgggaatgaatgcaacttttcagtagatactataatcctttgtcaaagggagtgctggggtgatggaaatgaaactgcaagtgctgaccttgaatttctggtaacattgagtgcttgtctcttcccagcccatgtgatctatggacttgcccaaatagcttcttgctggtactgtatcctctgttttctaaaggcaccttagggacttcaaaaggcacacttttgctttaaaatgcatcgtattttaatgttaactcgatggtaaacttatataatattggctgttagacactgaataagcttaaaatggaaaagtgacactttctcgacctgcattcatcttactccttgtaattgcattcattttttttcaactttaattcagaaatcttaagtagttggcctttattattattttcagtttacggcattattggtaccagaaggattgtggtttattttaagtatatgattcatttaatctgatgggactcaggcttggactgtctgctttccagcccactttgcctccaagatcaatgcaacctcaaagaaggaaagttttaagttttttaatggtgtttatgattgatgtaccttgttgatattaataactgtatctgctacattatagctttgattaatcacagtcttcaagtaaactgacttgctgacatattccactttagagaaaaaaatatcaaa

SEQ ID NO: 38575 - DNA, 1025 bp, Homo sapiens
tttcatgtttgatattacataaccaatgggtggtataacatttttgtttgtttctcatttatctttatgtttttgcaatgtgagtttcctcatttccatctattgacattaccacatcattcttgtttttccttgtcaatgagcctcctcttttcactaaagtgaagtagccctagccctgaccatgtagcagaatcactggcgagatttttaagaaagttacgttattccaaccctcatcagttctaatttccagatgagctttatgtgtaactggttctgagaagtactgatcagttttgataagttagctttcttaatttactcttagtctgtttcttttcttgtcttaatttttattttattattcctgttaaatgtctataacattttcatccagccagccaacttttattgagtacctgttgtaagctagaggctggggaggagctatgccatttacatgatagtcacttatttttaaacaatttcagtctctcaactagaatctgtatcatttcctcttccccacttaactcatttatagggacacattcacatatgcattcataggccgaacctaaacatccactaaacagtatgatttatataattggatgtatcttttccttttgcttgtttcttttgtttatttgtggctttgacagacattgcaaaatcagcagagaagggagagggctgaaaatacaagagagaagtgggataggcactaaataattaccaagatatgaatcctggtatgtttaatttttactgaaaagaatagtaagtaactgttataaagtagaaggtgataaagtgatatatgtcgtaagaaagtattagtaaaattcagaggagaaattgcgcttgagtaggaaataggcttcctattttttgttttctatgttattttacactaattgttgttacttaatttgtacttatttaatattcataattcatttctttaaggatagtgcacataaaaatattatttttattttccaattcattttacttgg

SEQ ID NO: 38576 - DNA, 1048 bp, Homo sapiens
ctaaaatatgtaactaattcatttacttattttcatcctcactattaccataaatttattttccacagagcagccaggcttattttttgaaaatcagattatgtcacatactgactgaaacacttccatggcttccctatcatctataaagatccaactctacaggttcctcacagccctactggagctggccctccctgctctctccccagcctcatcttgggtcctttttctcacctatcatgtttcaatacattggatttatttttactgatttccttgaaatggcagcatttgaaaattccaattcagggcctttttgtacatggcatttctcctatctgaaatagcttccccaccatccttaagtggctgactccatctttcctttcagtgaggcttttcctggccactctgctatggcagttcctcctcatttttctatatcacttccctctcttttttttttttcccctttgcagcactatattataatttgtgttgctgatttgtttagtgtttatctgtcccacctgagtgtatacttcatgaaggtaaggacttatatagtttattatatatttagtgctcaataaatatcagttctaaaatgacatgaataattaacaaaatttatttcttgtctgtgtcactgctgaaaattggcaagtcaaacacgtaccatatatgcttataataatgtaaaattaaaaatgtgacttggctttttataattgtgtgtgatatgaaaatatttatgcagcatttccccccttcatcttgaagtaaatacaaatatttttatgtttattgtggcattctgagcacttcctgggagttagaagacctggattctaattctgggtctcctaccagctaacattgtgaccttgtagtcacaatctctaatttcctcgtctataaactcagaaggttagaatacatgataatcaggagcccagcctgctataaaattccatgaaaagtatatttttaaacacagtatttaaatataatttttcttttctttctacgtaacaatcaagtt

SEQ ID NO: 38577 - DNA, 1051 bp, Homo sapiens
tgatggatggaaggacacatactactgaactaggaaggtaaataaccaaaacagagcatactacataatatacagaaaaaaatttgagattggacatggtggagaaggggatgtgcaagcacatatggagggcaaatctcacaagtaagatgggacaggtgaatgcttctaaaccaatcaaaaatacctttgtttccccaaaagacaccaatgctcagtcaaaaatagcagctgctgaattagcatgggcataccaggcaaataagcctgcattgtcatagcgttcccttgattgctctatgaaactgagtaaagtttcatttcctgattcaagaattgcagctaaaatatcctctggacaaagaagaagggaaattttttgataacagatgtgttggctccttacagtataaagccaatttctgtcatatctcaccaacaatcctggtttctacagtacatcaattttaagtaatatgccaaatcatggcagcaaaaatatgttccctctagctgttaggtactttgacttgaaaacaggagtttcaaatcatcttcttcatttctgtgaggattttaatgaaactgctgaaatcataaaatattgttgatattttgtctaaatacaaactagacttagctcatctatctgtgtattcgtcagacagtatagatgtaaaattttggcaaattgcattcagtctacaaacttcttaccaaagaaaatgaaaagatcttatccattcaatgccttgtacatcttatatacaacactgctaaaaagggatgtgagttgcttaaatgtgacattgagactttcataatgaaagcttttggttacttttcaatttcctcaaaaagtgcaaaagcacttatggagatttttgacttcacagaaatggaaggtaacctctttagacgtgtgcctgcaagatggctgtcattgtaagtgagccatagaaacgatgctaaaatgttggcctgccataagatcatattttcaaaggacaagaataatgtcctttgacattgtttgaaatctgaaaggaga

SEQ ID NO: 38578 - DNA, 1329 bp, Homo sapiens
agagaaggactgaactgggggagtgagggaagaatgcgagagtgagactcagagagtaaaggggagggaaaaaaaagaagagagaaagggcgaggaagggggcgaccgcaggagggagacagacctggagtccactcggaggcctggagccgcacaaagcgccaggtcagcggtcccggctgggtgagaccagcaggcggctctagcgcgcgggagctgggcgaggctccgggacgacctcaccaatggagactgcagtatttagcatgccccacccatctgcaaggcattctggatagtgtcaaaacagccggaaatcaagtccgtttatctcaaactttagcattttgggaataaatgatatttgctatgctggttaaattagattttagttaaatttcctgctgaagctctagtacgataagcaacttgacctaagtgtaaagttgagacttccttcaggtttatatagcttgtgcgccgcttgggtacctcggatgtgagggcgatctggctgcgacatctgtcaccccattgatcgccagggttgattcggctgatctggctggctaggcgggtgtccccttcctccctcaccgctccatgtgcgtccctcccgaagctgcgcgctcggtcgaagaggacgaccatccccgatagaggaggaccggtcttcggtcaagggtatacgagtagctgcgctcccctgctagaacctccaaacaagctctcaaggtccatttgtaggagaacgtagggtagtcaagcttccaagactccagacacatccaaatgaggcgctgcatgtggcagtctgcctttcttttgacccattacccatctaagttagatgcttttttaaatgttttttaatttttaaatttttaatttttttcattatttattttttatttttgagacggatctcggctcactgtaacctccacctcccgggttcaagcgattctcctgactcagcctcccgagtagctgggattacaggcgcgcgccaccatgcccggctaatttttctatttttagtaaagacggggtttcgccatgttgaccagggtggtcttgaactcctgacgtcaggtgatcctcctgcctcgtgctgggattgcaggcgtgagccaccgctcccggcccttagatgctttttaatcagcaagtacgcaatgctttcctgacaggaatgtcaagtccgtcaggaaatccacataagggtgttaagcaggcaaagtaccacatacagattaaaatcaaaagcactgtcaacgcttatttaatttatacagtagaccctaacttttctaattttgtgtatac

SEQ ID NO: 38579 - DNA, 1025 bp, Homo sapiens
tgcataaggagactctgtcccaagaaagcaataactatttgctgaactccataggacaactaaatgttactattttctgaaacaaagttgttatttttagccacctaacaatacattttaacctagaacccagtggatttgtttattctacagtatcaaaaaaaattcaagtatcaagttatatctgattggtatcattaaacttacctgtgaagaagataactataaagaagcaatgttgtatttcattaacatgaaacattagagtattttctgttttgggacttgtagaagtttatggacactaaaattatttgggctttttgccttagactcaattatgtttggaacatctgtcacagcaccttgtcaactgcattctagaacatttctcctcctgatggaaaatacaacatgacctatgaggcagtcttgcaaaagaaaaaagaaatagcagaatctaatctagcctttcaagatcctgccacaatttataggaaataagagtaagaggtcaaaggaacatatttattgacacctcagcaaaatctagcttctacagaaaaacgacccagtttcatcccaaataaattacaagaaaaaagagtgaggattacaaaagacttgagacatatcaagcaattacaatgtggactttatttgaatcttgatttcacaaactgtgaaatatatgtattttacatatgacatcttgagaaatatgaatactgtgacttgatatttgatctaaggaattacattgataattattgaagttgggtcatgagtacttagggattaattctctttaagtgtttttctcataaaaagttttaaagtcttgtagaactaaaaaaataccaaagatgttctaattttatttcatttttttctaagaagaataatatttttcttttcttttttcctttttttttttttttttttttttatgatggggtctctgtcatccaggctggagtgcaatggtgcagtctcggctcactgcaacctccatctctcaggct

SEQ ID NO: 38580 - DNA, 1046 bp, Homo sapiens
cagctgtttgctcatttattttactgttattgcaaaagataagttatactctgtgctttttcagcatccttcaccaatttatcactttccctcttaaaaaatgtccaagtgttttccagtagaaggaaatactaggcttagagataggagataataattttacatcccatctatgtaatgttggttacatagtagttttacctccctggatcttcattttttaagctagtaaatagaaataatgcaatcatatttaacacatgaggttattatgatgattaactgagatgatgatgatggggaaaaaaatctgatatttttagagtatttaacagtttttaaagcactcatacattcttgtgatagtcaaaacgactctttactgcatgcaaatattatgttacttttagtgtcactgttgcatactatttctgtaaacatagaagtgaggtaaggtttcattataacttatgcatcttttcttttgcagaaaccacttgactataaatacagatattttcgtcgtgtccctgtacaagaagcagatcagagttttcatgtggggctacagctatgttccagtggtcaccagaggttcaacaaactcatctggatacatcattcttgtcacattacttacaagtaggtgaatgcaataaaaataacaaggttacactataaatgtatacttcgtatccagcttaagaatttcagatatgtttctaatttctcagagttaacactacattacaaactaaaaccagtactactacaaactactacaaaccaagaaaatggcccaaacgaaaaagactaagcatgcttgaggaagcagagcatctggaacactcatatagtacccattggaatgtgaattggtaccaccaccactttggaaatgaaagtagcattccatgggaagaatggtacttagtcagctgtgagctgtccatgtatgacttaaagccattttaaaataccagatcatttttcttttcccacagttaccattttttgctttatttccatttgttttatcctcaggg

SEQ ID NO: 38581 - DNA, 1050 bp, Homo sapiens
gagccatgattgtgccactgaattccagcctgggtgacagagcaagaccccatccccgctttgccccccctacacaaaaaaatcttaaatatagtagctgtttaaacacccaaactaacactgtcctcctcttgctcctcaggatgtctggagtttaattcccttattactctcccttccattcattcttagtctgcagctgcctagatggttctcctttctagcctctgattcctacccctctccttttttcccattttgtgtctttttaaaaagtcttaatgctttgagataaaatatattattaaaccagagtgtccctctcaccctctactgtactattttaatggaaagtattattttagaatacattttttataatgttcattattatatattttctgttaatatctgtacctgcttttgtcagtgttcaagatttttttgttttgttttgtttgtggacttaatcagcttctgttactattatagcattgtggatactgattgtttactgaataaaatgccactttgatcttgaaattgactgattcttattaggtcactttgtgaaattaaatgaaaaagagagagttttctattcttggttgttagtaattttgtcaccatagcaagaaactgtgatttcttcttcctgcatgctcaagtaatggcctgttctcacataccagaaagaaacaatcaaagaacaaattcttccttggagaagattgggcatacctggtgtccaagaccttttggaaaatgcacttgaaacagtgaattgttgaggaaatctcatatatgcataagtgtactacatttaaagcaaattatttgaaacttggaagctttccttgtggcaaggcttcattcatttctgaaaggattcccaaatagtttctttagagcatttagcacatttagttaaccaatatttagtaaccagtacaacttcttggagatggaattgttttgcatagaagacatacctgtttaatattccacaaaatttgaaagaacatggaatggccatttgattgcttgatt

SEQ ID NO: 38582 - DNA, 1074 bp, Homo sapiens
taccataggttaattgatataaacaagagttaagttactgtggcatatttctgatcagaaaaacatcaaacttccaagcaaaaacccaaaacacttctagtatcaaacattgacataaatatgagctatacatacatttaagaaaggttaataaatacaggtataattatttacctaatttttggagaaccagtgagggatggcagttataatggtggtgggttaaatcaaggaataaatgtttgcaaagcaaaaattttaaggagcacttcctatggtgcagttcaaagacaatcatgaatagggtaggctcgctgattatttttgtactgcatcatttatttttgtgcatttgtatgattttcatacactttgttaatttttattttacagtaatttgtattcattcattcattttccatcccgcttattccagttcaggtgaatgttaaaattttttacctgccttgtctctttccaaactggctggggtgtttcatttaatgattgaaattttacatctttcatcatgccttccccaatgattgacaggtgaaatagatcccagacttgcaggttgtactccccacacaataagcactttagtcctttgtctttacacagaagtgtagttgttcattgtttaattttatgtatataactggtgtatgtactgggatcagcttgtactctgatactacaggaaccttggttgtccagttctctttgtgtctgtacctaccctggcattgttctcacataccaaacaaatacacgtgacaaggtacagagtattgcctcctttattccacttgcttccaacatcacatcataggcagtcaagctcaggttctggaagatttatgctaggaccactttagcctgttcctgcattgtcacttttttggcctaatgcggctgtactcaatttctagaaaaagttgtttacaagaagcaactattaaaaaaaaacagcttctgttgctctaaaaccttccaagaaaaaataattattgtctattaatactgcttaatatttctgatgtaatattagggagacaataaatttatttt

SEQ ID NO: 38583 - DNA, 1028 bp, Homo sapiens
atactgaaggaaagtgaaagttcccttatacttaaggcaagcatttaaaaaatggaagataaacagacgtgactaacataggctccctttttgaatcactgaatctgtctcatgatctcctccttgggtgagctaacctgcaggcaattaatacctagtgaaagttgacctgagcagaggtttgctcaataatctgcagaacctattttcttgagatgggttaaatcagtgcataacagctaaggagagtatcattttgaattaagagagacacaaaatggctggacaaagattctcagctatattccataattctcagagaatccaagtccaaccccttgtattctgggaaggtgctattatgtggtttaagggaagcttaaaaatatcagcttcctacataactggtaataagttatttaaacagtgactctgcttcccagaacttctaagtgatacattttatcctgattaccactgagaaacctgtaaactctgcctcctgaacccaaaagagaaagccaaaatatatatgaatgatgtgtataatgtcagtcttcattattattaatacaaaatgtcactgcgatacatcgttagggagatgggttttttaagacattcgggtaagttcaggaaagagactgccagcatcagtacagttctaagaacatagtaggtattcaggtgttgattgtactcatcatttggatctgaggtttttatttcctggaaaaaaaaatagctaccacatttatttggcaacagcaaaaggccagtttctatgataggcgccaaattatatatgtggtttcatttaagttaatcattattgttacttttggttaaagtaacatatccaaaaccacaaaacatatgactgagcctaaattctagcccaggtctgtatggtctcaaagcatccgctccctccatcataccgcatctccctctgacgtctataatgaactatatcttttcagttatgggtttgaatgcttaataatcttttctaaaaaccaaaggtt

SEQ ID NO: 38584 - DNA, 1024 bp, Homo sapiens
agtcacccatttggtgaccataaggactgacagcactcaggcatctgggcttctattcttttttatttatttatttttattattttactttaagttctagggacttgtgcacaacgtgcaggtttgttacatatgtatacatgtgccatgttggtgtgctgcacccgttaactggtcatttacattaggcatatctcctaatgctatccctcccccttccccctgccgcacggcaggccccagtgtgtgatgttccccaccctgtgtccctgtgttctcattgttcaattcccacctatgagtgagaacatgcggtgtctggttttctgtccttgtgatagtttgctgagaatgatggtttccagcttcatccatgtccctgcaaaggacatgaactcatccttttttatggctgcatagtattccatggtgtatatgtgccacattttcttaatccagtctatcactgttggacatttgggttggttccaagtctttgctattgtgcatagtgcatctggacttctattctatgattattgtatcatgttgcttctctagtgggtaggagaaatacatttgttaatgacaccagtaacagctaatgtttaatgctatgtgccaggcagtgtttgaagcattttatatatactgatgtattaacacatttatcttcacaacagttctctaacgtagatacctttattgccctttttttagaggtgaggaataaaaaaataattttttctaggcttcagaagtagaaaatgacaggtctggtatttgagcctgggtcatgggctcagacagaccctgcttgggcttaccattatggtgtattacctctgatagaccactccaggcaggctccatgcaaaccagctgaacattcacaaccatgcttttgttccagtattattgcatttgattcctggttatctgccacatggactccaactcataagcatggagtatatgatgaggctttgtgctttatctcctgcctccctcaattacttccact

SEQ ID NO: 38585 - DNA, 1033 bp, Homo sapiens
attttgagttcctctgcctgctggaggacaaagctggggctagatcagcagcaggaagtgcctgtgagaacaagaaatttgtagtcccaacaacatgcaatggttaaccagagataaaccattaaagatgctatgaggcttcttttattgtgcctgccttctattttagagagacccatattcgggaaatgcctttctgcctggtgaaagctccagtgaggatgaagagcctttagcagaattgtcaaaggaagaattgtgcgccaaaataaaaagcctgaaagaaaaactaacaaacacccggaaagaaaacagccgacttcgacagtctttggtcatgcttcaaggtaaactttgagaaaattgacattttagataaaagggaaagtatatgatcagtggaaagtattgcaaattagctgtcaagaatgaagaagaaaatccacacctctgggagctcaaaaaatcacagttttagaaaaaatcactgattatataatttaaatacaaaagcactctattgaaggatctagcttatggcttgaaaatttttagattctcctacaaaatactaaatattatattcatttaatagtttttaagagattatttattgagcatttaatatacacgactcacagtgctaagccctagagacaaaagattattaagacagagcaaatatgataagttactcatgatgtacttaggtcacccctgtctgctagggaaatctctagaaaatggagcttattgtgattcttcatgaaatcactggaattagagtccatatagtacattttcatttttttctgttgggaagagtgtcttgggaaaataataaaaataatagcattccactggaaacatataaagaagaaagatcatcacaaaatactccagtggctggaaaaaaaatgaaaaaaggagaaagacagcataagcaaattaaaaactacttggcttaatgcctttttgtaggatcctatgtgatgttcatgtgtttattttttcaaaaattatgctttccatt

SEQ ID NO: 38586 - DNA, 1031 bp, Homo sapiens
tttgagacagtagttttcaagccttagtaagtataaacaggcagattcctgggccccactgcagacctaccgaatcagaatttccaggcgggggcctaggaatcttcattttcagacaagtgcagggacataaggatttctgagcacactttggacagaatgggtttctaaagcagaagggagtgttttatgatatattttggggtgattttcatccataattgttggagttttagaaaggctttgcgtaaagtggtatctcagctcgccaggcagaaaacagttctgtccccaactcgtcttttggaatgccgtagttagttgcagtttggtattcaggctgtagaatttttctttaatggagtgtctgtctaatgtttctgtgttttttagtttttgtaggtttagggcgactttgtaagtcacttgttttttaaattaaaatttcctccctaaacattgttttgttaacatcgttgtttgtttttcgtgttttgtgtataagttctttaccctgtcactttctggacatatttcccaattaatagtgtgtgtatattttgttcctgacatttggaacctttctaaatattgatgataccaagggagattgtatgctgactctgccttcactgttgttatggagtaagcaacgtaacttgaaatcaaagagcaatggtttctgtttttgtaacgagaaacatttgggaagaggagttcatgggtctttaggaaaaataattttggtttcctcttaactggtataaaaacaggaatgattgggacagatgatcttgatgagttttttgtgcatctgtatgtagaagtgacacacgtctgattgatgatccatgtgccattgagaaagtatgtagaagtgacatacgtctgattcatgatccatgtgccgttgagaaacacagatgggatgtacaaaattaagtttggaaaagtaaataggtatagatttgtgtaatatcctgaggaataaatcattatattttaaattgtgagttaatatataggctgtg

SEQ ID NO: 38587 - DNA, 1018 bp, Homo sapiens
cccaggctggcctcgaactccctggttcaagtgatccacccgccttagcctcccagaatgccgatattacaggtgtgagccaccgcgcccatctcatgcagcttttaaaatctctgcgtgtgttataacagtttcagctagatgagaaaaaaaaaacattttctgtcacaataaatggcactccagctaagttaggttaaaaaaaattagatttcattagaattttaaaacaaacttgatgtttctgttatttcttcattccactaaatgatatggtttgaaaatatttatgctcagatttttaaatggtctctacaacaaattgtcacttgttgggttcaattaagtgctcattgtataagtgcacatggtacaaatcaacaccagcttataggattgtggaaagaattaagagatgaatttagtgatcttatataccctgtcagttggtcatattgtggaagagctctacaaaacttactgtactgttaactccaagattttcttccaataacagggatgctagccagatatttaataatcaaagaccaaaaatggcagtttaatttttctacccaatatcctatggcatatgaatgatccaaatttgaagctccaaggataggaaaaagcttacttgtgcctgtcctagacaagtactagagtttatattgaaatcaaaacttctaaaaataaaaatcagtaagattaattttactcatttttctaacacgagtcagtatgcttgaagttttcattgtatttgatgtcatgtaaatttactgtaaaaaataagaaaaaattttaaaatgctttattgattaaatttagggttgcttttcagtatactcagtaactccgaagtcagtgttaacagtactgagcttacataagatttattgaatttacctaacttaggcaaatgttttcaaacttatatgcttttggtccaaagtcaaatcaattattttgaaaaagatgaatgggatttttttcagtgtggatatgaaaaataaaa

SEQ ID NO: 38588 - DNA, 1055 bp, Homo sapiens
gcaggctcaattaagggacctaatgcaaactgttgtttcccataacccatggttcccggaagaagttacgctagatgtagagctctgggaatgagaggggagaaatcttaaacatcatgcacaagggcagtgggtcccagtaacatctctaacattatgggctttagttatggctactttggtcccactctacacagaagagcctaaaaagggaaggaaggaggaaccatcacctaccttaccgcctccttctccctcagccccgccattaatgggcagaaataccaaagaggagacagttttttcctgagccccctcctccaataaataggaaaaaaagacaagggatacgctacagctatgggaccctgtcttaggcaagcggcattagaaggggagctcttagcctacccggtaatgcaagatcaacaaggcaatcaggtgtatgaacccattacttttgacgcttataaagagataagaaaaagcattagaaaaaacggagccactagcccatttacgaaagggttaattgaggtcactctgcagacctctttctaataatggccactgttattcctcccctacccctaatgtggctctctcaaaatcctatttgggtagaacagtagcctttaaagggagagaaattacaaagagctcattaattagttgaggagcaattaaaagccggccatatagaaccatcaaatagcccttggaaatcgcccattttcatcattcccaaaaggtctggtaaatggagactttttgcatgacttacaggctatcatgctaatttgcaacctatggagccccttcaacagggcctcccttcccctgcagcgattcctcaagattagcctatagtcgttattgacttaaaagactgcttttatactattacccttgcagaacaggacagagacaaatttgcatttacaataccagctatcaataatgaaaggccagcttgccaatttcattggaaagtacttcctcaaagaatgctgaacagttctaccatgtgtcagtatcatgtgaatcaggctttg

SEQ ID NO: 38589 - DNA, 1046 bp, Homo sapiens
ccaggttgtagtgcggtggtgagattaggttcactgaagccttgacctcttgggctcaagtgatcctcccactccagcctcctgagcagttgggaccacacacatgtaccaccacacctggctaattttaaatttttttgcagagacagggtctcactatgttacctaggctggtcttgaacccctgggctcaagcattcctcctgcctcccaaagtgctgggattataagtgtgaaccaccacccccagcctggattttcttgtaaacacatagtccagctgcccagaaaaaaaataaattactattcctgtttaagtaggttttctctttcagggatgcttttcttgatggcttgacatgtgatatggtttggatttgtgtcctcacccaaattccatgtggaattgtaatccccaatattgggggaggggcctggtgggaggtgattggatcatgggggcggatttcccccttgctgttctctaataatgagtgagttctcacgagatctagttgttaaaaagtgtgtagcacctccctgctttgctttcttcctcctctgcccatgtaaagaggttcctccttcctcttcaccttctgccacaattttaagtttcccaaggcctccccagccatgcttcctgtacagcctgtggaactgtgagccaattaaacctctttcttttataaattacgcagtttcaggtagttctttatagcagtgcaagaacgaatacaacatggttctaattatcctatatatttcttgaatttttgaaaaatatgctttgagaaatgttaggtaaacattttcagtggagataaaacactgtaatgttatctttatagcatacataccaaaatttaaacattacattccccaattattagacatttagatattttccagtttttgctgttataaaaaaacctgtgatgtatcttcaggaaaatccctgcaactacagttactgagttgtatggtgtgagaagtttttgggtctagccacatactgcttgttttccaagaattttacccattaa

SEQ ID NO: 38590 - DNA, 2038 bp, Homo sapiens
tatctaaccttgttcttagccatgataacacaacttatatttgataagtggatgtgtttacttggttagaataagcaaggacatttttaaaaagcagtaaatttgctgacacttttatctttttttaaaagaatgaatgacagcttccttatcagtataattacatttaaacttttttttttaaaccgtgtggcagcttctttatcaatcagtataattccatttatttacttagccctcaaaatgacattttgaagggagcataaactctttcaggctacttggacagtatttagtattctatattagtactacactaataatttactgagtgctacctaagtgacctgattgataatgtccttaaggacctgatacatccaggataacctctcaggtactgtaaacaaggaggttgaaaaagacacattccggaatccctttgtctggtaaaattggatactgatgtggatggacatgacattcattattcttgaagatataactagttgactgggattctgatgaaggtttgaaattatggattagatctttgtagaagtagtttaaagattgcaataagtgaaatcttttttttttttttttttttgagacagtttcgctcttgttgcccaggctggagtgcaatggcacgatcttggctgactgcaaccgccacctcccgggttcaagcaattctgtctcagcctcccgagtagctgggattacaggcatgtgtcaccatgacctgctaattttgtatttttagtagagacggggtctctccatgttggtcaggctggtctcaaactcctgacctcaagtgatccgcccgccttggcctcccaaagtgctgggattataggcgtgagccaccgcgcctggctgtgaaattttttttttttttttttttatgtgaggcatattttgccacagtctcgcactgtttaggttctcttgtcttttggaatctatcattctgtatttaatgttagtggctagtccaataattgattgtctcatctgtatgcatcttatgcatgtgattcaatagactagatcgattctgtgtggtttatcatagtagatacacaaaccagtctttattttttacttaagaaaatatataagtggaagttatcagtaaactggtgattattgtattgaatgcaaatctttttattatttttccagatatattgagttttataaaccattaaaatattattttatgaaatttcccttcctggatgaacagaatattgttttattaaatcttctcttattagtggaatattttttacttctttgtcttttcatttacttgttttttgttataatgaaaactttactagtgtttggtaccattgagataacttattactggaaattttgtttgcttcctgtgggatatatctggaagtggtcatagtccaaccatgtccttttgatgttgttagcatatcagttattctatgtattgatcttttcttctcctgtattcaacacctctttctgaaaggatgtctgatcttcccataatcgctttgatgtagatgatatttttattctatcagtgtatactagacaggattttgatgtggctttgtatttgtatatttaaataccatgtctttaaagcattattagaagagatattctagtttcttctaatgtcccttttaaaaaaaatatagccagtccaatatctcaaactactttgatttttgaacttaaatcaacttttagtgctaccttgtttaatggtagtagtattttctcatttctacatgttcacacaagtttattatatatagtttatggtcatatgtatcttataaaaattttgaagcccatccccatggatttattataatacagctctgatatatcttaaagttaacccgttttccgtagatgttaagggctttactggttgaggtaacctatttcaaatggtctgttgggttttgtggtaccttgtcaagaattcaataagaattctcaggctgtctgtattttcttttaggactttgga

SEQ ID NO: 38591 - DNA, 1058 bp, Homo sapiens
agaggaccttatctctaaaggaaaacaaaacaaaaaaaaaaaaaatgaagaaactttctcctcacagggaagaagtaagcccaaagtcaattctaagatgccttttgttttcagcattagggcttgtgggtcttttcagcccttcagtgttgtgaaagagaataaacagatcagcagaattagtagagaataacagaggcaatttattgagacataaccatatacaagttgagtgtcctttatctgaaatgcttggaatcagaagtgtttgggttttagatatttttggattttggaatatttgtgttacagctgttggttgagcatccctgatgtgaaaatctgaaatctgaaatgctccaaggaatgtttcctttgagcttcatacgggcactcaaaaagttttggattttagagcattttttttttttccagatttttggattagggaagctcaacttgtagttaaataaaatatgtaggctactaatagctaaatataagaaaaacaattgtagtaaataatgacaatcccaacaggttttaaggcctccaagatggtaggctagtgattaattttagagtgaagttgaagagatctaaattaatgtttaaatggctaaacaacttatcttcctagtgtcgtgagtatgttttgatagcacgtgagtataatttgaagggagtgaagttttaagaatatacttatgtgactagtgaattactgaaattttttcctactgaatatataattgctgtgtttctgaatttaattttcattgacctttgcatcaagagtatatgcaaaggtcagtgaaaagtattgcatcagattcatttagtatgctttaaagtaaacattaagaagaataaatattatgtaaagctttcctgaatgactataacttcaaaagtaacttaaaatggttttattatggcctagaacaaagtaaaatgatagtggaaacatcaattcaaggatagttcttcccgagttaggattacctaaatttatccaaaacatggccttcttcctgtccctagaatattcacattgt

SEQ ID NO: 38592 - DNA, 1088 bp, Homo sapiens
caattccttccttttttttagagaccctgaagagactgagtggcattagaatggcagtattgttcagaatggattcaaagatgtggacaaagagaccagtttagatgacttttacagtaatttagctctgagatgagagaattgtttgacttaggtaatggcattcagaatgaagaccttaaagtgaaaccaaaagacatattgaagaaagaaatgatagggttatccatttccatgacaaatggaagatttggggaaggaagggaaaaagggtgaaagagaactgcattccgtactttagggtttgcagtaggttactgatgttctgcattttccagaattagagttctttcaggacatgtttccctattcatatactgagtgttttctctactataatgagtatatatgtctgttttctttagtaaatttgagtaggtagtttaaaatgaattttttcacttatttttttccccaaatttcattaatttgttttttcttttttctcggaatcacacattccatgctgttttgcactcctttttgccgtctctctaggaagtagatttatgaccttcagcgttctgaaaagcagtatggtaacatagaaagggcaaaggctttggtatcagacagacctgggttccactgttactattatttgcttcatattcttaacaggttactgaatctgtgagtttagtttcttcatccctaaaatggtatcgttatgcttatgtacgagattgttaagagaaaatgtaatactctatttcaggcctgacctgtaaccttcaatgattgcttattccttgacatttgtgtcaccacaaggactctaaagaaaactagtatgcatggggggttgtaattgcctcttttaaatcaacaagaagaggtcactagaagattgtataagcctcgctgttttttataggtatgaattctgttttgtaaagaggcagtccccaatggaaaaaagtcaaattattcacaatttgcattgttttccttgctcccctcccccattttctttcatcttcaatttcttcactctagactaggccttctcaaacttaaatgtacac

SEQ ID NO: 38593 - DNA, 1048 bp, Homo sapiens
aagttccataattcacactcagggaagaacatctttcatgttaaaaattgatacaggatattgcgaataaacaacaaataggaaattttgaaagtttttttcaagaacttgagtgtttattttagttttccataatacagctttgtcttatattttaggaagccacagatgatggacataacaacaaccttcttcctcagattattcagtgttttgcatgtccaaattgcttccttctttttagcagaaaggaggagtgttcaaagcatatgtctggaaagaatcatttccatcagagtttcaaactgggtggtatgttaatactctcttctgctgaaaattaaactacttgaatctttgctgatttatcatacttctcagatcattcttgagattacatatcctcatcttagttttagaactatgaaagtaaaagattatctcaattcctacttaaaaacaaagattcttaatatttatttgtacgtatgagtaaggcttactaactttgaagactgaagaaatcctgggaagcaaatatttattcaggataatgttatgttatatcatgatatcttggaagttttctgtttctcggcatttaagactcaaattttaatttgagtataagtaaggcattctttgtatttaaggctagaaagtggcttcccttagatttttattgccaaaataactgtcttcttttacttactccaactaatgttgagaagggctgaggggaggaaggttgggttactctgtactcaaataactttgcaaattatagtttattttgtctttcagataacaaaggaattgcacatccaatatctttcccatcttttgcaaagaaacttttgatctctctgtgcaaagatgttccctttcaagttaagtgtgtggcctgccacaagacactgcgttcccacatggagctcactgcccatttcaggtttgtattggtctggagctgtaaaggaatacggatgagtgtttgccagtgagaagattcaacaaatacattttctttccatgtttctctcctttt

SEQ ID NO: 38594 - DNA, 1032 bp, Homo sapiens
tattgtttgacctataggtttattagaaatgtgttgcttggctgggcgtggtggctcacacctgtaatcctaacactttgggaggcttaggcaggtggattgcctgagctcaggagttcgagaccagcctggctaacatggcgaaaccccatctctactaaaaatacaaaaaattaaccgggtgtggtggtgagcgcctgtaatcccagctacttggtggctgaggcaagagaatcgcttgaacctgggaggcagaggttgcagtgatccaagattgtgccactgcactccagcctgggtgacagaaggattttctgtctccaaacacacaaaaaagatatgtgtggcttaacttctaaaggtttatagatgttacatttaggtatttaatttataaacatttagggatttgtattattttttgtttccaatttaattccacaataattagagaacatattttgtacagtttttttcttttgaaatatattaaatgtataaaatggtagcaggtctgttctctctggagtttagtagtgaagacacagttgttctatttttttattttcctagggaagttgatttattttgagttaatttgtggaatagtatgtggttttattgagcctagttcttcagtgcaaaagcaactaggggcatgacatttgtctgacataaaattaatcagttctttatttttatttcttatagattcagggggtacgagtgcagttttgttacatgggtatattgtgaagctcagatatctgggcttttaatgtcactatcatccaaatagtgaacattgtacccaataggttattttccaaccctcacccatttcccaacctcccaccttttggagttttcaatatctgtttattattccactctatatgtccacgtgtacccattgtttaactcccacttagaaatgaaaatttgcagtatttgacattctgagttatttcacttaggataatggcctccagttccatacatgttgcttcaaaaggcatgatttcattcttt

SEQ ID NO: 38595 - DNA, 1051 bp, Homo sapiens
aaattggtgaaatgttcagattatttttatctgatttaagtgtaaatggtgtcatgtacagatttggatttcacaaaaaggtttagatagaaatgagtaacattcaaggttagtatttttgcatattaggcttctaatactttttggacttgaaatcagaatgattttagcaaattcttactgaactcatgttgatatttctctcttctcagaggaagaaattgttgagcttccagatttggattacctgcgaaccatgactcatatagtctttgtagattttgataactggtcaaacttttttggtcatctaccagggcatctaaaccaaggaacatttatttggggctttcaaggtacggttaataagaaaaacaaaagaaaactttttcccacctcttagaatatagttcagtttaaaaggctcctcttaaaccttcctggatagaacataggaacataattggaatattgttcttttgtattatagttactctgctagaatcgttttctttacatgcctctgtggtaaatgttagctctatctggtgactcaaagtttatggatcttttggccgggcgcggtggctcacgtctgtaatcccagaactttggaaggctgaggcggacggatcacgaggtcagaagatcgagaccatcctggctaacatggtgaaaccccgtctctactaaaaagaaaaaaaaaatacaaaaaattagctgggcgtggtggcgggcccctgtagtcccagctccttgggaggctgaggcaggagaatggtgtgaacccaggaggcgaagcttgcagtgagctgagatcgcaccactgctctccagcctgggcaacagagtgagactctgtcttaaaaaaaaaaaaaaaaaaaaaaaaaagtttatggatcttttgatacagattgaaaaagcctttattcaacacctaaaatgtgtcaggtgctttggctttgtactaacatggttactgattattatggttttatcccttttaaaatacaaagaagcagatgttttgtttttgtttttgttttttttc

SEQ ID NO: 38596 - DNA, 1048 bp, Homo sapiens
tgaaagaaaaaaaaggtgaactttttaattgaaaaaagtttattgaagtttattgtagtttattgaagactactatgtgccagccaccatgttaactgctttttatgtttgtagtgtttacagatgtttaaatatgttgaaagaacttcttccatatgctttttaatcccctttgcaagctacgaagtaggtgttggattaccccattttataagtgtggaaggaagcacaggttcagaaaggttaaataatctacctgcagtcacagagcaagtgctttgcttttcattagtatcaacgactgtggttgagactttcactgacacaaatacctgattccatgatgtagagctagccacccagtgtgaattactggctttaaccatgtccttgaagaatgaagataatgggaaatattctgccacagtatagggacattgcagagtttatataaagatatcaaacaagttttttatttttaaataacattcaggaagaatgcgcttttttttttttgtcagaagaaatgatttggttgtgagttctggtgctttaaaaagtaaagtgattatatgctgaatatagccaaggaaagcaattagcattctaatttctttaggatcttttgtctcataattaaatgaataaacaccatctttacaggctcctcgagatgttggcactagaactacaagcactgcagtgagcttattggagtactgcaacatgtggtttcaaagaaattcactagaaacctgcctcccattgcttcctctacctttcacttaatcgatataaatgttccagggcacacagaagttagtattttcagtgttttcttatttgggccagtatctgctcccttgagaattacatgtaatgaaaaagatgttactacaagataatttttgttgaatctgtatgctccttagatggtcttgtttataagcctgagactgtcatatccatttagttgtggcttcattgtggatgagtgggttagaagcagtaagtagggttggcatctatgagtcataccaattacaca

SEQ ID NO: 38597 - DNA, 1018 bp, Homo sapiens
ggaattaacttgcaagttctaagttcatatataaaattcaattcaagatcatgtctagattttcatatttcaaaatactcaattttttagtagagaaactgccaagttatcctgtgtttttccattttgattttactttccttcttgaaaagaatacagtcgatgaaacttaaataaatacagcacatgttgagttttctgccctaagtgttaaaattctatgttttttaatgcagatgtggaattagaagaagctattagaagaagtcttgaggaaatgtaattaaagatattaccacacaacatcaagtggccttgaagagactgagataacgaattcttgagtttgttttctaaaggagaccagaaatccactattacaaatgtatttgaaaacatgtttttgctttcatatgttcaaaatctgatctttgttttgtatttttgtgctaatgtgcaaacatgtacagaagaaatagaatacatgttcatgcaaatataaattatgtattctaatataggtgtaacagtttcccagttaactttgaatttatatatttagatttaaaggattaaaaaaaaggaaagctcttgacagttgtttcccaaatagcattagttctttaattttatttgtactgtacaaatgatgctagtttatttttttagcagtgaaaatgaatataaaaaaggtgacataggtcaagttttccataaattctacttctcatgtggcactattatataatacctttgagatctttgtttatgtttattagaagagggtaatggaaactgatcatggaaacatttaaaattttatcagcaatgttctttgtgggtgccatgcatatgtaaattattgctttaattagagcagcacattgctaaaataaaaaatacaccttaatttttaagaaataatttaaatgaaacaatttccattccttttacctgcttagacttttatgtgacttgtatggtctcctggttaaagggaatggtgtcagaatatttg

SEQ ID NO: 38598 - DNA, 1043 bp, Homo sapiens
agctgtgattgaccactactctccagtctgggtggtagagcaagaccccatctctaaaaaaagaaatgtttttgaaacttactttaccattggcttaggctggctcagtatttccttacacctcttaccattctaatgcatttattttattcatgtgtcattatttttaaggaaaacttagaagatgaatatgaaccacgaagaagagatcatatttctcattttattttgcggcttgcttattgccagtcgtaagtatatgtttatattctcacagtcaaatctggtgtcatgggttataaattggtgtgtggtaagttgatgtgttgtgctaaacataggaaaacccagaataacatcaggagccggttgatcatggggttgaacactgacagtaaattgtttggaagaaattgtttacttaaaaatattgaaaaaaattctatcgcagaattttgcctgatgaaacacttcttaagtttgtgagatagactcttcatttgggattttaaattggaaaggattttattgggaagaaggacttttgatatttttcctgcaaaaaaatggtaatatttataagaaacaattaatgaaacccacacttgaatttgatacaggtttttggaatttgagctctatgggccagttaaatcgaagatatttttgtttggtagttggtttcttttaagttaatagtgccacccagaggtagtaaagttagttgcttttttaaaaattgtttttccctcacatgttaattttggtcacataatttagttatggctgtctttttttaaaattaataagcttatcaagtgagactctggaattgcttactatcccaagataataattgagaaattacttaccagttttggttctagagtttttcttctgtaaaaaagcatatgtagtttgtgaaatttatataataaatatgttgctgacaatctgtgaaaatctcctaaaaatgtgaaatcatattttgcatccagtagggtaattattttattatataacgataatgcccattagtatct

SEQ ID NO: 38599 - DNA, 1035 bp, Homo sapiens
aaatatttttcccccatatttttggtataccctcattgttcctggactccaactagcctatgagttgaggaagataatactttgtttcgttctgagtgtttctgagttcgcttttttgacaaagaacatcactgatgtggtatttgaaacaccaatgcacacaccgtgtcagtttgcattggtaggtgggttattcccgatgtttttgctgatgggtatggtatctaactacttgatcatgtagtctagggcactgtgtctgatcaattatgtatgccactatttttttgttttaaatttttaaatattttatatatatttagttatggaattctattgatattaaaaaattgtgaattttatttttggatagtaatacaagtattgcaacatattttaagtattaaaatatttaaagaagcattgggtctgatcaggttgttaaccactagttccacccaaggtgtgtttctttgctttgcagattctcaggtatgattctgttacattcttgcgtgtagtattattagccctgactgtagcatatttcttattttttttgtctttttggaagatttaaagtagttttggcttacagttctacttttcttttttaacacttttctctttttaaaaaaagatattgtttgccttgctaatactaaagtagctttcactgcagtcacattgttttcataactcaagttatatctggatattttcctattttttgtaaaaacaaaaaaaatcttcttaaaccttcaatatgacttactttcagtacccttaagaacttattagcaaagcagatgaaggaaagagcccaaagcaaaaataataataataacttcttcttggaccccttcatatacagagttcaaagctcttcatttcttgtgaatgcagagcttcccagaatccctgtggaacagggcaagctaacctctcagataggaaggattaagactgattgtctgtttacagattttttggtggggatattcagttctttctatttcccttggagagttcttc

SEQ ID NO: 38600 - DNA, 1049 bp, Homo sapiens
ctctgttgcccaggctggagtgtagtggtgcaatctcagctcactgcaacctcggcctcctgggttcaagtgattctcctgcctcagcctcccaagtagctgggactacaggcgcacaccaccatgcccagctcatttttgtagctttagtagagacagggtttcaccatgatggccaagctggtcttgaactcctgactttgtgatccccccacattggcctcccaaagtgctgggattacaggagtgagccaccgtgccggcctatccaatccattctttaccctgaagcaagagtgcagatatttacagatgtctatgctacagcccctccccaactcttcagcaatttcctattaatataatgttaatcttcaaaatttgtaataagttacctcaagctctcatccctgtttacctccctagcctcatctcttaccactaatctgtaaactctatggaccagccatgtgaacttcctttagttgtgaaaacatgttttttccccttgactttggatactcttccctacatttcgtctaattctgactcatctgtcatgtatcagcttaaacagttttctttctgggacatttccttaagtttagcgtagaaacccatcctctgtggcttttttttttttttttgagacagtttcgctcttgttgcccaggctggagtgcagtggtgcgatctcggctcactgaaacctctgccttctgtatgttcaagagattctcctccctcagcctcctgagtagctaggattacaggtgcctgccaccactcctggctaatgtttgtatttttagtagagatggggtttcaccatgttggtgaagctggtatcggattcctgacctcgtgatccacccgccttggcctcccaaagtgctggggttacaggcatgagccaccgcacccggcttcctctgtcagagcacttgtacttgagggttatcacccgcctgtcttgaaatgggctctaagtctcctgaaagcaaaggaccctgaatatggtgtttattacctaacacaatgtctagcct

SEQ ID NO: 38601 - DNA, 1028 bp, Homo sapiens
tgatatcttaaaactatacacatttttatatgtaaaacacatattttacagttgttgtctcttaatctgagtcagtttttaatactttttttgtacctaatgcagaagaagacttcaaaggtttgtgacatggctgttttaaactgtactgattatagtgtaagcatatgccaagctttccttctcagttaaaaattgtagtattttctgatataaataaatttttattgactctctggggttacctaaatatgtataatttagctatgtcagcacttgggaagactaaaatactaactctgtgtttattaaatgaaggaatttatgagaacacctagcataacaggtatttagtaactgttaatattctttctccattcctaatcctgttatttctttatcctcatgaaagttgatgcttttaaattttttctttacttgtctgtcactaccctagattatattctagttacagctaagaatagtgtctttcaccactgtggaagacactgatacttgtctactgtttggccattgctcttttattattcttagttttattcacccatattctctctgttgacattttagaccacacttctttgtgtgaaatagacaaatattttccagcatattggatagttttagctgtcatctattaaatgctggtggtggaccccagtctccatgacaaccaaaaatatcaccgtgcatttcagaaaacttctggcatgttaatgctactattaatctgatcatagtcatttccttcttaccaaatttttaatttatgcctgtgacaatgtcattgtggctaaaaagtatgagttctttgggggctcctgaaaaaagtttttcttgctaaaaaaaaaaaaaaaaaaaggcatgtgggatgaagtagtctttttttcccccctctggatattgttgtaactgaatgtgatgcctggaagagctacagccatctagagatgaggcaggtaacttcgggacaacccaatttgctgcatagacatgtagaaagatgg

SEQ ID NO: 38602 - DNA, 1049 bp, Homo sapiens
tcaggctttatttctatatagcatactatctgaaagagtttctttgtccctgggcagaagtttgaaatcaaggtgtcggcatggccatgcttcctctgaaggtgctggggaaagatctattccacatctgtcttctggcttctggtagttctttgacttgtggcaacataactcaagtcttcacatggcattcaccctgcatgtcccaaattctgctttttctaaggatatcagtcatattggggtatcatttttctaaggatatcagtcacctctcaactccagtgtgacctcattgtaactaagtacatctgcaacaatcctatttctaaataaggtcacattctgaggtactgggggttagtacctcaacatatgattttcttgggacagagtttaacccatatcacatgtctatcactaaagcagctattgtggtttaagggatagcctagcctaagatcatgtgtctgcccctttagatggggtatcatgggagctgagagtcagtgtgttcctgaaaccacaatatcccaaacaaaaatggatgattgttaggaatggggagaggggagaatgaagatggggaggcagacaacaattgtctactacctagaaaagacactgaatatgaattaaatgtacaaagtttttcactttgtaatttctttcaagccaagctgcccagtgcccaaaaacctaactatgaaaatgcatctgaaattcttttacttttgggtttaaagctacttctgattttgtgtattgcaaagtttaaataaatttttaataagttttgactgttttataaatttgccttgaaagcaactttaaaaatgtaaaaaaaattttacatttgccacacatttttattttagataagtcaagatattctatgtatatttgtgatttatcatcccaatattccagtgtagaaagaaggatatgtggcagatttttgcaaaattttacaatttttttctactttctgggtagaagtgggggatctatactgagagaaaagacagaacttgggttcctaagtttgt

SEQ ID NO: 38603 - DNA, 1051 bp, Homo sapiens
ggtctcccttgctgctgatctgtgggaaacaaaacgttgcagttgaaagccatgagactattaggatggtgcaaaagtaatgtggtttttttctttacttttaatggcaaagactgcaattacttttgcgccaacctaataacagaaaaaaaatcatttttcgggggaaaataagcatatgctctttctagtttgacaggtttgttgactgaggatgctcagctgaacttgattgttgttctatttgtgagatactggtttgttaacctttttctaagatgcagtttacaatctgttgtctattcaacacatatttctttttttttaacttttaggtttgggggtacatgcgaaggtttgttacataggtaaactcatgtcatgggggcttgttgtacagattatttcatcacccaggtattaaactcagtacccaatagttaccttttctgctcctctccttcctcccaacctccaccctcaggtagaccccagtgtctgttgttcttttctgtgtgtgcaagagttctcatcatttagctctcactaagtgagaacatgtggtattaggttttctattcttgggttagtttgctagttagtagcctcaggctccatccatgttcccacaaaagacatgatctcattcttttttatggctacatagtattccataatgtatgtgtaccacactttctttatctagtctgtcactgaaggacatttaggttgattccatgtctttgctattgtaaatggtgctgcaatgaacattggtgtacatatgtcttgatggtagaatgatttatattcctctgggtatatacccagtaacgggattgcaaggttgaatgatagttctgcttttagctctttgaggaatcagtatactgctttccacattggttgaactaatttacactccctccaacagtgtataagtgttccctcctcttcgcaacttcatcagcatctgttattttttgacttcttagtaatagccattctgactggtatgagatggtatctcattgtggttttgatttgcatt

SEQ ID NO: 38604 - DNA, 1028 bp, Homo sapiens
tgtatatttaaattccttatagatgttgaatattagacctttgtcagatgcatagtttgcaagtattttcttccattctgtaggttgtctgtgtactctgttgataatttcttttgctgtgcagaagctgttaagtttagttagatcccatttgccaatttttgcttttggtgtctttgtcatgaaatttttgcccattcctatgtccagatggtattgcctaagttgtcttccagggttttcattgctttggattttacatttaagtctttaatccattttgagttgatttttatatatggtataaggaaaagtccagcttcaatcttctgcatatggctagccagttatccagcaccatttattgaataggggttcttttccccattgcttgtttttgtcagctttgttgaagatcatatggttgtaggtgtgtgggcttattgctgggctctctgttctgttccattggtctatgtgcttgtttttgtacctgtaccatgctgttttggttactgtatcctgtgctgtagtttgaaattggtagtgtgatgcctcaagcgttgttctttctgcttaggattgccttggctattcggactcttttttagtttcatatgaactttaaaatagtttttatttatttattttttagttctgtgaagaatgtcattgatagtttgataggaataggactgaattatataaattgctttgggcagtatgaccattttaatgatattgacttttcctgtccatgagcatgggatgtttttccatttatttgtgtatctctgatttctttgagcagtattttgtaattcttattgttgcgatctttcacctccctggttagctgtattcctaggtattttattctttttgtggcaattgtgaatgggattgccttgttgatttggctctcagcttggcttttgttggtgtataggaatgctagcgatttcgttcattgattttgtatcctggaactgctgaaggtctttatcagctgaaggagcttttggact

SEQ ID NO: 38605 - DNA, 1060 bp, Homo sapiens
gagcttcagagacgtcaggtctgagctggattttgcaaggctctctcttagatgtaagcattcccttgaccttgtcttttttagggagtagggagtggggagtaagaccactgctttttttttccttcttaaattttttaagttctctcatttcttccttgtccatacccttgctgataatgaggcttgacatctatcttcctgcctgctccattcagacagatgagtaccgtccatggtttctaattctgtaccttcaattttcactgcttgtctgtttaattgcacatatacgtttaggaatttgtcaaggagtacagaatccatcttctgatttacatgcattgagagtcttgtgtctcagaaatgaaaatcttaataaggcttttccatctttatccgagtgacagagagaaccctgtgaacttaagtaggcagtatatatactaaaattggagtggtgcagaaaatgttacccaacaagttctaggagagtaatgtgtaagttcaaataaaaaataaaaacaaaaaatgaaaatcgtctgagactagttgattggaaataaccaaggaatgagagaattgagaataacaagcttggtttcccttaaaattttaaaggggtactaagagtagaaggaaatgttttatgagactcttgctgttttgtataaaatcttatttttaataattttatatttttcatgcctacattttaaaagagagacctaacatacagttatgagacttcagaaatatcatggaaagtacttatgctctggttgcggttgtcccttgtggcactatgattttgttcatgtataagattgtatttgttgagttgcaaaacagccaggtgaacagtgtcattgagtttactaaattgaggtgtgaataaggtaatgatctagaaaacagataactgaacctggaaaaagatatagaagacagattacttgcttataaatttgaaacaaaagaatggtaaacaagattggtaacccgaatgttatcttctttaactgtgtcatcaaaaactccacagttataacattgacta

SEQ ID NO: 38606 - DNA, 1039 bp, Homo sapiens
accacaaaaacatgtatgtatgctttgataattaattgaaggaaaattctgtatttgggatgcataaccttttgtttttggtattatcctaatagagagaaaaatattcccaggcttccaagagtaaatttgagggtagttcattttggagtgtttatgagtatttgctttatttacttctggaaaatgaaataaccaaatcaacactcagtttttgaaagtaaatttgaaagaatataaaaatattgccttcaaatgtgtagcatgcactttctccagtgccgatctttatttattaagacaatgttgtatagaacattttccagagaaatgttattaaggcatgttcctgacaagtgattttaatcaaaatagattaatttaaaatgcaaccatttttataagatattttaattttcaaatcagcaaggatttcacagtaatgtaatgaaaatggaatattcctttaaagtttgtaggttttttgaggcatcaacatagtttttgagggtgagagtaggattggcagggggaggcagttcaaaggaatgcattgttaatggaataccaaactctgtaatacattttaaagagctttattcagagccaatatgagtgagcatggcccagggaagcacagtctcaagaggtcctaagaaagtgcacgcagggcagtcagattatagtttgagtttttacattttagggagacaggagttaataagcaaattcataaattgatacatggaggttatacattggtttggcccaaaaggtgggatatcttgaagcagggacttacaggtcataggtgggttcagagatttttaaatttgcaatcagttaaagagtaaagctttgtctaaaaatttggagttggcagaaaggaatgtttaagataaaaaagttgttaaccattacactcggtcagcatgacttataggggtgcataacttagcccttgtctggtgtgacattaggtcctatttataatttggtatcttattgccacaaagagtctgtattgtcagtcttatga

SEQ ID NO: 38607 - DNA, 1073 bp, Homo sapiens
cccggtgtgtgatgttcccctccctgtgtccatgtgttctcattgttcagttaccacttatgagtgagaacatgaggtgtttggttttctgttcctgtgttagtttgttgaggatgatggtttccagcttcatccatctccctgcaaagcacatgaactcatccttttctatggctgcatagtattccatggtgtatatgtgccacattttctttatcaagtctatcattgatggacatttgggttggttccaagtctttgctattgtgaacagtgctgcaataaacatacatgtgcatgtgtctttatagtagaatgatttataatcctttgggtatatacccagtaatgggattgctgggtcaaatggtatttctggttctagatccataaggaattgccacactgtcttcgacaatggttgaactactttacactcccacaaacagtgtaaaagcattcctatttctccacatcctctccagcatctgttgtttcctgactttttaaggattgtcattctaactggtgtgagatggtatcccattgtggttttgatttgcatttctctaatgaccagtgctgatgagcttttttcatatgtatgttggctgcataaatgcctttgagaagtgtctgttcatatcctttgcccactttttgatgggattgtgtttttcttctaaatttgtttaagttctttgtagattctggatattagctgtttgtcagagggatagattgcaaacattttctcccattctgtaggttgcctcttcactctgatgatagtttcttttgctgtgcagaagctctttagtttaattagatcccatttgttggctgggcacggtggctgaccagcctgaccaaatggagaaacgctgtctctacctaaaatacaaaattagccaggcatggtggcacatgcgtataatcccagctactaggagaatcgcttgaacctgggaagtggaggttgcagtgagccaagattgtgccattgcactctagcctgggcaacaagagtgaaactccatctcaaaaaaaaaaaaaaaaaagaagaaaagatc

SEQ ID NO: 38608 - DNA, 1079 bp, Homo sapiens
tttttcgttgtgtctctgccaggttttggtatcaggatgatgttggcctcataatatggcccaggggtttggggcccttgttctaagtacttactatttttagcaaatattttgtctaattaaatttattagttggtgtatgtcactgacaacttagaaccctgactaatatatacagctcatacttagtgaataactatgtgtgggatatagtataatcatgggtttccttttaggaggggatttatagaaccatttcttcatgtatgttcagggccaaggctaatgttatttttattaaatgcccaagtcatttgctctctagtttatttcgggttgatttatttcattgaagaccttaggccttgactccaggcttgttgcaatttttgtttgtaagccctgaaacagagattctattctccctgagggagaaatggttatgaagagagcttctcatgttaggatgtagtggctggtgtcaggcagtgatttccttatcatcaccgttgtgattatcttggcatacatatattgctgataattgatattctctatgaagagcctgtttaactcacgtctcatcccaagtgaagggccatcttgagcctgagtttccctctggaactctctttatgttgctgagaagcacagtgcctcctggcacattagctttcagtctgtgaaagcagatactttcaaatgggaaaatgccatgcaaggtgaactgttggtattttcacagcaggcaaattcttagcaccctcagtataaaaacactagtgaatcacatttatggttttgtaaccattacaatgagaacagacagtgacattcaaatctcagaaaattgaacccttgatattgattgttaatgtggaaaacttgaagaagcaggtagaacactgtgaccttacgatgtgaattctctaatcagaccatacagatcagtcaaatatttgacttattgatttttggagaaacaagctattttgtatgcaagatatgaaaatactagaagttttcgcccttgattcagaataagcaatgagagtcaaggtcttatgcagtaaatttga

SEQ ID NO: 38609 - DNA, 1049 bp, Homo sapiens
aaacatgagtcattattggaattattgtagttttaactaataaatagtaaaattttattggactcttgaaggtcatgggtcatcatggacttaaaaattttagtgtcagtacccagttgtccagaatttagaattggtaaaatacattcagctaccaaaattgcgcagtaatatcatcctgtttaattcagctggaatttaagttaatggcagatttaatggatgggacactttgtagcttctgcagaccctgataagctttacataaataccaagttgcagctacttgagtgaactacagttccacaagagaaattcactttaggatattttgaaataccattcatctgcttcagttagatattttaggtaccatgtcattcttccctatttattaatgttatataatattataccatgtaaaaagtattaacaacgtaaccatcattgtatttgcattgtagcgtaatcagctgtgaaagatgaattttcagatgtatacttatagtactctttgctaaaaattctgtaggccaccctgactcattggttataatattgtgtagtataagtaatttcatgatgtgattatttttatatttatttatttatttttgagatggagttcactcttgtttcccaggctggagtgcaatggtgcgatctcggctcactgcaacctccgccttccgggttcaagtggttctcctgcctcagcctcccaagtagctgggattacaggcatgagccaccatgcccagcctcattatgtgatttaaaactttataataaactgtaagaaaccaaaaacagattttactcatgaattttatgaatgagttggattttaagagatttatttattgggcctcactctgtcaccaaggctggattgcagtagtgtgaccacagctcactccagcttcaacctcctgggcttcattgatcctcccactgcagcctcctgaatagctgggaccccaggtgcttgccaccatgcccagctgatttttaatttttgttttatagaaacagagtctcctatgttg

SEQ ID NO: 38610 - DNA, 1977 bp, Homo sapiens
tctaaaatagccttttagtcccaaccttcccttattactccccactcccttaccagattgttttcattatagcagttaattatatctgacagtcaattttgtatttgtttccaccattagaagacagggactttgccttgttcatgtctctgtccttagcatctagaatagtgactgtcagggagtaatctagtcaaagtactcaaataagtactgttgaatggatgcaggcttgcctaattaagttgtaaggacaagttacgatgaagccattatttaggagatatttgaatatgggttagttaggtgggatgataagtagagggatgaatatccatggtagagattgagattccatgaacatgtgacagactgggaaatcatactttcacatccttctggccaccgtggttagtctagggcagcttgacccaaattgaacttaacccaaattgagctaggcagagtacctagctttattctatgaggccctgcccttgccctgtttaccttaactcttccttagatcctgtgagctgctgcaacctggaatccttttgatactgctgttttcccctctttgggtagttagaatttagtttctattctttgtccatgtaagagttctgcctaatatcaaggggtagagataggtcatgtgaattaggtcggagttagatgtatgtttgtaactattaacattagacctgagcaagtattggtttatgcaaagggctgatatatgcagtactgcattttcttgtccttttaattttaggtctctaagacagagtagaagctacggaaaaaaaatgtgtgtctatatgttaggagtttttaggttataggaaatctgagcatctgtagtagtccacatatcattatcaatggctagagaatctatccacttatctggttggcatttaacgagtgtgtaccatgtgtaggacattttccttacatacaaaggttaattaattcattttacagagacatttattgaatgaaaactccatgctgtgttttgcagggtcacagttaaacaagccctggcttcccccttaaaggagcttacagtccaagagagtgagcatgacaagcaaacagatttgtgcaaagcgccataggagtgtgtgttgcagggatgccaagaagggagtcatcagttctaaggttaagataggagaaatttcttggaaggttcttaagagatggaaaagttaaataggtgtttggcagagagaggtattgggtgtttgtggaaggagaattggaattccaaagagtaaaggtgtggaagtgctggaccagtggaggagatgttgttcagaatgtctggagagtatagcctaaagggaagaagtgtcaggtgaggaatgggacagaagaggaggctgaaagagggagaacaggctaaagagttgggactgtatatggagggtagtaaggagtcatttaacccatttatgcctagtgttccattattggaacgctaagcttgtgtagtaaggagtcatttaacccatttatgcctagtgttccattattgaaacgctaagcttgtgggggttatttatatcctgctcatggtcatcaccaaggtctgatttttcacaaaacaatttgcaacctatggcatgaatgggttaagagacttattcaaggaaatagtggaacatatttgtattttggcaagtaccctgccatgacaaagtaaagaatgggctggaggcaggaagaccacggaaagcagataatctgaagccttatgttcttagtcacagatccgtccttagggaaagtgaggccttgcctgagcagaggctctagatgggcggattgaacttcatgaggatgctgagaacagtgaacacattcctgatgtgtccagtatatatggcatgttcaactcccccaacagttatatcatctttatagctcagccagtcatatttcacattaaatggcaaacctagg

SEQ ID NO: 38611 - DNA, 1023 bp, Homo sapiens
atcaaaagctttgagttcccactgcactgctgacttgctttctgatcctaacaagtttctaactcctccaagcctccattcatcaaatgatatacagaaatgctctttcagggggttgcaaggatctaattagaggctattgaagactctttgtacactgtaaaatgctattcagatattatttattttaataaacagtgattgctttatgtcaggctctttaacaaaaattcttacaattcagacctcctatcaacactgcaaagcaggcattattatcgccattagtcaataaggcaactggcatacagaaagtaactaagtaacttgctcacatgctacttttaagtgatgattcccaatttaagttccagctgcttttttgctatgttgtcgtgctgttaataaaggataaatggtagaggtttgaactttaacaacaacttggattatgcttctaaaaaaatggaagtggcgctctagactaggagtcaggaggttcagactgttactatatttttctattattttggggtaagttacttaaattaatttcattaaatatgtttaaaacacttggctatgtttctgctaaggtttacatgtaaaatgctttcttattttaatcattttcagaatttaaaaaatttccttcgaagggatcaaaagtattttatgaatctgttttaatatttttttttctttttttaaagtcattcctacactagccaagattacagtacccagggaaatgttgggaagatttctttagatcagattgatttggtaagtagaacattcttttaaacttagaactgtatcaatggagggaacatagattttcttaaatcaaagacttttgggtgaggagatagaatattatttcactgcttgctgattaattttaaagaaaatcccatgtcctacttagatgatttttaaaaaatcataggaaaatcatttaatcagaaaattatctgtacttttatgaaaacagaatttaatcaacgattccaaacagga

SEQ ID NO: 38612 - DNA, 1053 bp, Homo sapiens
ctaatgaaaggacttgggtgttgaacccagctcgaatgatttgaaataacagcttctgtttggacagcttatgtcctaacagtgtaagaaaaatgatgtggtaacagtcaatttcaactggaatttttctgtactattgtttcccaaatgatcataatgtctgatttctttctcttaatatttgtgtcctcatggtgacttatttgagatacattgctatgtgagtctgagcaaatattttgggtacttagccagtacttttgagttagcagagactggtataatatctccagcacttttgagctctaactctgcagctacaactacctttcctagatatactgcctggaaccaaatatttctttaccctaacttctagcgcagctctgttcttgaattgactgcctgatcggtatctgtctcttcctcccatctttacttacttgtgcttgttgcaggcattttttttttaacactttgcttttaaaactaatgttatacttaatgttggaggggaatgtgttgtctgtattctgaaataatttacacctgtattagtgttgtttgtaactgtcatccaaagtataaatattaaagtattgtgtctctagataccttttattaaggttaagcagtttttgtgttataatgcacataatttctgttataaacatttttgagtagtaataatggattgtggaagcagcttaaagttctgatgctcactgttatttttttattaggaatttgatgttgtaagagttaaagaaggaggaaagaaacacgaaaagcagctcaacagtcaaagacaggtttattttggagaataaacctgagtggggcttctggccgagtttggtcagtaatgctgtctcttacagactgagagtatttattggtgagagagcttggaatgtttctgtgtgggggagaagtttatggcagggttggaatgtctctggttggagaggagagtatgttggggctgacatctctccagctggaggggaggatatctcgggactggcatgtctctggtcagggaggggtttg

SEQ ID NO: 38613 - DNA, 1031 bp, Homo sapiens
atccaatccaccaagccaaggggattatcatggtaagtgcctccactggatatgttggccaagtacagaaatccaagagctctgttggaaacactgaaacaatgttgtggctttttgcattcctgtcaagacctagtttgtagcttatgtcagtcgtcactgtcaagctagagctccattactcttagaacaatttgtcttattactgaactaggtcaggcaagagaaattcattcagctgcacttcagtttgtgctggattaggcttttcagttctcactttcttccttcccgctgttctctgtctccctcatcttctgcagtgttctgcgagtgtcttagagggcgatgtaagttttacaaagctttttgaaattagaatgttctaagtttggaatagtagattcattaattttccaaaggctaactactaaggaaaagtgtgaggtttttttcttatcaccatcatctgattaaccaacaaagattaagtgggcaatttaacatgtcgtgatatctgccataactatcagttttcctgagttatttaaaaagaaaaacaaaacatctcatttgtctggtacgtccaagaatgaattaatagtttatatcagtaaattttctggattatcaaagcttactacagtatgtgtcaaaacttatttttgttttagaatcttcaacactttttaaaagactgcacacttttggactgctaaagatcaaataatcataaacaatatttttagaaagacattctatgtgaccaaatcactaaaaaatgcccatacattcattagttaatagatgaagaagtggccagcactcgttatatagatagacagataagatagatctatatatagacatagattttttttttttgagacagagtttcattcttgttgcccaggctggagtgcaatggcgtgatctcggctcactgcaggtctccacctcctgggttcaagcaattctcctgcctcagcctcctgtgtagctaggattacaggcacctgccaccctgcccg

SEQ ID NO: 38614 - DNA, 1050 bp, Homo sapiens
aaaacaaaaaaccaaagtacgcaggcaaccaagagcatgatgaatgcaaaggtacctcacatttcaatactaacattgaatgtaaataggctaaatgctccacctaaaaggtacagaactgcagaatgcataagaactcatcaaccaacaatctgctgccttcaggagactaacctaactcataaggactcacataaacttaaagtaaaggtgtggaaaaaggcatttcatgcaaatggacactgaaagcaggcaggggtagctgttcttatatcagatgaaacaaactttaaagcaacagcattacaggcaggagctgccatgccaggcattttgctcattgctttcaatgatgtcatgtcttttttgtccctcggtttctccattagtaccttcttttgcattaattttttttttggtagtgtacttagtcagttttgtgctgctataacaggatatacagatcagctaatttataaatgaaagaaatttatttctcacagttatagaggctgagaagtccgaggttgaggagcctatctctgatctgatgaagactttcttgttcagtcttcacattgcagaaggacaagagaacaagctagccaaatgccacctgaagctgctgctgctttttttctttataagggccttagttctattaatgaggaatgagccctgatggcctcatcatgtcttaaaggttccacctcttaatactagcagatttgcagcacctgaactttggaggggacacattcagaccacagtaccatagtaccatttttattcccatcactttttttttgatgtatttttttctcattatttgcttagtggttatcctggggactgtaaccttttatatgtataacaatttttaatatcaacttagcatctattatatacaaaaactccacttctgtatagctctgtccctcccccttatattgttgtcacaaattacatcttcatacattgtgtgcccattaacttataattactgttttatgcatctgtcttttaaatcatttgagaaaaaagaagagt

SEQ ID NO: 38615 - DNA, 1011 bp, Homo sapiens
cctgtaatcccagaactttgggaggccgaggcgggcagatcatgaggtcaagagattgagaccatcctggccaacatggtgaaacctcgtctctactaaaaatacaaaaattagctgggtgtggtggtgtgtgcctgtaatcccagctacccgggaggctgaggcaggagaatcgcttgaaccagggagccggaggttgcagtgagctgagattgcgccactgcactccagcctggcgacagagcaagactctgtctcaaaaaaaaaaaaaaaaaaaaaaaaaagagataggaacttcagaaacagagacagtatatacagaaaacagtatatacatgaattaaatatagaaagtaaatataaatgtgtatattaaattgctgtgaacaggatagataaaacggttttggaaaaactggataattttggaaaaaatagagtccatattcatagtatgcatttaaataaactccaaatggatcatcaattttaatgaactcatgactttaatagattctctttcctagctctgtccactgaaagggccaggatgcagtgacacgttgcaaacaaggttatattagtttccaaatactgttcccatcaaaagggcaggactccctggagtattacatgattccaggtcttgcattagatgaacatgaaacatcttgtgccagaaagcaaggaattgctgaaagagtgatgggaagatgtcaaaagaacataggaacgaccacctgactggctaaatttgagacaatgtgaaaataaaaaaaacgacaatgatagattatagaacattgaatatccagaaaataatgacaaggaccctcagactaatccagattgtaggacatttcctaagacaattgatctgaactcttcaaaaaatgtcaacgtcatgaaacactgaaatgacagtcactgaaatgacagtcactgaaatgacaaaaaggcaggacactgtttaagttaaaggcaggacactgtttaagttaaagaggaata

SEQ ID NO: 38616 - DNA, 1119 bp, Homo sapiens
cagagttaaaggacttttatttccaagggactagttccctttacaggaactgaacaccagtgcatggtggtgaatgcatggaattttaattccttgactagaagacaatatggccttcattgcaaatcccacaggggatccaaagcaggcagttcgagtgtatgaataattttgctttcttttaaagctgattgctgttttcttttaaaaacaatctgtcaagggagtttctaaggccatacttattttttaagtcttttcctaggtaccattaacatggctggctgtttaagacaagagtgctctaaaaagctttcctttaaatacagccaattcattcatttactaagtgaactagttcaagtatatttttgtcctgttaatccaatttggggaaagaaaaaagacaaggctcttaccaccctcatttgacctggggtcctaagcagagatctgggagaactgacttggtaaaaaaaattcttattttctttgttggctttgtgtcagttgtcccaagatcccatctgtaggctccagaataaagtttcctacagtgggtaatattaactagtaaatttgttaacctattcactgcatcaaaactgtagggaagtttaaattttccccctgaagagtgaagaatttgagtctgtaaaacaaactgataatagacagattaaaggggaaaaaaggcatatgaattttattacatgtacttgtttgcacgggaattatatgaagtataaaaacttaaggaaaggtaacatagttgatgcttttatatcatcttgaaattatagaaagaacagggacttggaatgtgacagattatgggggcaaaatgggttatgaaagggagagaaaagaaagacttggctagcaaaggtggtcttaccatgcaatgaaaaccttgaaggtagaatccatcagagagaatagatgctaaatgttttgtcagacctttaaaagcatgagactctcagtaaatctttcctagattcagacaaggggtggtgtggttcagagagagcctgtttgcatctgttgcacccttcactttatttcttctacagatgcaaatctccacaaaagtcagcttttcaattattcttgtat

SEQ ID NO: 38617 - DNA, 1059 bp, Homo sapiens
ccttttgatagagcagttttgaaacactgtttttgtagtatttccaagcggatatttggaacgccttgaagcgtatggtagaaaaggaaatatcttctcataaaacctagacagaaccaatctcagaaacgactttgtgatgtctgcattcaactcacagagttgaacatttctcttgatagagcagttttgaaaccctctttctgaaggatctgcaagtggatatttggacctcctttgggtcttcgttggaaacgggatttcttcgtataaatctagacagaagaattctccgaaatttctttggttgtgtgcactcaagtcacagagtggaaccttcctttggatagagcagtttgaaacgctgtggttgtagtatttccaagcggatattagagcgccttgaagcctatggtagaaaaggaaatatcttcccataaaacctagacggaagcaatctcagaaactactgtgtgatggctgcattccacacacacggtggaacatttctcttgatagagcagttttgaaacactctttctgtagaatctgcaagtggataattggaccgccttgaggccttcgttggaaacgggatttcttcatgttactctagatagaagaattctcaaacactactatgtgatgtttgcattcaagtcacagagtgcaacattcctcttgacagagcagttgggaaacactccttttgtagaatttgcaatgggatatttggacttctttgaggccttcgttggaaacgggatttcttcgtataaatctagacagaagaattctcagaaacttctttgtgatgtgtgcattcaactcagcgagtggcaccttcctttggatacagcagttttgaaacactgtttttgtagtatttccaagcagatatttagagcgccttgaagcctatgctagaaatggaaatatctccccataaaaccaagagagtagcaatctcagaaactaatgtgtgatggctgcattccacacacacggtggaccatttctcttgatagagcagttttgaaacactctttctgtagaatc

SEQ ID NO: 38618 - DNA, 1051 bp, Homo sapiens
taccttataaactatttggaagaagactgattattaacatcagtgtcttccatgtacatattttaaaaatatgctgtgactattggtttaatgtttgatattggcataaaaatggtttagttcttaagggggaacttagagaaaatataaatacattcatatttgtttatatttattggttacagtagttaccttgcttttgagacctgccacttccaccttcaacatccctttgtccgccttctctgagttggatttcagttttgagttgtatatgtgaaattttggttttaaaatacaaaagaacattattaaaattatgaatattttctttacagttataaatgagagttgtttcctttttagattcataagcatacattcttatgatatttcacataacaagttgattttcagagactcattttcctcgtcttcagtttaatgggaatgataacagattgttaaggataaagtgagattctaaatataggacttaaatcagtctaagaaaaggatataaaagcataaagttggaaaagaacttagatgtttcagtttatgagttaagtaaattatgcaagactaataacttcagagttatctggagtttgtattaatgtgtaaaaatgtttttgttagttggaaaaatcaacataaagtgtatgtaattacaatgtaaagaaaacaactatcgaaagggataattattagaatcatataattatatattatatatagatagtatatatacagagaatataactagatagaatatatatgaatatatatatgaatttcacaaaaatgtaacaatgggtttggtttttttttctgaggaatcttggtaatagatcatggatttcagtttaatctatctgactgcttgttttatgctgattgatttaatctgtactcaccccttgagttttgcaattcaagtaaaagtcgatgaagcggctcaggccctgctttagaaaaatagttgtgtacttaaatagtgtaaaaccctaatgtatttcttttgaattggaaaataacttattctctc

SEQ ID NO: 38619 - DNA, 1035 bp, Homo sapiens
acatgtctttaatgtcttcagacaaaaaagccttacattaatttaatgtttgcactctgaggtgcaacttaacagggagggcctgagaaaagaatgggagggggctattaattatttttagcaaaatgttgcctttgtcttgtgcaaacatgtagaatatgctctttaatttagtaaaatatttttttaaaaggtagagatgctttgttattgtaatcataaacttcctgaaattcttgtaatttttttcccatacttatcagaagtgtgtttaccaacttatttttgtttgaaagtgtgattttttttttccttcccaacctctcttgcaaaaaaagaaatgggtttctgctaatgaattgagcagacatctaatattttatatgccttttgagctgtgtaacttaatatttggatacttgacaatttgttttattatgtaattgataaaatggtgatgtgtattaatgttagttcaaccatatatttatactgtctggggatgtgtggttatagttctgtgggagaaataattttgtcagtgttcaccagcttgtaaaaacttagtgcgagagctgaaacatctaaataaataatgacatgcatttatcatcattgagattggtttgcttaaaattaacttattttgtagaagacaaaatgaattgcacttcacttaatgtgtgtcctcatctttttacaaataaatgaaggattataaatgatgtcagcattttagtaaacttttagacaaaatttgttagggtcattcatgaaaactttaatactaaaagcactttccattatatactttttaaaggtctagataattttgaaccaatttattattgtgtactgaggagaaataatgtatagtagaggacagccttggtttgtaaagctcagttccactagttcatggttttgtgcaacttctgagcctcagttttctcctttgcaaattaataattacatacctttatagattttgaaattaatttaaatattagtatttggtacatgaaggcttaatgt

SEQ ID NO: 38620 - DNA, 1371 bp, Homo sapiens
tatatcatagtagttaagaactgaccttagtgtaatgcagagtggatctgagtcctggctctgtcacttatttattttgtaatattgggtgtaactttgctaaactttagcccctctcttgtaaattggggatgatagtacctgcctaatggtttggttgtgaggattaaatggcatgatgcatttaatttgtttagcacaatgccttgcacacagtaaatatccagtgagtttaaccttacaaacacatagggcagttgtaagcacattgactcttaaatgaaattttctgggttcagattttagctctgttcttcctgtaggagatagcttaaacaaacaaacaaacaaaaccaaacaacttttagttccatcacctactatggcaaattatttaaactctttgatcctaatttcattttatttcaatttttatataatcaggataataatataaggttgttttgaggattaaatgaattaaaaaatgtagagcagaatttcttaaacttgactgttgacatttttggctggataattttttgtgtgtgtgtggggctgtcctagtgcattatagtatgtttactagatgcaaatagtaccctttccagttgtgatggccaaaaatgtctctagacatggcaaatgttctctgcatgggcatactcacctctgattgagaattatagatacaaagcatgtagaacaatgcctgtcttgaagtttgagcacaagaagttttgttttatcattactggtggtagtttgttcttctactgctactgcctattaggaatttgtttttggtaagcatgcctgatgaaattgcttattttaaacgatggtatgggggctgaaggcatcaagtgtgctccacttttaagacctttgtacttctgggtctttgtctggattgctctttggcatttatgcattgatcactacctcacttgagattttggttcaaatgttacgctgtgaggccttcacttactatcatacatagaccaatcccccatcaccaccaccatcactattgccttgtataacttttcttgagcgatattagtctcctgataaatttttgctcccctcacaccacccccctacacacacacccacagacacaaatgtagactacgtgagagacaacttcatcttagtatataacctctttggcctttgatagctttagtgatttattgttaggtgtgtatgtgtgtgtgtgtgtgtgtgtgtgtgtgtgtgtgtgtgtgttttaggaaataataggatagaattcataggtttactttgaaggtgttttaaagtgagtttttgtaaagtgtaatttttttttttcgagacggagttttgtttttgtcttccagg

SEQ ID NO: 38621 - DNA, 1029 bp, Homo sapiens
attgtttcctttgctgtccagagctttttagtttgatctaatcccaattgtctgcttctgcttttattgcctgtgcttttgaggtctccataaaatttttgcacagaccaatgtcctaaagcatttctcccattttcttctggtagtttcttagttttggatcttacatttaagtctttaatccattttgagttgatttttgtatatggagagagatggggtttagtttcgtttttctgcacatagatatccagttttcctagcaccatttgttgaagagattattccttcccaaatgattgttttggtgcctttgttgaaaatcagttggttataaatatgtggattcatttctgggtttctttttctgttccattggtgtgtatgtctgttcttaggccagtaccatgctgtattggttatcatagctttgtagtatattttgaagtccagtagtgtgataactccagctttattattattattattttttgctcaggattatgttggctagttttttttttttttgtggttctgtgtatttttttttgtgtgtgtggttttggggatttttttttctatttctgtaaataatgttactggtattttggtaggcattgcattttttgctcaggattatgttggctagttttttttttttgtggttctgtgtattgttttttttgtgtggttttggggatttttttttctatttctgtaaatattgttactggtattttggtaggcattgcattgaatctatacactgcttttggtaggtaatgtggtcattttcacaatattcttctaaccacgaacgttggatgtctttccattttttgatgtgtgttctctttaatttctgttattagttttttttgtagttgtccttgcagagatctttaacctcttgcttaaatttataccaaagtgttctacatttttcggtgagtaggattgctttcttgatttttttccccactagtttattttggtatatagaaatgctgctgacttttgtatgtttat

SEQ ID NO: 38622 - DNA, 1028 bp, Homo sapiens
gtgtttttgtctggttttggtatcagggtactgttagccacacagaatgggttaggaagaattccctcctcttcaattttctggaagaatttgagaattggtatttgttctttaaatgtttgatagaattctgcagtgaagactgggtcctgggcttttctttgatgggagacttattattacagagacaatcatggttgaacatgaaaaatacaaatttaatacgtgtagccatgcagatgagatggaaatacattggttaagacaaagtatatactttttatcaaatgttgaacaagatgaactgatgaaccttgtaagcacatacataccctttaagaataaaaatttctgtaagattgatgattaagattacatatcattttgagttttacgtagagaggttcagatgaatgtggagtatgttttgaagagagcaaaagataaaagagaggtaaacacttcatagaattagagctgtaacttagggaagaagaggaaatgccaaaagatcgaaagagtatgacctagtagctgccatagatatttggaagtttatcatattgataagagatttgacttctttatgaataaaagggaaagacctaggtcccttaggcagcagttagagggaggcagagtttaagtggctaaaagggggaacttgtggttctccaaaatggaataataggttccctggctgggcatataggattttcgcttttgctggttatgacccgttgactgaggtgtttcagtggggattcaggcatcagatagttatttgtattaggtgaccttttttttttttttttttttcgagatggggctctcactgtgttgcccaggctggagtgcagtggtacaatctcagctcactgcaacgtccacttcccaggctcaagtgatcctcccacctcagcctgcctagttgttgggactacaggtgtgtgctgccacgccctgctaattattattattattatttttgagacagagtttcactcttgttgctcaggctgtagtgc

SEQ ID NO: 38623 - DNA, 1047 bp, Homo sapiens
gaaggcagggattgcagctatgtatgttattcataccggcactagaatagtaggcatttagtaaattttgactggaaaaacgcacaagaaaaaagtgggaccagataatgagactagaagttaagaaaataaaatgtttgatgcaggtggggtacaactttgcctatcagatttatagcaattactattgaagaggaaacattccaaggtgaagaatacaatgtcctgaatgtaaaaacaaatttagtatctaggaaaaggaaaataatttttgacactaaaactggaaagaaatttcaaccagtgtgatataaaaaaatctttaacataatttcaatgaacatagggctttttcttatatccctcaatatatattccagtatgagcagtattacaggggctaacatcatggtctgactgatccaatcccaggtagattttaagttatctttcaaacagcctaccttggatatcagttctcactagattttttaatatattgataagaagatgagttatatgatactatctgagaactgttgagaatgtaattagccttttgttttcttttgccctatacataagttttattgatcaccagagctgggtatgagattgcataaatttaggctctgataggagtgtttcttagaataggaggctgttctgctgtccttgttgtagagcaggggtccccagactgtgggccatggactagtaccagtttggggcctgttaggaacccagctgcacagcaacaggtgagctgcgggccagtgagcattaccgcttgagttccacctcctgtcagatcagcggtggcattagattttcataggagcgcgaaccctattgtgaactctgcatgtgagggatctaggttgtgctctgcttatgagaatctgatgtgtgatgatctgaggtggaacaattttatcacaaaaccaccccctcatccgtggaaaaattgtcttccatgaaactggtcccgggtgccaaaaaggttgggggccactgctgtagaggacagggccaaaattttcctca

SEQ ID NO: 38624 - DNA, 1066 bp, Homo sapiens
atatataagacatttgagtgcacaccagtatttttacgtgtatttatattacttgtcttactgttttactgtattaatgtattttgtataacaaatacagtagatattaaatattttaaaatgttgagccatagataaaatatttatacttttcaaattattaactaaaattattagttgtataagaacttacttggaatgcattatgattgcacatgcttaattagttttggaaatttcatcttattttgataaaattttttacatatctggttccaagttgagcttgatactgggttttaatggctatcatagctgaaaaagataactcgattatacatacatttaaatggaagaaatttattgtagttattgtacaataactacaataatagaaatttattgtaagttataatcttagttttttttgttttaaatacagaaaagcttttattttagttaattagaacatttctgccatctttcagtgtgcttgttttttaaaactactaggaagtggttacattaaataattattactatatgagatcaaaattcactgaacttttttatttgggaaaatttttaaatgtccagattaaaaacattttttaagtgccacatttcattttttagccagataatacgtaacaatgaaaacatacctaaacatcaattttcttagcccgagttttttctttttaaagtaagaaaaagagtttctttcttatcactaaaatatcattttatctagaagggacagattaaaggtgtgtattttctcatatgacttatcacatctacttagaaaaggccagcacgtttctaacacttgtctcatttgtagaacatttattttgtaaaccaaaaatgtgtaatttattaagtataatagctcttttaagtcctttgctatgaattaatggataatttttttgtggcataaagattttaataatcacttcctgtttcattaaaattactgtttcgctttgtggtttttttttgttttttttttttttttttgagacagagtcttgctctgttgcccaggatggactgcagt

SEQ ID NO: 38625 - DNA, 1033 bp, Homo sapiens
tgtctttattaagatactaatggcgttttaaacagtttttgtctcctttcatagtttctgacttctcaatgttgcattattttaaaaaaaatgtttaaaaaggttttggcctccatctttcctagatgctctcctgaaatgtctgacccttgattattgctcatgtttaagggtagggaactaaaattatgaaacttctaagtgtggggattgggttttaccagctatgagcgtcagtgtatagcaatctggctgtactgttgtttggcagaacccttcctatcagaatttaggttattttccataacttattagattgctagcatattatggaagcctgtaagggaaactgactggggtttctcagatttcagtatatacaaattcacttaatcttacaaatttcaatgtactttacagccagtctcaactgtgcctcatgttctttagcctagaaaccttgctttactatctccagagaataagctacgagttttggctcaggactagggaagggcagttgcccaacaaatggagtaggggaaagagggatctagaaatctaactgctacttttaaagagctttcagcccttctaagtgttaagcatctgtcttcattcccactttagaatcatctgggaccaccaagtcttaagacttttgaggtgttaatggtgttagtttttgccaacactgccagcctagtgttttattaattacttttgggtctcttatgtcaaatacttggtaatcatctcttgtttggtttccaaaatttgctgctggtttttcctctctcgttcttccttgccttttggacttttcaaaaaatgtcccgctgttatagcttcagtagggttttgagaagtgaataaatttagatccatgtatttatttcatcatcttttcttgatctatgtttttaatacattttcaaaatcagttatttggtatatacgtgtggctttgagaaatgaaaagaatagaataaacattgtaggaaaataaaacttttttgcctatagaatcagg

SEQ ID NO: 38626 - DNA, 1489 bp, Homo sapiens
tctttagcactggaatatatttggttttatatatttagaaatatttaatgtttaaaaatccatgatggtcttgctttaatatgggcattaatggtaaaggaagctcattttacttacgtcactcctaggttactttttatggaaaagagatttgatgaaaacatttcttttaataaggtataatattagtctgaattttttagaggcttttccccctgctagaattcagagaactttgataaatataaaatttgacatatgttaaattatatatatgtgtatatatatcatgtcaccattatgagtactgttcaatacatttttgttgagcaaattatagctcagaataaagaagtgatatattctaaattgtattgaaataaaagcacatgacaaaatagctaagtatttttatttattttttccccctgtgatagaacaagtaagaagtttgcgacagagcactattgccaagcgttcaaatgcagcaccattaagtaacacaaaaaaagcatctgggaagactgtatctactgctaaagcaggagtgaaacaaccagaaaggagtcaggttaaagaagaagtatgtatgtcactgaaacctgagtaccataaggagaatagaaggtgcagccgaaatagcggacaaattgaagtggtacctgaagtatcagtgtcttcaagtcattcttcagtgtcatcttgtcttgaaatgaaggatgaagatggattagattctaagcataagtgtaataatccgggagaaatagatgtgccatctcatgaattaaattgttcacttctttcagagacttgtgttactattggagaaaagaaaaatgaagctttgatggaatgtaaagccaagcctgttggtagtccattgtttaagttttcagataaagaagaacatgaacaaaatgattccatttcaggtaaaacgggtgagactgttgttgaagaaatgatagcaacaagaaaagttgaacaagattcaaaggagacagtaaaattatcccatgaagatgaccatattcttgaggacgctggatcttctgatatttctagtgatgctgcttgtacaaatccaaataagacagaaaacagccttgtaggtttgcctagttgtgtagatgaagtgactgaatgtaatttggaattgaaggataccatgggtattgctgataaaactgagaacacccttgaaagaaataaaattgaaccgttgggttattgtgaagatgcggagtctaataggcagttggagagcactgagtttaataaatcaaacttagaggtggttgatactagtacttttggaccggaaagtaatatcttggaaaatgctatttgtgatgtgcctgaccaaaattcaaaacagttgaatgctatagaaagtactaaaatagagtcccatgaaacagcaaaccttcaggatgacagaaacagccagtcaagtagcgtttcttacttagagtcaaaaagtgta

SEQ ID NO: 38627 - DNA, 1031 bp, Homo sapiens
gaacctcatcatcctgcacaaactggacatgtatcacattctagccagaaacagtgtcataagcctcagcaacaggccccagcaatgaaaaccaatagtcacgtgaaggaagagcttgaacacccaggcgttgagcattttaaggaagaggataaactgaaactgaaaaaacctgagaagaacctacaaccccgccaaagaagaagcagcaaaagtttttctttagatgagccaccattgttcattccagataacatagctaccataagaagagaaggctctgatcatagctcctcatttgaaagcaaatatatgtggactcccagcaagcagtgtgggttttgcaaaaaaccacatggcaacaggtgtgtgtgtatgtgtgtatgagtgatgtgtacattgaaaataaattgcttttttgggggtgggattaatgtgagaattgttttaaagacattatttgatacacagagacctgtgcaaaaacaaaaagcttcatcagtcttggataaatgatagaaagatggatctactgaatttacaaatatatcatcctagaacatttaaaaaagcatagtctggccaacagctgacatacatggaaatattttgtcattgtcacaggttagacagtgtaatttagccactgcatctgcaaaaaagccaaacacttcctggtaattggaaaattgttatactgctttgggtctgtaagttatatattaattcatttggtgtgagaagaactagtaataaagtatgaaggtcataatggaaattctatttttcttttgaagtttttttttttcttaaaatgaaacatattaaagaacaccatttcataactatcaaactttatcttgcagtgaaatttgacagctaaacaattgttagattacccaggtcaacatgaaatagagtgaaaaacgtatttctttttttgaatgttttaaataattttttgtgaattctagtctttttaaaatttgagatgattttagcactgactttcatcattctttctagtattc

SEQ ID NO: 38628 - DNA, 1016 bp, Homo sapiens
ctagatttttattgcttccttttattttcctgattcaaacttacatcaaaggtgtatgattttaaagaccagattatttaatcctctgatttttaaaattaatgcaacttttgaacttcttttaaacgtaagtcagttggcattttgtaaggaggaagtcttagttttttcatgttatttaccttgtggtttctgtttttctacttctccagaagatgcttgagtttttagtttgcattacactttcttggccccaattgtagaagactagtatatcagataatatttaaaaaacaaacagacttagaaaatggatttatagctttcaaacaagaaaacttctgagaagaaattttcttctagaacaaatgattctatttttctctgcagattgttagtaacaaaaatgatttaatgtttatgtgacatagaattctctgatcttagaagagtgagtcttttctctctctcaaaaactcttaaaactgcattttttaacctaaaatataaactattaagatacatctgtagatggcactagagttttgctttttatagcctctcaagtttgaatgagacatttccaacttgaaatgaggcttattgaaagaattgcttgataaatttcacgatcatcaaaccactcttccctggttgtgaaataaaaatgtgaaaattccttaatatgtgctttatattttgacctttaggtttggatttggaacaatagcattatttgtactgtaggtttttaagtcatgtctcactgaaactatcccagacttgctttgaagaaatcttaatatacctttgattgtggaagtaaagggaaatcattagctttccttcagcatttcagaaacattcatgttagacagttgctttcaagaaatagcagttagcccattgttaggaaagctacaatgctcattacaaataatcatttttaatattttagctttgcaactcgaagtgggagaacttttaaacacctgcatttcaagctttattccact

SEQ ID NO: 38629 - DNA, 1023 bp, Homo sapiens
aggtcttaaaggtatcattttaatagaatattattttctttgaaaacttgctgtatgttgaacttatggaacggatagagatggaaaacatgcaaagtttcagaaaatcagatattgaaaatttaatttagcctcatttttgacatagattttcttgttaaaaaaagggataaaagttttttggtgttctgttttccaggtttatggttggctgtgggagatgtgatgactggtttcatggtgattgtgttgggttaagtctttctcaagcacagcagatgggcgaggaagacaaagaatatgtctgtgtaaaatgttgtgctgaagaagacaaaaagactgaaatactagatccagatactttggaaaaccaagctacagttgaattccatagtggagataaaacaatggagtgtgaaaagcttggattatcaaaacacacaacaaatgatagaaccaaatatatagatgatacagtgaagcacaaggtcaaaattttaaaacgggtgagctcttcattaatgcattattttgtttatttaagagctttttgtatggactgactgcaataattttgaaatttctctttagaagttttaatgttcttttacattttcaaatttagttttccatgaaagtgaataggtttttatttaaaattttttgtcagtcttggtgaaatcagatggtgacttttagaatatgcaggccttatctcttacagtcttttttgccatttctagcccctagtttggtacttgaattttctgttgtaggatgtgtgtggatcttgtggccattaagtgtaaattgtgcttgctaagttgttttaaaaaagcttttcagtccataaatatctaccagccctttgaccatttggcattatttttttgactaccttctgaaagtattttctaaatagaaatttcaagatatttaggctttaataggagaaatgtataaaggacacggcattttatctgattaaattttctttcctcattgtctacctttttattacct

SEQ ID NO: 38630 - DNA, 1050 bp, Homo sapiens
tatgtggttaggcaagtataatccaaaacgcaaagaacatgaatcttagagttggagctttagaaatcttttggtccaatcattttgatttattaatatgccttacaacatttctaggaagtgatgatctagtttctgtttgaaatccattgcaaggggatacatcttcatttttaagcatctaattgtcagaaagttgatcagtttgagctgaaatttgcatccctgaattgaagcctccttattaaaacttaatttctctgcaacacgatatggaagttaatttagattgaagagcatgaggatgtgttctccagaatcttacctattaacaaatccgtttctttcaggcattccttgtacgacaaatctggattaagttctagtttgtcatatccttgtggcatctaatattttttgtctgtcaagactttttgaaaatcagattctgtccttctgatacgtgttattactttgttgatttgatcatcaaagtaattgataatatggatctgagagccacaatgagaacagtttatagcatgtctttggaaaacttctatttattattaactagtattaataatcacctcttacgtacagcttcttggccatatacatatgcagtacaatgagaaatatagctcattgtattgaccatagctgagttgtctctgtcttgcttaaaaagacatcataaaggctgagtgcagtggctcacacctgtaatcctagcactttgggaggctgaggtgggcggatcgcctgaggccaggagtttgagaccagcctgggcaacatggtgaaaccccgtctctactaaaatacaaaaattagccgagcatggtggtgcatgcctgtaatcccagctgcttgggaggctgaggcaggagaatcgcttgaacctgacggaggttgtagtgagctgggattgtgccactttattccagcttgggcaaaagagtgaaactccgtctcataaataaatgaaaagacatcataaaacgttaacaattttaacattttgagaacctctttatccagtctgta

SEQ ID NO: 38631 - DNA, 1033 bp, Homo sapiens
ctcccaaggatctcagaattccagttttactggtaattctttgtggattataattagaaccagagtagcaggtactctgatggtttattctacctcatgggaattaaaattgccaataggcatactgagaacttaattgatacacttgctagtatataagtgaacttaatttcatttgttttagaatatagatacttgtttctttacaatttcctcctttttccatatccagagccaaataagagaattcttactaccttatttttaattttctttctactaatggtattgggaacatgatctctatgtcctttgtttctcctttataagctattatgtgttctacacaaaataggtgcagaatagatttcgaatgaaagagtgaatctcattttactaataatcaagagttatttttgtacgtcttaaaaaacaaagattgtttagttattttcattctaatgaattaagtactcattttccaggagtctggtgaaggcagaaattcatcagactgtagagataatgaaattaaaaaatggcagctagctcctcttcgtaagatgggacaaccagttttacctcggagatcctcagaagaaaaaagtgaaaaaataccgaaagagtctacaactgttacttgcacaggagaaaaagcttcaaaaccaggtagtgagatgaacagaaaaaattatatactaatatatttatatcttatttaagatacaattaattagtatacttagggaatttttacaaatttaacattattaaatgttgtattgccattaaggcaatacaaatgggttaggtgattggccttacttgtaattaaaaacttgctctaaattctggggaagcgctagtgaaattaagataagacccctcttctcatggcacttaaatactaatggaagaaggcagtaagtttgcaagtaagaaaattgcatgttattttacagcttgagaagaaaaagtggagtaatgggatggatagtcacaggtgggaagagtaatgggacttctgttttac

SEQ ID NO: 38632 - DNA, 1008 bp, Homo sapiens
ctaaaggctgtgcatgtgtgtgcgtgtatgtgtcagtgttagctctcaacaccaaaagtaggtctctgataagtacaataagcaaaaatcatgccagcgaacattttaaaggttcagaacatgactgatctcttgtgtgtgacatttacctaggtccaccagcagttttttgctatagattactctaggtaacagaatgtgattagatgcaacctttttgcataaaaggttttcacacaactgatataaatttgtataaggatatttgctacagtaggtgatttgaggtattttcttgaagtacactaacagagacttaaaattgtacattctgccatcatggtcccgaggatcagatgcttctggaattacataatctggaagcttttcttcagcaattaaataaagatttatttccctcaggtttttttatcttttttttggagacagagtcttgccctgtcgcccaggttggagtgcagtggcgccatctcagctcactgcagcctccactcccgggttcagatgattgtcctgcctcagcctcccgagtagctgggattacaggcacacgccgccacgcccagctaatttttgtatttttagtagagacggggtttcaccattttggccaggctggtcccaaactcctgaccttgtgatcctcctgacttgccctcccaaagtgctggcattacaggcgtgagctgcggcacccggcctccctcaggtttctttcaggtttctttcttgcaggtggttttttgctctgcagtttcctccaagcctgtcaggatttaaatatgtaaaatcttaaaactatgaagaccattacattgagtaaagctctttgatgcagtacctcgctatactatagattgcttattgttatggttatattgtgtccctgggtagacttaatacaacttttgggtaggtattgtaatggttctactgtacatgcttctccatatatgttgatttttatatgaaatgtgtgttttgctg

SEQ ID NO: 38633 - DNA, 1045 bp, Homo sapiens
cgcccacctcagcctcccaaagtgtggggattacaggcatgagccacctacatgcttcttttaattacttgttctccattcctctagttcttaaattctgttggtttctctgatcttgtcaggtttttttctcattttctccagttactaggttacagaattaccttgtgttttattatagtttgtaaatgagaaggatgggaaaagaattaacatcttttcataattacatctgtatttttcagcagcacagtttgaaggtattatgaatattggtaatttgtagagccagatgaattaagtcagaataaaaatgtgtacaggcttatctcttatccaaagtttcaaatgccaaaagccctgaaaaataaagttattttcgcataactaatttattgataaagcttaacctgaattgccatgtatgaatgttcatattcacagaaatattgtatatttaattacgtgtctcagacctaactggaatgttatgtaatatagagtgtgtgcaccatatttcatgtttaaatttaaaaattctgaaactcacagatagcaagaatttttgtttggagattgtgaacttaaaggtatttaaagtacctttaaaaattaagtatgttacttagagccattgtgacagtgagatagccatgttatccaatttttgtattacaatggcatcagaatgttagccccttattctagaaaatactggttgtagttcatattaactctacatgatttatctgattcttttgttcataatatttagttacatctcaggcactaaacctccatatagacctatgccagatctagtttgaagctcatctagaggccttgatttgacatatcatacttcttcatacattcctttaccttcaccgtatgtaatttctcctcctcttatattttgaaaataatatcacctcctcttccttccctccatatctcaaatatgcacatgccactcttctgctttgaaactggctgcgagtaacatctgtatcagaaaatgccagcttgttctttcttaaggcca

SEQ ID NO: 38634 - DNA, 1032 bp, Homo sapiens
acgttaggaaccagccgccaataagtcattggagaagccagaaggatctgaaaaacaaaaagaggaggttgactctatgtctaaagataccactagtcaacacagacagcatctttttgatctcaactgcaaaatctgcataggtaattggaagtttttcttcgtaaaattttgcattcattatgaaagaaggatacttagatactagtatatgtaatttaagtaggttttgttttcccaatattggtggtgaggcactcactcacagtctttaagctttcgtgtgactggttttctgggttgaggtatagtttgatactgtggtatagtctactgtctagacctaattatactatatatgatttgaacttaaaaactgttcttgctggagtcaaatgacaagaatttaaccattagaatgaacatcaaacattgtgggcagttgtgatgatactgtcatttactaaagtaaaggagtaaaatagcatttatattttattatatataacataagacaaatcagaaactgaaattacttttttgtaaaaaagctttttatttttaagagcacttttaggttcatagcaaaattgggaggaagttacagagatttctcacatacctgctgcctccctacgtgcatagtctccactgttagcaacatcccacaccagagtggtgcagttactacagttgacaaacctacattgaaaaataatgaccccaaatccatagtttacattggcgttcactcttagagttgttcattctgtgggtatggacaaatgtgtaaagacgtgaatctagcattatagtattatacagagtattttcactgccctaaaaatcctctttactctgtctattcatcccttcccccaacacccccaccagcccctggaaaccactgatcttttcattgtctctgtagttttgcttttttcagaatattgtgtaattggaatcatctagtatgtaacattttcagattggctactttcacttagtaatatgcatttaagcttcccctat

SEQ ID NO: 38635 - DNA, 1025 bp, Homo sapiens
tatctggctccccagaatacctgacagaggtactgtgaacttttctgcttttctgtgcatgaattgataatgtgtgtttctgaaagtaattgacagggaaataagacagagttagtaatagaaatatttattaacaatgatttttaaacagtccaagtaatataattatgaattaacaaatggatctttagaattgtaaaataaactattctctgaaagttttaaactcctatgtcctgcacttttcccaagatgtactgcctcactgtgtcagataattcaaaatcaatgagagtctacatggatatccaagtttttctttgaatacacacttaaataaaagatttacatacttttggtctttaatgttaacacattaagaattttttgttaaacagatcttctgatttccccactgcttatgtttccccatcttcatgactactgttcttacctgcctatttctgtgaatgtggtttatgtagactgggagttgaagctttacagctagttgaaaaccagtgagactagtgactgtagttgctgcaagtgatacccttggttggttctacacctgagggaaatagaaagaaactattatgtggtatttatggaaaataagcagcagtaacattataatattgtgataaatgagacagtgacatttttgaattattttgaaggaaatgtatttttatatgtgtatagaaggaaaataaatcagtacatatatactgtatttatgttgagatcatattttgctatcttgttcgtatctgacctttttcatttattctctatctgctgattttaaagaattaaaagattgtaaaaaaattccttttattatttgaaaaagcctaaatcatttgcctgtcttttttttttttttaaggctaacataaacttcacttttctttggattaggctgcaattagtttaattcaatgtaatactgtttatgtaatattgatcagtttatttggttagcagttgtgggtttgtttttgtttttgtttttgttt

SEQ ID NO: 38636 - DNA, 1031 bp, Homo sapiens
atcacctttacttccagaagcaccagccccagaacaagtacaaacttttcacccatgaggccacagcagcccaaccttcagcatctcaagtctagcccacctggatttccatttccagggcctcctaattttcccccacaaagcatgtttggatttccaccacatttgccacctccattacttccccctccaggctttggctttgctcaaaatcccatggttccctggccacctgttgttcatctcccaggtcagccacagcgtatgatgggtcctctctcacaagcatcaaggtatataggcccgcagaatttttaccaggttaaagacattcggaggccagaaaggcgccatagtgacccttggggtaggcaagaccaacagcaactggataggccatttaataggggtaaaggggaccgccagagattttatagtgattcacaccatttgaaaagagagcgacatgaaaaggaatgggagcaagaatctgaaaggcatagacgcagagacagaagccaagacaaggacagagacagaaaaagcagggaggaagggcacaaagataaagagagggcacggttatcacatggtgatcgaggaacagatggaaaagcaagcagagatagtaggaatgtagacaagaagccagataaacctaaaagtgaagactatgagaaggacaaagaacgagagaaaagtaaacacagagaaggagaaaaggacagggataggtaccacaaagatagggaccacactgacagaactaaaagcaaaaggtaaaatttgcaggctgcttcaggattacatttaaataactgttaaaatgttgtatcttgtaaacaaaagaaagattgcctgctaggattgtgccatctttaaaatttttactattggtcatttgcagaacagtaaattctgtgtgttggtacagagtgctctgtaccagtgctcatcatcccttcttcataccaacggtccctagttataggaatttaatatttttaaaagttttacattgctgtatattc

SEQ ID NO: 38637 - DNA, 1046 bp, Homo sapiens
taaagtcttagtgacctttgtgtaaggttgtgggttttgtaggcttttgtgattcttcttcttatcaggcatttatgcatcagaatcctgtcttcatcgctttcccccactctattgtcaggtttttgccttccttcctttctctgtctctttctttctttctttctttctttctttctttctttctttctttctttctttctttctttctttctttccttctctctctttctttccttcacgcaggtgactccatttcgatttagacaactttcacaatatgtaagtgaataggtgtggctgcatgccaataaaacttacaagagttgggtatatggctctggattcaccctgtataccaacattattaaatgctgagaaagtaggagtggcctgagaggaagccgagggagtcctcaatggagagcactgaagtctagcaaagagcccttgagcaaaaggcaaaaatgtgccccactacccagagatgcccaggctttgaaatgactgatggacaaaaaaaaaaaaaaaaaaaaaaaaaaaaaaaaaacaaacaagaatttgaagttgatgagtcacaaataatttacaagtttatttaccatttctatgctaaaaggaatatgcaaaatagctaagtaaagtttctatatacatattacattattaaaaactaacaagttcaaaaatgaacacataaaatgctacatagttactttcttgactggccttttagtctgtgtacttttgagtatcaaagaatctttctctttaaaaattaagtataaactcctaaggtgaagaatgtttcccatctaaagctctgtgtgaggatacttctggaacttggagatcttaacctatgtaatggtgatggtggagatcgagctgttagaactctctcgggcactgtggtccttggagatgccctcctaagctgctttgtttccagggaagtgatggctacatgttactctccagcaatcctattctttttctctgtcctgaacatttcaatcccagccttttgggaaagagataataat

SEQ ID NO: 38638 - DNA, 1114 bp, Homo sapiens
gagatagcgccactgcactccatcctggtcgacagagtgagactctagctcaaaaaaaaaaaaaaaaaagcagtgttcccattttttcttgtttattcacacttctgtattatttttgttttattcttgtccagtgttactttacctttttttgttaactggtgttctttttcccaacctgatatacttgatattcctttgtcagatgtattggcaaagtaggatgtgtacaggggggctgaggggaactagtaacaaggaaacaaagagcctttatttttttaagaagccttttttaaaaaatgcaaaatgcctaaaggctcttgttttgattcgtttatgaaaggaaaacaaaccagttctgtatctatggtatattgttgctctttatcttccccaactctaaccttgaggaaagaactgccatgagctttgtcactatttgtaaagaaaattatttttcttaacgtatgttggagaagactgctaaatagaacttgtatcagactagacagattttaatcgtgactttacatgcaataatgataataatttcatgtatgataattctgaagatatgaagaaataggaaaaccaaagcaggaaaaatggacaagtgatatgttacaatttctcaggagacaccacttgctcccgttctctttttatctcactcactatgtgatctcatctctcctgtggttttgagaggtgaagccaactggacttcctgggtcaagtggggacttggagaacttttctgtctagctaaaggatgataaatgcaccaatcagcactctgtaaaaatgcactaatctgcgctctatgtctagctaaaggattgtaaacgcaccaatcagcactctgtaaaaatgtaccaatcagcgctgtgtctagctaaaggactgtaaatgcaccaatcagcgctctgtgtctagctaaaggattgtaaatacaccaatcagctatctgtaaaaacgcaccaatcagcgctctgtgtctaaaggattgtaaacacaccaatcagcactctgtaaaatggaccaatcagcactctgtaaaatggaccaatcagcaggatgtgggtggggaaaaataagggaataaaagctg

SEQ ID NO: 38639 - DNA, 1043 bp, Homo sapiens
aaagcaatcaccactggcatgaataagtactgcatgaaaagggagtatcaaattccagttttgtatgagttctgcaaaaaaagcctaatattctgtggtcccctcactcagtctctcatttggtaaacagaaagctgttttccctacaaggtgcttggtggtgaagccaccaagctgtctttggtactcttaaagcttcagtggcctagcaagatctttgggcccttgtatccattatccttatgacctcatcaccctcagactttaagacaagaagccaccatcaaaacaaaggatgggatacgtatagaatggactcacttgtcctagaagatgaatgtgtagtgtcagcaaatgcatgttaagaaggtgaagcccaaaagctcttaaggagaattgtatttctccagaagctgcagcaagaggtacagctcaacaaaggaaaaccacaggactggatatgcaactagtgctcagaccaaagagttcacacccactctaaaaccatgtcctctgaaaagaaacaaaaatacagtgatcatcaaatgcctaaacagtctttctgttggttagctgtacattcattgaggaactgttgattggcaggcactgattctctagaacactgggcatgaggatgttgcagaaatctagatggtgggtcccacagatgtgagaacatgctgcaagagcctgccagccacagcaatcaggactcacagctcttcaaggagcagtgcagatttcaatttggctaaaacaggatgattgcttttgtctgtttactgaaaaatgagtttagaaaggctagcccactgacattggaaaaagctgtgaacagagttgtgtctgaggaatgtgcctaatttaaggcagggtttgttccaatgcatccgtgatttgaaccggttttcattatagattaatgaactgctggtcaggtactgtctacaatggctgtgcatacctataacattttaggtatttcatattgaattatgctgtatatttcaattccaagtttatttattttccaaggttat

SEQ ID NO: 38640 - DNA, 1617 bp, Homo sapiens
tgttgtttctaatgagtctttaggttggagcttggctgatgtcatcgaagcttgtccacgcgtttgtggtcagctgtggactgattggtctaagatggccttggttgggacttctcagctctcctccacataatctctcatcctctaacaggctaggctgggcttaaacaactcttagctttaattgaattagaaaattgtatttttgcttagacttatcgggtgtaatagattattcaatgttaaaaaaagttattttaaaaaatctgtgcttgccttcagaaaggaataaacagattactaatgtatttacatgataattaatttttactataattacattgttttgccttaatggtaaacagaaagctcagatactaacaatctaaagaaaaactagttttattttaattttactctattctatcattttgtttaatagagtggatttttaaactctgaaaacgaagtcaaaattgtaaagcactgatcataaatatgatgctattaaatggaatgtggatgtatgtcttataaatgagtaatataaattatcttaagatttgtattatattaggagtatctaattacaagataatagacttcccaatgacttcattcaaaatacatttgtcaagaggactccaaaggagaaggaaatattgccctttaaatagacacagaaacattgctatttgaacacctgttctcattggcataaaggataagaggatggaattaaattatggttgtagtaaatttcagttaggttttaaagtgggggaaatttttctttgtttggagatgattgcaaaattgttgaagtatctttttctagaatgctttaggtcagtgctattctcagtagcttgtctgcagatggtttgtgactggttcaggatgaagcactgttgccagaatggaaatgaatgctgctttcttcattaaattttgctaccaaaaaaaagttagttaaaatagtgtgctttgcaatatagttgatttactttattttactgcagattggtaacaaccatttcacaaaaatgcacccgtctgtgtaccatatttgaagtagtacagctttagaatattagcaatggcatcttgagtggagttgggtttcattcattttgaaaagcggcaaatatttagaagacatttagaagaactttgacaaagtgctatgctttaatcttttatcagactttgcaagtgaaatgttatcagtttgatttgtttccacatatcgttggaacagtcaataatccagcatgctactactaataaattaagtagtgaggaaaatattgttggagtcagaagttgaaagtagtactttgttctttatttatctggattactgtagaacagttaattgaatacctgtagctactattacttttcttaatcatatactgccaccatttccttgtcataagataaactactacaaagaacatattatgatttggaaatggaggaaagtaaggatatagatttagaaattatatatatacgtgtgtgtgtgtgtgtgtgtatatatatatatatatatatatatatatttttttttttttttagatggagtctcactcttgcccaggctggagggca

SEQ ID NO: 38641 - DNA, 1050 bp, Homo sapiens
tccatatggggttgtgccatttttgatctcactagtgctgtggtagaattcctgtttgcccacatgcttgccatcatattacacccatgtgccatttaactacattttggtcagtgacagaccgcaaatatgacagtagtccaataagattataatggagctggaaaattcccatcacctcgtgatggtagtagctttggtaacctcctagtgcaatacattactttttctatgtttagatacacagatacctattatcgtgttataattgcctgcagtatgcagtacagtacaatatggtgcagatctgtaacttagcagcaatgagctatgtggtatagtctacgtgtgtagtataaccagcaggtttgtgtaagtacactacattgttcgcacagtggcgaaatcaatctaaggatgcctttctcagaatgtattcctgttgttgaatgaagagtgactatattttgttagattgttggatttctgtcagtctgatagttgagaatggatatatttttgtagtgaaaatttatagtttttaaaattataagtgaaagtgaactctttttgcatatttagagtcatttgcatttctttttctgtaaactgtttaatcataccttttttttcatctttctattggttgattggtctttttcatctcaattttcttcttaattaaggtttgctggaatatatcaacagatggcctcagaacaaaagcagcttaattgctttgcctaattcactatgattttgccttcctttaaattttccttggtaattccatactatcttgtcagctcttcagtaattttacagatatactttttatactttatctgacattgtcttttagcaagagattgttctgaataacctagcccaccacaactcttaaaatggaagtgttttctttgatttttgaatttttttatcgcttacttcatattttgtttttaaaaataggtaacttatccacattttaaatttttgggctgggtgcggtggctcacgcctgtaatcctagtgctttgggagggaagc

SEQ ID NO: 38642 - DNA, 1051 bp, Homo sapiens
tatatagtagttctatttttattatttttattttttgagacagggtctcgttctgtcatccaggctggagtgcaggggtgcaatcaaggctcactgccctcgacctcttgagcttaagtagtcctcctacctcagccccatgagtcacatatgttttgtacatatggagcctaactttgttgcccaggctaatcttgaactcctggactcaactgttcctcctgcctcggcctcctaaagtgctaagataacaggcgtgagccacacactgtgtgtggccagtcgttctatttttaattttttgaggaacccccatagtattttgcacagcagctatactgtttcacgttttcaccaacagtacacaagagtttcagtttctccacatccataagtgctgatcatgttcataatactaacatgaagtaagaaataaatgagacaaggtccttgccttcgagaaatctccatttcttcctcctgaaaggctcttcccttttatcttcatttgactaactctttttcatggtgtttcaactcaaatgctatgttgtcaacaaagcctctcctggtttcacagcctaagttcacccccatattgtaagatgtcatagcactctgtcttctgtacacttagtgtagatgtaatttacagaattaggtgaggtcagggaaaatggttggtttttttgttcagtccacttagctgagaaaatccatggcacaaagcagctatatagtgaatgtgtaactttgcattatgaaatatattgcacattttttgacgattacataacacagtattttattaaataataaaatgaacacccaggtacccaacctttcatttaagaaatagaacattactagtactgtaaaatcctcctgtatacccctcttgacgtttgtgttattcttttgctttctttatagttttatcattatgagtgcattttgtcagtataactatattccaaggaaatatctggttgagtttgaaaaaaattgagtggcaagcacaaacccagctgtgtaagatagcataaatatc

SEQ ID NO: 38643 - DNA, 1038 bp, Homo sapiens
tagtcccaactgctagggagcctgaggcaggtgaatcgcttgagcacagaaggttgaggctgcagtgagctgcaatcatgtcacttcactccagcctgggtgacaaactgagaccctatatctaaaaaaaagaaaattaaaaaaaaaaaaagagtggtacaagtacagctattattataaaagaaaaggggacatactataaaagctgaatgtctgtccttcagtctaaatgttatataaataccatgctatcaaaaataataatttaatctacttgttataaaaacccactgtaacagaaattactagggccacatttcatgtttaaatttattgtataaacaactctcaaatattaccacattttttatatgtattagaataaatttagttgacagatggttaagtattttttctttatttttccaagtttcacatgtaacattttgtattactgacactctgtatcctacatctgttttttgtttagggttgtagcttcatcattgcagactccttcctacatcatgcgtatcgttttcattatacactttgtgccactttgctgctagccttcaagggattgcacagctacttcattacagtaacagaagagattccttcttgtcagaaactagaactgggtatgttaaaagtagcgagacttattctacagttcaaatcattctcttcagtcttatattgctagctatcagctttgccatagtttttctatactaaaactacagtgtttgtgtgcttcacttctctatcaattccatctttttctaccttgataatcactttttgcaatttaaaagtgtttttcagaatactaaaaaataacttcttggtgctaaatgtgaaatgagtcttttaaaaaaaacatgtcagtaatctgttcctcttaaaatataacccaaaaacatgttagaaagcaaatgtaattatctgcagaatcataggaaggtaaattaaagccatacttccaaatattttacagtctaatcagattgtaggtacttagggcatttttgt

SEQ ID NO: 38644 - DNA, 1023 bp, Homo sapiens
actactcaactctgttataacatgaaagcagccatggatggtatatgaataagtgaatgtggctgtgtttcaataaagttttatttacaaaaacaggtgttgggccagatttggttctcaggctgtagtttgccaacgcctacattataaagctaagaggagagttgatacctcttccacaaaataaaagtctgtttgaaggttatttttagtgaccagtagaagtaaaggccagtagcaagaaatagttttacatgggaaaggtaatcttcagggtatttttttctcttttttttttattttgttttttctttttttttttttaatttttatgtttttatttagttcccgcaagcagacagggtatttttttaaaaactatgttttactagagaaaaatattatagttccattaaattgttctgtttgtgtcacctgaatggaagttctgggaagagaatggtcgcaaggattagaggcaactttatagcttgatattcaatgggaaggaagctattctgggtggactaggaacaagaaggtaaacttaaaagagcagctggtgaacacaactttgagaagaagggacaaagaaaggggactaagacaaaaatcaggtttgtggaaaattagaataccaaagataaactttggaattttacctagcgcttcccttttctcaccccattccagataccaagatagggcctattttaattgctaaatgaatcatggaaggataataaagacaaaataagaaaatgtcctaatgttactcaagcaggaataagctttgcccttccctgcagtgtatcacaaaaactgtggacatggtagcatactgtgttatctggctcccatttatgcaattcaagaggaaccttgctaataaaatatcttgttcttctgagaatacagtgctaagcctacaggaactgaagtagtctaaaggtcattcagtgtttgtacagggacagacttagctacaataaagtatataggctgtctgataacgaattcaga

SEQ ID NO: 38645 - DNA, 1035 bp, Homo sapiens
attgtttggtgtcgtcagtctttaactactatagtaggggtaaagtggaatttcattatggctttattttgcttttctctgctgactcctgatattgagggtttttgttatgactttagttttgtaaaatgttaaattaggttgcctttttattactgacttattaagattatttatatatattctagttatggatccattgtcaaatatatttattaaattctcctagcctgaggtttatattttcgttttctcagtgatgtattttgatgagactaagtacaatttatctttttttcttttatgtttagtacttttgtgtcctaagaaatctttgcccaagtcatgaaaaatattattctgtatttgctttagagagcattagaattatagatcttacatttaggaccatgggtcatcttgaattaattttttaatttggtgtgaggtgtatgggtcaagattctttcttttttttttctgttcaggtttttgacatcatttattgaaaacacttttctgactctatggaattgccttaaaatctttgttgaaaatcaattgactaataagcatgagtctatttcttgaccttttttcctgttgcattggcctgttatacatctctatgttaataaataccacactaactttattgttataatattatactaagtcttgcagccaggtaatagcataagtcctccaaggttttcttcttttttgagattgttttggctattctagatctcttgcaattctatataaattttaaatcaagtgttaacagctcttttagaatttgtctagcaggttttctggtttttattggaaaaccttcctccacagaaaattttaaatcatgtcaatttcttttttttttttttttttaatcctcttgggatttcagtttacattaagtaaaatctatagatcaatttagggacaattacctccttaaccatattgattcggacaatttgtgggcatgatatagcttcctatctagctccccttttatttagaccttcaatt

SEQ ID NO: 38646 - DNA, 1029 bp, Homo sapiens
aggagtttcactcttgtcgcccaggctggagtgcaagggcgccatcttggctcactgcaacccctgcctcctgggttcaggcgattctcctgcctcagcctcctgagtagctgggattacaagcacctgccaccatgccccactaatttttgtgtttttagtagagacagggtttcaccatgttggccaggctggtctcgaactcttgacctcaggtaatccacccacctcagcctcccagagttctgggattacaggtgtgaggcaccacgcctggcccatagcttctcttctaaagaacattacactttaggaggggagatgatttattttaagacaaaaggtggtaaaggctatggtggtaatcataatagtttatatttatatatgctttccagatttatttcatgcagtacaaaaatacattggcaacactgaagagggagaagggaagtttaattctgacgggtgattgtggaaggcgtaatggaggcagtttctctccttaccataagatgccggattgactttttaaatacgtcatgttattaatactctcctttggaattttttaggtacgcagattttctgaggcattcttttgttttgagcatccaagagaagctgccattgcataccaggaacttcagtgagtagtataaattcaaaattaaaatgatattacttccttttacataagatacctgtctcagaatttatcagtgacagaatatacagtattaacaatataagaaattaggagaatttgaatttcagaaatcccatctataatcaaattgtttcatcttattagttacttcattaaagttccatactttacatataaagaagcataatgcactgtattcctccctccttttttatcagatctaccataatcttggtagtctcatacagctttggctgtagccttccatttagccatattctgtctttattttcacaggccagaatttcttatgttcatccttttttattacagattttcatatatactgtcttctgtaa

SEQ ID NO: 38647 - DNA, 1020 bp, Homo sapiens
actctaaggattctgtggttttggtaggctacaaatgtttgaaaagtacagcatcaaatgatctcattaaatgctttgaaggcaatccttcacatagtcagaaggaaggtctggatcccacaatatgtggatataattttgacccaaagacctacatgagacagacaagtcaaaaggaagctagctgtttgccaactaatacagagagaactgaacaaaagtctccagatattgaaaatgttcaaccagaccagtttgatcctttgaactctggcaacctaaatctttgtgcaaatttgtccatttcaggtaaacttgatatctcccaggacgatagtgaaattacacaaatggaacacaatctggcatccagaaggtcatcagacgattgccatgatcatcaaacaaccccatctttgggagttagaacaattgaaataaagcccagtaataaagatcctttcagtggagagaatataactgtcaaactaggaccttggacagagcttcgacaagaggaaatacttgtggataatttactacccaactttgagtccttagaatctaatggtaaatctaaatctatagaaataacatttgaaaaggaagctttgcaagaagcaaagtgtctttctattggagaatcattaactaaattacgaagtaatctacctgccccttctacaaaagaatatcatgttgtagtaagtggagatacaattaagttaccagatattagtgccacatatgcctcatctagattttcagattcaggtgttgaaagtgaaccgagttcttttgcgacacatccaaacactgatttagtctttgaaactgtgcaagggcaaggtccttgcaatagtgaaagattatttcctcagcttttgatgaaacctgattataatgtaaaattttcattaggaaatcattgtactgagagtacaagtgctataagtgaaatacagtcatctttgacatccataaactctctaccctccgatgatgaactgtcacctgatg

SEQ ID NO: 38648 - DNA, 1128 bp, Homo sapiens
tactcctcctctctcctagctgcattcatgactcagtgggagtttaaagcagctcttgttggttattagttggtggcactttagggagcagtgaggactgggaatgccttgccagcttcaagtttagttttcagtatttaaagtgttatctacaggtaattctagctttgatttttgtttttttttttcacttctctattctttcacatgctctgaatagggcatcttgtgttggacatcaggagtagcctgaacttggctgagtagggctcctagaaaacatcgctgggcttggcaggtaccacattgacatgtcccatgcttgttaatgtatatttctgagattttaaaagtgcattcaagaccagcctggccaacatagtgaaaccccgtctccactaaaaatacaaaaaccattagccaggcatggtggcaggcacctgtaatccctacgtgggaggcggaggcaagagaattgcttgaacctgggaggcggagaggcggaggttgcagtgagccgagatcgcgccactgtactccagcctgggtgacagaacaagactccgtctcagggaaaaacaaaaacaaaaacaaaacatatagataaaattcacattgagcggtttcttcccactatcccctctccccagcccttggcagacactattgcatgttctatctctgtaggtttggctgttctggatatttaatataatacaacatatgaacttttgtttctgactttgacttcatatgttttcaaagttcattcattttgtagcatgtgtcggtacctcactccttttatggctgaataatattccattgtatggatagaccacaatttatccgtctattgatgaacatttggtctgtttccatcttttgctaggtttgattttgagcatgtttaaattggtatgaaagtgagtctcttgcccattcaattttgggtagtcagaaacataaggttttttaactctagagattgttttgtttagcctgtctgatattgagagggtaagctcattgctgagatcaaacactcgtttctttgttccgcagatcttgacttgaagacacactgttagatattgtattaggtaagagagctaaaaaaatttgtaa

SEQ ID NO: 38649 - DNA, 1052 bp, Homo sapiens
ttttttttgaggtggagtgccagtggctcgatctcggctcattgcaaactctgcctgccgggttgatgccattcttctgcctcagcctcccgaggagctggtactacaggcgcccgccaccgcgcccagctaattttttgtatttttagtagagacggggtttcgccgcataccttgtgacttctatgtcagtgtttactattattattaaaaaattatattattgagagtttattttttgagtcctattgagatatggattgtcatcaaacttttatagtttttatttaaagcttttcactgatgatttaggtcttgctgagcaaatttacctagtattatctttaattatcccaagctatatcacacaactcatacaactcttccccacaggttgaggagtccttttgtttaaaattgtttcactgtaatgctttcttactattaatgtcagtatttctacctcagatgttaggtagaactgtgtttaacttggagtggcatttagttactcagatgttaggtagaactgtgtttaacttggagtggcatttagttacagtatcatatagaagtgatttttaaaattatttcacttaaaacagagcttagataaagtgctcttggaaacatgctaatttgatgtttacatatattttgagtgataaatgtgaggaccttgagggtccgaaggaaagagaattaaaagtaattctaataatcttccattctctgtggcccctataccccagcaatttttggtctccatttgactagagatccaagtgattgatggtagaccttcagatgtctcttattgatcttttataaagcgtgcctttcattgagcagtgatgagctcaagcctaaacttaagaaaataaggggaattctgtgggaaataatatttgggatagctttatcttccattataggaaaaattcataaaaattatgtttagcctagggcgttatttagttcatgcatttctactcttggaagttgcttttggtgtagggtgatgatggtgcacagtgacaaaaaaattaaca

SEQ ID NO: 38650 - DNA, 1019 bp, Homo sapiens
acatgaaggaaatcaagaggataatttcattggattgctacacttttacctgatttatggctttattttactttattttattttattattattttttgagacggagtctctgttgcccaggctggagtgcagtggcatgatctcggctcactgcaacctctgcctcctggactcaaacgattctcctgcctcagcctcctgagtagctgggattacaggcgtgtgccaccacgcctggctaatttttgtatttttagtagagacggggtttcaccatgttggtcaggctggtctcaaactcctgacctcatgatccacccgcctcggcctcccaaagtgctgggattacaggcatgagccaccatgtctggctgattaattttttttttaactgtaagagtttgatcttttcaaatgtgttcagaaactaatttggattctttgattctagtatctcaacgtgtttatttttagattctgataagtgaaatggatgtccttgtggagctctggcctccccagcttatctatcagtcctgctgtcctcacctccttgcctctttccatgcttacccttaagccaccatctttctcagctagcgtgtgtgtttctagtgtagttggccctccatattcaggggtccagcatctgtggattcaaccaaccgcagattgaaaatatttgttggaaaaaatggatggttacatctctactaaatatgtgcagtccttttatttgtcattattctctaaacaatacagtataacaactattgacatagcatttatattgtatgtattaggtattgtaagtaatttagagatgatttaaagtattttacataagggacttgagcattcctagattttggtaactgcagagggtcctggaaccaaccccctacagatatcaagggaccactatacacattaggatgatctatattgaaatctacatggaacagagtgggacttctaattgtatgacttcaagattttgctttgtttaaattaataac

SEQ ID NO: 38651 - DNA, 1031 bp, Homo sapiens
cttttagataagattattaaaataaattattattaaatacataattttgaatacatattttgcttttttatgataacatatttatagataagtcctatgttcgaccaaaataaatacactttacatctcttgatactattatttattactatagagaatagagaattatttacaatacaattttattaaaatataagacaaatatgtacgtataaaatgagagataaattatgtccactaatgctacattcataggttatatgtcaaccacttggcaaatcgtaatgaacgttggcatttcatttctcatcagctttatttactcattcagaagtttctaccaatttctaaatgaagtaaatatggcatcagatttggatatagtgaatgttcataagaatttcagcgttaggtgacttttattgttggacactggtagccaggaaaatattctaaagttaatgacaatttatacaattcaactttggatatcttctatcagggccatagttgattattttgaaaataacattgtaatgcagaacgtaaattattccttaagagagttatccagtacattcaaataaattgaaaagcttttagttgccctcttgtttcccacagcatatatgtgtacacagacacacaatttttagagaaccatttctccataatttaacagtaagcattctcagtttttctcaagtgataccatagatttatttggaattaacatgaaggtacttttatctaagaatattttctagaggccgggcgaggtggctcacgcctgtaatcccagcactttgggaggccgaggcgggcggatcatgaggtcaggagatcgagaccatcctggctaacacagtgaaaccccgtctctgctaaaaatacaaaaaaattagctgggcgcggtggcaggcgcctgtagtcccagctattcgggaggctcaggcaggagaatggcgtgaacccgggaggcggagcttgcagtgagccgacatcgcgccactgcactccagcctaggcga

SEQ ID NO: 38652 - DNA, 1108 bp, Homo sapiens
ctctgccaggatgagttaggtgccccttctttcaggttccatggcactctaccaatgtcattataatggtgcttcccccattgtactgtcatcgtgggctacttggtctgtctctcccacatgacagcaagcttccatacagtgaaatttctacttatttctaaatattaagtgcctaacaaggtgccttgtgtctagtagaccctccataaatgcatgcttaactgagtaagtaaataatttttcttataagccttccacagaggagcttcagggtgagccgaagctgaaagaactaccaagtcttttcagttttcttagacgtaagatactgacgattcatttaaaagaaaaaagatatgggactagaagtaggagattagtgctttgcttgtagctttgccactaattaattctgtaagtcatttcacacatctgggtctccaaatcttcatctgtgatatgggcacaatcgtgtctgtgatccgagatggtggaggatactgtagagagtctaaaatgctatcattaaagagaaagagtatttggaataagaagcaatctgatccttttatcatttcctttcctcttctctgagcttgagggttgcctcttaactagttgctttaacttaattcctaaatccccaaggtctctgtgctacatagtagccaaagttatctttctttctttctttttgttagtttgagatggagcctcactccgttgcccaggctggagtgcagtggtgtgatctcagctcactccaacctcagcttcccaagttcaagcgattttgctgcctcagcctcctgagtagctgggattacagacgtgcgccaccatacctggctaattgtttttgtatttttagtagagatggggtttcgctatgttggccaggctggtctcattctcctgacctcaagtggtctgcccacctcagcctcccaaagtgctgggattacaggcatgagccaccacacctggcccaaagtgatcttcctaaagacttaacagaacacatcactcctcctctgcttggaggaggatctgtttattgcttgtctctcccctcaaccccaattctttaaaggcaggggtttct

SEQ ID NO: 38653 - DNA, 1033 bp, Homo sapiens
tataggaatgagctgctgtgcttggccctgaataataatttcttaatgtaatttcctataaacattaaattcccaatttatacagtcatcatggaatacctaagattcactacaaaatagcatcattgctttgtttaagtctcataatggctgaatatagaacatgtttactccaaactgattttttgatttttttcttctctttaaaataataaatactcattttctttacactagtgtgaatacatttcattcagcttccatgcttttctctctccccttccacatttacattttccctggatgtttcttactttccctttccccttggtcttattgtatttttcttccagttaaattgctcctagttttttttttttttttttttttttcctttctctctgtgcttctacctttctggaatggtgtttctccccatttctttgtacaaaatgttgctttcttttcctctgaaagctgtctgttcttaagagatgcattgaatttctaattacatgctctaagagtgtactgcctacgtagactgggtacctaatttacatattgctctatggtaattaatagagacttctagaaaatgtggattttagaaatataaggggagaaccctatttttcttagggttttagttatgctcaaatttcttagaaaataaggagtgaagccttaaaatcgctgaagttttctaatatctatatattatttctgaaatttgggaatagtcagatattcagtgaataattttaaaagtttttaccttctgttttggaagttgactactttgaaagttgactatatactttggaagtatatagttaagaaataaattagaaattagtttttatgccatgtggaattattatataaaaatgcacaataaagaagtccaaatatatttgtaacatagttaaatatcagttaaaaatatttaccccagtggctgttataatcattaggagtttctttactcagtgagccaagaatagatctataatctggcatcacagagctg

SEQ ID NO: 38654 - DNA, 1035 bp, Homo sapiens
agctattcacaataaatctgttatgtttttgtacttgtttcaagggtgacatgtaaagttagtggttgctctacagtaagcatctggtagtggagcggcagtgcagcatgacaaggacctggactgcagtgtcagccctgggaatgtgcagaaacggagaataggagaaaattcaaagggaggactggagttcttagctctccattggcttctggttggcaaaagagatgaaagaatcaaaatgttcttggttccaagcaagtgtgactgtgaccacgcagaagttactcaattctgttttaggtaaagaacaagcacaagtagacatgtggcctgtttgggctttgggaaagacaggggatcatcagttaccaatgtagagtgatggagaagaaataaggtccttggagaagagtgtatggaaaaagatttagggaatactggcatcttgggaaatgagaagagaaagatttgcaaaagggacaaagaagagaaaaactaggaaaatacaacatccacaggaagactgtctctcaaaggattgcaatgggataaaagtattacaaagaaaagaagtgaaaatgtgtgatgatgtagaaagccaggatagaaggcgaggggccagaacctagaagaaaactttgccatctaggagtggacagcatgtgcagtgccatgtgttaggaggacatccaatttcacaggaaacatgatgtcctggaaaaaaaggccagaacaacccagcaactaggtggtgtgcagacatagcaatcagtttttcaaaagggaccatgcagggtgaggggtgtccctgaaagtatcactgtataactaggatggggactccagaagagagggtgatatttagagagcctcgaatgaaaccagggatatctggttggaaagcaatcttgcagtctctaagagagatgctgataagtgcaaagcagttctaaagagcttgagataatgcaccaaacggtgcttgcaggggagaagggagacagattagggtgcataattgataaataaatg

SEQ ID NO: 38655 - DNA, 1050 bp, Homo sapiens
ttgctcctagtggaaatacagggttaggtcctatgagcctttggtcataacattttcatcaatggatcaatacataaccttattttatgtgtgtttctgtttaaagatacattatttaatatatattgttgattcattaacactgaactcacagtttgtaagtcatacctgaatgttgtttatcttacacatattttctccgtaaggcacatcacagccttcctgtgcttaggaatgctagatcacccttcagtctggttcagtgttagctgggaacatatgtgagaggagaggttcaaatttttggctggtctgcacatgtctgcaaatgacctcaaaagtgctgtattaacttagaggttacaaatcaattttgagtagataaattctcaaatatgaaatccacaaataatgaggatcagcaatacatagacagcatgtatgcatgtatataaatggaaagtttctggaaggattaaactactagatgaaagttatctttagcgaatagggctgtggggaaggaatgagacaaggtgcaccttttatcataaccctctttgccctacatgacttttttactgtgtgcatcccgtagtccttcttattctctgtctcctccttttctcccaccatcactatcatcgtcattctctcagcaagccagtgcattttctgaagaactctagggacaaggttttatttgagccaaattgctcatagtgaatattctctgaatcaggctcctggaaaagttggtctacataattttgcaaattaggagtattttacaaatgctaagtatgacacttagaacatgagttctcagggtaatttgtgtcacataatattaccccatatcccagcatgctgggatggcctggactttgggtaccttttgtctgtcaaatactcttacttaggggtcatgcacagtggctcatgcctgtaatcttagcactgtgagaggctgaggtgagtggattgtgttggagcctggattttaagatcaatctgggctatatagtgagaccttgtcaccaaaaaaaa

SEQ ID NO: 38656 - DNA, 1043 bp, Homo sapiens
tgtatggacctctaaaaataaaaatactaaaatttcttatatgtttattttccttaccaaatatgacagttatccacaagtggaacagattgtagttattgctgatcttatgtctgaaaaaccacatggatttgggggaaaaaaaagcatatggttatctattggtctacatagtttactgttgcatgggtagacagaagctttcagtaaaactaaagggaccttttctgatcaaaccctgtgtatggctgatatatgttctgccaatccagccttgtttgagtttaagggtgccttctggcctggggtcaatttctctgtgattggtttaatgtcatttgcccataagcatacattgcagggtgctgcccaagggcaagtgcacagcttaggtacatcatctcatttacaaatcaccatccggccatgtctatgagcactgagatatgaatcatcattatttatacactttagtcatatttgaagttcttcttactaaccctataaaactctcaaatgaattagaatcctcaaattcacataactatcctatccatttcctgtaggcagagccatatgcaaaactaacccattattgagaggtgcttggtaaacataggcacagaacagactctaatcacgtcttgtaaatctggggtccattataaataataaataaagttttattgaaacaccattatgcatattcattcatttactgtctgtgactattcttacattacaacaatagagttgagtggtaacaacagtgatctacagctgaaaaagctgaaaatgtttactatctggcctaggccagaaaactatactttctatcatgtgtccttgccgtgtaggcaggtgacttatggagaaatgggatgaaaaaaatggacatggtgagtcaatcatcagtagagttgaattgaaagaatgccattagttggagtcagagtcatggcaagagagagagagtgtaaggtaaagttgtgaggaagaagaaaccatgcattaagaagagaaacctggtcaggagacagaag

SEQ ID NO: 38657 - DNA, 1046 bp, Homo sapiens
acgaaaaaaaaagaaaaaaaaaaagagatgccataagatgagagaaagaaagagagaggcagagacagagactgagagactgatcatctggcatatggccctgaggcagagattagcttgttcctcaacttccctaggtttctgatagctgttcagttcacagacacatgcatgtaatgcccctgacctccaggacccccatctatggacagcaaggagctctttttgcaatcaaaagagagggaccaaaacagatcattatgtattgcgccataatgaggcaaatttatttctcttatttgtaagttcctatgggaatgactcccccattagatcacagtattgacgataagcatgaataagctaatttgggtagaaaagtcacttcatgtagtagaatgtaatgttgactgttaagatatctcatacatcatgaaattaaataagatttcccttttatttcatttgttcagccactcagtaaatattgaagacctattaagtataaagaagtgcaagacagcttgatggattagaacatgtatgtaacaaacccactcccagggaacatgtacaatcttgtatgaaagttgagacagatacactgatgactaccacacagagaaacctatggtaattaagtttgataattatttatagcagtcacattatgtactaaaacataaagaacataaggccattcaccatggctattgagatggatgaggctgagcctttgacgttggaagaacagtagcactgtacacaagaactgaggatcacttcttgccatcaagaccagggaagccatcatggaacatcgtgcagtgggcacaagagatagaatgcccattgcaacatcattggtaatagaaaaaaatgaaaatgtccataaggataataatgagtaaataactggcagtgtcattgtataggaaaataccatacagtaattgaaaggaatgaattagagctacatgaatctatattgatatatctaaagcctaatgttgagccaaaaataaaggtgcaaaaacatttttata

SEQ ID NO: 38658 - DNA, 1439 bp, Homo sapiens
aatattcctagccttcacgtggttttagtctaaagggagaacactcaggaaaaacagtgtgcatcaacctagagatgccatgagaatgaaatgtgcagtaactaatccatggaggagaggatggtcagagggggtcgtgtttaaattgggtcgattaaggttgcaaagggtcagcctattttaagagggcaggtgggaaggaataggaacagaggccaaatgcaggagataatattttgtaaactgttttgtaaatgataaattgtaccttctgtgtggaggtaaagtatgaggggagatttctgccttcttcctatcttgttcttatatatttgttcatatatttaacatagctacccccttatggtattataattacctgattaccttttaatctcatctgtgaagtccctaagtgtaggagcagtactttatccatctcttttccctagtgcctaacaggtccagacagctggtagatacaaaatgaagactcttttagttgaactgagtgaatgaaaggatggacagatggatgcatagatagatactctgtaattacaaagaaatgtacttgggctatgactccttcagtggaaaaaacaacatagcagaaaaaatgcaatacatggggtgtggtagaattgtaaaaatatttttactagaaatactcttggactttatgacaaattagaaattatttccttctatgcctggcccttccaaaatttcacattcatgcatacactagtatacttgttaaattgttggacaaaaatctccttcgatttagaagtctattatttcgttgagatgacagtttttaactagtaatgaaagttttccaatgaaaacactctaattttgcaatgtgtacctcaattttgtgaaaataaacggctgagtatactggaacaatcttaattctgttgaactccttaaaatgatattacatatcaaagagtacacctttaaactactaatggaggaaaatagaataactcaaggagagcaagcagacagctggaatttttgggaaatgtctgtggtatttgggtttatttttaagggaaagaaaaatttcccattaaattttataacacaataacacttttaaaacttatactcaaaaagaatctttataatgctgttgtaaaactcagattatattttattcatgaattacagatttcttttttgatgacggtggttagggtaagaagcggcttttataagctttatttatctcttttaattacctccttctcctgtctcaatgctcacacttacactcactttaaaaaatttttatctttcatgggatctatatctaaataacaccacatcatatgtaaattaagaaacattccaaatattctccgggacattgaaaggaaatcaagcaaaacattctgtaatgtgtaggcaactttaaaagt

SEQ ID NO: 38659 - DNA, 1030 bp, Homo sapiens
aatttatgctatgtccaaaagatcccaaatacaagttcccaaaaaaggaaattaaagtttaggaacatgacctaagtatagtgctttcccattaaagtttggagcttttaaaatgcattcttcaattccaaaataagactctttcaaaggcacttctttttcaaattttatggtgtgaaacacaaaatatattctttaaaaaaaaaagtacttctagtgttctcaaccattctttatatgtgcgttgacagtgtgtcctccgctttaaatcttcaagtatattatctgtactcactttggctacctattttcagaccatccagtttcagattttgtttggaaatacttctctggaccatcaccctactccccagagtttctaattctaactcatgaccttgtttccttcctccctcttcaacctgttacaatttcctaaatactttgcacatttacctgtaaaagctactgacttcaaaaggactttaaacattattccaaagtgctagtggacatggaatacaggagtgaacagaaagtgttaggaggggatgtagataatgaatcctatgtgatagggaagtgcaagaaaggagtgagagttggagtctaaagttaatacaaaaaaggaaaagttcacacagttaaatttattcctgaaatctctcaaaacgtcgggttccttgacaaataacaaaatgtattctaacaacacagtttgtattaatgaaatataattttagtaaatattatttggaaatcaggccgggtgcggtggctcatccctgtaatcccagcacgttgggaggctgaggcaggcaggtcacttgaggtcaggagtttgaaaccagcctggccaacatggtaaagccctgtctctactagaaaaaacaaaaattaactgggtatggtggcacatgtctgaaatcccagctactcaggaggctgaggcaggagagtcccttgaacctgggaggcagagcttgcaatgagctgagatcgtacccactgcactccagcctgggcaaca

SEQ ID NO: 38660 - DNA, 1984 bp, Homo sapiens
tttaaaaatgctgtcacttctccttgtttatatctatttttgcttttttccatacatttgacattttctttaaaatctgggcatataaaatgctgattaaaaatatttttatgtggagttgaaatcaatgtgtcaagattcttcattgtattttccttcaaaaaaggctgctgtaacataggaccaaatgttaagggtgcttgctggcataactccaaagcagtgtttttggataacaggagtctttaattcttaggtataattgatatttttagttagtacttttttcagctttgtttttggtttgatttggggtatatgtatgtatgtatgtttctataacaagttttgaatttttttgaagacttatcttcttaggccaccaaagcaaattagttcagtaattatagtctcagtttaccttgtttccctctcagtgggtcaaccaaaaccgcatggcgtactactctctgaagcctctactaccctgctcctccgtgttgacatgtggtcaggcaagccaggacttactcacatcagctacatcagttactggggtaagaaactctgggcttttcagatactgtcctccagaaacaccagcaccagcctttgggtttaagatcacctggtgagattgattatctttagggaatggtgcagatgggatagtttctagacaatttgggaacctcagaaatgggagtacttatattagaatgacataaaataactttttgccccagggatcttgcagtaaagattatcatcacagttggccataccatgaacttttctaagttatttaaatttaccttgaaatgttatcagtgtctgctgtcacagagaataaatgtatctggtattaacattttactcatgcttgccttgcctttactaaatcttatcttgtaattgaagaacttgactatttttaattctgaatacaatatgcctcagaataaggttttaagctttaggtaaggtaaagtttaactttagtttgtatctgtgacacctaacacaatactaaggaattcaactgaatgagaaatttattctaggcatccaccatgttcaaaacatactaagtacctaggaattacttatagaatagatgtaactctattgaactataaatcaaatatcaacatacaaagttgagtgagcagacttgtttgcctcttttcattttttgttacactgatggataccacatgtcttaggtgattgggggtgcggtggctagtaattactgccattattgtctgtgatacagcagtgttcagatagcagctattctgcttataatcagatgaacaagatattatgtttggctttgtttatggaaaaaaagaaattttattaaattgtggttagaggcctgttagcataaaggatgaatggtttcttggaattacaacttgaatattttgagagaaacaaatgaaaagtatctcactgtagggctgaattggtttgtgaccttgcttctctagctgaaatctattgactctctcagaagtattgctaggagaagaaataatcctataaaaggacattaagcaatgctaagaaaaagatgatgataataataatgctttcagctcaccatgtgccaaacatcatattaaacactttaagtgcattattacattgaattctcacaaccctacaccatatcctcattttacagatggagaaaattgaagcctagaaagatcaagaaactttctccaggccataaatagaggaatcaggattcaaatcagatagaccccagggcttgttctcttcaacaccacattaccctacattattattcaattattaaataaaaccttgcattagtggcatttccaaatgcataacaaaaaaataaaaaaaagtaacactggtcatatgtatcgtattttttataaaaattacattattccatttgtttttctggaaatttttattgcattgagttgctagaatacca

SEQ ID NO: 38661 - DNA, 1028 bp, Homo sapiens
aggatgttgacccccttatggggcttcatcttcatgacctcatcgaaacctgatttacctcccaaatgtctcacctcctaataatatcacattggggattagagcttcaacatatgaactttaatatgttgaaaattcagctcataacatgactgggtcaaactgtgtaaaattttggcagatttgctattgcttcacatagggtcctacccgtttccaatataagaaagagtaagactttgaaccttgccaacaaactgtattatcaaattttgtgatgttccctcgagctgataggtcaaaatgatagctcagtatagtttcaatttacatttcttttgttaatatatgaggctgatgaacatttcatatgttcatcatttagcactttagcactattagcactttatttttctaagaagtaggtattcacagtctacccacttttctgttggattgatgatccttttcttatgtgtatgtgaaaattgtcatttttctttgatataagctgtaaatacttttgccagtttgtcttgtgtcttgacttttgttaagggtgtttttatttttcataataactttttaaaaatttgtcttctattgcatctgtaagatgaaattataaattacttcactgcccatctttagtttgagaatctttatgggttgttttttttttttttttttttacttttaagtctttgatacatctgggactactgtggtacaggttatgagataagaatccaatatctttgtttgattttattgttttgttccttcttttaatgttactcaggtgttctgtatctgtttatttcttcagaaaaaaataggttaatctatcaaataagggaacatatctcaaaaagtcataaaagggctaaattatatgattctatatgattatctactgatttttgtcactgtaaacataatctggataattcagatttagaatgtgtgtgtgtaagtaaatatattttaggacagttcttaacttatcagttaattgtgtaactctt

SEQ ID NO: 38662 - DNA, 1028 bp, Homo sapiens
tacctgccctttacaattgctctgcggttgaccctttagtcgtattttgagttagcagatgaaaataaggtttcccttgaagtagtggttgctaagggcaactggtactgacgccgaagacgaatactctatctccttagtataatgcctactttgtgagctaaataaagagctaaattgtagagaagaaagttgtacaaatgtgaaatatcaagaaaggaatagaaacaggaatattagagatgggaaaataagaaaaagaattactataatcacttttttggtaactgcctggcattttggacagatgtccttatctcctgggcactctgcatttccacctttcatagctggaaaattaacattgttcactggggcaagactttcttttgtaatatgaattcatgtcattagttcttagtggattttgacaaaatggaggtgagactgtgatagaaatatttgtcaactttttaggcttggattttcaagcataaatattttgtgtcagtagaattgctttatgctatttggacaacttgtagtgtgcagggtcagttatctctaactccatgtcagtacagattgttttatgaacatgttggtttaatgagagagtcttcatatagaatgtgttataacagtgttcataatttcttcgaccaaattgcacttaatgtattcattgctgtgatttcagaaaggtttttaaaaacttcattgtatcctaggcaatgctgtttctaaagggtgagttcattactcctttatgagcatctgctcgatgccaggtgttttgcctgtctacaagaagcccacagactgggaagatggacataaaatcaagtaattacagatgagtacactgtaagctataatcaaggcataaatttgatgctataggagcacagagtgagaaacattcactgagtaagtcacatttagcttgcaggatggtttggagtttgcaggttgtgcgagaaacatctgcctgcagcagcattccttccatgattatcaaggttcat

SEQ ID NO: 38663 - DNA, 1026 bp, Homo sapiens
cctccaggcaaaggagccatcacatttttcaaaaaggaatgaggaggtggaattatttttataatttattttctgtaaattgttgggaaatggattattttttaaaaagaatatttctaatagcaatatagagaatggattgggcttaagttttcaggaaaaagactaactttgaagtatagatttatgtgttactaacttatagataataattaaagccataggaaatgggtgggagaacccaaaggaagcatgtggaataagaagacaagcaggaagaaggaaggaatcattaaaagcatatatgaatatgaaaaagaggagaaacgtgcacacgagacttggaaggagtgtttagagagttagaagataatcaggagagtgtgtttgggagcaagatgtggagagattttaagagagaagagttgataaggagtgccaaatcctgttagggctgtaggatgagacttgaaaaagtggatttggcaattaggccatttgaaccttagcgctggtaggttcacttcataaggtcttctttgttagaaaacaaaacataacaaagctgttagtgatgggattcaggattctttagcagggcaagggagtaaaagtttttctctggaggaaaaaaagggtaagattgcaggaaaatgaaataaatgttagggcccagtaaaggaagccctaatcatagaattgtaggactagctattactggttgtttaaattgtaccaccataggtcaaaactccacctaaaactattccggagaggtgaatattgtaattgcttatacagaatcctaattatgagctaataagaagaggcattaaaactagcaccccactgatttaatttggagagagacacttatattagctgtttctaagacttatcttttaattcttcccaaaaccagttatttcacagttggctcacagttttgaaagtagaactgctagagtaaagaaagaaatttacagcttcagatgtttagtttctgaaggtgtcagaatcccatat

SEQ ID NO: 38664 - DNA, 1078 bp, Homo sapiens
tgaggtatttaaataaactccatgttacatcttcatacatcattattagagagaatgctcaactaaattgttacattctttccacagcacaatagaattacagaataattcaaagcaaatacaaattattttcttagcccatcttcttaatttgtaatattgtcccagaatacccttccagaataaattaacatttacaaacaaatgagttttcaataaggatacattatgagtgtgaggttgagcaaagataaaatactaacatttgtgtagcaatgtgaagggctgctgagataacagtaggaaccaaatacacaatcaccaattcatgtggctcaagggaaataaatatgaacattcctgagttattggccaagattaaggaaatacaaggtttttttttcttaaggagtatgaaaaggtttaggaaacaggtaattttttgcaagtgataaaaaagtattaagtgcctggaatgttggaataaatagctatgatcgaagtagagaaagatgtgtttttaaggaacaaaagctccctttgttttgttccactctctgtggaaatgctttaagacttagccctgaggactgtgaagcatcagataagttgtgatgttctcccatgtcttcagcatgtgacccattcacacagaatattcagatacagatatgggttctaattgccaagtagtttacatttccctagacttcattgcaattgatttaaaaaaatggccactttacggtatgatttcacttcgtacaggtacacttttggcagattcagataaaaagaaatcattcatatttattatcattctgcatgttcagcctttttccttccttagaatcagtcttgattacttttaaagggactttactaatctttatcttcctctccatcctgccatcactgacctgcctcaatccctgttcaactctctcttattcagtctcctatgtggattgtcccactgccttctgtcctctgcgcagccacaaggcagtctatttaggatgcagatctgtttctgtcaccccactgctagacccccgcagtggctcctcacaaccag

SEQ ID NO: 38665 - DNA, 1010 bp, Homo sapiens
tgacattctggatacttccaccatggggcgtactaaataactgcttattcacttcagtctatatagtctagttgtgagaactgatatcctggatcattagaattcactgcgtgtctgtcagttatcaataggttaaaccgcagaaaataaagctagaatatgtctttgtattgaattcatttattcttttttcaatgtttgacatgtatgaataatacagatatactttgccaagatatagatgttagaattgtctctatagagtgaaagaaatacaagttgcttctttgtgaaagcttcatgctttcttaaaacaggaaactttaagtaggtgcagattgacatgttgaagcattttgatgcaactattcttaaaaatgcctagaggttttactgtccaaattttttttttgttttttgttgttgtttttgtttttttttttgttgttgttgttttgctaaagcacagctaatacaataaatcaaaatttgtaaaatgtaatctcttcccctgtaggattttgtggtccctttaaaaaataaggtaggaaagaaaatttcaaagcaattatcagacctaatttttaacacaaaagagctgtcagattttatacccttattactttaatctgggaggtaatttgttgtattgttataatgttgacaggctcaaattccctgaaataaattatcagaataagaagtgtagtataagatagaaaaatttatttttttgggtattgcttcttaccaaaaagaaatgagatttgtgtgtgtgtgtgaacatttaaacgaaagaaaaaataacaaactattaaaatgtagtattatgtttgcataaattgattttgcaataaatattggacaaatctttgctgcagagctgattattttggaattttgattaaatgaggcagcaaaagtcagaaatattaagcactataaaaatgaaatttggttaaaatgtcactcaaggtatagttatgtcttttctttttatcatgaattat

SEQ ID NO: 38666 - DNA, 1031 bp, Homo sapiens
tggaacttaaattatatattaacctgataatagttaacttaggacagaatgtaaactagatcccacttataaattttatgtgcacatgtttaaccattcatcagacacagaacttcttttattttgagacagtcttactctgccacccaggctggagtgcagtggtgcaatcatagctccctgcaacctctaaatcttgggtttaagagaccctcctacatcagccttctgagtagctgggaccacatatggtgccaccacaactggctaatttttttattttgcaggctgatctcgaactcctggcttcaaacaatcctcccaccttggcttccaaagtgttgggtttacaggcatgagccactgcctcaagccagaatgtcttgatgaaatctgaattaaaaagattttgtttccaccagctatccagggcaaaacagagtaggaccacattaatccttgatagtagctctctttactcttcctagatttactcttagatctgtacttctgaatagtctttactttcttaatcatatgacctcctacaataaggtttttgttttatttgggttttcgccaatgtatttgttgatatttaaattttaattgcaacaaaatgacaaaatttcatgacttttatttttttcaaataatttttcacattaagacatattttacatgtattaagatatgaaatgaaaacagggtggagaaatatttggaaaaatttgattatatgtattaagatgtgaaatggaaaagagggtggggaaaatttatggaaaaaattttgaagtataaaagggaaacttcttttagacgttcttaaagacatgaaatcacttcgaattttactctattgcaaagagaagaaaaagctacatttgagcttattaagcaaatacatttttgggttgggtggcagcggggacagggtctcactctgttgcccaggctggagtgcagtgctgcaatccacagctcactacaacctctgcctcatgggctcaagcaaccctcccacctca

SEQ ID NO: 38667 - DNA, 2328 bp, Homo sapiens
atagtttttattaagttacttctactttttgacaaattccaaaataatctaaatataatgttgatcagttttgttgaactcctgtcctcaactgatccacccaccttggccccacaaaggtgctgggattacaggcatgaggcaccatgcccagtgatcagttttccttccttttaagattctctaaaaatgaaacatgcataggaaatatatctactttcttaataatacttggtttgaactagaagttattctcaaagtgtgcttttattgccttgtttttaggacatttatttcaatccatacaaaacatccaaataatttggtcttggaatcccattcattagtgaactaaaggaccatccaaaaaaataacagtctggggttacacttgatccttggagaggaaatatttctagaaatataaattctgtcattctcttttctcctgtaatttacataacactctgatggcggttttatggcccctaacagagatttggcccagaaaagagatgcttaaactgagggtatacccctgctaagtcaaaatgaattgtgaaatcactagaaatggctacaacttctcttcatgttctgcaaattgtttcaagatgttttctataaactttcactacttttgctttatttttatttcatttaacaaatatttactaagaacacaccatgtgctagccactagatcttaagtgccaagtcactggtgagcataacagacattcttcctgtactacagagattaccctctggtggagaaaacagtaagaatcaaataaccatgcaaataaatacacccattaatttattaaaaaaatgtatattgagcgctccctgtgttatgaatctgtactagatttgtggaatatagtacctgaacccatgaatcttacattctggtgcacaaattaaacagtaagcaaataaacaaataagtaaatattatcatggtgggtggtgatatgaagaaaaataaagctatataagggcacagaaaatttgaggggttgaaataacatgtttagagaggaatggagtgagtgagggaaagaatggtaacagataaggtcagtgagataggaaaaggcctggtcttctacatggcaaacagtgcttgttattacaaatggtgaaagtgcactgtaacaaatacaagatgttaaaagaatggacaactggaagcctacccaagggaatcaggggaagcttctgttaagaactgaattgtgtccccccaaaatacaaaatttatttaactctcaatgtagcaatcagaaatcaattaataagctggcattggtaagttcttaccattcagtaattactttgaatgtaaatggattaaattatccaatcaaaaggcatagagtggatgactggattaaaaaaatttaaaaagcaaaacaaaacaagacccaactgtatgctgcctacaagagactaatttcaccttaaaatacactcagactgaaagtgcaggaatgggataaattattacatgccaatggaaataaaaagagaagaggggtagctatacttatttcagacaaaatagactttgggtcaaaaactgtaaaaagagacaaagaaggctattatgtggtgataaaagcgtcagttcattaagaaaatgtagcaattgtaaatacatatgcacccaacattggagcatctaaatatgtaaagcagacatgaagagatttgaagggagacatagactgcaacaaaataatagtgggggacatcaatacccccacttttaacattggacatatcattcagacataaagtcaataaggaaacattggacttgaattatactttgggccaaatggacctaacagacatatacagaacattctacccaacagcaacaggatatacattcttctgaagtatacacagagcattctgcagaacagatactaggttaggccacaaaacaagatcaaaattaagatccaaatcatattgaatatcttttctgaccatagtagtaggaagctagaaatcaataagagaaaggatcatggaaaattagcaaatatgtggaaattaattccccatgtgactgtgtttggaaatagggactttaaagaagtaactaaggtaaaatgaggttgtaagagtggggccttaatccaataggactggtgtcctccttatcagaagaagagacattaagaataaatgtacacagagaaaagaccatgtgagtacacagcaagaagtagccatttacaaaccaagcagagaggcctcaggagaaaccaaccctgccaacaccatgatcttggactcccagccttc

SEQ ID NO: 38668 - DNA, 1046 bp, Homo sapiens
ttataggcttggaagaagagaatgaacttacaaagaaatagcaaaggaattgtcacagacagaaattcatagagtccaaggtttaagaagccaggggaagaaggcgcttcaagaaggaaagagaatatacactctgaagtgagtagcatgcagcagcaagcctagcatatgaatgaacacttccgaatcctaaaagcaagaccagctttaaaatacttaaatctgtttgtcactgttgtcaatctttgaatctaataagatttaatttattttgtgtaagatttacctcagttaatagccgcttggaactacctttgaaagcacatctctgacacattctcagcctgggtggatatacgataacatcatcattctttgtattaaattatgaccataatgacagttggggaaaaatgtcagcaactaatagaacaccaataggttttcttgacaagctcacttggagtatcctctctggatgaaagctcaataattttttgctttactacctcctcctgttacttcactctgtactcccttatacttctgcataagaaaaactttattaacttcatgcataaccacataatttgagtcataattaagattcagatgagcagtaaaacaattttatatcaccacctgtatataccttctaaaaatagatgtttattagttacttagttttggtcagtcttcccttggaagataatctacgtggcaacaaaaactttctctctcctgtttgctgcattcccagacccaaaactgtgcctgatgtattttaggtgctcagtaatatgtacataataaataaatgaatacatgcttaaagtcgcacggcaggaggtagatataaaaatgctggttgggtttgcagcttagtcagagatgcaattcctaatatcaggttacacatttgaaatccaagcaaacatcttggcttgctaacatctctggctgacttttaagccccagccccatttcggatgtttccacatgaaagccaaacaggcattttgaactccaggcgtcccaaacgtgac

SEQ ID NO: 38669 - DNA, 1009 bp, Homo sapiens
tctatacacatatgaaatgccacttttatcatataccaaaatttcatttattttttgtgtctgtaactttatattttgcttcttaaatttacatctctattcatgcagtagcttcatatcattttaattactgaggctttatggtgttttatgtggtagagttactcattcttcattacacttttttcagaattttcctggctgctcttgtttgtttctttttccatataaactttagaatgagtttattttgttctgagaaaaaaaaaaagtattgacattcagggtgccattacatttacaaattagctgtgaaaggatgaatgtttttatggtacattttcttatccaagaacatagtacgcatttctatttatgtattttatgtcccttagaagcatcttaaaagctttcttcatatggttcttgcatatttctcattaagtgtttttctatttctgattctatttatggcttagcatatgtgatactaaaaaggaaggactccagctgttttaaccctggctctacctccaaattcccacagattagaagaaacagatagatgttataagtaagcagataaaagttttaagtgaaaatgagaggacaggtgggtagagatagcatattaggtgctaactagtttttgtcatcccatccaaggaaagccaccagatttgtctggcacacacaacatgggcaaagcacaatggagatagaaaggactcagaaggcagagcagttgtcatttagaagcagaaaagcagtggatccaagaatttttattaggcttggctccatataaaagctatcccaaataacagtgtctttcaacacaataaaggtttatttttctctcatgtaaatgagttatgggtataggcattccaacactgttatgggactaactaacgcatctgtgattcaggcttctttttttccctcattactatgtttagtgtgtgatctccatccccaagtttgcctcatggttcatgatggctgc

SEQ ID NO: 38670 - DNA, 1052 bp, Homo sapiens
ttttttcaaaacttaaagttttgaattagtgagtttcaagcacaacacaacttgtcattcctctagatttagaattcagattactattggtgactagtagttagaagggtcttctattaaacaaattggattgtttttatttttaagaattttataaatgtagtcattttagatgctttgaaaaatgaagaagctttcatctctcttctaatttgtataaaggctttgtttatataacaagtagaaatttaacatttttctagcattttaaaataaatttgaaaaactacttagacaatattatttttatctttttaagctaaaaacttaaaaacaaatttttatggcagaatgtgtatagctagtgtagcaatttcaaaactggatatttattttatttttgtttcttttttgttaatagtcttttttaagaaacatgaaactcacaatttaagattcatgcacatatgtgtgtacacatacacacacacacacacacacacacacggattccccaattcaaatttttaacataagatttgtgacactgacaatttttgtcagaacatatcaaaagctctaaaatatctcatccctttgacccttgaattctattcccaggagtataacccaagaaaacaagaaaaatggttctgtacaaataattttagcagtgttatgtatgatattaaaaagtggcagcaatctcaatgtccgataataaggggcataattgagtaaattatggttcaatagtagtagtgtggattacattgacaaaaaaagatgaatataaattgctaagaaaaaatatgataatctgcttatgaagtaatataaaatgagaaagtgtagaattaacataatataaattatgcttacatgtaaaaaaagatttctttttttttttttttgagacggagtctcgctctgtcgcccaggctggagtgcagtggcgggatctcggctcactgcaagctccgcctcccgggttcacgccattctcctgcctcagcctcccaagtagctgggactacaggcgcccgccacca

SEQ ID NO: 38671 - DNA, 1085 bp, Homo sapiens
ttgcccagtgaaaatgttctgaaaagaagctccatggttaaggtgtcaaagtgtcacatcagtgaatacaatgtttccttttctgtggcttttctaataataatgaatagccaggaagattttgtggtttacttgcagagatggcaccccatgactttctgtcacctttgggagccagcctgtaagagagtcccaaaggtgaagagactttctctcacctgggagagtaggggtcccaatgtctcgtagggcagtgtttctcaaacttacatgagcatatgaatcacctgggactcttactaagatgcagggtctgatgtagtaggttagagagttggaggaggtgaaaagaaaaatttgcatttcaaacaagtttccaagttattcaggtgcttctggtccataatcttcattttaagtaacaaaactttggagcattagaataggaaagacataccttagatgatgttattgtggccttgatatactataaagccacaaaatgagaggaaacatagcttaccccattagctgatgtatgaattaagaaaagaacgattcaggatcacttacagatctatgagaaaaaaacaaaacccaggcaaacaaatatgcttcctggtggtagtttctgtcttttcttaagaatatgttataaaagaacaggaaacctggcagttgctagaaaagcagacaaacctaactccattgtcccctaagtctgaaggacataatcttctgttttaagttttaggggtcacttaataccagatggttaagtaacttggtcatgctactaccaacaacctatccgcttcatgctctgccattgagcctatatctcccactggctgtcaactgccttcatacagtaatactggaagcaactgaaggtttattcgcttggggatgaattctatacttagttatcaagtattctagagtgacttgtggtcgggggaagggttaagaatctctctaggagtggactcacagtggagccctggttagaagatagcttcagtattctttattgtaaataggtcatttgaatttttaatgccatgcaattcaaggatcgccac

SEQ ID NO: 38672 - DNA, 1239 bp, Homo sapiens
gaggcagaggttgcagtgagccaagatcgttccactgcactccagactggtgacagagcgagactccgtctaaaaaaaaaaagaaaaagaaaaagaaaaaatggtaagaaaggcaacagaggtacaacagatttgctgagaaatcctatagttagaatggggaaggttttttgggaaacatgagttaaggactggatattgaagcctggaatggatatggatttatggacagggaaggatgatctataatacagagaagtataattcaacacagaaattctgatttctaggctattactggaatacactatttcaaggctattaatgactacatttatgttatttttcctaaaatatcaggaccttttaatctaatgactcagctcttctgtgtctctgtttttcttgcactttgtcttattgctttgccatttaaaaatccagccatgaaaggaattttggaaattgtgttcttttccatgtatgtaattgctccttaaaactgaaaagatcaattaggaaattattggctccttcgtacttcttttaccacctctatttattaattgattgaattgggttcgccaggtttagctctttaatatcagatcaataaaagattaaatgtttaaattaagtgagcacacatgtaactttcacactccttgcaatttctaggagccacatccaatcattcaggattgtcagtaacggcagcaatcaaggctagaatcagagtacttgcaacttttcattctttttcctaaacttcagcctacatttatgggaataataatgcagccatactttcctcaaactcagtttatatttttgtttgaaattaaagcagctttttgagacaagaattaagattgttgccctgatgctagtcatagtgaatttctaacccttctaacccttcttaaaaggagatggtcgtatttgtttcctttggatgccgtatcaaattaccacaagctgagtggttcaaaagaacagaaatgtactctctcacagtacttgatgccagaagtttgaagtcaaggtgtgtctgaaggtcatattctttctgaaggctccagggaagaagccttccttgcctcttcctaacatctagtggttcctagcaatccttgacctgtgttggcgtgtagccgcctcactccggtctctgcctctgtcatcacatggctttttgccctctgtctcccctgtatctctaactccaaatttctctct

SEQ ID NO: 38673 - DNA, 1050 bp, Homo sapiens
aacttgttaaacttttactttctttcagaaagcactgggaggcagttcagatgtaccagggtagacaggctagtgatcaagggtgagtcagggatttgctgacaggtactaatgggagtagtcattgaactaaacctgaagcaacagtgaaacaaaacaaggtttgcatcacttctaaagaagatacttagaattgttttcttcctcttgcttcaacaactacattggatatatttagctgaatgctttattttgactctaagcaaaatctcatagcaacatcttttctttcaaagtaccattaatgtaattttgagtacaggaataaggaaaaaagttagaaaatttcattgaggataataaattgagaccaaacactaccagataatacatcaagaacattaacattaacaacatccttttatgttatgctacattcttgtgttaaactaatgtataccatacattatagatactaatgtagtagttgcggaaaataatgacgctctttgattctatctagcagaactgcaaactcttaattataataacaaaagattatgtgttacactctaagtcttgcctagaatgatacaagatatggattttgagttattttaaggattataatccttatatttatgttctagttcaggggttgatgataacctaaggtccagaatttggataggaaaaaaaatgtatttgtttttcctaactctaactgatatttgatatctccttcaattattaatgtaagccacaaacctcaggggttatggcatcaatagaaatcctagattaattttaaattatatcacaggtattgaatatatctcaaatataatttatacttagcacttcttcagaattatgttagctacttagacctgctgtgataccttatttaatgcattaataaagaattcttttaatattttgataactatttctatatactcatttttccttggaatatttttattttatgcattttaaaacaattctgttgaaaatagttcctcgggcttcatgggactgccaaagtgg

SEQ ID NO: 38674 - DNA, 1045 bp, Homo sapiens
atactacaattttctttctttctcagtcagacaattcattaatcatctgatattttttataatactatacctaacatggggataaatgactgaaaaaacagggttgtaaaaatagaagcatagcatacattcctgtcctcaatgatattcagtctagttagttacatagcatatgaattgccattgtccatatcatatcttaaaataattcttatactgtatttttataatgcttaaaaaatgtactcaaaatgctgtcctctgtaagaactcattgaacaccttcaacagggttgttaaattggtaaagcaagatcctactaggtttataaataaagaaaaggctttcccttaagtagtgagagatgaagcaagaaaacactcagctctcccaaactgtagttcagtgggactttcatttcacatcatttccttagaaaaatcctacgtcagaaaatcttcagtctttttcgttgtataatctatacatctccgaaaagtgtaagatggcttgttaagaataaagtgtggtttggttgtgtaagaccaaccagaaaggggaaagggaagaggaatgatgttgagattgggagagtagttgctgtctgtgatcttttatacagttgatgtgtgatagttgtttgtttgtttgtttgtttttttaattccaacctgttcttaaatgcaaatacaaaaactagagaaagagatggaatcaagctaaggttaaactcaaaagtgacttcagtatcaacttgttggttgtatgtagcctttctgtcacagaactgtgccctgggttctttttactcaaaaagtattccataaaacaaccgcctattggtgcattacttcacagcctgttatgaatgagaatcttgagtcccaccccagacttaatgaatcagaatctgcatgttaacaaaattctcaagtgatttgaatatacagcaaaatttgagaaccacagatgactttcaattcacccataataactgagaaaagactgtaaattcctacaccttgttcttccataatttaagga

SEQ ID NO: 38675 - DNA, 1065 bp, Homo sapiens
ctgtggtttgcccatgactcaactttcttgaatgaggggagttaactcttggattctgaacaaactctaaattacatatttattttcttcctcctcatacttcttttcaccactcattgccatgatagaaccttacaattctgagaagtttgaattctcaacaccccaaaacattttcatttaaagttgaatccttgctaaaggtgaatccttgctctgatatttagattgagattctgttaaaagttcaaatagaataccaatttatccagctagttagagtgatttttggtttatattttaaagccacctggttatgaggtatctttacttactgcctattttgttggttgaggataggaattattaccagtcagaaatatgcttttgatgtcattggttagtcacttaattttcagctacctctgtttattggaataatgtggaaaaattaaaaaaaaatttctcagactttaattcaggtaatacctgctgttaaatgttactgtgaactacttcctccaactgctcacaagtagccaaagggaaggatttgaacttcattacattttatctctcctgccatgctctgccttccactctacagaaaagggacagggaaatagtccaatcataggtaggtggatggaaaaatacaaggcacaaatagcccacatagggaataatcataccttaaatagtcactgacaacatttaaaaaaatatatttttatttccatttatgtaatcaacttagggttgttattgacctgccactgaggcatttggtttttcttttcataggacctttttcatttatttcttcagaagcattatctaattaaaaacaaacatttaaattaacatggcctgtcaaggaagtacaaaccagtcttgagttaagctataattacaatgacaacaatgtcaaaaagaaaaagcaaaaaccttttttaaaacctgtaattacttcattgtttataatttttaattggaatgcaagtaacagggaattcaaatttcataaaaccgtggtctgtatatcttgttatcaaaatgctatcc

SEQ ID NO: 38676 - DNA, 1084 bp, Homo sapiens
aagctaatacctgaaggtaagtagaaattaatgagttaatggaaatgagagaagtttaggcaaagaaaacagcctaggtacagatttctgctttctttaggtaacaactatatctcaaggtaaacaagcttggaatgaaaagcagggtcctaaagaacatagtttcactctggctctgccccacccattgatatgagcaatcaatcatcttcaattatttctgtgagtctccaagttgtattcatacatgttcacaaccacagtccattaaacaatttggatcttcacagtctcctgaattgcctaaattccaaagtgtgtacagtttaggctaacaaacgagaacagccaatccatgtaaaataggggactagactaagttattttgaagctgtatttctgtcctaataacctatcatattgtgtttctgattttctacaagtattaatactataaaattaaatgtttggttttattagaaacagggcatagtggatatgtacagtaacaaaggacaggaagtgaagaatgaattgatcgaggttcttctagatagactctaaaagaatacttccaagagacaggaaatattgtatacccattgtcaatgtttgaatattattaatgaattaataattaaaatgtaaggcaagtttttacttgctaagaagacctgtgcattcatgtaacaaacaccatgatgaagctatagaatgcttccataacccccaaaatttctccatttctcttcccttggtactagtttctgacagtcactgatctgatttctggctctatagtttggccttttccagaatgtcacataacaggaatcatacagtatgtagctttttatgattggctttttttcacttggcataatgcttttaagatgaatccattttgttatgtgtatcattcccttatttcttatatttttgagttggatcccattttacaggtataccataaaaggataatttgtttattctttcattaattgttggatatttggtttggtgattatgaatgaaatttctataaacagtctcagataggtctttgtgtagggactttacttgg

SEQ ID NO: 38677 - DNA, 1098 bp, Homo sapiens
tggcttcatgcctgtcctccagcagcaggcagtcacctcctgcatgcctctgccacagcagggacctctctctcgtttcctgctcccagtctttctcataagcacctcacgcaggcctgtggaaaagtttataaataagtgtgggcttccctgtgggtggagttcctagatatttcaaactaataatagttcatacttgtcttttagaaatttgtgaaacttttagctaattttttcctactcacatttgtagggaggccacctatttttcccatgctttgccaaagattaaatactttgtatgtccctcttgaggggcatatcactctttgaacttaatttacttggctgccttgaacctcagctctctaatgggctcaaggaaagtagtaattttgtacatcttctggcttttggtcattgttagcaggaacaacgttctcttgtatctctctacaacatttaccaaagtggaactcctcttttcagcatcttaaacaaattttggatttgaaatggctcaaagcatttgggaactctattttacatacattttaaaatgaagcttctatagttctgtggtatcttatatgatcttaattgttaattagttggaaggatatgtgtcatctattagtaagttgtagagtttttgtttttagacattatttgtcataaccccaaagggtctatttctacataagtattgaaatcatttttcaaaaagcagcaacagaaaaagctgctataaatttcatggctaaagattgggagatatttgggggtgatggtatctgctgatattaaccttgtgatcagcctaaatttctatttattacatttttacttgtttttattcctataaatattatatataagattaatagtcaacttatggaacatttgtcactggaacatatttgtcattccctatttatatatatacaaatgaaatacacatacttgatcgaagtaaatgcattaaaaacaatcatctttaattcctttgaatctgtactacatacaaacgacatagttttaggattctctacaaattcttaagtataattaaatcagaattaaggtgatcatctacat

SEQ ID NO: 38678 - DNA, 1024 bp, Homo sapiens
acattcttgccagcatgatcccttgagtttatattctggttgtgggggaacagtgggcagggtggagggagaagaaatacaagcaataatcaataaataagaatctcagatcaagataaggaccatgcagaaagctaaaacagagcaatgagtcaaaatgaccaacgtctactttacactgggtggtcaggaaagtccatggtgatatttaagcagaagtcttaatgatcaaaaataagccaacactttgaagactgaaataagagtgttctgtgaagagggaccagatattatcaaaaaaggtcctaagacagaaatgatgtagagggtcttgaggatcagtatggctgaaacataccaataaggcagacgtgtggattcatgtactgagaaataggcaggaggcagctgatatcaaccttcctatatcacaggtaagctgtttagattatattataagcctgatgagttaccactgtggctttttaggcagaagaatgacttgatctgatttgtatgtatataaaacataatgctctatggtgattagactgtaggtaggaaacaagagtggaaactgggagacctgctaggagattattacagaagagacctagtggcttcaactaggatgacagtaacaaagacattaattcattcatctgtttatgccttcaacaaatattaactaatgatctactgtgtgccaagtcctctctagatatcaggcatgcaccaagggtcaaaagcaaagaaactgcctttatgtggcttatattcagtagaggatatagacaatcaaggggaattaagagtgatgggtctaattttagataggatggtcagggaagacttctgctcatacctaaatgaagagagggagcaagcattgcagttgtctgggacaaaagggactcagacagagagatagcaagaagaccctaggatgggagtgtgcttgaggagttgggataacagcactatggctggagcacagttcggtaggagacaaatggcaagagtt

SEQ ID NO: 38679 - DNA, 1085 bp, Homo sapiens
gtggccccagttatcatatcacaatctacttcatgagaattaatgggcttctttatagttaccttatttttaaaaccactgtgtgtgtgtgtgcgtgtgcattaatgtattaaatttattttcattgtaaaaaaatttattttcattgtaaaacccaatttttgtttccctttcatcgtgtcccaatctgggatcatccaacatggtttacatttaaaaatatttcactgcccacttcacaattggagctatctgtaaggctttagccaacaattcttgcagtggaggagagggaagcatttcatcatatggaaaaatagccactctgcaaatagtgagtctcccaatctttggccctagcccggaagtcctcaagtagtactctcctttcctcagatactttgcttttcctatttccacgtatgcaatgatcagaaaaggataagcctccagaagagaacagagttaaataattttgactctaaaacagaaatatcatgccataccaatacatgaatagagaacaaatgcatatatattgttttgttcaccttttcaaaaggaattttgaatttttgaaagtaatgtgatataatgtttaatgctgtatgcttaataaaaatacatacttttaaggtaacagctatgtttggattgtttgatagaataaagtatcaaaataaatctaagcatgatcaaatacaaaatcatagatacatcataaaatatgagggctatctgtatttttcaatccttagaatcatctggtggagtttctaaaataaaatatcgatgtctaagctccaccccagatcaattaaatcagaatatctggaggggtacctgagcagagattttttttttttaaagctctgtagctgattccatgtgcagccagggttgagaaactttgggctgattattgacaatttcctgtagaaatgcacagaactgcctcataagcttgagttctggacattgcagactgcctgctactgacatacagaaggaaaaacaaacccactaaaatgcaattctacaccttctgaaacttcttatttcatagctttgtctgaaaacaaagc

SEQ ID NO: 38680 - DNA, 1081 bp, Homo sapiens
tccacagcaagtaagccatctctacaccatctcaagcaacaggttgagaaagcttaaatgggagatatggttttaaaatggattttaatggctcatttgactgaaatttattttagggagaaatggattctagaaaatgttggcagttatatcaggtgaaattattttgttgtcaataatccaaaaatgagagcaatgggaagagaggaaagagacaaaggccaagtaggtctagctcttgagatgatggacatggtacctcagtaagcattgggaaacatctcacatattctgcttttgtgttaaagatgataaagcattggtagatgatggtgaaatgtttcagtgatggcttgacaagtaaatttatttcaggggtttgacaagaataaaatataatgaaacaaaatattataatctttgaaagatataaaatacaatgacggtaaatattataatctgcagaacaatcagttttgtttttaaaaacagaatctgtaagatgacctgaatcacacatttataaatcaaaaatatttagtatgaaatcaataattatttcgagaaagaaaacattattcatatatgtgtaccgattttattttccatacttttagagtgctgtattgcctgtggactttaaatatttaaattcctagtctgttattaatactaatttagtatttgcatgcgaatatcattttagttttatcattttcagttgtagctgaaaagctaaaactacttaaggattccattgtgtatacaatcataaattagtaatattagcccctaaaagttttatcaaagtaaatataccactgcagaaaagattccttcatttatttattcatccacaaattttactgctcactaatgtgtcaagctctctattggctttcacatttagagagaaatatgaaattctctcagccctcaagggaccctcgatctagaagggggaagggggcggggaattataaccaaagaatgccagtaaatttggtgcactgaaagaagttgttgcacatatagtgaaggagcagataaaggagtgggcagccttctggagcgtgagtgg

SEQ ID NO: 38681 - DNA, 1047 bp, Homo sapiens
cttatttgaaacccctgagttttgacaacatagaactgtgaaattttagagctagccaaatagaattgacatgcaatgaataggagttaaaatcattttaattttgaccaaaacaatagtattgactttaaccctacatcatttttcacttttgctgccaaccattttcttttgacatgtcacttacatttgttacctacttcacaaatgctcctgggattggttctccttacaattcatttttcataaaggaaagctggacataaatgcatttgaggttttctagggttacctattcagactcttcagtcacagagacaatcttatgcaccctctctctctctctctctctctcccacaagagctttcaggtacatcctgatgataaagagaaagacatgatgacttgagcagttctatgcagagcatcttctccacaccctataccgtggtcccacacagcgcagttcatttcatgcttccccatgaatgagagtattgtaagttctatgtgcatgaagaaataaatgattatcccattctccagaaacacaaatgccgtatcacaaagcatgcaccattttccttttaaaattccttcctgaaaagtgtttgtggttgttgttttgatgaattaatcatattaggacacagaacgcagatcataagctcagtgatgaagaaactcgtaacattcaagtttcaatggaaatgtttcctgctcagaaagtccccttgtccctttgtgtctcctaacctccattttattttatcataacaccaggttatgataaaaccataatacctggttttttatcataacaccaggttatgataaaaccataatacctggttttcttatttattaatgtattcattgtcctcttgtctgtctagactcgtaggctcttacgtgccttatcactgcattatctacagagcctagaatggttcctgttgctaatcaaatgtttttcaatgaatgaatcaatgactacagctagatatcccaggaattataaggagtaagaattcagagaaagaagg

SEQ ID NO: 38682 - DNA, 1051 bp, Homo sapiens
gtgctgctgtcaacactattgcattggagattaagttttcaacacatgaactttgggggacacaatcaagccatagcagccagccactatattttcatggaaagaaaacatattgagactcccacaaagtaaacttctttggatgccatgagtgtaaaatcttgatttgagcttcatttcatagccatggtggcaaatcaaattgttaaatatatttgtgagtctataattatggagaaagtcattgtctcataatatattccaaaaatgtttaaatatttgtttgtcctcttcttttttcagtgtctcatagtctttctcttttaccatgcccatttatttcttgacatcaccattcatgaaccttcccaacatggttttaagttcaagcttcttgttttttctgctttggtaggatcttgctataccattctcttgcccttcgaagcacaataaagccaataatagagacatcttcttgtatcagcattttggaatcaatattttcataggtcttttacagttaaatcagctcttggataaagtggaactttaagaaagtctggactttaaaatgactatattctggtaatcacaaagtcataaaacagagcatttcagtgacgatgggtcatgttttttcagtcttaatttagaatttttttcaactgactttgagttgctgttacaattcaacctgcctctggtgttttatatgccttaaaatttgtggctactgtataataaccaggaaagcgtagctacagggttccaattactttggcaaaggagccttattacattgtctccaactaagcacataattaatgtctctatttcaaggctatttcagcaaattcaaaacccagaatctatccatacatatttagggatgcatgggaacacttgtgatgtcttcattgcagcagacagtaataccagaggaatttttggaagaatatggaatactttatcatgggttgcaaatattttaaagatgtggtttgaaattaaacatgttgttctaaaaagtctccatgggaatagaatg

SEQ ID NO: 38683 - DNA, 1025 bp, Homo sapiens
caaaacatatgaaaaaattagctgggaatgttggcacgcacctgtcatcccagctattcaggaggctgaggtgggagaaccacctgagcccaggaggtcaaggttgcagtgagcagtgatcactccactgcaccccagcctgggcaacagaataagaccctgccaaaaaaaaaaaaaaaagtgtttagtataaatactgcttgttatagttacattgacaaatacccctaacatgctatcagagctcagccattaagttaatgttatatttaataggttattatagtgatactgtttagccaattgaggttttaattgtgtaagtaggatacattacaaattaagaaactttattggatttttatagaatagtggcttagtgcatgagttataacatagacttatgatgtgaataaacaacaaaataagatcaaattttggccagtattttgagcaggaaaaaatcaacatattaaatcattgggatattatttataattattaaaaactcatgaattcttaactagaattataccttctatattcattattagttatgaattaattcttaaatggctcaaatatgaatatcaccatgtgtaagatgctaaaccagtcactgaggaaaaacaaataaatgtgaaaattgttgacctttttaaggaatttatggcctagaatgtatgcaagatataaaatactaaacaagaagcaatttaaagcactctgtgatacccatgagtgaactggggtgtaaatcctctaatacttaaaaaacagaacacagtcactatgagattgtagctaggtcttcagagattaatatacttcatattagtaacatgtgcttgaaagttcatgagtatgtccagatacttcttatctcaatatttccttggatgtaattactctacttctttgaaatatcttttaagctggtattatggtttgaaggtatcctgcaaagtttatgtgttggaaagttaatccccaacgcaacaatgttgggagggagggcctaatat

SEQ ID NO: 38684 - DNA, 1034 bp, Homo sapiens
agaagcacaaaacagactaagctgttatttccatttcaagcattaggtttcacttagtgtaatacataattcataaatgtgaatattctcagttaggtgcacagaatgggattgatcaagcccccagttcatggtacacagacattaatagtcctgagattggcttcctttttatataatacttcattttaaaaattgtatttgtctaccctatctcctattttcaatcccattttccctatttgtgtatatttaatgtaggactgttcacttaatttttaaatttttatgaatgcatatatatgtatatttatatacatatataagacatataattatgtgtgggatatgtttttaaatttacaaacatttagttatataaatggcaaagagtggtgtatcagccagggttctccagagaaacaaccagtaagatattttatttatatagagagacagagagagaagagagacagagagacagattgctttcaaggaatttgcttgcttacacaactgtggggactgggaagtctgaaatctgtaggcaggccagcagaccggaaactcaggcaggagctgatgctgtagtcctgctgccgaatttctaaaggaactcttggttttgctctttagtccttttggccaattgaatgaggcccatccaccctgtcaaggtaatctcctttgcttaaagtcaactgattgtagatgttaaccacatctacaaaatgccttcactgcaacagctctattattatttgattactgggtactaccatttagccaaactgacacataaaacttgtcctcatacatggcttctggtttcctgttctgcttaagatttcccccacttcttcaagtaactttattttaatttataactatacacctagcttcaacaacagaatacacttgtggacttaggttgtataccatttcaactcaagaaaaagaatctgtattttctacagtccagtctagtaacatttctttgagatcaaacacggaggttccagagtttgaatgtg

SEQ ID NO: 38685 - DNA, 1030 bp, Homo sapiens
gggcctcttcctttacgtcccacaattaatagaaattactgtctctcacacccacctcatgtaccaccttttaaagtgaaagctttaaaatggttgtccctaggtgtccaagaggtattgattccaggaccccagggactggtttcaggacccctgtggataccaaaatctgcaggtgcttaagtccccgatataaaatagtgtagtattgtatatggccaaagcacattctctcatatactttaaatcatctgtagattacttataatatctaatataatgtaattgctatgtaaatagttgttttactatattttttatttgtattacttttttgttgcaatgttattattttttcaaatattcttgtcctcttgttggttgactctgtggatatggagagtcaactgtaccctgttgtactccttggatcaggcatttaggagcagtggctggactatgagttggttattctgggcttgctgactgtataaagatttggttcatgtcactgtcacccagagcctatggggccaggcaggatcagaggaggaaagagggcaagcaggacttctatgagagcaagagcgtggcccagtgcagagccaggcccaaggccactgatgcacaacattttgaatctaggaacagaaggaaagggaagggtgggaagcagaagacaaggcggtggtcctgtccaccctggaaaatgagtgcctgcctctgagaataggatgaattagccatgctcggtggtgctcctccaccgcagtgcaatgtaatggctcactatccaacctgcagccaggctgcctggcttcaagtcgtcactctggtacttactaattgtgtaaccttagggagattactcaagctcaacaagcacctgtttcttcatctgtaaaatgagggttataaaatcattaccaacctcatagattcctgtgaagattacttagaaaatataaaatactctagctcactcctgtaaagagcaacgcccgacacaggaagttaagcatttttgcat

SEQ ID NO: 38686 - DNA, 1050 bp, Homo sapiens
tatgagataaaattgatatgactcattttgcacctctaagtgacagacgatggtgccactagcagagccagacagccccaaaagaagatctggcttgatggaaagatgacaagtttaacttggggcacattaagttgttggtgctggcaggacattcaacaccaaaactcatgagagattttcagtggagagatcactcatgtacagaaaataattgaagccttggaattaccaaaggagaaaatgcctgagaacagaggcttaaggccatttccttaaggaacacccccacttgcagagcaagagcacacaaacagtgaatggcaagaaatgaggtgaacactttggaaagctgcagaagtcatagggggagaaggtgtcagaaaggaaagtccagacaagaattttattgtcgcaaataaatatggaacctgagaagagatgctgaatttgatgactaagagaaaactggtgacctttcaggaaagtagaagagtagtaagggtcaaaggcatgctgtgaaagattaaggcatgaacaggtggtgagcaagtagaagcaatgagcatagaagattttctcaagatggttgatagcaaaagcaaagacatcctagaattatcttaattttattatttgcttaaaagtcacaaacttcacttgacaacttaacagaatagtaaaattaaagtaactttgtaagaacggggagactacaacaggctataaactgaaagagagtttccagtgccccataaaggagtaaaattgaaaaataacagtgggtggtcaagaccacaaaacaagtgggaaaatatgggatcaaggatgtaattgacatgttccaattttatgaaatccacatcatatatctagattaacgtaacaattaacatggtctgccaaacagctcagagatggccacgagaattccaacagtgtatgagccattttgtaatccagtcatgtggtcacccatggatgtggcctgtcttcccaaggatgaattaattaccttatctctttattcattgtctttccattcccatt

SEQ ID NO: 38687 - DNA, 1031 bp, Homo sapiens
cggaactattcacaatagcaaagacttggaaccaacccaaatgtccatcaatgatagactggattaagaaaatgtagcacatatacaccatggaatactatgcagccataaaaaaggatgagttcatgtcctttctggggagctggatgaagctggaaaccatcattctcagcagactatcgcaaggacaaaaaaacaaacatcgcatgttctcactcataggtgagaaatgaccaatgagaacacttggacacaggaagcggaacatcacacaccggggcctgtcgtgggatgcagggaggggggagggaaagcagtaggagatatacctaatgtaaatgaccagttagtgggtgcagcacaccaacatggcacatgtatacatatgtaacaaacctgcacattgtgcacatgtaccctagaacttaaagtataatttaaaaaaaaaataaaataaaattaacagaaaaaaaaagaatgtctttaagagacggacattgttgcagagcccttttactagggttaaactggagtacagagaacattagagtggggctttagtgaggtgtgtgggcctgatttcagggagtatgtaaaggctgggaaacatgaattgtaaggcagagatgttgggggctaacagagagggagggggtcaaaggtaaccaaggtgtcaatcctagatgtctggtagaatagtgtagcatttaatggaatcagaacatcaggatgaaggcagtattaattgcctacaggtgataaaagttgtccacagaaaatatccagcaggtagcaggaaagacagacagaattgggatttgggaaagagtctggactaaagatgcatatttgagaattgctcatggagagatgagaattgatgagatgtggcaatggataagatgtttggaagagtgagaggaaagagaaatgatgagatgtggcaatggataagatgtttggaagaatgagaggaaagaaaattaatgagagcagaatcctttttgtttttacctaaattttaatgatga

SEQ ID NO: 38688 - DNA, 1035 bp, Homo sapiens
ttctcagttccacattcacacatcacactggtagcttgaaatgagccatagacagggaatttatgccacagaagttggcaaatgctacaaattagggttttgttttgttttattgagacccagttgttaaacatttaccagaatgccactgaccacattggtggtgttcttgttatttttgtttgttatttttgcagtttgttttgccctcattagcttcctcactaataatataattttgagtagaagttaagattttggtggatgaatctaatcagagagtgagaagaatgatgagcttcattagattatctagtcaagctgcaaattacttattcaaaaaagcctgtattttaagaacagaaatatttattagatggcagatagaaaagtagaaaatggggtttctgagaataaactgatgattatgtgaccctcagataagtatctaaaattttttattgtatttattagagcaaaactggagaagaatttacaaatttggtgctctctctctgtgtgtgtatatatatatatttgagacagggtcactcaatcacccaggctcatcatacagtggcatgattgtagctcactgcaggctcaaattcctgagctcaagcaattctcccacctcagcctcccaagtagctgggactacacatgtgcgccaccacactctgctaatttttttttttctgtagagacagggtctcactgttttgcccaagctggtcttgaattcctgtgcttcagcaatcctcttgcctcaaacttacattcattttttatgtaaacactttgatatattttataatctccagctttctgcaatgtctgggatcactgtctatacaaggtaatttattgtttcaatttctaaaggaaagtggtgagattttgagagcagagctgggcctgttttatccttttatttccattctctgtcccaccctctgtcttttgataatgcatagcaatttgtaaatactgataaataactggaattcatctagccataagattcatagctgg

SEQ ID NO: 38689 - DNA, 1067 bp, Homo sapiens
ccaacctctggtaactaccaatctactctgtgtttttatgagtttgactgtttaactcatccaaataacagaattatctttttttaaggctgagtagcattccattgtgtatatataccacattttctttatccattcattcactgctggatacttaggttgtttctatatcttgacaattgtgagtaatgctgcagtgaacataggagtgcaggtctctctttgacatactgatttcaaatcctttggatatgtacccagaagtaggatacctggctcatgtggtaattttatttttagtattttaaagatcctccataatggtttttcataatgcttctattgtgtcctgtgcttgcatacttaaaagaatagcaagagacttgagcggaatttatacacaaaacttggagtcctctttctcaggctctctcctttatgaagttccccagctcactctccagtggctctttcctcatgttgctccagctaccctcagtataaaactgtgaagatctgaaactcaacccataccagtcacttactccaagtattgactccccttcaaaatcttcctacttttgttcactctccaagccccccggctagttgtttttctgtattttgaccagttgttatttgcaagaggttcaattaggagcttactcttcaagattacaaatggaaactcctatactgattttatagagaaaaacattttactatttgccagaaacaccttgcaataatataggaatgtatgaagtttatgatccacggactaggcagtggacagtcttctgtgagcagcagctctgataatgtatgcatattatggcaccagcacacacagttattttgatactgttaagcttatggatggttgttttacatgaagtctacggttatgttttacatttgcccctggtcctcaccttcactgagatgctcacttaaagcactaaagtatccagactattgagaattaattctgctctcaagtaactacggagctttaccaccatgttctgagtaattcattacaatacgtaatatagaattgccaa

SEQ ID NO: 38690 - DNA, 1041 bp, Homo sapiens
cgaactgttaaagagtatagtgccatatttcttacatgctctttctattccccataatctcttagccctttttctgccaatgttataccggattattcctttatatattcctatatatattccttatatttcatataagcatgaaaatgttctttctctcatttggatatgtaatcctaattaaacaaagtcccagcattttcttaaaagatatggagctcatctgtcgacttgtaccaatatcagattaattactgtaattattaagaaacatttgaggaatgttgacattcaaatcaactatagcataaaacatgtaccaaaaagatgatgacgttaaataacttttagaagactatgaatcttggttgtcaaggggtccttaattgctatcacattgtctgttgcttaatgcacataaagtataaaagtaactttaatcaaaactaactcaagaatagaacaaataagaaatataataggattagtaaattctattaactggacattcacacacatcacgaagcaagggttcaggagagatcaggctaaagaggtttctggtggaggagggtcaactctaatgaaaacattggaagtcgatgggatgtggaagcatcatctgttgaaatgacttccacaatgagagagaaacatctttctctcttaataaatcattacgtctccactgtccattgcactttggcccctgtctttttacgatagctggcaagtattcactgtgcctgtagggctagacagcaataggaatgataaaaagaagagttgacaactatgattcattgaatgcatactgcatgcatacatggtgctcatttgtattggccagacaatttgtaaaaccgttatagtaatcctcatttttcagaagaagaacctgattctcaggtcacaatgtagtttatctaagatcatactggtggaagtggcataactgggattataattcacacccatctgactcttaaatttaagctagtggctgaactaatttacactcctaccaacagtgtaaaagtg

SEQ ID NO: 38691 - DNA, 1009 bp, Homo sapiens
aatctgcccacctctttttgaatgtaggccagcaaataatttttgttttgcacccttctgtggggcagccctggctgatgtgcagccatgttgagtgattgtcctgcatccaacagcaggaatgaagcttaacaggcactgaagggaagtgaagcaaccctggggaaggagaggattcagtataaatgtaacacaccaaagtaattcatcagtagtaccctttccaacaatagcccaagtctttacagttccatttccattcatttttattttgtagcaaattatcatgtttcttataaacatttagagaaatgtatagttggattattattatgcacactgaaacttaaaggtatatttatgactttctgcacacctcctaggtggaataaatatgccattttttgtaaaccacttctaacagggaccatgacagaccaaatcatgccagtgccctactctgtagtgaagtatctgtgcaatgaggttacaatgacctaataaacggatataccatgagaacgcttaagaacctgcatgcaacattacctttgagatttaaatgagttcttctctgaaaatataatgcagatctttccaacttagtagaaaagcatgcttttagtttgcttagtagaaaagtagtaacattagaaaaggggggaaatagatgtatgaatataaataaatttttttttaaaatttggttgtattgaactttcaaattagccaactaatggtacatataaaataattataatcacactttacttagacagcattaaatatgggatgatcagagtattatctgtgatcgcaaaactgttaacagattatgtagctttattagaaaaaaaatttctttttactattaatatgtgttcatttatgtaaaaaattcaatattactatgaaattctgctgaaatttttaaaaataatccaaaaaagtttacgatgtctatcattaagtcttaaaagagagaataagtgtgaggatatgttaaagg

SEQ ID NO: 38692 - DNA, 1041 bp, Homo sapiens
tatatttttttaagcatgggtggcaaaagttatttaatgaatcatcttccaatgtgcagaaatagttgacaaataatgtacccttgttttccccatatttttcgtatttttttcaatttgcctatatcatacatcactttttccaatatatgattttatctttgcttctcctaaaatgccatttctctatttttctcaaatttaactctgtattttttcttgtgtcttgtgcctgcttccctcacttattccagactttttttttcttttggagccagggtctcactctgtctgtcgcccaggctgaagtgcagtggagcaatcacagctcatggcagcctcgacctccccaggctcaggtgatccttccatttcagcctcccagatagctgggactacaggcatgcaccaccactccgggataattttttcatgtgtgtatttttagtagagacagggttttgccctgtttctcaggctggtctctaactcctgggctcaagtgatctgcctgccttggccttccaaaatgctaggattacaggtgtgagccactgtgcctgacctgttcctgatttttaaatacctggttgtcctcttcttttgtcatttctttattattatgtaatcctattcaccaaaaaaaaaaaagctttttccccttttgttgtctccatcctcaaaaagtgattattgatctcttctttatgtaagatactaggcaggaccccaaagggaagacaatgccctctcctgaaaagccaaggcccagtgaagagatgagagacaggtccaatgaaacaaatacaaatggtatgaataaaaatacaaatgatgtgaggctcctgatgctaagtgtcacaagcacgatgacacttctccagccctatttccatttctactctaaattaattttgtcttcttttgaagtctcacctgcaaggtagcagaccgtaaaaaatacctaaccctctgaactacttaaactctattccaattcggttatttcaacaggaccttttcaacatgctcagtctttct

SEQ ID NO: 38693 - DNA, 1032 bp, Homo sapiens
ccataaatcacactcactttagaaatacgtttttctttgatccaaatgtcttttcttaataactcattcctaagatttccattttcagattcctgtttttgcataagattgcatgaaatattttttgccattacacacagtgcattttattgaaaggactctaaagggcttagggaaaggaaaatttccctaaactgcaaagaaagtcagctaatcattctgaaacataataaaaactagtttttaaaaatagctcatgataggtaatggggagtaggtagacccaaacaagattggtcagtttctacctggacaataaagtaaggcattaatttccttcagatataggtatttctgtagcagatattttttagaatttttttaaaagttgtgtaagggtgttttatttatcagaaaaaataaatgtattttgaactgtttgaaatgtaatccaaaaattacagctgaaaacatcaattatttaaatttatgttacacaaataattgtaagtcttgtgtactggaagtaaacaataaaagtatgaattttcttttgaccacccctttcccctaccaggggaataatggctccatggcagaggcagtttgtacctcagtccatatacatccccttcttattggcattgcagagggattgcagcctccccgcggcaagtagctcaataaccaaatattgaaactgtctgagtctgtaccctgctgcccatgtcataaattcttgtatcttaaggtatcaattttttatatgctttacttttacttatgctttttattcctatgccctttcccttgtactctacacctacctgaaatgcagcatgcatgccagccatgcctatatcccatgaacactacctccaatgctacctgactctctacccttccacttttctttttattatcattaaagtaataatgggccattagtactactcaagacacaaagccaaggagtttacaaaaactaaattactaagtactgtcctagcagccttcctaacttaatgccag

SEQ ID NO: 38694 - DNA, 1118 bp, Homo sapiens
gagtaagaataagaggagaccaggcggccacctgggctgccacaaaatataaggaaatagagagaacaaagaatacaaaaagtaggaacctaaaataaggcagattaagaagagtgaggtggtacttcaaatgccaaagaagtacaagtaccattgaataagtacaagttgctgctgaaaggatgtcattaatacaattaaatgcaactctatatgacatagtgatcattatggttattgcttgtaagaatcaatattcttaaggacatatatgatagtcttctttagtttctcagaatttatatgatgagattaatctctgccacatcaagtagatcttcaaagatataactcaatttaaaaacctgatacatatcaaacaactgaggtttgaattatttgaccaaaaaattttacatcatgattagaatgatgttcttgcctgaagatactcccttgtcaatctaggatataacccagagcctacaaatcctggtaaaaactacttttcacagctcatgctatattaaaaatccctgaagcattcattgttggtttttatagactcttgaaaattcagagccaaaaccttttaaagggtttaggaaaagaaatataaagaaaaaagaaggaaaagtccaatatgaagcaaatacacttgggaaagaaagaagtcatcataatagagcattcacaagcaacagtgagagatgagagatagcatcagaaagagtattgtgtatgcatagagggtccgtcctcagagatacatcctcactttccttttgatgtgttcaagtgaatctctgaaaccatgtatagtgttgagtctatagcaatagaaatcattataaaaattcaaagaataaaatactttttttttttttgagacagagtcttgctttgtcagtcaggctggagagcggtgagacaatcttggctcactgcaacttcagcctcctgggcttaatcaatcctcttacctcagcctcctgagtagctgggaccacagatgcacaccaccatttttgcctaattttttgtattttaggtagagacagggtttcaccatgtttcccaggctggtcctgaactcctgagctcaagcgattcatcca

SEQ ID NO: 38695 - DNA, 1029 bp, Homo sapiens
ttgaatgcagtaaggaaaaaaccatgcaaatatcgaatgaacagtattccaggcagcagcaacaataaagttaaagaccctggagtgtgattgtgcttggtgtgttgaagaacatcaaggaagtcactgtggctggaacagaatgaggcagaggggaagcagattagataggaccttggagcctcggaagccactgggaagctttgatcagagagctactcaacagcatataactgatgcatttatagtgtgtattaggaatagcctgaaatgtattcaagtaaagacttacattctcccttcaccttccaccctcctttcttgccatctctgattattgaaggtataaaatgaagcagtaccaccaaggccatggtaagagaaacaaactcaccttgactcagcatctactatgtgccaagcgccatgctagaaactatagttttatctcaattcagcagcaaaatcagtctatcaggtttcagtggcacaaagaagagaacacagaaatattttagtcaattaccaaatggtaagctacaattttttaaataagtcccccctgcataaagaaaagataaatttttaagttgatggatttctgaattactctgatttgatcattagacattatatgaatatatcaaaatattgcatgtacctagaaaacatgtacatccactatgtatcaataataaatttttaaaagcccccaagccttcttggacatttgctaagggcagtgtggctgtttgcagccctatatgcagaaacctccatgaatatgtagggtacaaggcagagagaactgaattcagtcagagctgaatggtgcttggaaggtgcccagcctcccaagaagatgtctatttaccctcagcgagcagtcacagtgccctctgcccaggagggcaggattagctttgaagcagggttgtttgtttctctttttagaaaagctctgttgaaacataattgatatatttaaaattgcatatatttaatatatacattttgatgggtttggac

SEQ ID NO: 38696 - DNA, 1035 bp, Homo sapiens
ttcatttaaagaggaagtaatctggaaaagagccatgaataacagaattacccagtaccttgatgttttctcatttctctgccggcattcagcccaacagctgtcactgtacctctacaggaacttagttcttgtatggcaacttgagtggcattgagctctgatagaaggtcataacatctttgttagaaataatatgcaaatttttccaagaggttatgtctcaagtttctattctaaaagcaagaaaagtcacaaaacaaatttctttgtagatcaaatactaagaggtgaagaaaattaatttccctctggcttttgtcttggttgacaattcttctgggataaggttgattatttttatgattcctcatggagactgtcagctctgcctgattaactgaaaactagcataaaaagattgtataatgaacattattcatataaaattattccttttagaggctaaataagaaaatttgccttacatagagggaaatttggcactctatgttggttgtcttactttgattaccaaaaatcactttttgagtcctgtatgataactcccatattttagagtagcaattgatctcataggaagtaaataacatagccacacaactattatgtggtcagacaaggatttgagtgcagtaattattagctgggagtgtccatgagcacgtgtgcacacacacacacaagcctcagctccacacgttctgattcagtaggtttaaggtggagccccagtaatcccagactttgggaggccgagatgggcggatcacgaggtcaggagatcgagaccatcctggctaacacggtgaaaccccatctctactaaaaaaaaaaaaaaaaaaaaaaaaattagctgggcgtggtggcgggcgcctgtagtcccagctacttgggaggctgaggcaggagaatggcgtgaacccaggaggcggagcttgcagtgagcagagatcgcaccactgcacaccagcctgggtgacagagcgagactcggtctcaaaaaaaaaaaaa

SEQ ID NO: 38697 - DNA, 1133 bp, Homo sapiens
ggttaccataggtggagagagggagaacatggggagatgtacaccaaaggatacaaaaagcagatatgtaggatgaacaagtctagagatccaatgtacaacatgagaactaaaggtaataaaattgcgttgtgtttggaatttttgttaaacaaatagatttagctgctcttgtcacaaaaaaagtaattatgcgagataatagatatgttaatcttcttcactatagtaactcttttgctatctatatgtatcctataacatcattttgtaaaactcaaatataaacaataaaatttgtaatttgtaattttgatctttattttccccagacatttaaaaatatgtcaaagaatatacttcatccacaggcagatttttcatatccatttaactatgtctccagagagcacttattaacagaagctaaacatatggaccttctaaaattaagaaaacctttttggaacttgaaaagacttttgaatagggctagaagcaacaagccatagtgaattattcaacaccaggatatcaaagaaatggaggaagtaatttcgtgctgtagaagcaaagttctgtaaattgatatgtgatgatattcaggatagtttaatttggtagcctggaagagaatcaaatgaattgaagaaattcttataaatatttctttcttcttttttaaaattaaagatatctgctaatttgaatatgccacctgtgctttactccaatgttcaaatttctttttataaattgcaaaaaatgcatctaattttacaaatattcctcactctctacaattaaaaatatatgcatataatttaatattcttatgaaatcaaatatctaaaatagaaaaatcctaacacagaccttactttatgatcatctttgtgatattctaaatcctcagttattttaaaattgaaacaacggggaagttttcaaataaaagatcttatttcacttgaaagaaaaatgtaggtgtaaggggaaaagttataggtaataagatttaatggctgtgagaaatagacaaaaactgatagtgttctctagagaaaatagctttggggcagacagaagagagatgaggtgtgatactgagtgaagttttaaaaataaagaaa

SEQ ID NO: 38698 - DNA, 1024 bp, Homo sapiens
ccataatgataatctgattattatttataatattaagttctgggattcattatgattttatttctcacaaatttccaaggaaattccaaattgctaagtttagagctggacaggacctttaagttgaattcttttaaccttctcatcttatagttgaggaaataaaatgatacagtttacatttgttcagtgttaacacagtgaggggtagaaaaggaaacatttgccagtgcatataatgcttatattgaatattataagaattgcattttttctactgctgcctatggaccattctcttacctatcattcttcacccgattagccattagtgtgtacacattcataaacctaaaccttttcaattatagtaactcttatagaatggaaaggtaggggggtgtgtgtgtgtgtgtgtgtgtgtgtgtgtgtgtgtgtgtgtggctgataaattattgacttctgtgtactattctttacccatactttatcacttcttacctggacctccttctcttctaactcaaatacccttgcactctaaattttgttgctgtgtctctggataactacataaagaagaaaccgaaagaggataaaagtgaacataggtatcaatttatatataaagagggaagcatgaatctgacttggtactcactctatgagcagcacggaaacaggtatagggatttatcagcttcatatcagctgaccaccacaagaacccataaatggaagatacatgttgttttagacacttgcaagggaggataagtgaaagagaggcctgagcaaagaagctcacacacagggcctgtgcctatgactccagatgaagcccaggtcaggctgtgaacagctctgttagctatactaaccaagaagtttttaactgtatcccaagggcaatggaaagccgatgaaggctttacagcaagaaaatgacaagacgagatttatgttttggaagaatcctcctggcttaaatgtacggaatggagaaagagtggtgcaaaggaca

SEQ ID NO: 38699 - DNA, 1027 bp, Homo sapiens
aaggtaattaagccattagggtggagccctgatgaatgttattaatgtccttatgaaaagaggccagagagctagctagcctctctttccgccatgtgaggttacaataagaagttggtagtctgcaacccggaagggggcctcaccagaaccccaccattctgacaccctgatcttagattttcatcctctagaactgtgagaagtaaatttccatcatttgcaagccaccagtttatggtggtttgttaagtagcccaaactgacttaagacaagtgggaaggggctgagtagtaagaccaatgcctagaatagtgcttggcaaataggagatgacaaatgaataactgttgagtatgtatgacagcagaaaatccaattatgatgctgttgagaaatccaggcaggagaaggcatcactggggccagcatggtagctgtcagtgagtgtgcattaggattaagtgtttaatgcaagtgtgcagaactaagaacatcctatgtttttatggtgtgtccaaatccggagtaaagacaaagttttttattttgtttgccaagatagcattttccttttagcagtttttcttctttaaagatattgtactctttcaccactaaagttgcattacctctgaactggcagttttgctgatggcttctgtggtctggaggcttgcccatttattttctgatttcccctttggcagtgcacatttctgctctcattcttcactgcaagcttcaaatatataagcgttctagttactaacaaccaagagacaaagagattgggggataaaagtacaagagcaagcagattcatacctgatgagttattggagtgtttcccttaatcaatgccattgtcatcccaaatgttggcagatcaagcttggataggatccagtatactcactgtcactgaaaatagttaattacttggagggcattatgtgtggtggtagcacagggctatgtacatataggtaaatcaaaaaaaaacttaatgggcatattaattca

SEQ ID NO: 38700 - DNA, 1035 bp, Homo sapiens
tgagaacacacagtatttggttttttgttcctgcattagttcacttaggattattcttttgcccacttttatttgttttattgctagtgggtcatttgagttatacaatatttaaataaaagagaaccataaacagtttttgtcttaggggataattttttaacacaatggtttccttttcaggtcaagatgagctcagaaaaaaaggtattgaaataattcaatcatagtttactaaatgagaacattttgctaatactttatgggttacatgaataacattcaacttgggagatttttatagtattgttcattttgatttctttttctaaagaatattaatgtcaaaacaagttttcttatagttcatcttctaatcattacacaccataacatgctcacttgagatctacccatcatttttataacaatttccaatgcagctgagatgtgaactcatgacagatttttttagttttttgagattgaagaacagatttcaaaataacacactgaactaatcacaggaaactaggaagcagaaatagcaatttttctgaacagaaattaatattggaactatcaagtcagtaattttatttgaaagtgaaaactagggtcaccaaaatcccacttagaggtcgtcacctcacactgaagactaagataaaagcgcctcttaagtgggtcgccatccgcatcctagttgtgggcactctgtccttccagaccccacagcctattgtcatcaacagcacatctctggcactgtgattagctcaatgtgctatttttaaatctactattcatgctcagagctctcacgcaggtggaagacccttgccttcccttcccagagctatgcagtattcttctctctcaccctccttccactcgcataccacacacacaccttcaacacttcgacctcccttatggggtgagcaactgctgtcttggtttgcctacaactgaaggatatcttgggatatggaatttttggtactaaacccaggacattgggtcacatacgtg

SEQ ID NO: 38701 - DNA, 1023 bp, Homo sapiens
ttgtttatactacaaatcggagaagcaagtcatctcttattttgtgatgaattgtttttgtcatgtgttctcctatgacttagagatcctagagatttctacaaacaacagcttttagcctaatctaggtgacaatgagacaaacacaataagaattttaaataaattcagtgtctcacaacagaatcacatcaatctagagaaatgagaaaatgggtcaagtagataagaaaatctaacttcctactgttggaaaataaactatttaaagatcatgatataagtaatatgaataccagctcaaccatactctgtatttttctttaacattacatactttattgcttccattaattgaattttctacgattctattgaatttaccagtctatattgttttaattaagcatattggtataaatttgcagtcatttataggtgaccaatacaaatttttttttcacttgttttcgcaaaagatagataattctggactcacagatctctagacactgttcctggtcataacaggtattcaagaaacattggttcccattcctatacctaacaccttctgcacattacaggaagaaaaacatgtgatccttgaaaaacttagtctggagaataaatacatgaaaaggagggaaaatagaaaaattacatgctaagaaatgtgtactgcttgagaactctttaagcaacaaaagtgttgtctctattaaaagcagacaggtgaggttacctgagaagaaacccgtgttttcatgttcatctctttaacatggggcaggtccttaggtacaaaacagatctgaacttcttgctttctgttactcttaatttaactggctaaatcagtaatatgactttgcttttagacagttatactagacagatattttattgagtactctttgaatttagaaaaacaagggtactaaaatatgcccagtgatgtaggaactatgtgcagttggaaggactctttgccaaaactctaaggaatcttgtggattcctt

SEQ ID NO: 38702 - DNA, 1052 bp, Homo sapiens
tatggtttacttttattacagcagaattgagctacagtttcatataattagatatttgtctggtccttgtataaaagcatacagactctgtcatgcctgatgtcttttattgcccactttaactggatactaaagtttgtgtttaaagagatgatttatatagacaaagaacttcttctaaaaaataatagaattctattttattgaaactaaagtttacttttttattacatcatttgtctctctgaatctgtagcatgttggccaatatagtatgataataaattactactagaatacctcatatgaaaacttatatttttcttgactattaatttgaatcacttttttaagaatcaaatttcaggatatctggttaatgatggtgggttgaacacatacattagcctctgagccccttctgaaaccacatcaaaatgaatataaagaggtcttttaaagatcctaaatcactaggacacaagaaataaaagagaacacaaacaaccctggaaagcatatggacaagtggtaactgacttagcagaacctagaaagttaaatcctaagtcagcaggtgggaaagccaagaaacctgatttatattgcagaccaaaaggcgaggaactagtggctccaggcacctctggaagtggaagcgaagtgaggctaaaacaaaagccttcttgtaaatttccttaagaggcatttagacacccagggccccttcccaactctgcatgcgaggtaattgcctcacactttgcctcacactttggcaaaaattggaggacgattctctggaaggcctgccagagagagcttccagattgtagtccccaaaggctagagttgagggaggaatactggactgaaaacaggcaggtaaaatgaaagttaatacattacaggtaagctctccctcacttgactcccaaaaacccaccaggcactggaagagccttctctcaggaatctgcagcccaagaataaacacctgactgcatagaaataagggcagaggggatgtggggagttcctcatgaaaagac

SEQ ID NO: 38703 - DNA, 1065 bp, Homo sapiens
atttgttgggttacttgggaagtgttgcagattaatatagaaggaattaggacttggtccttgaatagtgtctcaaatattaaagatcttgaaactgaattattttgcattttgtactttgaaaacattgtgatgcaccaaagtaacataaaactgggtcttctaaggttatgttttttaaaggtactatgcaaaaacaataattcttgcctgtagtcccagctactagggaggcagaggtgggaggaatgctcgagcccgggaggaggaagttgcagtgagctgagatagcacaactgcactccaggctgggtgacacagagtgagactccatctcaaaacaaaacaaaacaaaacaaaacaaacccagtaattctcaaaataaggccaaccttaaaatatcccaggtactaaatcatttagcctataatctgatatcactgtttaacagaaacttttccattgctgtcaactaaaaggtaagaaaagggaatgaaactaataaattctgagcacatgcttcgtgttggatacatttagtgctttacatttgctttttgtgctaaatcctttactaagtttatcatttcatgcaatacctgcaacaacccagtgacaacatctttattttacatatgaaagaaacagactcagagaggttgctcaaagccacacaacaagtcagttatcagaagaagaaaagatccaaaccagagccaaaattatttagcagcctcaaaaaaattgacttcagtgtctaaccttccctcgtgtttaaatactctttccaggataggagatgtaattaaaacaatagctaaacaaaaactcaagccattatatcccttgagggctggggggaagatttaaattggttttgttgttatttggttttttcttttttctttttttttttttttttgaagcttctttttaaccctttttttctttctttctttcttttattttttttatttttttattttttattttttatttttggtagaaacagggtcttgctatgttgctcaggctggtctcaaactcctggcctgaaactatcct

SEQ ID NO: 38704 - DNA, 1067 bp, Homo sapiens
atcagatatctgcttgactcccttaataacttagagtttgctccaaaaggcctaccctgctcctatttaaagctggaaaccttccatctcttcccagcaccttcatcctcttttatcactctctatagcacttatcttccaatgctctatctttctgtatcccaatgtacttgttcattatattatctgcttgcttccactagaaacatcaaatggacatggatatgtttactctgttcagttctgtattccagcatttagaagagcacctggctcagcaaatatttaatgagtgggcttattttatttaacagagttaaagcgatttctgtgtatcaggcactgttctaagcactgtaaaaatattaattcatttaaagtctggtgacaaccctattaagaatggatttttcattccaattttatagaaaaaaaaaactgaggcacagagaggttaagttaaattgcacacattccataaatggcagacccctccatgcttctatcccctgggctctgctgaatgaatgaatgagacatagtggaaaccaccttttctgcactttgttctgagcgtcccactctgaccaaattaatgatcccagtgtttgacattgacccattgaagtcaatgtgctggccctttgcttccccaaaacttgtagcttattagttatttagaagccagtatcaaggagaaagaggcaagtaggccttatctactgggataggtctaccttttagtagaagtatgaaaaggatcaaaacagaatatgcaaatacagatcaaggaactagtgaagatagggctgtggaaatgaatctcaagccccttggatcagcagtagacccttccttctggtccagcttgtcatgctttgctaggctaagggctgcctccacagattgcaggaacctggaacttacctgtgggacagaccgacacgtatttgcatagtaatttgtacagctagctgtagcttattggaatgattacttcaatgtttgggaaacatttaagatgattgaaagggggtaattagcatttgggaggaggcatatctcct

SEQ ID NO: 38705 - DNA, 1043 bp, Homo sapiens
gtggtcagctaacaagccccatgtactattgcaccctattgacaaaggcccaattgatagaggttttatgggctaattactgaaggttttagcatgtccccttctgaactgcccaccttccttacccctgcactctagccaaaaccaagagcatttcaaaagcccactgatctcacaaatcctaaaatcattacatatttgtgtttggaaaacatattttaaacaattataacataagggaagaaataaatctatttaactttttttaattaggtactttgtttcattactactgtacattgatgtatgtctgcttggttttaagcatttgctttgaaaattagtaaaatcttatctagaacataaaattcttcctcatatctatgtgttcaatttttatctctcccctaagactcttctgtcataataacattctatagctatgagcactaattgctgtattgctgatgtggatagtcaagtgtgttttgggatgaccacccaagctgcccttcatttacccagactggctgctttatgatttctctatgtgaaaacacaaaacactcacccaataacatcggcataaagaatttgtgaataacctctaagactgatttcatagtcattcttttttctagctttcattactgacctacccaaaaattgcaaatagacctaaggctgaaacttgggtcacaataatgagcctgatgtgtcaggaagccaacaaattacttctcacagtggctttttttagattccttggtgacgctttccaaaggcagatataacagggccatatttttcagtcttgcagggagtctcagtgagaaaataccagcctgttgttagtcttggatctgcatttgatgctaagtgtaagttgatttcttattgttattttaacagtttattttcagtgtaattatttccacaagaggacaaaagaggaataaaataaaattttattttatcctacgtggataaaataaaattgaagcctttattaaaatcgaccacatggctgagactactctaat

SEQ ID NO: 38706 - DNA, 1029 bp, Homo sapiens
taattatagtataatccgtttaatctacatgtggagaaataatgaaggagcaggaaaaatgaatttcttaacagatcagtggaaaaccatattacatagattagcaactgtcttttcaagatccgtattttcagcatgtactagatggtatctgatgccatgaaagcaaatattctaattccactggccagaactggcaaagaacttcttattttcctcactttgaaacataagtaaaggggttccacttgaaaattaataagccatgtgatatgattcgattcctgtccccaaatctccctccttctaggggccattgtctaaagtctaaaagaaaacataccaggcacagtggctcatgcctgtaatcccagcactttaaagggagagcaaggtaggaggatcacttgagcctaggagttcaaaatcatcaacctgggcaacataatgagaccctatctctacaaaaaaaacaaacaaaaacaaaaacaaacaaaaaaaactgtaatagctgggtgtggtggaacacactggtagtctcagctactcaggaggctgataggagaaggtaacttctgcccaggaattcaaggctgcagtgaattatgattgcaccactgtactgcagcctgggcaacagagtaagacagagagagagagagacaaagagaaaggaaggaaggaaagaaggaaggagggaaggaaggaaggaaggaaggaaggaaggaaggaaggaaggaaggaaggaagggagggaagaaggaaggaagggagggagggaaggagggagggaaagaaaggaaaggaaagaaaataaatgtaactattataaaagatgttcaatgttttattttggaataactttagacttacttagaagttgcaaaaatagtacagaatttccatgttcaaatgtactctttacctaactttccccaaaatattttacctacgtatactgcaattatcaaaaccaggatatgaatacatactattagctatagtctttatttgaatttcaccagtttt

SEQ ID NO: 38707 - DNA, 1061 bp, Homo sapiens
tgttattattatacagtgtcccccagcgattatttttctgtaaattattggggaacaggtggtttttggttacataagtaagttctttcacggtgagttgtgagattttggtgcacccatcacccaagcagtatacactgcaccctatttgtagtcttttatccctctcctccttcccatcctttcaccttgagtctccaaagttcattgtgacattcttatgcctttgcatcctcatagtttagctcccacctatgagtgagaacataggatgtttggttttccattcctgagttacttcacttagaacaatagtctccaatctcatctaggtggctgcaaatgccattaattcattcctctttatggctgagtagtattccatcatgtatatatatataccacagtttctttatccactcattgattgatgggcatttgggttggttccacatttttgcaattgtgaattgcgctgctataaacatgcatgtgcaagtgtcttcttcatataatgacttcttttcctctgggtagataaccagtagtgagattgctggatcaaatggttctacttttagttctttaaggaatctccacactattttctatagtggttgtgctagtttacattccaaccagcagtgtagatgtgttccctgttcaccgcatctccaccaacatctactatttttccacttttttattatggccatttttgcaggactaaggtggtatcacattgtggttttcatttgcatttccctgatcattagcgatgttgagcattttttcatgtgtcttggccattcatatatcatcttttgagaattgtctattcatgtccttagcccactttttgatgggattgtttgtttttttcatgttgatttgtttgagttcattgtagattctagatattcatcctttgtcaaatgtatagattataacgattttctcccactctgtgagttgtctgtttactctgctgactgtttcttttgccgtgcaaaagctctttagtttaattaagtaccagcaatttatctttgtttttattg

SEQ ID NO: 38708 - DNA, 1079 bp, Homo sapiens
gaagtttggaaaatatttattttgaatgaatgaataatgaacacattgtgaacaaataaatggtttactatttaattattcaggaatcaattaagctttattaataaaaattgtttgggggttttaaaaagcccacacacaaatgagaggcatcacagaggcaaacggtatgacattattaaaatcgttattgctgaatcacagttcagcaataagcaagtgtttgaggcattcaaataagtgagtatttgagtgactctaagaagataatgaaactcctccactgttttacagttgcaataatttttaaggaacatataaaaacatattctagtgtttccatttgaataaagatagtatatataacatatgcaattaaaaagaagaaagaaaacaaattttaatgtgtttttcttttcaccttatgggcagttactagatgtatgatcagcaattttagcagtagagaccttattaattgtttttgaaaactctctagtgcttcacaccgtcactcaaaacagagaaattccttttaattaaatgtcaggaagtattccaagaaattttgccagcatttctgctagccagtaagtaaggttaattgacaatctttaagagagaatcttagagacattcatatcataattaatgtaatttaagatgctgaggatgcatgaattacctactcagtgtaaatggggtctttgattgtgaagagaaatactcaagtgcagtggtatcttacagaatagattccctcattagtgtgaattagtgtttctgaatgttgctaattagcaagcctgggaacaaacacaatgaaaaatcaagtttaccaaatcacaaaaaaagtactggttagcatatttggtaaacatgggtcgataattattttgattgaatctcccagcaacctagtttattgtggttgcaggccctgtgcacagtatgttttacctgccataggtataatcaaccatatactaaaagtttgtaatgactgttgagatcaaaaagtatttcagaaagtcactgagaatatagttttctgagataaggagatgatgttctatttc

SEQ ID NO: 38709 - DNA, 1039 bp, Homo sapiens
atagttcgtatccattctagaatatcttattgggttttttttttctcccttcattttctctgaaagaagagagaaaatatgaagatatttctcataataaagatatgaaaatctgttatttgaaagttggacttgcatactggccccgattttcttatccttcctctttcattttctacctctttgtctttttgtcctactttctaggagttttagctaatattatcatccaaacctcttactaagattttcatttctgctatcatttctaaggtcctttgtttttgttgtttttgactaagggttcttttattttagtatcctatttttgttgcatggatagagtattttgccttatatctgtgaagatattaatgacaatgttttgaaattttcatttccttagtttctgttaccttctagttgcttttgagctccatttttgtactggaagatttccttagatacatagtaaattgaatgttttctcataataaaatgttggagactagaagggtgactggagtttctgagtgtattagagctgattaactttgatcttcaccataggttgacctgagtcaaccacttttgggggaattcctggcaacagtatctttagctcttttttcttgcactgatcagattccccagagagtagctactcaaactcctagagggaaaaggtcttactaccattattacgataacgagcaggttgtggtggatcctcaacattcaatctgtgtatgatcacttaataccccagcttttggtttaatacctgtcctttgactgtgttggatgtatctttggatgaaggggtgaactctcatctaaagatttctatcttctgctggaataggagaggaccatatgcccaggagtctgggagagattgcacgcaaccttccttatcttagttatcccctctttatgcttggatcaagaagtacctaacgttgccaattcctgagccttttgagttttccaaagtgtaaatcttgttgttcttagcttttctcagtgttggcatagg

SEQ ID NO: 38710 - DNA, 1065 bp, Homo sapiens
caattcagtccacgaattaatctgacttgcaacaagtatggaaaatcttatctagtgagagcagattaggcttcctaaaagtcatacttaacccagtttatgtcatttcccaagaccttctgaagctttctgcttttgctttacaacctataaaaaggattgtgagctgcaagaaagaaaatgaaataggtttattctgctagctaagcacttcagcaacagcttaagatttactttgttattcttcttgaaacttgactgatttttgtgaagtctttgcagaattcccttgcttttcagaattctttcttggttcttatttttaatggaactttactatttacatgtctatctttttgtggattcttgacattttctgcttgctgcattgtggtacctgagggggatgtttttctcctccatatcctgattctgcctagtggtttttcatcacttctaaattccatttcaaattaacagattgtgtcgcttgaacccaggaggcagatgctgcggtgagccaagattgtgccactgcacttcaccctgggcaacagaacaagactctgtctcaaaaataaaaataaaaataaagagaatacaattaaattaacagattctgtaaaaacctaatagatacactcaatagcttaataacctaattgaaaatattttactcatggtgtacttaatttctaaagatacataatttaaaaaccaactaatacaattagcagctctaaaaagaagtttgcaggtataagtcctaaatcttatgcagaagggttcttttcctaaggtgtttaattatgttcgtaagttcaacatcagttgccggagggtttttgccagaacatgcccacctcttgcagctcccctgaagcagtatgtatatgtatattacagattgcaggtgtgaaacatctattattcatctcaaaatagtaactttgggcatttttcttgttattttttaattgttagaatatttaatacgaatatttaaatatgccttttgtatttcagtaactcttgcaatagtagtttttcctagcagccaaatta

SEQ ID NO: 38711 - DNA, 1050 bp, Homo sapiens
atttcgctgacatacaggtaggactatgggggatgggacatttgagtgggactgagataggaaaggcttgaaaagaacccagaaacaccaccaggaagttggcaaagtaaaagaaaatgacttccccctcaaagggcaatgagagggagagaaacaaaccaaaatagaagaactagactttttagaaaatgagtattgctagggaattcaactacctaatcttcccttattcttatatataagcagagaatttttgcaaggtatttattttttaatatgccctgaatgtcttttgctattatgtgtacattttgcatatgaaagtctaaaacgaaacttcctttactttttatactgtagtgaaaattttctattcttcccaagaatgttgtcccaaatctgaaattactggttcaatttcctgatataaacatttacaattagaagctagatagtactggcagagtctgcaaatcagaacacttaaatatatcatggcagcaaaaagaccaagggaaacaaaatgacaaatgtatttatcagaaagcaagcaatgctgactgcttgttagaaacccatctagctatcttaggtcaccagaacttcagccaacgtaatgacattcaaaaaaaaaggacataagagatagcatttcaattcaattaaaccctagccacaggaggactcaagaaaggaagttgtttccttggcagacataaatgctgcctccagaagtacttctccagcagccaagcagaatgagcagggttatcaagtggatgttcaaaggaagaaggaggccctgaactccaccaatcctccccagccctccccaacaggctttctccatcattgactctcccctgcttttcttcttcattaactccttattcattccctgccagtattttgcttctgaacttcaccaggccttaaccagcctccatccccaggtcaaccagttctccgctttacctaaaatgtgcttctcaaccttttagaaccttgtcccttttgataaacatggaaatttttaaagcttcctcttcg

SEQ ID NO: 38712 - DNA, 1001 bp, Homo sapiens
ttgcccaggctggaacgcaacagcacaatctcggctcactgcaacatccacctcacgggttcgagcaattctcccgcctcagtctcttaagtagctgggattacaggcatgtgccaccacacctggctaattttgtatttttagtagatggggtttctccatgttggtcaggctggtcacgagctcccgacctcaggtgatccgcccgcctcggcctcccaaagtgttgggattacaggtgtgagccatcgcacccaactggtctcaaactcttgacctcaggtgatccaccttcagcctcccaaaatgctgggattacaggcgtaagccaccatgcccggcctaaattaagcttttgaaacgatatcaggtggtgctgctggaaaggcagccgcccccttgcccattacacaatgcatttttatggagaacccgacactgaaccattcttagatgacctgcttctggggtgggatttcagacatagcagagcaacttcctcgctgcgatctattgaaagttaaccctcagctgggcgtggtggctcatgcctgtaatcccaacagtttgggaggctgaggcaggtggatcacttgaggtcaggagttcaagaccagtctggccaacatggtgaaactccatccctactaaaaataaaaaaaaaataaaaaaattagccaggcatggtggctcatgcctgtaatcccagctactcgggaggctgaggcaggaaaattgctcgaacctgggaggcagaggttgcagttagctgtgattgtgccactgcactccagcctccagcctgggcaacagcaagactccatctcaaaaaaaaaaaaaaaaaaagaaagttaaccctcaacgcatataattttattttaaaaagacggagaaaaacaaaaaaaagtaagcaacatcgagaaaaagttgtaagacttttctcaatgtaagagttttttcacaacaaactcctataaaccattgaacgtcactcactgtta

SEQ ID NO: 38713 - DNA, 1046 bp, Homo sapiens
gtgaaactctgtctctaccaaaaatacaaaaattagccgaacgtagtggtgcatgcctgtgatcccagctacttgggaggctgaggcaggagaatcgcttgaacccgggacacagaggttggagtgagctgagatcacgctactgccctccagcctgggcaacagagtgagactccgtctcaaaaaataaaaacattaaaaaaaaattaaactgctagttagatttagagttttgcttaaatttaacttcatcttttgggatgtttatttttggcaagaatacttcataagtaatactaggcattatgcacaagtttagtgtctattaaagtcagtacgtatcatgtggaatttatttggataagagagaaactagtagataagcaaatcagtattgcatctggttactgttttttagccagaagatcagctgccatgttacttgactcacaccaaccctagagtggatgagattgtccttaagaaccttcaccttaatagtcatgttaaagaaacgacaagaggacctcggtaagggcaaaatgtcagtgctcagttactttaaggaatgacgtcaatcctcttttgttcatttcaagtttatttaaatgttctattctagatactgtccctccattgaatcaaaagttttgcgttttccaaaccgtctacatcaggtttggttggaacctgaaggaatggattctgaccttatctacccacaggggttatctatgacgctaccagctgagttacaagagaaaatgatcacatgcatcagaggcttggagaaagctaaagtgattcagccaggtaaagaagatcacaagtgcccttcagtataaggtcagcattgttttaatggtcagtgaggaggccttagctacagtcattgttgttcagagcctcagaagatgaagcccaacacctatacattttaaatagtctgttttttgtttgtttgtttgtttgttttgagacggagttttgctcttgttgcccaggatggagtgcaatggtgcgatctcggctcaccacaacctccc

SEQ ID NO: 38714 - DNA, 1192 bp, Homo sapiens
actttacaactccaagtccaaagtgattttagtcactttgggttacagaagcaaccaaaaatcaaacttttataagtcggatcttaactattaacatccaaatctactcactagcaatacgattacagaagtcaccaaaagcaaaattatttcataagtaaggtcttaactattagcattcagatctaaaccactcactagttctggggaaatcacctaatgattctgctggtaaaactcattttagttgatctttccctttctggtattaaacatacctcagcagcctccttctcaaatttttcaatggttcttttgtcgatgccaccgcatttatagatcagatggccagtagtggtggacttgcccgaatctacgtgtccaatgacgacaatgttgatatgagtcttttcctttcccattttggcttttaggggtagttttcacgacacctgaaatggaagaaaaaaactttgaaccactgtctgaggcttgagaatgaaccaagatccaaactcaaaaagggcaaattccaaggagaattacatcaagtgccaagctggcctaacttcagtctccacccactcagtgtggggaaactccatcgcataaaacccctccccccaacctaaagacgacgtactccaaaagctcgagaactaatcgaggtgcctggacggcgcccggtactccgtggagtcacatgaagcgacggctgaggacggaaaggcccttttcctttgtgtgggtgactcacccgcccgctctcccgagcgccgcgtcctccattttgagctccctgcagcagggccgggaagcggccatctttccgctcacgcaactggtgccgaccgggccagccttgccgcccagggcggggcgatacacggcggcgcgaggccaggcaccagagcaggccggccagcttgagactacccccgtccgattctcggtggccgcgctcgcaggccccgcctcgccgaacatgtgcgctgggacgcacgggccccgtcgccgcccgcggccccaaaaaccgaaataccagtgtgcagatcttggcccgcatttacaagactatcttgccagaaaaaaagcgtcgcagcaggtcatcaaaaattttaaatggctagagacttatcgaaagcagcgagacaggcgcgaaggtgccaccagattcgcacgcggcggcccc

SEQ ID NO: 38715 - DNA, 1033 bp, Homo sapiens
tattgaaagtagtatttttattgtgttctgacaatatcaagttgatacataaaaagactatgtttataattattcaggtatacatatgggaagccagtgaaaggagacgtaacgcttacatttttacctttatccttttggggaaagaagaaaaatattacaaaaacatttaaggtaacttttgcagacactttataacttgtgatgggtaaaatatgtgtatttttctagaaataagatttagtactgaattaacaaaaagttaagtgtaagaaaatcaagagctttccagcattgaacaaatgagaatttatgcaattatagcgattaaaatggtaccagagctatcatattgttgtgacttagtttgagttttatttctaaaatttgaattgctaaaatggtaaataatactgaacttttaaacaaaacagataaatggatctgcaaacttctcttttaatgatgaagagatgaaaaatgtaatggattcttcaaatggactttctgaatacctggatctatcttcccctggaccagtagaaattttaaccacagtgacagaatcagttacaggtttgtagactttaaagtggaggtaaaactattcatgtgacactgctttatcatctttcttattataactggcactttcatttgggagcatcattgactttctaaagatgctatttaatgttgaaattgttatgactgttagtctaagttgcaggatgattttataagggggaccttattttctatgaaagtcactacttcaaccacatgtgatagctcttcttaatttttttttccatttctactctttccccctgaaaactacatggaaaggcttacattttcagctggtaaccttcttctttttaaaatcactgaaatctcagctgttcctagacagttttcacttttaataagaaaataaagttgagtttcttggacctttctgttactatttcaacaactttagccaatccctgaaagagcaaaagactattctttcattggccttaatttg

SEQ ID NO: 38716 - DNA, 1051 bp, Homo sapiens
atttaaccctgagttgacacagcacatgtttcagagggcacggggttgggggtaaggttacagattaacagcatctcaaggcagaagaatttttcttagtacagaacaaaatggagtctcctatgtctacttctttctacacagacacagcaacaatctgatctctctttcttttccccacacccagccatcccattactgggtatatacccaaaggattataaatcatgctgctataaagacacatgcacacgtatgtttattgcggcactattcacaatagcaaagacttggaaccagcccaaatgtccatcaatgatagactggattaagaaaatgtggcacatatacaccatggaatactatgcagccataaaaaaggatgagttcatgtcctttgtagggacatggatgaagctggaaaccatcattctcagcaaactatcgcaaggacaaaaaaccaaacaccacatgttctcactcataggtggaaattgaacaatgagaacacttggacacaggaaggggaacattacacaccgggacctgttgtggggtggggggatgggggagggatagcattaggagacatacctaatgtaaatgacgcgttaatgggtgcagcacaccaacatggcacatgtacacatatgtaacaaacctgcacgttgtgcacatgtaccctagaacttaaagtataataaataaaaataaaataaaataaaattaaattaaaaaatggagctggattagatcatttctaaattccttttcaaatctgagatttttgagtcaacatggaatttcttggccaagcccaagtggaaaccagttctgcctgctagagagagttgcttaccttgtccctttgctctttcttttttgatttttttctttccttgttccatcttcagtgattccccctttgatgaatcttctgatgggggaaaaagtgttgttgttttgcttgctcggtgttatttggtggaccttataaagtgtattttatgtaatttttttctcttttcataaaggttgtcagcttttgttt

SEQ ID NO: 38717 - DNA, 1021 bp, Homo sapiens
ttttttactagagcccagggtaaatgccccttttcagtagttctaatgattagaatttgatttgagtgcatagagaatgtcatcctaaaataaactcttgaggaggttaaacagtccttaactgaaaattctccctgatgcagtaagagattaaagtggtgcttgtgattgcagtgtgcagctgcagtctatttgctctcttttaatgctggccaactgctggtggtagacagattggactgagcgcattgtttctctcttggatttggttagtactttggaccactcttggacatttcagttgtttcttgtaaagaaaaataaaattaggttaagaatggaaaactcagaaaagtgtatcgaaatgctcttatattttggcaaagtcaatgtttctaaacaagggagccgtgtgaactgatgtctgcttctttgaacagggagacaggctgtgagaagttacaactctgaagtgaagctgtcctcctgtgacctttgcagtgatgtccagggctgccgtccttgtgaggatggagcttcaggctcccatcatcactcttcagtcatttttattttctgtttcaagcttctgtactttatggaactttggctgtgatttatttttaaaggactctgtgtaacactaacatttccagtagtcacatgtgattgttttgttttcgtagaagaatactgcttctattttgaaaaaagagttttttttctttctatggggttgcagggatggtgtacaacaggtcctagcatgtatagctgcatagatttcttcacctgatctttgtgtggaagatcagaatgaatgcagttgtgtgtctatattttcccctctcaaaatcttttagaatttttttggaggtgtttgttttctccagaataaaggtattactttagaataggtattctcctcattttgtgaaagaaatgaacctagattcttaagcattattacacatccatgtttgcttaaagatggatttccctgggaatgggagaaaacagc

SEQ ID NO: 38718 - DNA, 1030 bp, Homo sapiens
attttaaaaagaagtgaaagaatcattataccacaatcaatatttctagaaacatcaaaagccacaataaaccaattcccctttatgttgtagaacattagttgaatagcattgctttataaaaaaaaaaagtctagaaatagatcaacgtatattcagtcaattgatgtttgacaaaggtgctgaaaagcaattctgtggagaatggatagtatacttcaatataaaagctacatttctgttatttttgaaataaaattaagaagattatttttgtaatctgggattggcaaataattcttagagaataaatacagaataatataaaattaaaaatgattctttttttgaaattataagcatcttctcatcaacatacactattaagaaaatgaaaagacaaactagattgggagaaagtatttacaaaatatatatgtgataaataacttatctagaatacataatataatacatcatagtaataaaaacacaatgacttagtaaaaaatgggcagaaattggaacagaaaattcatcaaggaagatttatcaaagagccaataaacatattggaaaatgtatttaatatccttagtcatcagggaaatgtaaattacgattataataatatagtactatacaatcataaaatagccccatttcaactgaagtcatgtgacaaattctagccaatgagttgggaacaaaagtgagctatatcatgtgggggctggcacatttaattgttgatgcaaaacacctagagttttttcctcctggtgtcttgacttgtaaccttggagatggtggctgactcagtcactcagcggactccctgaatgaatatcatgtacagagcctcccctttaatccataacagacatggagtgaaatcatttttgtttttataattcactgaaatttgagggttgtttattactgcagcctaaaatagtgtgatctaatagcatggttgaaaaaacctgattttggctatcaacagtccctggatcaaacattcaggtgc

SEQ ID NO: 38719 - DNA, 1044 bp, Homo sapiens
tggcgacggcaggtctggattgccagacaggtttttctttttacctcgaggctttctctgaagggagtcggagcatttaaaaggcggcctcaaggtggattgagtcgggggaggattagcagtatttgcttaggttgtaaaaccgcgactttatctaataaatcgccattcaaggtgcaaatacaaacttggaacagaggtgcgtgacatgtaccccttttgtcctaaagtcaagaatcaataatgtgacttagccctattatcttgcctctaattaagcgattctcacttattctttctctattgctaattctcacgttacatttccccttttctgtgtccacctttctcttttgcgcattgatataggaagtgttttgtaataggctgtagctttttctcttactgttataaaaaccaggacatatagcattactacaaaatgagatactccgtaaacactttaaaagtgccagctatttaatgacccaagaaaatactcgtgatataaaagttgactaagtcaggatattagagtagtgtagcgactatagaagtacaatatagagcgcaactaaaaagtgaaaatggtaactctgctgaccggatgaaggatttttttttctgtttctttgcacttttctgtattttccaaaatttctataataggcgttatgttatttgtaaaatttaaacaatatatacaatccatattatactgacatctttgaaatccaggccagagagtaaatcatatcatttgaaaacaaattacttttttttaggcttagtctgcagtaatgccttaaagaaggtaaactgaggaaagagaaaataaagagtgcttggtcctcataatttaccgttaagctgggctctgtggctcacgcctgtaatcccaacactttgggaggccgaggcgggtggatcacctgaggtcaggagttcgagaccagcctggccaacatgatgaaatcccgtctttaccaaaactacaaaattagctgggcgtggtggccgcgcctgtaatcccagctactcggg

SEQ ID NO: 38720 - DNA, 1046 bp, Homo sapiens
ttgaaattggaaacaaaagatggcttactcgtgcttattatcttcagtatgcagatgattatacttttgtgctatcctagatttccagcttctataggcccgattgagttaaaattctaattggatgaacatagggaggattaaaacaagcacaaataaagccacagatgtagagttaatgtgagtttcaaactactacttttactttattctaatctaagggtctttgaatgtataggtatgataaattcgagtttcaccatgtcttaagcatttttataaagcaagcaaacggtaacttctttagagcataagcataagggttctgggcacggtggcggcacgcccttaatcacacacagcattttggagggccgaggcaggcggatcacttgaggccaggaattggtgaccagcctggccaacatggcgaaaccccactctactaaaaatacaaaaattagccgtgtgtggttggcgcgcgcctgtagtcccagctactgcggaggctgaggcaggagaatcgcttggaaacgggaggcagaggttgcagtgatagcgccactgcactccagccagggcaactgagcgagattctgtctccaaaaaaaaaaagcataaggaaaaggaacaattttagttcctcataaccaattttcatatgctatattgaatctttccaaataaatgatatttaatactaatgttttctgcttatttcccatgattcttttggtgtcttacacttttaataataataaaatattccggccaggcgtggtggctcacgcctgtaatcccaacaatttgggaggccgagatgaacggatcacctgaggtcaggagtttgagaccagcctggccaacatggtgaaaccccgtctctactaaaaatacagaaattagtctggcgtggtggcgcgcgcctgtaatcccaactactcgggaggctgaggcaggagaatcacctgaacccaggagctggaggttgcagtgagccgagatcgcaccattcgcactccagcctgggcgaggagcgaaactac

SEQ ID NO: 38721 - DNA, 1067 bp, Homo sapiens
tttttttccttttaaaagcagttttttattgtggtataatatacataacatataagttactgtttaaccatttttaagtgtatatttatgcagttcattggtattaagtacatttataatgttgtgcagccaccaccaatatttatttttggatcttttaaatcatcataaacaagaactgtgtacctgttaaacagtaattctccatttctctacttcctttagcctctggtaaccttgattctactttctgtctctatgaatttacctattctgggtacttcatatatgtggaatcatacaatatttgtccttttgcatctggcttatttcacttagtaactgttttcaaggttcatctgtcttgtatcctgtatccaattcgtatccctttaaggctgaataacattccgttgtgtctatgtgtgtgtgtgtgtgtgtgtgtgtgtgtacatatgtacacacatactgtattttgtttattaatctgttgatagaaatttgggttgtttccaccatttagcttactgtgaataatgctgctatgaacattggcatacaagtgtctgtttgaatacatgcttttgttattttagatgtctccctagaagtgaaattgctagctcgtagggtaattctatgtttaactttttgaggaactgccaaattattttctacagtgcctgaactgttttgcgttcccactagcaatgcacaagagttccagtttctcccacatcctagccaatacttgttactttccatttttaaaagtaaataatagcagccaggcagggtggctcacacctgtattcccagcactttgagtggctgaggcagggaggatggattgaggctgggagttcgagaccagcctgggcaaaatggcaagacctcacctctacaaaaaaatttaaaaatttcctgagcatggtggcatgtgtctgtgatcccagctactccataggctgaggcgggaagatcatttgggcccaagaagtcaaggctgcagtgagccatgatggcaccactgcactccagcttgggctaccttgcctcaaaaaaaa

SEQ ID NO: 38722 - DNA, 1082 bp, Homo sapiens
gatttattgatctggttttctgctggccaaaataaacaacaaattcagagatccacaaatatacacacaaagttctaccaaaactataaatatgttaaagaaatttttatacaagaagtcattcagaatatattggctaaatattgtaggtgcttcacttctgtctgggcaacagctccgttcatcattaccactttatgtgccttcaccgatgagatgttgatttgaagttttatttgaaggagagctttgaactggtaagtctctcatttaaagtcagtattttatggttttctttctttcatttcttttatactttttctgattactttaaaatataaaacaattattcagtatgcatatagttttgaaaaattagaattaaatctgaaattaagctgcatagaaaatataccactttttaaacatgtttataaaatgtttacgagagactttttaatcattaaaaaaaagtttggatgtatataaacagtaatacaacattttacatttttgtgtaaatatctaggactttacaataaatagctgagttgtcttcgaaaacgttgtatttgactttctttgatggcagatttactgtagttatacattttttaaaaactgtctttacggtgctagctgtcctgtacatttcatttctgaattgtactatttggttcatcatgagtctcaggcacatcagctttttgaacatgtatctattaacatgaacctgttaatagatacattagtttaatcttctagaatttcaggccggtgatttctcaatgaagggttgatattttcaagagtggtagaagtataactattttaccatggtaataccactggaattactttcttttcattagctaaggctttctttcctttcagttcatttctttgtttctctatctttctacccttaattttcaatctaagacaaaaaggaaaaatgaatgagaatatataaaatccataactaaataaacagaattatgtgttcatttattgtagggttcaacaaactatgatccatgggctaatcttgcgtgccacctaattcagttaataatttttat

SEQ ID NO: 38723 - DNA, 1050 bp, Homo sapiens
ctgagctatttttcttttctcaggtccatatggatcattggtttaaactattatagactggtttctccatttgaaaatgagtgtggaattaagagaaatcctttattaaatttagttcacagtgtcttcatatctttccccttctctttcacagaatcttctctttgtctttgggcttctgcagtttcactgtgcttcttttaagggatttatatcttttgttagttaagaaaacattttagtcattatctctgtggattttacctttctacattattatttctagacctcctaatagacataaaaccatcatttaaaaaaaaaaatccgtaacctatattttatgtttaaaagcaaaaaaggaaaaaaaatggctaatggaatgaagaagtatatctctgtaccgtattctgaataatttctttagctctatcttccaatttacttttatctttagctctaagctgctatttaatccatacattggattttttttttttacttttaaaagatttcaatgacatttatcatttatagaactgctgttggttctctttcaaagttgtattttcgatagtgtgtctaattttttactgtttcaattctttgtttttcagaatttaagtgcttttaacatacatatgtctctaacttaatggtttctattaggttctcttattatctgatattcttcggtgctaaacttcctgaatatcagtactttacttaaattacatgatgtgataattttgggtggaagataacattgataattttcacatatttagtattctcaatgaactattcattgatgcagcaaatacatattgagcacagtgttctaagtgttggagcaaaacagactttttttgttcttgtggaacttaaattctaataacttgctatgcttattagttacttaatgattaatgttataaacaggagttgtcacattaaggctctaccctgaagtctattgtctgttagctacagtggtttttacgtttttaaatgcttggaagaaagaatcaaatgaattctatttcatga

SEQ ID NO: 38724 - DNA, 1028 bp, Homo sapiens
tctgacatcagtaaggtccatgtttgtaattggttttctagtcatttgatctcttttcgaacaaatggattcatctattcacagtagttctcttgatgctgtgcttgcattacctggaaaactgtcttaggctggggtagggcggtggatttaaagttttagggacttccagactgaatatatcatcatgattttattaatgggagtactctaatctgtgagataatcagccataaaattttaaaaacttatttacaccttatttcctcccagtaatttgatgtagattaccaaattagcacaaataaaataatggaaaatcaaaacaattaggaggtgagtagatgtgccaggatgctaaaataatttatatgttgtattttaattcaacagttgtctctgaattttctgggaactgaaattgtgtcctgtaattttataattgtatgataaaggaatctttacaaatttattttgctccttttgcctgttatatactgtgatctctctaaagtgattgttactgatatgtttatattattatttgcatctattgaagtataaagtatcaatttctgcctgtacagaaactttgatactaaggcaaaagttcttatacataagcacaagttgaaatgacagccgattgccatatttggctgtagtgttctccagatagcagcaaggcctgataagcaggggaaatgcttactttttactctctggagaaagctatcctaagatcctctaccctaattgtctcaaatatctttggaaagattcacatgaaaagaaagtaatacaataaacctccatgttcctacaaatttgcattgtctttaggaaaaaaaaagtaggcagttgaattattcttaaatccatgccaatgctatccaccatcattcccaatagctgtatgtttttactacttttaaatggttttcaaatagttgttgatagattgtcacattatagcatttttgactcatatttctggatctttttttacagttaaatcgtcgatctga

SEQ ID NO: 38725 - DNA, 1047 bp, Homo sapiens
ttatagtactaattgaaggtaatttttcttttctatattgtatgaaatagtccaacaagaatgtaagttgacatttttacaaagtcctacattactaataatgacttttccccggttttatgttttattttaacatgaaagcaactctagggcaggacttgataaaaacacatattgaaggtacctgtaagaataccatgacttgttaatcagatacattataatgaatgcattttttctcaaggataagaaaaatgagcattgatgtgtctttgtgtgtgtagtgtgtgtgtgtgtgtgtgtgtgtgtgtgtgtgtgtatatatatatatatatatatatatatatatattttttttttttttttttttttttttttaactgttttccttttcctaactcccttggcttattgggaagtattatacctaacccgtttcttctacctctgtttttctacctatttcctttcctctgtacaggtgagtataaaaaacaacagaggccggacatggttgacttagacctgtaatcccagcactttgggagggcaaaataggaggatagcctgagcccaggagttcgagaccagccttaccaacatggcgaaatcttgtctccataaaaaatacaaacattagccaggcatagtggtgcacacttgtagtcccagctgctcaaggtgggagaatcacctgagcctagggagatcaaggctacagtgagctgtggttgtgccactgcactccagcctgggtgacagagccagaccctgtcatctcaaaaacaaaaacaagagagtactaaactgttcttattttttgggcacagcagtatagaattggaagtggctacattaggtattaatgcctaactgttggttttcattttgctttttctggaaatgcagctatataagaaataaatacataggataggacagactagatttaaacttttatgtttatattttgcttcgcttctttaatagggatgtgattatattcccttgtttttctgtcatttatctaacctatgtgttttttag

SEQ ID NO: 38726 - DNA, 1313 bp, Homo sapiens
tattaatgtacatttataatattcttttccttttgaaaattttttttaaatttgtatatttttaatgtgttcatgtaaaaacaagttactatattttttttcttcatttgctaggattaaattggtattttagttgcatactccacatgataggagtataagaattgatataggaatttggggattttgtaaattatgctttgcttacagttagttccaaatatttcattccttttataataaggataaataatattagacatgaatctcattttattctaaattgagggcttatataatttcattctcgagtaattgatgttaatagctttttggagttttcatgaactatggagaagggtggaacttttatacattggacttgtgataagaagccaagattttaaattataggcttttccttgtgtcccaaatcatataccatatttaatctaagacttttgtgcaaaaatttcagccttaaaaaattttttttcttactccaaaggaaataatcatacctgatattaggatcagtctggaaccagtaaaaattttataacttctaggaaatgctattgtttcttgaagactatttctgtaacaacagtagtctcctccttatttgtggtttgatttaaccattcccttattagtagatactgaagttgtttctgaatttgctatgataacattattgaatttttcagatattgagaattatgtccaggtgagggaagtacatactatttataaaagtacaaaggaggtaccatggcattaaacatgaaaggacaagctaactcttctgctatgtagcaacactctcgggcatataataaaaccaggtgtagtatacagagcaaaaaacccatgtgctcacaaaaacatttgctcgtcttctggcaatgtaatcagaaagtgtggttgacacccattttatttatgaaatgtttttaccaatgcttcattttggtatattggattcggtactatcatcagtttcaggcacccattgggggtcttggaaaggatcgttagagaatagcagggaatattgtattctaacatatcttcaagtatttgatagttaaagcccttttaagatttttttatatttttgtgtattcatcttcctgtttgtttattttgtatattgacagaaatcgaaaaacaatttagacatgactcaaaacatagtatattatatatatataatgtatttaaaacaagttgatcacagtataattttgccttaatgactatagttactgcaactacagtgatatatcaacaatgaggtcttgcctctt

SEQ ID NO: 38727 - DNA, 1123 bp, Homo sapiens
ttccagactagccttggcaacataggaaggccctgtctctacaaaaaaataaaataattggcctggagtaggtagtaagacagtaaacaaactggaaagtccagctatttttaatttccaaccaaactgttgaatcaattaaaaaaaaaaacgagtctatagtgcctttcaaatgcctgaattttgacatttgtacatcagctgatggattaatattttgaattgctatgtgatggctctgcatgggcatggtggccagtgcttcagttttgacagcattaccatccttggtgatgacatggacagcaatgtttctacaattgtttgaaatggtaaatatatttttgattacatgctgccttttaggcatacgcttttattcattccaagtatttatcgaacctgctgttacaggatacagtgcatcctgcataaggatacagtgatgaacaaagcagacaagatccccgcagtcctgtagtttacattcttatgggacaaagactaatactgaacaagtaaaacatgaaataataatttccatgtagagaagtgtaatgggttgatgtgatagactgacagtatgatttctttaaatcgcatattcagggaaactctttactatgaagctaacatttaactaaagactaaatggggaattggcagtgccacgatcataagaatggcttttccagatagggaagaggttgtgctaagttactaatccaggaatgagtttggcatgtcaaagaacagaaaaaaggggccactaaggctggagcttagagaggaaaggagacaatgttatgagacgggtttggagagactggctgggacctacgtcataaaaggtttttgtaaggtgatctgaagcatttggattttatattagtgcgatagaagctttcagagcatttgagatagggaagtattgttacctgataaatatttgagatttttaaacacagtcttttgcatgtgatttataatttggcataaatagaagtttaaatcagtggcaatcagttaaggctgggcaagttcctctctaaatggaggtgtgttacaaaggaaaatcagtaatagtctgtaagtactcaaaactatctcagcaaggtctagg

SEQ ID NO: 38728 - DNA, 1056 bp, Homo sapiens
tttctttcttttttttttttttgttttctttttctttgagacagtctggctctgtcgcctaggctagagggcaatggtgcaaccttggctcactgcaacctctgcctctcaggttcaagcaattcttgtgcctcagcctcctgagtagctgggattacaggcatgtaccaccatgcctggctgatttttgtatttttagtagagacggtgtttcgccatgttggccagtctggccgcgaactcctggcctcaagtgatctgacggccttggcctcccaaagtgttgggattacaggcatgagccaccttgcccagccggtaaatttctaaggctagaatttagttcgtaatagtgtaccagtgttggtttcttttttgacgtgtgatggcaatattaaggtgttgacattagggtaagagatataagggtattctgaattgtcttcgtaacttttctgcaaatctaaaattatttcaaacttagtttactacaaaaaatagactttcaccactgaggcttatcgaacttttaatgaacagagcattctgatgttatttaaacaattcaggatagagaaataaatgctctctagttcattttaaacagcttgtaaaaatcttgggtttatgaaatgggacctctgaagctacacaaacgcaaaccctaagaagcaaaaatgctacccacctacacaggaagacagcagatgacagtagagcttctctgcctctggttggttaggggtagaaaagaaatagccactttgagattaaatcctaggcttgattttcaatgagtttggaatttgaaatttatacctgcaagagtaatggaatcctcaaattaagaaattaatgtaaatgctggccaggtgtggtggtttatgcctgtaatctcagcactttgggaggccgaggcaggcagatcacttgaggccaggagttcgaggccagcctggctgacatggtgaaacaccatctctactaaaaataacaaaaattagcacagcatggtggcgcacacgtgtaatcccagctactcaggaggctgaggca

SEQ ID NO: 38729 - DNA, 1050 bp, Homo sapiens
tgcgcttttatacaattagctataaggtttttgctttttttccccccaaattttgcttttttcccccaaaattagtgttgtgtttaaatagatacagtatttggatgtagtatttagatatagtacttagttactaaggattatgtttaaaatccttgatattgtgtgtatttgaagtttaagagaggaatttaatactttacaacaaacatactttatagcccctgacataatgtaatcatactacaagactaaatacttgttccacgattgctgatcttgtacgtaacgttttttgttctgattttggaattgtcctcaagacaatctcattcaacatttattcctttatttattaatttgtttttaaacaactaaaaaatacagtaaaattttacaaattgagtttcatttattggtatagttttgttattttatagtatcactttttatatggcaaagaagctatgatttgcttttaataggcttattgtaagtatgccattaactttttcattttgaaaactgtatttcctgttagaataaaactacataaatttcttttttaggaaagaatacccacctcatgtccaaaaagttgaaattaatcctgtaaggttaagtcggctccaaggtgttggtaagtgtgcagttttgttacacctgtgaaggatttcaaattgctgtatgaaaagtacaatggagatacgatgctggctttagaatattcccaggtataatagatatatatgtagaaaaccatttttttgtaactgatttgagaatttcttcaatggtaacctgatacctggaacagttgcacagttaggtgattacagtttgaaatcttttgattattttagcatttttgctatgttacaaatttgcaaatagtgtaactgtagttgagctatagctttgaaattgagttttattgaactatgttataatgtattatgtaattgtgtttccacttactggttttgcttctaaaatttagaatacattagggaaacactcaattaaaaagagaccacacctgctaaaact

SEQ ID NO: 38730 - DNA, 1509 bp, Homo sapiens
ctactggaccattattaagaacgtcaattcatcagaattctggaggacagaagtcacaaaacacaggattaacaaccaagaagttttatggcaacaatgtggaaaaggttccaattgatattattgtgaattgtgatgacagtaaacacacttatttacagactaatggaaaagtcattttacctggggcaaaaatacccaaaatcacaaacttgaaagaaaggaaaacaagtttgtcagacctaaatgatccaagtaagtattttactccctttaatattgcttatatcaatccagtatttttcagatatatttttacaaccactctccccaaccccatatatatttttaatataaatgtgagcttaaaactaatcttgttctcatcctgtccatcttaaatagttaaaaaaaacaaaaaaaagaaccacagaacttgaccctagtcttagatgaagtgctagttataaccagcattctgacttcggccaggttaatttaatctttctgatctgtaaatgggtagatttcctgctgatagtgggtttttttttttgtgggggggggggtgcctaaaataacataaagtatgcatagcccaataaaatatttgacatacaatatccttaccacatttgttcctaactctatatcctgtctttttactcttatgtgtatgtgtatggcatgcagtccttgtttataataaatagcaaaagattagaaattattggggactggttgactagagtatacagcgtgtatactctaaaggagtgaaagatctgataaactgtgtaatttccaagatccttaattaagtgaataatgcaagctacagataagagtgtatactgtggagaatgaacataatttcttctaaaaaatagaaattgggcacagtggtgtcccaactactcaggagactgagatgagagaattgcttgagtccaggagttgaagtgtagccagggcaatatagtaggaccctgttgctaaaaaaaaaaaacaataataataattataaacagaacactaggctttccttttaatatatacttgtgtagtttttcattaaaaatatagttcatgggcctttttaaaaaatctatatacatgtacacacatacgtctgtatgtatatatatatacatctatatatgtcaggtactgtgctaagcattttacataccatttgttcttgcaacgattctgtgaaatagatacccttattgtccctaattctacagagaagagaaattgagccaaataaccagtaagtggcaaaaccccacctctcaaatgctatatatgtaaatctgtttagatcgtctaatctggcctgttaggttttctgctaataaaagaccagtgttgaaagagaaaccatgctcaatatttgttcctgagactggacagtaaaattaaaaagacaggtagagaaatactgagatgatacttctctgggacatgtacattactcagtaaaaattaagcatttatgtttga

SEQ ID NO: 38731 - DNA, 1024 bp, Homo sapiens
aaaatatgatatataaaatatatatacgatatatataaaatatatattatatatatatacttgactacatggagtttcacacatatttacaatgcattctattttgtgaacaagttgtatgcaaattattttttacaccttaaattttttgggactctgaaatagacctactgttcttcttgtaacttgctgatattgctgtttgggtgagtggtgatggactgtaaaatcaaattttatatttgtatcatattttttaaaagataccaagtcttaatgctttcttcagatttaactttttatcagatagagtggattgtatcttcattcatttttattaattttagatctggaggaggtccaaagcaaatttaggatattttccactttggtaatttatttgcatttttaatggacagaaatgaaatataaaattataactatagttttaatataaattataaattattaaaatacttttagtcattttgtccagtgatgatgatgatgacaacgacagaactaacagaagagaaagcatatctcctcagcctgctgattcagcatgttcttcccctgcaccatccactggaaaagtagaagcagcgctaaatgaaaatacttgcagagcagagcgtgaactacgaagcattccagaagactcagagttaaatacagttacattgccaagaaaagcaagaatgaaagaccaggtacttttcacttttgttgacatttgttcagattaatgcctccattttggggtgtaaattttttttagaaggcagtttggtagtgccaagaaaaaatgatggattattaagtggggcttaaataccacatgggagattatttggaagaacattaagccatatacaaaaataagtttcaattaaacttaaggcttgaagtataaaaaattcaacaagaaaacacagtatcaaccttaaaataaaatgtcagtatgtacaaaaatttcttataaaatctagcagaggagagaagtcattttgacagagatata

SEQ ID NO: 38732 - DNA, 1080 bp, Homo sapiens
gcccatgagttcgaagttgcactgagccatgatggcgccactgcactccagcctggtcaacaaagcaaaactctacccccacacccacccccgaaaacaggagttgtgagaattaaatgagatcgtacatatcaagtagtaggaaaaatgcctagtacagtgttagaagtttatggtcttgtaggaagcacaaatacagaattaaagcaatgatagaagcattaacatggtacagtcctagcagatgagagaatgcttcattatctttggaggttgggagatatgagggaccaggaagctttcctggaagagcttacattatgacccaatatacattatgacccaacataacacatgtatacacctatgtgcaatgtgtttatacatttatcaatttgtatgtttttactggtttgtgatataaaatggacatgtatatgaaataaaacagaacttagcatcagtatgcatagttctctgtaatattttctagtttcttatactgtgtttcattaaacaaaacaaaacttttaaaaattgatgctggaatctgctgaattgattttatagcctattggtggttgcaactcagtttggtgggaaaacacattgttataaagagcaaagttttgatcagagaaatgatatcataattgaatttctgttaagaccattttgataggcatgacatcgtggaagtctagatgagaggtgatttaaggaaatttaattaagatgatttaagaagcctatttaagatattttagttgaaatgatgagacattttatgaggtagaattgtttactatatagaattagtagtactccaggactaattaagtggatattaaggaggagaggaaagggtaccaggtagctcctagttttctggctcacaagacctgctaaatgatgttggcactaaagcagtgaatgcagaaggagaacaggcttgggtgaggaggggataagttcccttttagaggtctgtgatataacaaaaggacagtgccaataagcagttgagcaaatggcgctagagtttggttgagttctgaccaacagagatggtaagatgtt

SEQ ID NO: 38733 - DNA, 1096 bp, Homo sapiens
gccagttttcccagcaccatttattaaatagggaatcctttccccgtttcttgtttttgtcaggtttgtcaaagatcagatggttgtagatgtgtggtattatttctcaggcctcttttctgttccattggtgtatatctctgttttggtaccagtaccatgctgatttggttactgtagctttgtagtatagtttgaagtcaggtagcgtgatgcctctagctttgttgtttttgcttaggattgtcttggcaatgcgggctcttttttggttccatatgaactttaaagtagttttttctaattctgtgaagaaagtcactggtagcttgatggggatgacattgaatctatacattactttgggcagtatggccattttcatgatattgattcttcctatccatgagaatggaatattcttccatttgtttgtgtcctcttttatttcgttgagcagtggtttgtaattgtccttgaagaggtccttcacatcccttgtaagttggattcctaggtattttattctctttgtagcaactgtgaatgggagttcactcatgatttggctctctgtttatctgttaatggtgtataggaatgcttgtgatttttgcacattgattttgtatcctgagactttgctgaagttgcttatcagcataaggagattttgggctgagatgatggggttttctaaatacacaatcatgtcatctgcaaacagggacagtttgacttccccatttcctaattgaatacgctttatttctttctcttgcctgattgccctagccagaacttccaacactatgttgaataggagtggtgagagagggcatccttgtcttgtgctggttttcaaatggaatgcttccagtttttgcccattcaggatgatattggctgtgggtttgtcataaatagctcttattattttgagatattttccatcaatacctagtttattgagagtttttagcatgaagggatgttgaattttgtcaaaggccttttctgcatctattgagataatcatgtggtttttgtcattggttctgtttatacgatggattatgtttattgatttgcatat

SEQ ID NO: 38734 - DNA, 1096 bp, Homo sapiens
tgttatctcttttttaagtgatccatacaagtggccaaaaagcatatgaaagatgctcaacatcagtaatcattagagaaatgcagcatcaaaacaatataacacagtgtcatctcacatccattaggatggctactattaaaacaaaaacaaaaaaaaacagaaaataagtgttgatgaggatgtggagaaattgaaactgttataaaatggtgctgccactgtggaaaacagtgcgtaggctcctcaaaaaatttgaaatagaactacaatatgatccagcaatcccacttctgggtatacagtctcgtgccacataacgtttcagtcaattatggaccatatgtgatagtgagcccataagattataataacgtatttttactgtaccttttctctgggcacacaaatagtttccattgtgtcacagttgcctatggtattcagtacggtaacatactatacaggtgtatagtgtagaagcagtaggttataccatatagcctaggtgtataggacactatgccacctcggattgtataagtacactcgatgatgcacaacttcaaattacctcatgatgcctttctcagaacataaccccattcttaagcactgcatgactggatgtccaaaagaactgaaagcagcgtctttttgttttgagttagggtctcattctgtcacccatgatggagtgcagcatcacagtcacagctcacgatagcctcctgggctcaagtgatcgtcctgcctcagcttcctaagtagctgggactacaggtgcacaccgtcacaccctgctaattttttcacttttatacagatggtgtctcactttgttggccaggctggtcttgagctcctgccctcaagcagtcctcctaccttggcttcccaaagttctgggattacaggcataagccactgctcccaaccagaaagcagagtcttgaagacatatttgcacacccatgttcataacagcattcataatagctgagtggtggaaacaatcctgctgtccattgatgaacggataaaccaaatgtggtgtatacatataatgcaatatgtatacatttccttccttaaa

SEQ ID NO: 38735 - DNA, 1031 bp, Homo sapiens
ggattttatttttgtaccccttaatgaagcgtgagtaagaatttcctttaaaggaaaatctttaaatcatgtaaatgatggcaatttttaaataatgagtatgaggtgaagaattcattttaaaacatctttctgaaatctcttgtgtatattcatatttgtactgcctgttttacaagaattaatgcagtttcacagtgaagcatgtaagatattgaattttagagacaatagaccagatacctttctaatctcattttattcattaatgtcaaataataccatttttaaaaatatggtgcttattgtctagcaagtaacctatagaaaagtattattttatacaaaaagatgattaggtcacataaaggaattggaatcttaagtttaaaatacacttctgtttttagccagaaaggagaaacgatggttggatttatgccatttttcaattaaaaaccatgtggactacttgaagcagtttctgagtaaatggaggtgtttaaagatttgtattattctctcccaatgactagatagtagtattttacaatggagacttaaaagttttttgtgttttattctttcgcttttctatgccctcaatccaaagaacaccagaaatacacttgtagtcggaaaacttgggtttatcacttgcatcaaggaatgacacacaccatgggccactctggagcctctcaataaaaggatgtttcaaagaacctgtgacagaatctgggctttccttgagtgatatgggggagggtctaaagtagtggtttgcctaggtaaagaagtagcattcactcattaataaagaagaagaatgttggctattttgtggtttccaactgtgaccttatgtttttctctgcttagacaaattatgatatggccctactttgtctcattctatcatggttgcagaatatgctttcctggagttggtattctatgagattgtttatgtctaataagcctagctgtgccaagctagcttctgaattttttttttttaacttttgtag

SEQ ID NO: 38736 - DNA, 1046 bp, Homo sapiens
ttcatattatcatagtaaaatttaaaataacatttaaaactagttaatttcttcattctcttcaaaataaggttttggctgggcgtggtggctcacgcctgtaatcccaacactttgagaggctgaggtgggcggattacttgaggtcaggggttcaagaccaacctggcgaacatggcgaaacctcgtctctactgaaaatacaaaaattagctgggcgtggtggtgcgtgcctgtaatcccagctactcaggaggctgaggcaggaggatcgcctgaacccgggaggcagaggttgcagtgagccaagatcatgcccctgcactccagcctgggcagcagagtgagactccatctcaaaaaaaaaaaaaggaaaagaaaaaaaaagacagaaaagaaggtttcttgactgggtactaatttgtcttgtaaagtaacatgtgaacagcttactaggtgaaagggaggaaagcgatttgtcagaaatgagttataaaaattttaaatagaaatattatttgattatacacgatttaggaatagaggcgcatccctcttagtcactatacctctgcatggaagttattatcagtgcttccagtcatcttagtgagaggtagaaaatgaactctgtaagagagctctaccatttgtagattaaaaaatagcctataaatcaagagagcttgtttttgtttttgcttttttttttttttttttttgaagagacaaagctacaaatacttatacactaattatgttagattggctgccatatatttgtcatctgttttgtttttattttttctggtagtaccagttttgtttttcttttctttctttcttttttctcgagatagggtctctgtctgtcactcaggctggaatgtagtagcatgatgtcggcttactgcagcctcaacctcccaggcttaagtgatcctccgacctcagcctcctgagtagctgggactataggtgcatgctaccacgcccagctaatttttgtatttttttttagaggatggggttttgccatgctgccc

SEQ ID NO: 38737 - DNA, 1042 bp, Homo sapiens
ttctgaactgctataccaatctctaacagattcctatgcctcctgccttctggttttcatggttgtttcccaaaaacataaatctaatcctgttactttcctgctttaaatcttatagtggcttcctgtggctgttgatttacagaccaaaatctttcacatgattgataagcacctatgtgatctgaccccctatttaagcttctagcctcattttcccaccattttcactctagctttaatacaacagccagccacctgaatgccattgtttcatgttctttcttgcctctaggccttgattcatatttcctaacctggaatacttttttgttgcttctattataccttgtctgtctaacatgtattcattcttcaggtcttagcctaaacatcacttcctcttggaattgcataaaaccccagatatgtattttcacagtactctatacttctgtcataatacttgccatatttcttgttttaattgttgaattacctgtctttctaaactggagctggcaaacttgttaataaagtagtaaatacattaggctttgcaactgtgcagtctctattgcctcttagttctgctgtggtccagtgaaagcatctgcagaccatatgtaaatgagttagtgtggctgtgttccaataaaactttattacagaaacaggtggtgggcagaatttggtccactggcaaaccctgatctagactataagatctatgatagaaactgtgtcttgtatctccaatacctaacacagtacttggcatgtgatagataatacagaaatacatattgaatgcgttgttgggttttcttatttttaacttcggaatgtttctgtgattgaaatgaaaggttatttattacagttttctaatacgcatttaattgtattttcagaatccaattctcagttttgaactacctatgaatttggcaaactggtttcctccaccaagaatgagaacaaaaagagaagaaatccgaaacataattctgaagctacaggaagatcagagcaaagagaa

SEQ ID NO: 38738 - DNA, 1040 bp, Homo sapiens
gaagtcaaataatagaattctagggttgagatacctgtgctacagcttaaaccattaagtcccatatcttggagggtggcatttgtcagtactttttcaaagatccccaggtagttccaatctgcagttcaattacttatcttttttaaaaattaaatctttgtaagtaaaactttcttgtcaggtgttgaggaaactcttggtaaccagaatgttttaaaaatttagtttttgtgtactaatttttaaaatgtatggtatcttgtggaggagttaaaaaagtagaacactctctgggatagagacttaagaattatttaaaattattaaaatggtacacttgatacaaaatttgaaagtagaaattaattctgttgaaactaatactgttgagtctacttttctgtttctggcctaccgtatctaaaccactctaaacaggtcactcacttgttttatccttattttaatgagcttctgagatgaagtttctgtaacctctttttgtctcctgtttgtcacaaagattcttcatgtcttacctaaattgctttgtttacattctatgttcggagatgtaggtaggccatttgatcattgatgtgagtatacacactcatacactatcccccacccccgtcgcacagtttaaagccttctcattcgcatagataattttgtaagtctgaatagcctaatttagataaactttcttcgtagttcaattagaaaactctccattttgagtgcttggttaggttttaatataaaggaaacattttacattaggaatcattgttttactaaccttactgacaaaaagaaatagtgatgaggaaatgactaaaaccagttcagacagtattgagcatccagatactacaagggttgagaacagacgggactaagaacacatgtggagaagtcagctctgaaaagagttttggatcaccttcaggtataggtggatgaagttaccgatgtgttttcagttggagaggcagagtgttgaggaattttatacctattgtgttgtattt

SEQ ID NO: 38739 - DNA, 1036 bp, Homo sapiens
aagtagaggggttggcacagttcagttgacagccagttgatggacaaagaggagccttgtcctagtgctctgttatgtggctatggatgagtcacttaaatttcctgcctgtttttgtttttggaaatgaaaacaataacactggttatggattgttcatattataaaaacagttaaattctgatgttctgccgaaaaattggttcatcagtcggttataattactgttgctacttggttctaagtttttaagttttagattaagatggatttcatggcttgatccagtccagcacattttaaatgatttcactttatagatattaattagttaccctggatgatgagaaggggttatcagtatcttgttaacaaaagaagctgttaaattattctcaagaatataaggtggactgtatacttattttttacaaagggaaaaaaggggaatttgtgccatggaaactaaagatcccatttatttttgtcattatgccaaaaaataacaacagtgttttctctctggcttatttagagtggtagagcttctttgacgtttcctatttctacctctgcttgtatcgagctgtagaactcttcatttagaatataacattttcaaatattgaaaaattacttttttttttgtgggattgccactaggtggtgggtataatatgtgaggaatgatcagcagtaataatagttctgatagtttcgggtacctatatttttacattgttgtgctttttcattattgtgtatatttgaacatttctgtgaaacttagtttcttttcataattattttgtttattttctttagagacaggatctcgctctgttgcccaggccaatgtgtggtggtgtgatcatagctcactgcagccttgaactcctgggctcaggtgattcacctgtcttagcctctcaaatggttgggattacaggtatacaccaccatacccagctaaattttttttttttaatttttttgtagagacaagatctcgtcatgttgaccaggcttgtcttga

SEQ ID NO: 38740 - DNA, 1086 bp, Homo sapiens
gaattattctataaagatgtgtttccttgttaaacattggacttcttgataaacatggagaatgtctacgtacatttatatcttctttctcttctgaaacatcattagaatgatagtataggaattaaaaaaaattacatagttgggaacatccctaccaaaaagttagatgtgcccagttactctagaatgaagtcataggtctccatgtacttacatcgagctgctggttagctacttagtgactttctaaatatgaatggaaaacaagttgagaaaagcctttccatgagaaagaaaaaagcaatagaaggagaaaagcagccagaagtaatcagagacaatggagggaaagtaaaaatgtgactgtagaaataaaattttctgtggaagggttagaaagtcaagtggaggacattcccaagacggtggaataaagggataaatatataggtaatagaagagaaaagaggcaagagtaagagtggcaatcttatagaaggagaacattaaattatagacctcagaaggcaagaactgaataggaagacatctaaaaaatagaaagaatatcagaacattcctcattgtatgatttgtgcttccagactaaacatgttcttaatgtatgtagcacaatgaattcaagcaacacagagccatattatcatggaagtttagggcacccaggattaaggcaagatccttcaagctttcaagtaataggggtgaaataaaaaggggtacgaataatcaggaacctaaaaggcatagcagttctggatgctaaaatatatgttctcaaaatcttgaagaaaaatgactttcaacccagaactcaattatatgtgtgtgttcaatcagtaatttaagtatgaaggtagaacaaagaccctattgagcatgaaaggactcaaatacgtacctaggagcgagcagtgaagggaagccccagaataatagctggcagtagtttcagagagcagccaaacaagggaaggaggggtgggaggcactgttgttggttatataagcaaaaaaaataaaaaaaataaaaaaaaaaataaaatgtgctcttttatcacc

SEQ ID NO: 38741 - DNA, 1034 bp, Homo sapiens
acctgcctctgccttctgaagtgctggcattacaggtgtgtgagccaccgtgcctggccacatggggcgttattagcatattaataacattgatgccatgattagccatatggataatgtttaaagccgtaagactagatgtattactttgttttcacactttataaagaacttccctgagactgggtcatttataaaggaaagaggtttaattgactcacagttttgtatggctggggaggtgtcaggaaatttacaatcatggcagaaagtgaaggggaagcaagcaccttcttcacaaggtgcttcacagaaaagaggagggagaaagagaagagcggggagaggagggaaagagagggacgagaggagaggaggaggagggaggagaggagaggaggggtggttgttcttgcatggcttaagaaggaataggatctggtgggtgagtagcgactggttttagataggagtaagaataatttggacttagtaacagaatgaaaggaagactgtatgggcacagatgcagcttgatatgtagaggtggtggtgagagcttaatttttttttttatgagaaaacttgcatttgcattttcagagatagtttagtagaatactgtcttcaaagcatgttgtggagtggagttgaaagttaaagtggcccttggaaatctgaaaaaataatttgagggctgggcacagtggctcatgcctgtaatcccagcactttgggaggccaaggcgggtggatcacctgaggtcatgacctcaagaccagcctggccaacctggtgaaaccccgtctctactaaaaatacaaaaattagctgggtgtggtggcaggcgcctgtaatcccagctactcaggaggctgaggcaggagaatcacttgaacctggaaggtggaggttgcagtgagctgagatcacgccattgtactccagcctgggcgacagagcaagacttcatctcaaaaaaaaaaaaatgtgattctcatcttatagaatatctgaatatacttattgcata

SEQ ID NO: 38742 - DNA, 1033 bp, Homo sapiens
gaaaccatacaggggtaatggaaaaattaggttagaattcaccttaggcaaaaactgtaaacaatccaaatattcatcaacagagcaataggtgaacaactgtggtatagtcattcattggactagtacgcactacaaggttaaatatgttgaaagcaaaaacagtttgttgaatgaaagaagacagacatgaaagaatacatactgtatgatgtcacttatatgaagttcaggaataggcagaaactaacagaacagtaggaatgcccatggggaatggttattgaccaaaaggagtcatgagacaactgttttgttttagaaacagggtcttgttctgtcacccagaatggattgcagtgatacagtcatagctcactgtagcctcaagcagtcctcctgcctcggcctctcaaagtgttggcattctaggcgtaagctaccactcatgaccttgattggagtgtttcataaatggctatatccatttgtccatattcgtcaacttgtatacttagatttgtacatttcactgtatgtcagttttacctcagtggaaaataagaaaacaacaaaaatggcatactgagtagttccgtgaggatgagcttcgggagcacatcagtccattctcagagagtgagggaaagtttcccagagataataatctctctttttatccttttacttccacagttgatttatttttttcaactcttagctacctccccacaataatatctattcctatgactatttaatttattgtgcaaatgcagaatactttagggagcaaaaaggagtgctggtataaattacactcaactggtaaaaactatcattgtttgcttctgttctagtcagagggttgtactctactgcagtcatacctgaaggaaggcagtagtagagcaggtgtacctgagggtggaacaacctctgcttggcctcatctaaaagtagataaagggggccgggcacggtggctcacgcctgtaatcccagcactttgggaggccgaggcaggcggatc

SEQ ID NO: 38743 - DNA, 1056 bp, Homo sapiens
gaagttgtagatgtgagagctggttctgctcatgtctgactaacacagaggcttgtgataattgtcccttctttctcccaggccactgaaatttgtcatctatgaatgaacagactaaaacagatgtcttaatgattttcagatctaatgttctgtaatgctgtgaaatcaataatgtgagatgcaacataacatagtggatgggagcacgtgctcctgatccagatgctttaccacatactgtctgtatgaccttaggcagggaacttagccttttcgtgtcttagtttcctcactgtaaactgaagataatagtacctacctcatgttgtaaagaggaatacgcgagttaaatatttgtaaatgatttgagtacttgtgtctggcacatagtaatcattataagtgctttaaatgagtaagtacaattaaaatacagattgctcccaatttaaaatgaaaaaaaaaaattcaagcaaaattagatatgttcttaatgtgcattaaaattttttgtttttttttgaaggattggaaaatttgttttgaaaatgtaatgaatgttagcatacatttcatttgctctctagcattgttataccaaaggagcatatgtgggagattctaacacaaaaaaaagtctttacaataattaatacacactttagaaatgttgttagaagtgataaatggcatcttcacacctcttattattaccctgtggtagaagatgcagttgtatagagtattataagtgttgcatgatcaagttatttgaagagtatgaaatgcccaaaaggtaatgctatttgcgttatctcttatttttcttctctaacttccttctattgagggtaaagtgaacagaaatcagggaagattggaaagagacagggaatcaataagattaatatgtgattcaattaattattttaaaagctaagattttattatatttgtcttcatccttcctatgactcttcctatagatccaaatggtttctttctaattagaagtgatttcttttttccctagggagcttaatttggcatgtc

SEQ ID NO: 38744 - DNA, 1091 bp, Homo sapiens
ctcaaattatatgcataaaagtcttaaaggccaggtgtggtggctcacgcctgtaatcccagcactttgggaggctgaggtgggcagatcacttgagctcaggagttcgagaccagcctgggcaacatggcaagaccccatctctacaaaaattataaaaattagcctggcttgttggtgggtgcctgtagtcccagctatttaggaggctgaggtgggagaattgcttgagcccgggtggtggaggttgcagtgagccaagattgtaccactgcactccagcctgggtgaaagagccagaccccttctcaaaaaaaacaaaaaacaaaaaacaaacaaaacgcaaaaccaaaaaagcaggccttaaagcactgcgtagcactgttttgaaaaagttgaatttatttcattttattgactgctttggattttatttctttcctctttccccatatgtgctactaaatgagtcatgatacagcacttgtgccctttgaaatctctgttatttacctcatgagctaaaacctcttgaatttactagttttcttattacttatgagggtgtgttttttgtgtgcttatagaacttttctaagtgttcttatagcagtgaagcctacaaagtaagagtttccagattccatccgttcttttagctgacttgaatgactctaatgcagtgggttgcaggtttggctacttacctatgtactctgtaaacatccagaggcccagggatattctgagccactgtgtgtgaatggagtttggccatctgtagatttccgcagtctctccaggtgatcgcactgtgcagcctcattgctcataaacaaaactttaatatgcttttaatgatctttcaagtgtgttgaggatttctttcttgattttgaggaatatatgtcagtatatttttcaactttaagtgttcgtatatatattagtaaaaacattgaaactgaagtctgggggaagtttgtggaactagaatattagaatcaaaagtttggatttaaaatctaatgtgactatcgagtggcatgctggaaatttttaatttatttggccatcttttagtatgccat

SEQ ID NO: 38745 - DNA, 1050 bp, Homo sapiens
aaaatgcttctcatgatattaatagaagattatttttctcaaaatcatcttggtgttatatatctatttcggcttttaaataaacttgagatttaaaagaaagtttaaaatggaataaaaacagcaagtgggaaatagcagttaattgccactaaatacagttttagtactgtcatcacctaatgtgcgggtgacactacaggagagaaatttctttttagataaaaagcaaataaagtcataacataaaggatttgaaatgcttttcaacattcttttgtttttcagtgcaattttactgtattgtgataaatattgtttaaaaatgaaaaccattcaacctttatacaaattaaaaagaataaaactattttcagtacactcagttaatgacaacatttagttcctgcaactgcctatgctttttacttatatttaaagatttaatggccaggattttgtgaaatcagagtatgttctagtggtggttaggttacaggactgctgtttctgattccaaacattttggagtacgtgcctagtacgtgccacctccttgtaacaagaaacgaagagtgggtttatattgaaatcttgtatatcaaatgagagaatctttgtcttttgaagtagaaagtatctccatcacccgtttctatcttcaggcagataatacattatttttctgactttaaaggtgtgactttaggttcaaatcacttaggcccagatttctcaaaggtcatataacaagaattagatagaaattagaaccctggattcttatctcttgagaagcaacttccacaatattctgtttgttgccccaatgcttcctgtaatcattttgtgatttctccacttaaaattttactatgtcaaggaatttttaaattactcattatgattttagggatccacttggcaaaacttatttcgtagtagtaggaactgaaaaatacctttcaaaacagtatgaagagcagtctgatccaaattatccaaattacagagattaagagctggtagtatgttatagcactcctccag

SEQ ID NO: 38746 - DNA, 1032 bp, Homo sapiens
tccagaaactacacagccaggcttcatggaaaactggaatgtgtttgaaaccactgagttgtcctaggaactgacctttcagatgcagaaagagagcattagagctgcttgttttaaaacatgactaaatgagagtttggctaaactctgctcctcttccttctgctttacctttttaatgttttatattcagatttcttaagagagaatctgattatattttgtatagggattccaggtagccagaatttatatcatatcacacagtccaatacatgattgcctttaggtcagcaccagcagtcagtggaaaccaaagtattgggatcacaagatacaaaatgtaccaacctaagcattaataacaatgtgtggctttatgactatggatttagcaaacactagagcctaatgtataacacataccagtattcttaagtactgttaaatatatggaatgagattagatggttggtagacttatacaactcagtagaagaaaagcaaataacctgattttaaaaatgaacgaaggacttgaatagacatttatcaaaagaagacatacagatggacaaaaggtatagaaaaaggtgttcagcatcactaattatttgagacatacaaatcaaaactacattgagctataacctcacacctattagaatggctattatcaaaaaagcagaagattggctgggcgcgatggctctcacctgtaatcccagcactttgggaggtcgaggtgggcggatcacgaggtcaggagttcaagaccagcctgaccaatatggtgaaaccccatctctactaaaaatacaaaaaaattagccaggtgtggtggcgggcgcctgtaatcacagctactcgggaggctgagacagaagaatcagttgaacccaggaggtggaggttgcaatgagccaagattgtgccactgcactccagcctgggcgacagagcaagactccatctcacacacacacacaaaaacaacaacaacaacaacagaagacagtgtcgatgagaaag

SEQ ID NO: 38747 - DNA, 1052 bp, Homo sapiens
caatagcacaaaggtcaagaagggaagaacagaagtacagtgttataaacttcttatatgtgaaatgatatgctagctcttgatggtagattgtaataacttaaatatgtattctgtaaatcctaaagcaaacactaaaataatggagttacggctaataagtcaatgaaagctatgaaataatataataaaaatatcaaaaagaaaacagaaaatgagtaaaggggaaataacaagaccacaggtttaaatttacccatgtcaataatcacgttaaatgtaaatggtccacataccttcattaaaatacagatattttaagttaactccacttacatgctgcctgagagaagtgtactttaaatatgaagacatatgttggttaaaagtaatgggatggagaaagatatgtcatgctaacgtaaatgaaaagaaagctggagtggctatagtaatcaaagtagatttcagagcaaagactatgaaagataaagacagtcatttcataatgataaaagtcaattaatcaagaggacatacagcactaaatatttatacatataataaagcttcaaaatacttaagggaaaaatgatataactacaaggaaaaataaataagtctacaacttttgtagatttcaataccccccttttcagtagttgataagaccatagacagaaaatcagtaagaatataacagatttgaatcacactgtcaaccaatttgacctacttgacatatatagaacactccaaaaacagcagcctacacattcctttcaagtgcacattgaacatttgccaaggtagaccatattctgtgtcatataaaagtatttggccgggcgcagtggctcacacctgtaatcccagcactttaggaagctgaggcgggcagatcacctgaggtcaggagttcaagaccagcctggccaacatggtgaaaccccgtctctacaaaaatacaaaaattagctgggcatggtggtgcacacctgtaatcccagctactcagcaggctaagacaggagaatcgcttgaacccggga

SEQ ID NO: 38748 - DNA, 1046 bp, Homo sapiens
atttctttccaaaatctataaatctttgaatatagtcccacagaatacttatgttcactttctatttttaaaagactactctgaaaaacactcttggataataaatgtattatgtgcatacttatatactgacagttcatacaagcacatgtgtaatatttctattataaggacagatattgacccttgcatttcataatttttaaagatatttaagctaaaattttctcagccacatttttatataaaaccaaattttatgtaaaaactaggcttcaataagttagctaaattttttaaattgtaagacaaaatttttatggaaaagaattcctatatcccatcaaacctaataattttccacaactaaaaatgagtataaatacataattttaagtgcatcctgtcaggtctgatatttaattttactttagttagaagctaagtagttaccctgttacttcttcatggatgctaacagaagacttgagattcccagacagaaacaaaggactattactcatggcacaacaaggagcatgagcatcagcacattctcattgcttccccttgtcccaggtcccatgggggcaaaatgatatggccatatgcaatatggctacatatacagcaggcttttgttgtaggtaaagaatactgagcttggagggttcactgctttttatccatgaacagaagcaaacctgctctttgcctcatcccttatagatgctcactcaaaactcaatactgagaaatggcccaggtaaagaacagccaaggtctttcatgcttgccacacccagcaatatgtttaggaaggtgaagtctactgagggctatctcacatctaacagtttctttactaggaccagagaccattttggtaagatgcagataacaaccccaaccttaacaacttcacaacatgaatagaaatagtgataaataattcatagctttttacaaaagaataatgaggtataataggaaaatgttttgatgccaaaaataaaagagttaatgtttggatcggactccaacag

SEQ ID NO: 38749 - DNA, 1050 bp, Homo sapiens
gatcgcaccactgcacttcagcctgggtgacaaagtgagactccatctacatacatacatacatacatacatacatacatacatacatacatacatacataaaatgcccagtatcttacaagactgtagttcacagtgggtaattcaaatcagacactgctcttcaagagaggtaatattaatagaaatctttcaagaaggattgttttctactattaaaacaataaaactcttataaacctgtttatcagaaggatatttctgtttcagcaactcctggaatccttcttcaacatcccaaccaacaattactcccagatagccatgtcacctgtgaattatcatgaatcccacatcaaatgaacaaatactgcctctggactctgaatgtaagttggttcattataagagtgagaaaaagaagactaagaaaaagcatactgtattctttgctacatagggtttaaactttattaggaggccaggcatggtggctcacatgtgtaatcccaacacttcgggaggccgaggcaggtggatcacttgagaccaagagtttgaaaccagcctggacaacatggcaaaaccccgtctctactaaaaatacaaaaaaaaaaaaattagctgggtgtggtggcacacgcctgtaatcccagctactcgggaggctgagacatgaaaatcacttgaacccaagaggcagaggttatagtgagctgagatcacaccactgcactccagcttgggcgacagtgcgagactattgcaaaaaaaagaaaaagatgtattagggttttatatgctcagtataattaacaagacaatattagtgaaccaaaaactaaaaataatttacacactaaaagatgaaaagcccaggtggcaggtgaaagttctaatctaaaatgatcctgaaataagttactgatccctgaattaaaaaaaaaaaagcctcccaaatgccatgtcgcttaccatgtgataggcaggggtcaggcagtgacagtacgtgtgggactgtatgtccatttttcagaataagacactttt

SEQ ID NO: 38750 - DNA, 1028 bp, Homo sapiens
gggaaatggcagatgaaacaaagtggacaaagaacagattgaggtcactttttcattgtcctcatcttcttgcttcacttttcatgagataaagctgaaaagtacatatttttccgaaattacacgttgtcacctaaggttactaagtgacctcatttttctacaaaattgtttgcccccatttgcccatcagtgatcagagctagtttttgaaaatattttaataagagttcgtgtttatcttaaagctaagtataatgtgtaagtattcaaatcaccaaaatatttttgaaaagtactgtactaatctcaataagtacatggagtgttacaatttattgactcacattcctctactccccaccccaagaaaatgattagggaggatgattcagttacaaacttacactgcaaaaggaaaatgcatactgatcttggattagggttttttttccccaaatatttacaaaaggatgattataccagtgttttaggggatttttattccaggacttcacctttcaacataaatggtaaaatgtgcacgtgtcattttatatattttatttgccaaaaagaggtattaattaatcacattattttctgccctgaaatcccaaaatactatcttaaatgatgggtaaagatcttctctgaaagatggtggctattttttcaaggatgaaagaaataaagtaagacaatattcttcgaagactgagcagaatcattgtcataccccggagagatgaaatgccatattgatacagctgctaggagaacacagagttgcaaactgtcactacactatttgtacacaactccacagtgatgtcttccatgatgcatctctaagcagtatatgaggaaaaaagatgaaaaacaaggttactaactttgctgtgcaaattattttagaaatatttacccttaaaatgctaggtgtttttctagttactgtgtgaatctgtcactaatttttattttttggtattggattgaaaactaattagaaacattaccatata

SEQ ID NO: 38751 - DNA, 1056 bp, Homo sapiens
gttttaagtaataacatgatcagaattggatttgctgtatacacacataaatgtgtatacacacatacacaccaccaccaccaccagcaacagtgcagggagtgagctgcagtgatacaaaggaactacaggaaatgttgtcaataacaggtttgttcctaatagcaaaaggtggaaacaaccaccatgtctactggcaacagaatggttagattgtgatgttttcacacaataaatattatatagcaataaaaatgaatgaattttaccttatgtaaaaacgtgaataaatctttgaaatattacaaattattatcgtatgaagagacaaagaatatgccaccagaaatgtggaaaaaaatatattagcacccaggctcttgatttgttaaagagaaatgtactatccatgtttacacttatatacaatatctgcaatttattaaatttattacataaatatttgaatgtttataattcataagggatctataagcatatatatgtgggtgtgtatgtgtgtgtgtcatggtctaaaatggactgcaaaatcatgattgattccataaaagtataagtcatggccgggtgcggtagctcacgcctgtaatcccagcactttgggaggccaaagcaggcggatcattaggtcaggagatcgagaccatcctggctaacacggtgaaaccccatctctactaaaaataaaaaaaattagccaggcgtggtggcatgcacctgtagtcccagctactcgggaggctgaggcaggagaatcccttgaaccctggaggctgaagttgtggtgagctgagatcacaccactgcactccagcctgggcaacagagcaagactctgtttcaaaaaaaaaaaagtacaagtcattactggggccgggcgcagtggctcacgcctgtaatcccaacattttgggaggccgaggcaggtggatcacttgaggtcaggagttcaaaaccagactggccaatgcggtgaaaccccatctgtactaaaaatataaaaattagctgcgcatagtggcacacacctgtaat

SEQ ID NO: 38752 - DNA, 1042 bp, Homo sapiens
accacatgcttggccataaagcaagtgtcaataaattcagaaaaatcaaatcataccaaacatactctatgaccacagtggaataaaaatagaaattaataccaagaagatctctcaaaaccacacaattacagggaaattgaacaacttgttcttagactttcaagtaaacaacaaaattaaagcagaaatttaaaaagttctttaaaataaaggaaaacagaaatacaacataccaaaatatctgagatgcaacaaaggcaaggttaagataaaggttatagcactaaagaactcaatgagttagaaagatctcaaataaatgttctgactcacaccaagaggaactagaaaaacaagaacaaactagccccaaagtgaccaaaggaagagaaataactaaaatcaaagcagaactgaatgaaattgagaaccaaaaatccatacagaatcaatgagacccaaagctggctctttgaaaggataaacaagatggatagaccacgaggtaggttaacaaagaaaaaaagagagaaaatccaaacaagcacaattagaaattacaaaggtgacattacaactgaccctacagaaacacaaaagattatcagagactattatgaacatctgtatacacacaaactagaaactctagagaaaaatggataaattcctggaaatacaacctcccaagagtgaatcaggaagaaactgaaaccctgaatggatcaatattaagttccaaaattgaatcagcagtaagaaaattaccaatcaaagaactcccagaccagatgaattcacagccaaattctacctgatgtacaaagtaccaattctactgaaactattccaaaaaaatcaaggaggagggactcctccctgactcattctatgtagacagcatgagaaaagctggaaaacacataatgaaaaaagaaaactgtgagccagcatccctgatgaacttagacacaaaagtcctcaacataatactagcaaactgcatccagcagcacatcaaaaagttaattttggtggg

SEQ ID NO: 38753 - DNA, 1013 bp, Homo sapiens
tgaagtttaatatttcactttttctttagtaattttcagaatacattaattgatctagtactctccagaggtggttgattactttcttttttggaacatctttatgaactcatggatttttacatatttggtgtgcatcagtgtattgctatcattattattacctttttaatgctcctattaccacatctttagccaatgcataccctttcaaattagtgcttgtgtccttttgacatgatcttaatcatttttgatagattccctgttcttgggcattcagtgaatgacaatagtatactgaaacgaattaagataaaaaccaattgcttagagctagataaaaatttacaagttaataattttatcattaaaataatatttataatgaagatgtctttcaagatattaatttgccaaatacttgatagttaaataaagaaaaagtcagtgaaaacatttttagtaagatatgtgtgagaaggatactgagtagcacttgcaatctggactggatggctatttttcttcatggagatggaaaggtgccacaacaaaggtagtgctaaggtgaatatttctcctctgtgatgaaaaataactcacaaaattggcttctttgttaattttttttcaaaaccaaacactcagatcatcaacagcaaacaaaattgtgaatgtttttactgcacacaataaaaatgctacgatgaaattgaagcttgcttgttggatgaagaaagctgattgtgaggacctcgagttcttggaatctttagttcatttacaagttatgaaaataacagcttcggttgaaaaacaacagcattgcttatctttcctttgatgtagattgcacctggctgagcactactctaggaaatgaagtgttctcccttgtacctttagtagccttcaagatctgggaaagtcagtgcaaacctctactggtggccctggaggtaagaagagtaggcaaagagaatgatttagcaggtagctagaattctagg

SEQ ID NO: 38754 - DNA, 1067 bp, Homo sapiens
gcattttccaagatcatccaactggttaataatggaggcaggattaagtcccaaatttctgactaaaccctgttatatgtttcactacattattgctgtcctcagcaggaacaacgctaaacacttgtaccataaatggcatgaaggccattttctgtggatggaggttagtggttgccttacccatttcccatggataaggcttgtgagagctaattttgcctacttggtgtatgccagggtactgtcttcagcccagagcacagcagaaggctgaagtgcaaaatgctggtgcagcatttttgacagatcctgaaagcaagcctttgttgtctgtgactgctgagttgtgctatgataattgtggttcacaatgatgtccctaaggcactacaagtttttaggatgtgatctgaagtatcgaaaagtagttatatttagaacagtcttagtattcactacatatgatggcattctaaggtgacaatatggcaacccacacaatttatttaattggactttaaaataagattcgtggaatataatttagtagaagaatcaaggtatacagtcatattacttgttattatagtttatacttgtaatagttttacttttgcctcatcaaggctttgctgactattatggtatggatgtcattcactctttacctctttgaattactcaagttcattaaaacacaattaattcatcaattatgcattcatttaataaattcattgtgcatctaccatgtatcagacttgtgctagatacaggggagatactgatgggaaaaaaaaactataaagtatagcaactataacacttatagcacaataaatatgaaattacaactgtgatgagtgttattgaagggaaggtattcctgtatcacagtttattaaaggcagatttgatgaaattgaagataatagtagaggattccttgaggaaggaatgattaagcaacagtctgaagaagtagcctttaactaaacaaaaaaggcagagaaggggcttccaggcagaagagcagcatgtatgaagtccctgtggcatgaatt

SEQ ID NO: 38755 - DNA, 1045 bp, Homo sapiens
cttaagttgttcacaaattactacacgtcttagatttctcctcactcccaacagtattgtaaaattcttcttcgaatttcatctcaatgtctaggatagtgttgagaaatatttaggaaatatttttggattaattagggtattcgattaatctgaatacttcggttcccaacatttctagataaaggaagtttactgtaacatgtttataaaaggcaaataagctagacatctcctttcaaataggatttcaatagaaatcttccatttttttaaaaaaaggtcggctatacaatatctgttttaaaattaacaaaaaaattacaaaaagaccttatcccacaaaagagagagaaaaaaagtttgaaccctctcatttttattttgaggttaataaacttcattttataaatttatagatccattactagtggaataaacattcacatgggtgtgttgagtagtgagaacgtgagctcttttttgaggaagcagacggtgaaatgagacacgagggatggctctgggcagagataagggaactcctgccaaactcctttcctgcttgttactgtccacaaatatgtgtgtggttgcaatcgagcttctttgaggccctgttccatgccagaggctgataaaaaaaatgtgaccatttagttacaaatggaaatctcacagcatgtgaagcatagcaaccaagagagtcccaaggagattacccagcaacaatcagaaagttaaaaacaaagcaacacagtaaccaaaacataacccaaactatagagccaaggaaagcaggaaacattctaggcagagcagagatgctctgtgtcaggttcaattcaacagtgtcacaagatttgtacttcctcactcatatttagcagatgcctactgtgtggcagtgctttgccaggggctaggaattttaaattgagtaagaaatagtccatgtcttcaatgaaataaccccagcagtacagtgtgacaaatgctaggaagaggcatcagcaaagtaccatgggagaaaaggagatttggg

SEQ ID NO: 38756 - DNA, 1050 bp, Homo sapiens
ccagtagttccacttttagaattttcctccttaaagatcttcctaaaaacaaaacctgtaatatacaagcacacaattcttacagaattatttataaaaatgaagatatcctgagtagtaatgtggttaaatatgctatggtacatggtttaattttggaaaataataacgtttgtaaaatttataataaggagggaaaatatgtatatgacatcttttaaaaagaaacatatattaaagtataataaatatgcaaaaacattaactgtctttggataatggaatatgggaattttaaaacttcttaaaatatatgttctgatttgtctattctgaacatatttgacttttaaaaagtcaaacatgtgatttcagaaaaaataaagtacttctggaaatccaaaatatatatatatacttttataaccattcatgcttttctgcctacgtgaaaaaacatacaagataaaacgtcaatttatatttcttccctgaccatatgcacaactgtagactacaaggtgaccaagtagaatggtattatatagatttcaacaaattgatttttaaaaataaaaattttttacttttaaacagaaaatttaaagagtttctgcaatttatatttttataatttttatagatcataaaattattagaaaaaggaaatacagaattataattgtcggtcacattttaatttttattaatattaatacctatctgtaattgctttgcctaattcatgataatttgagtagctcatgacaagaaaaattaatttgtgactatgaagaagatgttgaatttttcaaattattattaaaataaaaaaatttaaactaattgagcagcaaaaagcatccagtataggtttttaaaaaacatcagcaatgtggggaaaaaatgtggggagctattaatagagaaatgaagaaactggagctattccactaggaatgttcccatcccaatatcatgtaatagtcttccaaaggtaattatgtttggaatatttacatttggattaaatgagcagtacaagaaagt

SEQ ID NO: 38757 - DNA, 1027 bp, Homo sapiens
attataaacacagaacctgtaagaagtcaaaatcacttttttctggttttgttttgttctgctttgctttgtttgtcaccactgacaaataacctagacagacttactaggtttttttcccagctttattgaggtataattggcaaatagaaattgtatatattcaaggtgtacaacatgatgattggatatacatgcacactgtaaaatgattaccacagccaaattaattaacatatccatcacccaacctaagaaattaaacactgcaaaaacttaaaatctattggtaacaccctttgatcacagccaagtccctttaccttcatggcatagttaatttggtgtttatgatttaagtatatgtataaaattgtactatatacatatatatcattaaataaaacataatgtatcaatacttctaaacttatatacttggttacatactatatgtgtgttctgcaatttcttattttctcagcattatgtttgtgaggtttacccataatgatctaagaagctctattcattttttaaaaaataaactctttttttggaataattttagactttcagaaaagttgcagaatacagagaatttccatacaccattcccccaacctcttctaattttaatatcctacacaacaatggtacatttgtccatactaagaaattcacattggtatgttttaattacctaaaccacaaactttatttggatatcaccagtttttccactagtgtcctttttctgttccagagttcaatccagaataccacattgcatttagtattaactcattttttctgctgtatgattacactacaatttatttcctcattatgttgatagatgtttagatttcattaatgtacctgatgatatcgttgtatacacatatgatatcttcgtgcacgtaatatgtaaagcatgctcttcaaagtagtaatatcaatttatttacagtctcacaaatatattaaatttcccactgctccaaattctttccaactcttggta

SEQ ID NO: 38758 - DNA, 1035 bp, Homo sapiens
cagctttatgtctttggacaagaaacttggcttctctgggcttcaggttttttgttgtgttgttgctgttgtttcataattgagatataattcacatgccataaaattaacttttaaaaattgtatgtcccaatgtgtttttgtgtgtgtgtatgtttactatgttgtacaataatctaattccagaatattttatcacccatattcatgcctattagtagtcactccccattctcacctccctctagctcctggcaagcactaatctgctttctgactcaatggatttgcctcttctggacatttcatgtaaatagaatcataaatgaaacctttgatgtctggcttctttcacttggcataatgtttttaaggttcattcatgttgtagaatgtattagcacttcatttctttttatggctgaataatactctgtggtatgaatgtaccagagtttgtttatccatttatcagttgatggatatttgggttgcttctactttttggctatgatgaataatgccgctctgaacgtttgcgtataagttttcgtatgaacgtatgttttcagttctcttgggcatatacctaggggtggaattggtggtttgtatgataatgctgtattttgtgtttttgaggaactgccaaactgttttccaaagtggccatttcattttacattcccactagcaatgtatgcaggttccagtttctctggatcctctcctacatttgtgattatttgtctttttcattgtagcacttttagagaatgcagtggtatctcagtgtggttttgatttgcattttcctaatgactaataatgttgtttttttttaaagaagtggttgtgggtatctttttttttaaaatctcttctagctctgaatttcagatttttcttctattccttgcgcagaccatatgaataacagaattgagtctttagggaatatatattttggaaattaatgggttaatcaactcctatgtatttatgaatatcttctattgtccagtgttcagccat

SEQ ID NO: 38759 - DNA, 1027 bp, Homo sapiens
cagacatgagccactgcgcctgtcctgcccaggctttttaaccatttctttttgctattctcttagcatagtaattctggggggaaaaccagtattattttttcattataattgatggtaacagcactcattaagtggaggaatttttttgcataattttgtttgggatcctttcctgaaataagagtgattgtgttatacccttgcaagcccaggagatgccagccatctctgtgtggtgtagctacttcacgtgttgctttgggtctcatcctttgtcattctaatgaattactacacacacctgtgtgagatttagcttttggagatttagcttttgggtttgcctgtatttatcttgtctcagataaatacagacaaacattgttcatgataatttgatttagtctattgatatgattatcccatttgtttacattctcttttattttcttccctgcctatttcaggtcatgtactaataacatcactaggttgaaatacggattctgggccctgagacagcccagagcttggctccaagaccaactctgagatcaatagctgggctacaagaccagcaatttggcatggactttgtgaccctagcccagaggaatccttttctccctcctttcctgtcttgagtggtgaaccactcttaaataatctgctcctagccatgtcctaaccaactggtatggctaacaaaagtgatgacaacagcaatattttcacttcccagactaggcaccagaaggaataactccaactgcagcctccctcactgtaccgttttacatacctagtaaatgtttattattatgctgtatcctaattgtagatgaggagctgaataatgacagtttttccatcctagtcataaggggtcagtgcaaacagaattttagcagttacatatttagtaggttaaaatgactccagcgttcggacttgtggatggcttctgaacaactgcagcaggaaagccctgccctatcattgacccattgagggcactaggctg

SEQ ID NO: 38760 - DNA, 1147 bp, Homo sapiens
gcctaggctatgaaatgtgacctacagcatccatcagaagtaaaatgcaataattacacatcagtgtaataggaagaatatcatgcaatgccatggcataaataaggacactcatgaaaaaaggaaacaattctagcataaagaggaaaaatggaactgacggtttttgtaaaagcttgtcgcatattttcaaatcaagacaggcaagtcttccaaatttagcaatgtgtagaaacattctcatgaaatcagaaaagggggtactggagggcaggttttcatcctttccaaactcttctaaattctcccacccagcgttcatttcagattcaaaataccatacacttacatttataaattgaaattttagaatgggaaaggaccaagtgttagtgactagtgaagtttcagggtatttccagaactctaagtgcatctgccctttaatgtttgctgccacttgctttcaaaaacccaaatcaactcatagttgtttccaaaaaatgcatgcaaatctagtggaagggaaaataccgcaaaaaaaaaatagtgctgtattaaaaaaacaattatttatgtgtctgtggaactgggtgcacctttaacaaatacttctgatagtcaagcaaatccagaatgttctagtgctgacatgggaaacagaactaaagaacaatatataaaagtaatcaggtatatcatttactctcagttagaattttgctcaaaaaacttgagttagtatggagcagaagaaaatggtgaggttctgtgattaaatatatatatatataatatatgtatttgctgtataatcttgaaaaaatactaaatgtgtggcacatatgtgtacagccgagtgccctttgataacaggacttgggtggtagcgacacctagaggcctcatctctgagtatagttacagggtgggctttgtgttgcattttaaccctcaccgtggtaaataaaaaaacctgtgaagatagctgtgaaaataaaatctaccctttaaaaaagtctattatagtatatgagatttatttatgttaaattggaaatgaaggtctggggaaggggaagctgcagtatttcagaaagttacttaagcgggtcaggaaacctgggttctggaaggaggtgggcat

SEQ ID NO: 38761 - DNA, 1051 bp, Homo sapiens
atgctctttaacaaaagatgtcatccttcccttaactaaatgtcattatgaatgatacttattatagcatgttgtaagagactgatgctcttggcacttttgtaacatctagaatgccctcctgtttctaactgttgtgattggcctttgctgtcccctgttggtaactgctttgttacacttctgttacttctgaaagtggacagtggtgataaactaatgcaaaattacgtcagctacatattgcaaggaaactatttggtatgcattgttatcagaagagagttggttatctgcataaaaagtgagagattgcttacttgcctatgaaataaaatacatgagccttggaataaatatttttgcttaagtctttttgatttttttttctaggtcctgatgaatacgtatctgggtggtctgggtggtgggcattttactgcctaaaaatgacaattatcttttgctttgttaggtaatgtcaaaaaaagtaaacaacttcttcaaaaagctgtagaacgtggagcagtaccactagaaatgctggaaattgccctgcggaatttaaacctccaaaaaaagcagctgctttcagaggaggaaaagaagaatttatcaggtaactattaaggtatactaatactttctgtggtaggtagtacttcaaataaagattcgggataataatttatagaaaaatattatttatgtagaatggttaaaatctaagattaaattgtaaaggaggtaagactgagaagtaaaaaagtctctacaaccccatgcaaatttgtcttttttgctaactaaactttcgttaacacatgaaaaacaactctaagcaagagaatttttttttttttgcttttggaaatagagaatgtgcttttaccctggggaaatagttatataatttaagagaatttgaagaagtagttagataattatcttggtatcatcttcatgtctgcatatcttacttggggacaagtatttcctatgaattgacttttaaaatattcttatttgtaagatcacttttttgtacttg

SEQ ID NO: 38762 - DNA, 1081 bp, Homo sapiens
gctgaccacctttcctacagctggacaaccagaccttctttgaagggaaattgggcaacaaatctccatgtctaccacagccttctctccaggaggttaaccctgactcgttgttcctatggtggcagaagggtttgtagcataaagatagggcaagcataatgtgcaagtacattccaaacatctactaaccttttatttgctaatgtctcattggccaaagcagtcagatagtcaatatcagattcaaagcttggacagacagacttcacctcttaatgggagaagtgacagtcatattgtaaaggagtgtgcctacatggacaggaagaatttgtaagtatatttttgtaattgctaaactcctggattcatttttctaatatattgttcggaatttttgcatctctgtgaatgacactggcctgtaatttttcttttacatattgattttcggactagttttatagaatgatttgagtaatatttctacaaaaagtatcctctaggagagttttgtaaaattagaatcatctcttctttgcaaggttggtaagatttacctgtagaactatttaggcttaatttttttcttttggaaatatttttactgatattatggattcaatttctttaatagctatataaaaaccaagcttttgatttcattttgagatatttttgctgtttgatagaaatttctccattttgtcaaaatttttaagttatgtggggcaaaagttatgcacatgttctcaaattaactttttttttttttttctagtgggagaaggagggtatttatttgcaggcaccaagcaggggggccccgacggtgcacacttaagtcctgacctccccgatggctggcaggtcagggttttggttttgttttgttttttttcatttttattactattttttaatattatactttaagttctatggtacatgtgtacaacatgcaggtttgatacataggtacacatgtgccatgttggtttgcacatccatcagctcgtcatttacatcaggtatttctcctaatgctgtccctcccccagccccccaatccctgaca

SEQ ID NO: 38763 - DNA, 1032 bp, Homo sapiens
agccaaatcgtattacttggtaaaataaccagtttctccaattgtgtcctgttaccagaaaaaaaaaaaaaaaagattcttattgcacttacactaataagtatattgtcataagttaagaatactcacaactagtttgcaaatttggagaaagtaggtagaaacaaatacgctccaaattttgttcaggggaactcctctttataaaaccatcagatcttgtgagacttattcactatcatgtgaatggtccagggaagacccacccccatgattcagttacctcccaccggatccctcctatgacacgtgggaattatggaacctacagttcaagatgagatttgagtgggggcacagccaaaccagtaatgtaaaatacaggagtatactttactcaattgttaaaagctattaatacctcaaaagtttccttgatgctgcaaaacaaaacaaaggatcagcaatgtttgaagcaaagtcaacaagattactttagtgttctattagttcagttcatgcagttaactcctgttctgcttgatatttatgaacatttcacctgtctatgagagtcctgaaagttttttacctctattctaatgttacaatcaccatagttatcagaaacctgcatttaagtgcacctgtcaaagtcttatagctgattataaaccaccttttgaagaggattaaaacaagacaacaattgtctgtgaatgataaaatgtcttaggaaaaaaccacagtcaaaaacacaattgacaaggaaatttggttacctctgtggcatacagtgattttatgtagccattataattattaataacatacagttattcatattggaattgtaggagtttcccataagtttggaacacatatgaaacatatttatacaaatacagtccaaagacaacatcactcctgtatgattttaatatatcaaataagccaaattttacctttacattagtgtgctattattgataaaccaaatttttaataaaaccttataaacaaatctgttta

SEQ ID NO: 38764 - DNA, 1050 bp, Homo sapiens
ctggatgggaagagatctagagaacagaatatcatatgtctcctgactcataacttgggatctttcctcaattctactgaataacctgtagtggaaaaccatgtttctatagtcctatccctcgtccaggtggattatctgaacaggactcctgtggaatggttgtggtaatgtaattcatgtggacattgacaagttgccatcatgtggtcatgaggatggtgttggattccttatgtgtgaggctgataagggccctatgttcaattcttagtggtccttttaaacctacacctgtttatattttttatcaacatgcccataacttatttttcgtgaatccactgaaacttccagagacttgaactttgcctaaagtttaaaacaggaattttttaaatcccttaaatgaaaaatagttttaagtgtatcccaactaatatgaaacaggaaactaatgtctaatatccttgggaactataaaatattcaatagtaatcaaaacataaaatgattctcttctgtctttccgttattctctacttccaattacattttgtaaaatgtaaacaattgcacctgcaattgatggaaaaataccatcatgaaatcaaatgtgttttctgacttcatatatgtattgtagtatttaatattaagtaagctcagaagatacttacatggaatctactgccttttctgagcacaagagaagcaatgattaatagaatgtggtacttgctccaaggagcattcatttaagaggagggatgctcctatttgggtcttcactgtataaagcatttatatgtatattacttaacaactaaaaggtatgtacttatgcagaatactgccatcattgctcttttctttactgtaatggtaccattcatcaggtccatggaagccagcttctcacacattctctcttagacataggcgttttctttctttcttttctttttttttttttttttggtgacggagtcgcactttgttgcccaggctggagtgcaatggcacaatctcggctcactgcaacctcta

SEQ ID NO: 38765 - DNA, 1037 bp, Homo sapiens
ctgcctggctggaagagaaagtcttgagtagactcactctgttacctaaaatgagatttattctctgcaaaagagcagaaaaaaattcataggtaggggcacatgagagatttgatgtgaacaaaggggatcaagtggacctcacagttttaaataatattttttctcagaaaagtggccctataactttcaaaattgcaagcattacaatctgcttgaattttaaatttaataaatgttctgtcaactcctggacttgaaatgaaagttgcattaaccaaagacgtgcctttagatgtaagtttaaataaagcacctctaaagaagactaaaattctatgtaattttacataattaaatgtagctattttgtcatactacaattttccactcttctccttatgtctacaattttgatgttcatcatggatttggatggtttatttcagtgcaagcttacccacatttgtagggtgcaaatggtaattattctctacctaaagtcagacaagatgccccaagttctcagtttaatgacacttggaagatttttagcaaaacaaatagtgaatactcttcaaatctgaacacaaacaatgaaagcaaaagtaatttccaaaaggtcacttttatttctgctgctattctaccttttcaacgtccctattcttttcattgatgagaatttgattgagcatattggcactggcatttctgaaacgactgagattaccatacagttccaagggttaatatgtttttggttacaagaaactgttttttcaagagcttatctttagaaaatattattttcttgtcttttcaaataaaagatcatcagaatgtcaaagtctgaaatcctatgagtctttgggtgcaacttttttctcattccttttctatcacacaagaaaattaacattttgaattttctatgattttgtatagaaaattattcatgtactaagctcattgaagttagaaaagatgatctcaatctatgaacactgtcatacatactttattgtcataatata

SEQ ID NO: 38766 - DNA, 1049 bp, Homo sapiens
ttgttttgtatggcaggcctggtgtgaccaactccttcagcttttgtctggcaaagtctttatttcttcttaatttctgatcaacagttttgctagatatagttatttgggttggcaggtttttactttcaattttttgagtatgtaatctaactttctcctgacctgcagggtaatctgctgacagtcttatgaaggttcccttgaatgtggcaaatagctttttactcactgctttcaaaattttctgtttttgatttttgacagtttgattataatgtgactcagtgaagacctctttattctcaacctatttggagttctttggacttcatgcatctggatgttcatttccctacccagattttggatattttctgtcattatttctttaaattagttttctaacccatcttccttctctgctcctctgcaactcttataatgatatataattacttgatggtgccctataaatcccgagggctttctttactcctttttaaaaagatagtatatcaaagacttatcaatctctcacaaacatattagcaaaaaaaagttaataaatttaagctcaccgtaagtatgtattccactctcaacatctttttttaaactattaagttcaggcatacatgtgcaggtttgttatataggtaaacttatgtcatggaggtttgttttacatattatttcatcattcacatattaagtccagaacccattagttatttttcttagtcctcttccttttcccaccctccactctttgataggctccagtgtgtgttgttctcctctatgtgtccatatgtttttatcatttagctcttaattgtaagtgagaatatatggtatttggatttgtgtacctgcattagtttgctaaggataatggcatccaactacattcatgtttctgcaaagaacatgatatcattctcgttatgcctgcatagtattccatgatgcatatatactacattttctttatccagtctaccattgatgggcacttagattgattccatatctttgctattgtg

SEQ ID NO: 38767 - DNA, 1022 bp, Homo sapiens
atttgtcaaagatcagatagttgtaagggtgcagccatacttctgggttctctattctgttctattggcctacatgactgcttttataccagcaccacgttgttttatttactgtagccttgtacaattttaagtcaggtaacttgatttccagccgtgttctttttgattaggattgacttggctattggggctctttatggttccatagaaattttaaaatagctttttcctagttctgtaaaaaatgccaattgtagtttaataggagtagcattgaacctttaaattgctttgggctgtttggacattacaaggatattgaatcttcctattcgggagcatggaatgttttttcattggtttgtgtcattcctgatttctttgaacaatgttttgtagttctccttgtggatatctttcaccaccatcagtagttgtgttcttaggtatttctgtgtgtgtgtgtgtgtgtgtggcaattgtgaatagaattgcatttctcatttggctctcagtttgattcttgtgtttgtttagaaatgttagtgacttttgcacattgcttttttatcctgaaacttcagcaaagtttatcagctgaaggcgcttttgggccaagactatggggttttctagatatcaggtcatgttgtttgcaaacagggatggtttgacttcctcttttactatttggatgaccttcatttctttcttttgcctgattgtcctagtcagaacttccaatactatgttgaataggagtagtgagagggcgtcctcatcttaccttgaaagtcctcccagttttcaagggaaatgcttccagattttgcccattgagtatgatgttggctgtggttttgtcatagatggtccttattattttgagatgtttgttaaatacctaataaattcagagcttttaacatgaaggggtgttgaattttatcaaaagccttttctgaatctattgaaataatcatgtggtttttgtttttagttctattcatgtgatgaat

SEQ ID NO: 38768 - DNA, 1083 bp, Homo sapiens
gggtgggatgaggcctaagtgggccttttgggcagtgtcccataaggttaaggagccaaatgctcagttaattttcattttcccctgtggaagcaattatgaaccaaagtgatctctcttagaataaagctaggcttccttgggggatgagtgacatgtagagtgaaactgttcttctcacctctttcaacaagtctgctctcatattttttgttttactggaatactggaacctctcagctaaactctggggctctgatatggtttggctctgtgtctccacccaaatttcatcttgaattgtaattcccacaagttgagggagggacctggtgggaggtgattgaatcatggggttggtttcccccattctgttctcatgatagagagttctcatggatctgatggtttaaaggtggcagtttcccttgtgtgctctctctctccccttctgccttgtgaaaaaggggcctacttcccctttgccttccattatgattgtatgtttcctgaggcctccccagccgtgcagaactgtgaattaattaaacctcttttgtttataaattacccagtctctggtagtatttttataggattgtggaaacagactaatacagagaattagcactgggagtggggcactgctataaagataacctgaaaaggtggaagcaactttgaaactgggtaataggcagaggttggaacaatcttgacggctcagaaaaagacagaaagatgagggaaagattggaacttcctaaagacttgttgaatggttttgatcaaaaccctgataatgacatggatggccaatgaagtcaagcttgagatggtctcagatggaacttattgggaaatggagcaaatgttactcttaccatgctttagcaaagagactggtggcattttgctcctgccctagagatctggggaaatttgaacttgagagagatgattagggtatctggtggaagaaatttctaaagagcaaagcattcaagaagtgacctggctgattccaaaagtgtttggtcatatgcattcacaaagagaatacctgaaactggaaatttattt

SEQ ID NO: 38769 - DNA, 1034 bp, Homo sapiens
tggctctatctttctgactgggctacagtgttcacccctttgcctggcacatcccattgactttgcagttagtaggacaaggaactcttgtgctttcagtatacaggactgaagaaattttgtactcatttttttatcctctatgtgccaaggttaaatatttaactacctgtacatcatcaaaaaatatatcaaaccattgcttcagatagatctgggtttgtttttgctatcagttttcttttctaaaggaaaagacccacaaggattcacttacaagccagggtaagactgttggtgagtgctggttcccacagctgagtgagactcaattgaaagaagccaggaagaatgacttacaaggcagaggtcaggagaactaatcacaactgtaaatatatctgtatctattattattttaaggatatttcaacactccatagaatgcgtaacctggtgtggctgattttaaggagaatatacctaaagtatcataagatgcagagacttgtagcagatacatcttaatagcagagactatagaatgagccttgaacctacccttatctgctcctggcaacatttagagatgtcgagaggaggtccacaaaatgaaacatattaatatttcattttcctttgacaaaatatactctttaaaattttatacacattcattttattattcccccagcaaacctgccatgttaaactgttaggtttaactgttaggacctagtaggtgcacataagtgaataaataaataccataggccatctctgtgctggattactcaagggagcaaaggtctggaaaatcaaatgctcaggagaatgttcaggaaacagggagcagtacaatacagctgatgtgtaaggtatacagagagccaaggaatgagatttgtttggaaaaatggattatgtaaaatttcattggctataggccttattggctgtaattacaacaaaaagctaaggtgctctaggagtgaaaataatttccggaattagtggcatgataagtgattgtc

SEQ ID NO: 38770 - DNA, 1030 bp, Homo sapiens
gatgcactgggagcaagccaccatgaacatatcctcaggtctccagtcttctgccatcgcatgaaaaatggagcttgtcaaacacagagcagagctgaactttctgaattccacaggacagttcagagtgcttggaatgacacccacctgcaatttaaacaaaaaagaaggatgagtaagtgaggagctaaaaattgcatgtttccctaaattagatttatttgtaagctttaagtaagtgcaaacatatttcgaattatctgttatgaattgtggttttgttattaaatagacattttgtttaattcttatgtgcaaagtgaaaagagacttgttttgctggatttttctttttggtaagtattgaattttgaaggggtactagtttttctagccaaattgaaaaatttctcagaatttaaaggatactccatgtgagttcaagctgtgttagggtttggctacatatttttctttggcaatgaaaagtatgtttgattcttatgacttggtagacttcaaacaggctcacacacaaactgttgtccttataaggtagatgtggaggaaaccaacatatgagagtgaaatttatctcaaagcaaagaagtgaggagtttaaaagatagagaaatgcctttgattagattctctgaggttttgagcttctaatattttgattttcaatatacttttttttttccaaaatttgaaaggttctgggatttcttagcccttgttgtttgtttaaagttcctatccataactaatagaaagaaagtggtttggctatgttcaaggcttaaaagaaaaacagctaccacccataagcatctattatatgccataacattgaacacatattgtctcatttaattttcctggcctcgtcacactacagtattatcttcctcactttacatatgggaataatgaaactcagacaggtaaagtgatgtacacaaaggcatgcagttagtaagttttgggccttgtccatctgctgttccctatgtctgaaatattgtgt

SEQ ID NO: 38771 - DNA, 1075 bp, Homo sapiens
taagccatgtttctaaatcaggggtgtccaaacttttggcctccctgggccacattggaagaagaattgtctcaggccacacataaaatacactaacacttaactatagctgataagctaaaaaggtccatgcataaatctcttaatgttttaagaaagtttacgaatttcttgggccacattcaaaactgttctgggctgtgggttggacaagcttattctgaatattgaaaaagatactgatttaaaaattaggtcaaaggggttgaatcactaggtatcatgcagagacatagcattttgagtttgagtataatttaatagaaaattaaattctatccacaaaattaatagcatgtgtaaaggcactgagatgggagggagcaagtcttgaacagtggacaattgcctaggttttgcttagctgggacagaagtgtgaataagattgaaggaatgggtctattttatgaaggctttatatggctaacagcttgcatttcatgtctaagaaaatgaatatcacaattatagcagtaataagagcacttcttatacgctaagttaacactgagctaaagagctttccagggattatcaaatgtacttttctgagcttccagcagggaacatgctccacctgctttttcctgtgtaaaattaattggctcttggagaaggtgaaggtagtgaaaataggttgttgacatagtccaggtataaaataggcatgaattaaagaccattctgaaaaatgcacatttgtagactttattaaactgctccaaatgaaatcgcacaagtacaaacttgtgtaattaggaagatgatggtgctgttgacagtaatgaaggaaaacaaggaaattcagaaaataatagcagtgcttgacagactttacagcatttcttggagtgatattctgacaacagaggtactgtgaaatggaaagtgaggagaggtgtagtaacagtttatggtttatcagtattttggagggtgcctatgttttgtagagattttttacaataattaagcaataccttattttggttcttattctattacgtgcttca

SEQ ID NO: 38772 - DNA, 1091 bp, Homo sapiens
acaatcaatgcagaagatttctataaccctaaaacaagtggttatttctcccttaccagcaagcaagcagttctacagtagataccagctggatgtgctgcagttcaatttggacactatctacctggagatagtatcagatcccacaggttgagggctgagcctcataagactgtcctcctgttttgatgccaatcacaagccctagtttgttttacctgtgcttctgatcaactggctataaagttccacaatcctttctttagctttaatttgctagagcggctcacagagcttagggtactggttcattataaaggacattacaaaggatacaagtgaagagatgcatagtgtgaggtatgggtgaagggacgtagaactttcatgccctcctcaggagtgccaccctccaggaacctccgcatgtgttcagctggcctggacactctctaatcatccttttgggccttttgagacttcattggataggcatgattgaagcatggacagctgtgtagaaatgtgataggaaagaaaagatatgatgtaatactaacagactaagtgggggaacccagcaaggcccgtctgtcagatttttcttggcctctctacagcattccttccttctgggtatggggcaggaccccttctgaaataggggtctttgacctacaatgagaccaagtagtccagagaattttgttacggccagctccgagacaggggaagattcctgccttagggagaaaaaggagatgagaagagggcaggaaaagtcagagagaaattgttttctgaggcctgcttctgaggcccaaagttccccatattataataagggctgtgggagttatgagccaggaaccatggatgaaaacctacagacacactctcactcacaataccacaccaggacactagttttcaacctgatacgacagataatcactttgataccataaaaagaaaagttaccattttcagtatgtcaaggatttgtcttaaaatttgattcagaagcttctctttgatgttagaacttctaacatttatcttttgaagtttgaataattctttattccttt

SEQ ID NO: 38773 - DNA, 1052 bp, Homo sapiens
atgctaggcagatagacagtccctgtcttcaaagatcttatagtgggaacaaataagacatgcacgcgtatattcctagtattaaaaattacaaatgtcttaatagattaaaatgtaggaatcgtatttttttgccgcctggccctaccctgggtttttaccttctacattcacaaatgcacacatccacacttcttcagccaacctggactattctctgaaagttagcagcattttaactttcattctgctgaggcttcacttgtgctattccttctgaaatactctttccccttgcctatctgctaaaatcctatgtagaggttacccacctttccttcctttcctcaaatagcctatcagaatcaatgcctccacactgtcacattgttgcttttatttgtctacatgcttatattcttgttggtcagggactatattatattcttactttgtgtcttcagagtggagggcaatgtatggtcatataggatttctatgatttaatgtgaatgtttgttggaggaatgatctctactacttggatcagaagaggcttcctggaggaggtaacatttgatctcagactttgaaggacagatgcattctgatcatgggaaaatgagattggggaggacagtagtacagaaggacaaatgagcctattttaagacccaaggttagaaatcaagtagcagttaatcactgttaactaggaggtgatatctatacaggaagcaatgggaaataagtcccagaaagtgagatccattcagaacacttcgaagtacaggatgggagttacagggagaggatcagcctaggaatcttgctttgagaattttccatgaagaggtacagtggcctgggggaaataaaatatgtcatcacaaaaacattactgtgtgtgacccaatattgacttggacttcattagaaggatgatgatgctgtcacaggtattcacatcacttgacagtatacttaataaagtgaattttgtccttttaggaggacactgcatgtgagacttcagattggacctggagata

SEQ ID NO: 38774 - DNA, 1065 bp, Homo sapiens
tagtatttgacctgatatgtaaagttgtaagtggcctcgaagtggaatctgcatcagttacatctcaattagaaattgaagctatgcccccaaagtgcagtgatatagatccagatgaagagacgattaaaattgaagatgactccattcaacagagtcagaatgctttgctgagtaatgaaagttctcagtttctgtctgtgtctgcagagggaggccatgagtgtgtggcaaatggaatctccaggaatagctcctcaccttgtatttcaggaaccacacacactcttcatgactcttctgttgcttccatagaaaccaaatctagacaaaggagtcacagtagtattcaattcagcttcaaagaaaaattatcagaaaaagtttcggagaaggaaacaatagttaaggagtcaggtaaacaaccaggagcaaaacctaaagtaaaacttgccagaaaaaaggatgatgacaagaaaaaatcttcaaatgaaaaactcaaacaaaccagtgtattcttcagtgatggtctggatttagagaactggtatagctgtggagagggagacatttctgaaattgagagtgacatgggttctccaggatctcgaaaatctcccaatttcaacattcatcctctctatcaacatgtgctcctgtatctccagttgtatgattcatccaggactttgtatgctttctctgccatcaaagccatcttgaaaactaaccctatagcttttgtaaatgccatttcaactactagtgtaaataatgcatatactcctcagttgtctctccttcagaatctattggccagacaccggatttctgttatgggcaaagatttttatagtcacattccagtggactcaaatcataacttccggagttctatgtacatagaaattcttatttctctctgcttatattacatgcgtagccattacccaactcatgtcaaggttactgcacaagatttaataggcaatcgaaacatgcaaatgatgagcatagaaattctgacactactcttcactgagctggcaaaagtaatagaaagct

SEQ ID NO: 38775 - DNA, 1024 bp, Homo sapiens
tttttttaggatgtaactcacaaaatagtggatgcaattggtgcaattgctggttcttctctggaacagacaacatggctgcgacgaaatcttgaagttaagccttctcccaaaataatggtagatggaaccaatttggaatctgatgttgaaggtattcttgtcaaacatttaggtttattatctgtaagcaggcatatatttactaagaaatcattttgcctagcactataagtaccacaaatttatcccttttctcatgtctaacaagtaactttttttcagtgggaaaaatatatatatacatatacatatatatatacatatataaaaataatacacacacacacacacacacataaaatttattttcagtgggaattagccatatctttaattttctcttatttatagatatgttatcacctgcaatggaaaccgcaaacataactccttctgtatatagtgtccatgcattgacattactctctgaggtaaatattaagctttttcacatgaactctcaagtagactgtttcattattaaaaattagcaagtaatttttatagaggaatttctaatttgagaaactattttgtgcttctagaaatcactatatagaattaatataaagttttggccttgtatgtatttggattatttagtttgccaaacattagtgataaatttagatactgcttcccttctccatgtcctattcttttttatgtgtttttttctttttcttttttttttttttttgagacagtttcactcttgttgcccaggctggagtcaagtggggtgatctcagctcactgcaacctctgcctcccgggctcaagctattctcctccctcagcctcctaagtagttgagactacgggtgtgtgccacaatgcccagctaatttttgtatttttagtagagacggggtttcatcagtttggccaggctggtctcgaactcctgacctcaggtaatccgcccacctcggcttcccaaagtgctgaggttacaggc

SEQ ID NO: 38776 - DNA, 1034 bp, Homo sapiens
tcctgcctcagcctcccaagtagctgggactacaggcgtgcgccaccacgcccagctaattgttatatttttagtagagacagggtttcatcatgttggctaggatggtctcaatctcttaacctcgtgatctgcctgcctcggccttccaaagtgctgggattacaggtgtgagccaccgcgcccagcccgtttacttcatttcttactttaaactcctatttcgagtgttttagtaaaactagatcctaatagcagtggcaaaggactcatagacatgaagtcccacgagttaaaagatgacacacaatgctatgtgttctggctgtttatatcagttcatgatactagcaatcctgataccagtattagtttaattcttatccagaaaagataaacacatggttccttgtctacaaagtattcgcctgtttcaatccaacctttgcctgtgtgccagtatgcattactataaagggcaagagactgttgaggggaccagtgtggatatctgcatcattaccttattgggaaaaaaaaaatctaattctacagtccgatgatgttactgccatctcctctgaaaattccaagctccacaggcttcaccaggcttttcaaaatgagagtttattttaatgattaaaaaccgctatttaagtagctcttgccaagccttttcattaccaggtctccatccctccccaagtatttctgcgagtctcatgtgctaagagatgtcttgagcagcctctgcagctttccgtgtttctgtggtcagctactgctgccctttcccgggaggcattccattctcctactgggtcctctcaagatgccaaagcttggtgctgggatttaggaacacatcctgttagatgtcagacagtgctgcttgtgctggggagcctacagaacttctgatgaaactaccatctggttttaccctctgtgccgtggatgcagacgtgtccttgggctacagagaggacatgatggagcaggaggccctatcccaaggaggtgttagaact

SEQ ID NO: 38777 - DNA, 1045 bp, Homo sapiens
aaaaatttggtgtataattaaaattattaggtaaatagtttttttttacatctccatggtaacttttgatgccgtttttgttgtagcccattacaaagtttatttgctgatggaatagatggttgtctaaaattattaccatatatttctattaaattagactatacatcataaaaacagattgtttatattatgggtacagtattgatttgtgaaaattgtttcggcacacataggcttggggtatatatactatatacatatagaaaaataattagaattatatgcccattaggtatatagttttaaatatatactgatagtgtcaaaatttggatgtttcattttcattgagatttttggatttttagaatttaattattttgctgtgatttttttttctaggtacagaaatagtaaagccatatacacctgtatctggttccttactctcagagttcaaggaaccagttcttcccaacaataaatacatctactttttgataaaaatctatcccactggactcttcacaccagagcttgatcgtcttcagattggttagtatttttacattttttaaacctcatttgtgctctagattggatcacattgtcctctagttatctccatgtaggagtctatcagatatctttaactcaacatgtctacaaccaaagttatcttctccttgtcctacacagcgtggccatgctccatattccttatttttattatttgcagcatcactgttcatccttgatccaatctggaaactcgagtcggccttgattcttcccactttctctttcccagtccagtcagccgctaagttctgttgagtctacatctcagtgactttttcagctacctcttctgccactgtcttacagtaagccttcatcatatcttcattggcttctgtttccttacaattgaccctactgcttcgcagctttgaaacctctgatgggtccccattatctgtactgcatgacctacaaagactttgataatctctccagcttcatatcttgctatacaaaa

SEQ ID NO: 38778 - DNA, 1044 bp, Homo sapiens
ctaataggcaaaataaccagctagcatcataatgacaggatcaaattcacacataactatattaaccttaaatgtaaacgggctaaatgccccagtgaaaaggtacagtctggcaaattggataaagagtcaagacccatcagtgtgccgtgttcaggagacccatctcatgtacaaagacacacataggctcaaaataaagagatggaggaagatttaccaagccaatggaaagcaaaaaaaaaagcaggagttgcaatcctagtttccgataaaacagactttaaaccaacaaagatcaaaaaagacaagggcattacataatgctaaagggattaacaagaagagctaactgtcctaaatatatatgcacccaatacaggagcacccagattcataaagcaagttcttagagacctacgaagagacactttcacacaataatagtgggagactttaacaccctactgtcaatattagacagatcaatgagacagaaaattaataaggatattcaggacttgaactcagctctgcaccaagcagacctaatagacatctatggaactcttcaccccaaatcaacaggatatacattcttcacagcaccacatagcacttattctaaaatcgaccacataattggaagtaaaacactcctcagcaaatgcaaaggaacagaaatcataacggtctcccagaccacagtgcaatcaaattagaactcaggattaagaaactcactcaaaaccgcacaactacgtggaaactgaacaacctgctcttgaatgactactgcagaaataacgaaattaaggcagaaataaataagttctttgaaaccaatgagaacaaagacacaacgtaccagaatctctgggacacagctaaagcagtgtatagagggaaatttatatcacaaaatgcctacaggagaaagcgggaaagatctaaaatcgacaccctaacatcacaatgagaagaactagagaagcaacagcaaacaaattcaaaagctagcagaagacaagaaataactaagat

SEQ ID NO: 38779 - DNA, 1097 bp, Homo sapiens
ttctcttgcggccgccatgtaagaagtgcctttcacctcctgccatgattctgaggcctccccagccatgtggaactgtaagtccaattaaacccctttttttccccagtctcaggtacgtcttttatcagcagcgtgaaaatggactaatacagtaaattggtaccagtagagcaggtgttgctgcaaagataccgggaaatgtggaagcaactttggaacttggtaacaggcagagattggaacagtttggagggctcagaagaagacaggaaaatgggaaagtttggaacttccttgagacttgttgaatggctttgacaaaaatactgataatgatatggacaatgaaatctagactgaggtggtctcaggtggagatgaggaacctgttgagaactggagcaaaggtgactcttgttatgatttagcaaagagactggcggcattttgcccctgccctggagatttgtggaactctgaacttgagagagatgattaagggtatctggtggaagaaatttctaagcagcaaagcattcaagaggtgactcaagtgttgttaaaggcattcagttttaaaagggaagcagagcattaaaattcagaaaattagcagcttgacaatgcgatagaaaagaaaatcctattttctgaggagaaattcaagctggctgtagatatttgcataagtaacaaggaactgaatgttaatttccaagacaatggggaaaatgtctccagggcatgtcagagacatttgtggcagcctcttctatcacagacctggaggtctaggaagaaaaaatggtaaaaatggttttgtgggcaaggcctagggtccttgtgctgtgtgcagtctaaggacttggtgccctgtttcctagccactccggccatggctgaaaggggccaacatgaagctcaggccatggcttcagagggtgaaagccttaagccttggcaacttccatgtgatgttgagcatgtgggtgcacagaagtcaagaaatggggtttgggaacctctgtctagatttcagaagatgtatggaaatgcctggatgcccaggcagaagtttgctgcaggggcggggc

SEQ ID NO: 38780 - DNA, 1030 bp, Homo sapiens
aagagaagagagagatcctcaatgtagtgaaatagttggagagatctacttggaggaggtagtatctgatccctaccctcaagggtagacaggaatctggaaaggagggagaggaagtccagcttgcaggtggaactgaatgggcaaaagctcagaggaccattttgagggttcccccgctgcaggttcctgtaccatcatgagccctcccttttttaatgaccctgttgtttctactgtctatgtcttcaggcttttgtgttgtccctcaagctgtgtgtgtatgggggggtgaggggtgtggggtgagtgggtgggtgggtgtatttgaaagaatgaagttcattgtgtggcagaggatagtttgaaatacaagcctgaattctttaagagcacagtccacagtccttgaatttttgacctctactaaatctttcatggttaagtaacagtgtttaaaatatccttgttgatctgaatggactcataataattttactgtgttcaaaactagtgctctttctctgtgaagggcatatttatgagaacttagtagatgtgtttgctgaagacggcatgtagtgggatagattaatgacattttgtaaatgttttcttttcaaaaatgtatttttttttagttatagttagagtgattggtacaaagtaagtcatttttaatggacttcctaggacagtttaattagtttaccaaagagaacattgttttctccaaattagtttcagcacctatatgaatttcctcgggctgccataacaaaataccacagactgggtagcttaacctgcaggagtttattttctgttttctttttttgagacagagtttcgctcttgttgcccaggctggagtgcaatggcatgatctcagctcaccgccacctccgcctcccaggttcaagtgattctcctgcctaagcctcccaagtagctgggattaaaggcatgcgccaccacacctggctaatttttgtatttttagtagagacgaggtttctccatgttggtc

SEQ ID NO: 38781 - DNA, 1050 bp, Homo sapiens
aagcttgggtcacatttttatgtagaatacttcggacttcttgaaaaattatcaaaccccagacattacgtgcctcacataccctccttttgtagcctttgttaagtacatctcatccaggtggggctgttcttcacttaggggccagtgcaggattgctcaggaccttgtaaaaatgggaattatattctatcttgaatagcaatttacctgaatatggcactcattaaagaatgggtacatggaagtaaagactaacaacagggaaatgtcattgttcaaaagttttgatattgaccatggccacaggaactagatggcaaaatgcagatgtagtgagtgattcctgaggaagccctgtcgttctgaggtatctactgctatgaaagggtagaaaatctattttatgtgtctggttcagtctataacttttgttcaggagttatttttttttttcttttgagatggggtctcactctgtcacccaggtggcagtgcagtggtgcgatctcggctcactgctagcctcaactgcccaagctcaggtgatcctcccacttcagcctcctgagtaactgggactgggtgtccactacacccagctaatttttttttttttttttgagacagagtctcactctgtcaccccggctgaagtgcagtggcacgatcttagctgactgcaacctccaccacctgggttcaagtgattctcctgcctcagcctcctgagtagctaggattacaggtgcccacaaccatgcccagctgagttttgtatttttagtagagatggggtttctccatgttggccaagctggtctggaactcctaccctcaggtgatccacctacctctgcctcccaaagtgctgggattacaggtgtgagccactgcacccagcctaatttttgtatttttagtagagacagggtttcaccacgttgcccaggctggtcccaaactcctggcctcaagtgatccacctgcctcggcctcccaaagtgctgggattacaaacgtgagccactgcgcctggccaggcatatg

SEQ ID NO: 38782 - DNA, 1030 bp, Homo sapiens
atgagaagaagctagtgctaaaatatcctggtctgcataaaagattatggggctttataggaggagagttaggataaggtttgggagccacaataaaaagcaaaagaagcacttctccacctccagatctgagttccgtgggtgattcattttgggacatttaaagtttgaaatgtctggagatatccaatattaaataccaaatatgccgttgaatatacaagcctggaatttggaagaaaggtgaagggtgaacaaatttgggatttgtagtagaaattcatcatttttggtcacctagcttacacagtgattctcccttctttcaaattgtctcattttttttttttttttagtgtggatttacccttcatttattctcagcttatattatttggatctacttaccctaatccctcaggtaggccctgattgacttaaccactcaacaaaccccaccacttggctacagtaattggtctgctgtgatgaacacaactcactgtgagagttagactggacatttttgcctaattattggaaaaaagaaactttctttttcctattgtgcattaaacatggaggatgtgaaatctgagagtgctgcaaccttcttgtaaccatgagagaagaatctattccatttgagaattaagtcaacactctgagaggaagagagaacagctgagctgtgaggtggagagaacaaggttgtaggcatagcatttgaacttgattgattcctgtggcactggcatttagccattccttagtagaaatcaggttcccccagaaatcagtcagtatggaagagggatacacaggatatggatactgaatggtgtgaatactgaaaggtataatgcatcagagccattactataacagtctctgacaatctgtttctactaattcttagaccccttgaagctcatccgtggtgcaaagggataaattaatcccactttaccccatacaagaaaaaaaaaatcagctatgctaattatcttacatttctcattcaagatca

SEQ ID NO: 38783 - DNA, 1023 bp, Homo sapiens
ataactcctattgttatgtgtgaatttgatcctgtcattatgatgttagctggtggacatggatgaaattggaaatcatcattctcagtaaactatcgcaagaacaaaaaaccaaacaccgcatattctcactcataggtgggaattgaacaatgagatcacatggacacaggaaggggaatatcacacgctggggactgtggtggggtggggggaggggggagggatagcattgggagatatacctaatgctagatgacgagttagtgggtgcagcgcaccagcatggcacatgtatacgtatgtaactaacctgcacaatgtgcacatgtaccctaaaacttaaagtataataaaaaaaaaagaaaaagaattagaaaataaaataaaataaaataaaataactccttaggtgatgaaagtaagatgtgtttttggttaagggaaaaaaaggtaatttttgtaccaaagtagaatgactggctgttccaaaactagaaagaaaaaagactgtagaaggcttgtggaaggttaatcttataaaataaattttaagtgtgatcacattggctaaagttagaagagaagttttctaagttttccttaaattgaacattaatttcaaaggtatacattgatacaaaactagaatttggttctctctattaaaacaagatttttcttggagtattgagctgctcttaatggcaaataatgaaaggtttttctttacctttcaggtaattggtctaggaaaaaagtatgtgttttatcataatagttcctgtgttttatgttgcctttattaagcctttgattacttaagaaaattgagtcctctctattaaagagctcacgtttttctacaagtaggcattttttaaaagaaatatataaccctgtgtttgcctttttcttttctttttgagacagagtcttgctctgtcacctaggctggattgcagtggcatgatcatggctcactagcagcctcaacctcctgggctcaggtgatcttttcac

SEQ ID NO: 38784 - DNA, 1049 bp, Homo sapiens
cccagcactttggaaaggcacagcaggaggattacttaagtccaggagtttgaaaccagcctgggcaacatagtgagaccctgtctctgcagaaaatgaaaaaaattagctggatgtggtggtaagtacctgtagtcccagctacttggatggctaaggtgggcggattgcttgagcctgggagattgaggctgcagtgagccatgattgcaccctgcactccagcttggattacaaagtgagactgtctcaaaaacagcaaaaatttatgcttccttttctctgctttgaatcagcacactataaagaaactatttctgttctttggtattgtatgcatctatggcttgtatagatataaggtggattgtgatatattctgacattaattagctggtcgagattataaagtatggacacacccctgtaggtaagatctcccattaacgttgtaaagacaggtagtgggtccttaatagaaagtcagtgcatgcaaggcaaacctacagcaggtaaaaaagggagttttgagaattcaaggacagtagatatttaggcaaaaacttttttgttgaagggatgaaggtagagagggtcaccaagctggcatctaccacatagactcagaacgcattgaattctcccagttctagatattcacttgcctcttgtagttagattttttagtttagttattgttatatctgattcattactgaagcctcattccagatttttcccaattaacctatagtgtccaccttgggcaagagttttatgtggggagtaaccctcaaagagatggtaaatttggtgggggaacataaattatatgccttccccacttccttcgcagcctatctggagattcatatatagcagctccactgaatggtgagctctgatagaggtcagggcacgcagtgattaacacagtaaaccagtatcaagtaaaaaatacacgtttgaaaccttgaaaccatctagaattctctcttttccacatttcctgtatccaattaaattcttgaatattcttcattctacca

SEQ ID NO: 38785 - DNA, 1047 bp, Homo sapiens
agttgcaaatatttcctctcattgtgtacattgcccttttactttgttaatatagtcttttgatttaaagacatttaaaattattcttgggcagtttccctcagctttgtctgacggaagctgctgggcttctgcttccagctggtggagggtgaggcattgccaatagtggccaggcatccagtgctggtagcctgcatctgtgccccacccgcagcaccctgagcccactatttctgccgtaggcagcccaaccagcggccgagatgtaggccatcaagtatgtggtggtgggagatggagctgtagggaaaacttaccaactcatcagtgatcagctatacaacctggagaatatatccctattgtctttgacaatcactatgccagtgttatgttaaatgggaaaccggtgaatctgggtgtatgagatacaagtggacaagaagattacacaggtggacagattatgacccccacccccgttcctatccacaaacagatgaattcttaatttgcttttcccttgtgagtcctgcgtcattagaaaatgtccatgccaagtggtgtcctgaagtgcagcaccattgtcacaacactcccatcatccttgtgggaactaaacttgatcttagtgagagaaatacaagactgaaacactgaagaagaagaagcagacttccatcacctaacggcagggtttaggtactgtaaaatacctggagtgttcaaccaggcctcaaaatagtgtttgacgaagctatgcaagccgttttctcctgacctcccttgaagtagaggaagagaaaatgcctgctcttgtcgatatccgagccccttgttcttggtcctgtcactggaacttttgttaaaaaacagcaaaacaaaacaaaataaaaaacaaaacaaaacaacaactaaaaaccccaaagcacaaaaaaacctgtggagcctttgcacccagtaccgagtttttgttacaaatcattttttccataaaagcattttgaatcaatcaataattttaagggttttcttgttgtaaat

SEQ ID NO: 38786 - DNA, 1043 bp, Homo sapiens
ttactgagcttctctcaggttctgtgttcctctactttgaggagctgacagatggtgttttctctcctttcattactgaccagctgttgtcatctttctgcatcctccttaccctgaagatctcaactaaacatgattttctcttcagaggtcttccccaaagcctatactaggtgaattcttctattttctatagttctcttgtcattatattcattgccttttattgttaatgattagtgaattgtctattttctttgctagacatatttcatgacgtttttggtcatcagtacttctccaatacagaacacagtatctaatgtttaggagacaataaatatgccaaatgaatatttcatgttccatgtaaaacttaggaagggttatacttaccattgcccttatcatgtattatttatctatatatatagtatatatggccaaatcagatgttgaaataatattgtcatactctttactacttatttcttgagggagccctggagtgataaaaagaggactggactaagaatcagacaataggatttctttttttttgttctgctactaattggttctgtgttattaagcaaactaatatgcatctattgtttttagtttgtaaactgaaaaaaatacactggtgattatttaaatcccgttcacatctgtggccatgtttcaaagtgggtccttatgttcaccttggcttagaattctaacaatagtttagccaaaatagcagctttgtgaataccaaaaattggagcttaatagacattccacctcctgaactgcagaggctggaaagccagaagttgcattatgcaaagtcccttgcagctatcttaaggaatgtaatttgggtttggctggttacatgagatttgaaaggcagaagaggggttgaagctcagaggtgaaactgaatcactgatgcttctagtatttctactgataaacccagttgtgaaggtttttgtttttctgaggttgtgttagcagaagttccagtggccagtcaccagctttcttcaaaa

SEQ ID NO: 38787 - DNA, 1008 bp, Homo sapiens
agtccgtttctcatttgctttcgcccttcgaggagtatgatttccactatcctttctgtcccgatcaccccctcacccctgtttcttggagtccttcctatttggcttcctgatgaagtgggagaagactgaggttcatgtggatctgtgctttgggtagtttcaaatcttttctttgcttgcccaagggcactgctcaccagtgactgcattctaaccagaatttggaatgttaataacactgtttgctagtgatgaaaatcatttcatccatggtgaaaatcggagagtttgggactacatttgcacttcattacgagccttacacttaggtttaaaatttcaaggtagtgttgctggctctggtgaagactttgatttgattgtcttgaggaggaaaaagaagacacaatttacacaggtcatatttagagttaacttgtgagtgtatcattacagagaattcgttttggaaaaatactgatcttaacgtagaacaatggttgaccattttagctgagtagattacattttcacttattttttagcttccaaatattgaaatattttctttattatgtcggggatacgtgatcacatacaaaagaatctccgttgctgtatgcactttattgtcacaaattatttgatggctgttcataatcttaaaaacaaaaactgtgagatcaagtggtgacgtctaggaggatgtgcaatgtgaaagctccctacttaggtaaataggtctggtgagtacctgtggcaaaattaaagtctcattcctttgaattttaatatttaaaaattgttgaaatttctcagtttctctactttgcagtacccactcattcttaattggtctttaaagatttattttagagataaaaaaatttctctaagatacccataataggaagtatttcatttgtaagtcgaatcagtttttatataataatcagtgaaaactattaaagtctagctttgctgaaagacattttcccctaatag

SEQ ID NO: 38788 - DNA, 1051 bp, Homo sapiens
ggaaaatcagaagatctggcaatattgaactgatgcctggctgtggattgaaatggcttcctggccaactcctcttggctgtttaaaatgtttgtgaccccacctagacttaccttcaatttatttacactacgctcctggttctacgtttgtgactgtttattgtctttactcctttcaccttctggaaggtaaatgatagctattattaatatattaaagaggactagatccaaaagtttgtagtatatgtgtggtggggggggctttccctcatagggaagaaaaagtattagctttttcccacctgtcactaggttcgtggctgagtcacctttaacagactacagattaagaagagaaaataacacaaatttatttaataaaagtttcacatgacatgaagttttcagaaatgaagacccaaagatacagggaaacctgtgtatttcagtgcttggatttgatgaagaatagacagtggtggggaaatgtgattggtcaaagcaggtaggatctaatggtaataaactggaggggagcttaacaaggcctgtttgtgcagattcttaatgttcctgtgttttcagagataaggacatttcctttcctcagggaatagcgagggcacctctggaatgagggtcttatgacttactttaggggaaggtcagaaaattgttttatggcctgtttcaggggagaagggtgggaggaggtcagaaaccttcctgcttctgctactttctcaaataccaaggtaccatattttggggtagcatttactgaaccctatcaccctcaatgttttcttcctttcactcttcactagcaacactcaagcatttttcccaactcatcattatgtctgaggcaggactttctcctcagaaagtggttcctgatgacctggttgataatccatgctttacatactcatcttcagcagtcatccactctgacattatctcccgtcactcactctggataggatttccaggtgtccattatttttatagacttttagcccttggcttccattttcagtcac

SEQ ID NO: 38789 - DNA, 1080 bp, Homo sapiens
actgcaacctccacctcccaggttcaagagatttttcctgccacagcttcccgagtagctgggattacaggtgtgcaccatcatgcccagctaattcttgtatttttagtggagacagggtttcaccatgttggccaggagggtctcgaactgccaacctcaggtgatccgcccgcatcagcctcccaaagtgctgggattacaggaatgagccactgtgcctggccaatgtggactctatatggtataaaggagtatgtaaactgtggagagaagtagggctattttctacagcagtggtcttcaaattttttaattgggtaccttaccagaaaacatttgaatagaaaacctcaatataagtatgtctaattataaatcatatgtataaatatatatactatttcggcttatatagtttttcaagtctgtttatgatgtaattttatgtttcagaacaatttaatatactttttttcctgctgtacttcagtgtacatcctctgtttggaaaccactagttcatagtgctgtgagtaatgaagttttctaagaatacattattaaataactgcctgatttatttgccctatttcctccatgtacggagacattacagcaacagcccagtcagatttttttcatgctatcttttagtcagatttaatttaatgtgtatttctagtttattgcttctgccatgttttattctttatgaagatccccgagtattgagtgtgccagttaccagattctctcccagctctaaattacctcttcattacttgatctgcaatattggagcctaaccctttaggccaggggtgtccaatgtcttggcttccctgggccacattgaaagaattgtcttgggccacacataacatacactaacaatagctgatgagctgaatcgcaaaacaaaacaaaacaaaaaaacagaacaaaacaaaaaccttatttacaaatttgcattggcccgcattcaaagccatcctgggccacatgttgatgttgaacaagcttgccttcggcatttcttctttatgtgatgttaattttgtgagtggagagtgctgg

SEQ ID NO: 38790 - DNA, 1143 bp, Homo sapiens
tgatattttggatttcaacatttaggattgtgtgttttgggattatgatgagcactgctttcgttaccggtgtcacaatttaattaatacagtaatttaattctgttggtgtaccatttgtattctagaatattctagaacttgaagcatactttctttgagaggaggtcttgccctgtaacccaggctggagtgcagtggcacaatctcactcattgcaacctctgcctcccgggctcaagtgattcctcccacctcagctgggactacaggtgcgtgccatcacacccaactaatttcttgtatttttgatagagatggggtttcaccatgttgcccaggctggtcttgaacacctgagctcaagcgatctacccacttcagcttcccaaggtgctgggattataggcatgagccaccacgcccagccctctatttttcttactttttattttttattttttaaacatttgctaatttattataaaggattttacaaagtattgacaggaagagatgtataggacaagatatgggggaaaggggctcagggaccttccacgccctgcctgggtacacctccctccagaaacctcatgcacgttcggctctccagaaattcctgaacctagtcctttggatttttatgaaagtttcattacctaggcatgattgattacgtaattggccattggtgatcaacttagtcttcagcccctctctgctctccagaggttggggggacaggtggggataaaagtctcaaccttgtagtcatgctttggcctttctgatgtccagcccctgtcctcaagttacctatgggctgccagccatcagtcaactcattaatatacaaggatgccttcaggcatatttttctaggttattaatggaggttaaattcccagactagttacaaaaagtattttttaaattcacagtaaaactgtaatgttactttatattctaggaacaggatactgtgcaggaaagaccactgtcaaattcagagttttgttttgggaatgccttaccacttcattttcattccctcttagttctccagtcctctttctcaagtagctgatgttctcatatttctgtgagtacactttgcatcttcactcaaacctattcctt

SEQ ID NO: 38791 - DNA, 1092 bp, Homo sapiens
aatgggaaaagtttaataagaggatttggtatcaactggctgtccaaagataaaaatggaccgtcctatcacatacaaaattgttttttagataaagatttaaatacaggcactccttcatttgcgtggtgcaccttgaggtgttgcagaaatgatgagagctgaaactgcaaagcaattttaatactttatctgttggaaatcttatagttttcctgtgaccgttaaaattttcattaaactattaaaaacacccatgactggtcacaaatgtattgggaaatggaaaagaattaatacactaaaaatacaaaaaatagaaaatatttaaaattatctaaaaatttgaaacattagaaaaattgagaactaggcagggcgtggtggctcacatctgtaattttagccctttgggaggctgaggcaggtggatcacctgaggtcaggagttcgagaccagcctggccaacgtggggaaaccccgtctctactgaaaatacaaaaattagccgggcatggtggcacaagcctgtaatccttgctaaccaggaggctgaggcaggagaatcacttgaacccaggaggtggaggttgcagtgagccgagatagcaccactgcactccagcctgggcagcagagtgagactccgtctcaaaaaaaaaaaaacaaaaagaaaaaaaaattgagaattaggatgtttctatttgtaaaaagcttatcaagaatactttcaatgatgcttgccttctaattgtataacttaagatatggaacaagcatctcttctgtgccttgccaaattgtcattttcttttctaaatttgtattagttttcaacattttatatagtactttgcatttccaaagtcatgaagtatttcagagacttcctttaatgtgatgtttttttcctctgggatatcttcatcttttggtcataaccagtttccaattccactttcagcattgccactttttgtttccttgctacactttcatttttgttggtcagtcccctcttttgactgtttacttttgtaaaatgtcaaatcagtgtatcactgggagacaggaaggcaacacagttacac

SEQ ID NO: 38792 - DNA, 1027 bp, Homo sapiens
ttctggcactgtaatatgctccaggctcatctggcgtatttcctgcctgagtcctggaatcaaccgtttctctagggaggacttgctccttttattggagaatggtattagaaaccaagatctatattaaactaaatatgaattcttactgatgtctccaagtctaattcattaacacaaagatcattgtagcctccttcccttgcttatctgtgacctcccacttcaacaaaatgtcatgtaattggaatcatacagtatgtagcctttcagactagctttttccaccattggccatccatttacttaatcctagtatacccctataggaaaaaactttattaactacagtacagtgcttttgtacagttcttttttactttattcttacattctccactcatttccaaagttacttaggtcagcaccttatttctccattcctttcagtgaggttcttttcatacatttgtaatatagttattttgttgtattctgtattccatcttgggcttcctgaacctcctaaataacttttttttcaatttgcataccttaagattccctcttttgtgttgtatagttttatagattttgacaaatgaaaatagtgtcgtgtgtccaccattacagtagtatacatagtagtttcactccctaaaaaaaaaaacaacaaaaaaactgtgtttcatctatccagccttctcccaaacacctgacaactacttatctatctgccatctctatagttttgcctttttcagaatgtcacgtaattaaagcttttcattcaagcttctttcacatagcattgtatatttaacattcatccagggctttacgtgtctgttaaaccaatgagctattagctcattcctttttatcactaaataatattccattatatggctataccacagtatccattcacctgttaaaggtgaatggctaaacaaactgtggtacagccatgtaatggatgctgtttttgatgtatgtgctgccagtttttggtgatttgaataaa

SEQ ID NO: 38793 - DNA, 1090 bp, Homo sapiens
atataattaatttttaaactcttattcaggattacatctgttgccgtttctacagttttgcaagaagtaccatcagccccgttttgaaaattacattttgccatctgttttcacttattctatggtgtgttctactcttaaatcttaagcttatcaaagaagtagagtagtaagagtagaagaaatatacttttctctgctatcataaatagcacataatcaaacccaagtagcagactttcccaagaaggtctcaccatgctcagttttattgttctcagcatttttggtgagttaggtgtcatcttgggttttacttttattaacattttgcataggttgttagtaccaggtgtctgacactcatggtgcatccttggtcttaaacctgtttttccttcttctgtatgtattattttaaaatctaagctctaagacaactccctattatagtcacactgaattttttaggcactttccctctacttctatattgggttaatttgcaattgcataaattgcagttttgtcagcttgccagtcctttcttgcatcttgagcactgcagttctcttttttccccccagaactcttttcttttcaaaggaaatttctaaagctttagattttccatgatacttacaaatcattcatggttttgtgggaaataagcccttatttagtaataaactttgcattttaaagtgaaaatggaaaaattgctcttagtttgctagatattagcatacctaagatgcaataatattttagcaggagaggggatgggaggagagagctagcgataactaatgttgcccaggtaaatagggtgaggtcagatctgattacatgcagattataccctactattttataattaaatataagtatttaattatatgacccaaagttttcagttttactgaaaaggatttttaaacgcactctttggtttcttaaagctcctagacaaggacattattttttagtgtgtgtatatatatctatatatctatatatatatagatatatagatatatagatatatagattttttttttttgagacggagtctccctctgtcgcccaa

SEQ ID NO: 38794 - DNA, 1035 bp, Homo sapiens
ttctttgtcagttattttggcttaaagattctatatgaattttaggatgcatttttctatttctgcaaaaaaaaatgccattgagattttcatagagattgtgttaagtctatagattgctttgcctagtatggatatcttaataatattaagtcttatcatccatgaacacaagataccttcccaattatttatgcatttcatttcttttaacaatgttttataatctttagtctacaggtctttcgcctcctccttggttagctttattcttattttattgtttttgttgcaattgtaaatggaattattttcttaatttcctttttgaactgttcattgttagtgtacagatgcaactgatatttatgtgtggatttttatatcttgcagctttaccaaatttgtttattagttgcagtagtttttaaatgggatctttagggctttctacatacaagatcatgtcatctgctaacagatgattttacttcttttcgatctgtatctcttttatttttcttgcctaattgctgaattgtttctttctttcttttcttttttgagacggagtttttgctcttgttgcccaggctggagtgcaatggcgcaatctcggctaactgcaacctccgcctcccgggttcaagcaattctcctgcctcagcctcccgagtagctgggattacaggcatgcgcctccacgcccagctaattttgtatttttagtagagacacggtttctccatgttggtcaggctggtctcaaactctcgacctcaggtgatccacctgccttggcctcccaaagtgctgggattacaggtgtgagccaccgtgtccagcctaattgctgaattatttctaagagagaatacaaattaagtatttttaaaaaggataagtgatccttgctttgaaagcaatggaaccactagaaggttttaaacagggaagacaatcaagtgtgtgctttaaagtaataccagaagcaccctggattctagtgaagtgatggaggtggtaagagtagat

SEQ ID NO: 38795 - DNA, 1109 bp, Homo sapiens
taaaatgaaaaatataccatcagtattgaacaaaatattagttgaatctcttcttctggaatgtcccaatagctttttgtggttactcatcgtggaaggttgtaatgccctagcattacagattttagggatgctaactgctggtgttgaagaataactgctgtaggaaaaaaaattagtgtaattttaataacattgactattagcatttaacacagaactattttcatcatcaacaagtttattcagctcattctaaatggtcccttatataagggccaaaagtacttaacttttaaaagttagcaatataatctcttcttgcttataaggtcaagtcttttgtgatagccttactagcaataatagaaaattgaaaaaaagcattttagttcccgtgtttaaaaatatttcttataagtgttggtattgcaaatgaattattaccaaatgttaataatctattatgtcttgttttttaaagtgaatgaatttttagcttttgagggtcccatcttgttggatatgagaattaaacatctaatcaaaacaaatcagttaagtcaagcaactgctctagcaaagctgtgttctgaccatccagagattggcataaaaggtagttttaagcaaacttaccttgtctgtctttgtacatcatcaccaaatggaaagttaatcgaagaggtgagtatgttttctttcattagtaattattttttaagttgagaaattaatttttaattagaatgtctttgatttccttttctcttagatagcgaagagatcattgtcaatcttacatttttggtatgttcttgagtggtggcaacttgattctaagtagcttttagaattatatgtaaactgattgcacctagtttctgttttaaataatatacatcttttaaatgctttggctaaattgtgggaaagatagtggtggcttaacagtttagtaaaatatctatatttgtcagcttttggccttaacttcaatcttgtctgacttcaagatacttgcacatcttttaaactggctaatttaagtaactttatagaatttttgtgacttatctctggaaatactttgtcatataaattctata

SEQ ID NO: 38796 - DNA, 1031 bp, Homo sapiens
tatttttccctcatgaatagatacgtagtttattagtctatacccagtgtacctctctgtgtgtctctgttgattctaatgcttgtttaaatcagtggataaaaggggaaaaaataaaagtactgcatttttttttcatgatcagatctgatttaatgggtagagattgcttatagttatcatcagttagttacatataaatgcttgtaaattcttaaatagttggttctccggtgtttcttaattttctcagaattactatataaatttctactggctataaagaaaggtttttttttttttttttaactgcagccagtctttgtcccagtaatgacaaattataactgacttgatagtgtatgaattaatggcattttattcataaaaactatctaaatatttaatgaaaactaaaggtatattgctctatattctaatataaaaccattttgtggcatatttctattggctttttctttagatttcagaagttgattgcaaagatgcactggaaatgatctgtaacttagaatctgagggtgatgaaaaaagcgctcttgttttatgtactgcgtttttgtcacgtcagctccaacaaggagatatgtactgcgcttggtgagttgatctttttttttttaaagaaatatttgttaaataagaatgcaaaataggctgtgagaattcatataacttaggaacataatttaaaatctttttaagacaaaaggcttatatttagatattacatgctgtgcaaacttattatcgagtagttgttacaactcaaaactttgtgtattaaaggccacacaattccttagcatgcataccaggaattatctttggtcaggaaatttttaagtgttagaaagtgaaagaaagacttgttttgtctaatgccaccataacatttttttagatatgtaagcaatacatttctttttatggtacattttcagttgggcatagcttgttatatgtaatcctttgggaggctacaggaaacagagatcttggtttcagtt

SEQ ID NO: 38797 - DNA, 1034 bp, Homo sapiens
agacacaggaatcgcttgagcccaggaggtggaggttacagtgagctggaggttacagtgagccaaggttataccactgcactccagcctgggaaacagagtgagacttggtcttaaaaaaaaaaaaaaaagatcttgggccagctcttcttgtctacttgggtaggtagatctgaaacaaccaccccctcaccaccgccccctgccacccgcaacacacacacatgcgcacgcacgtgcatgcatgcatgcatgcacaatcactacatgaagctggaacctgtgaagtactttaattttattgaaaaggtagactagaaaaataatactgtctaacacatatggatggtagggaattttaggtatgtccaactggactctgggtcagaggaggaaaatctttaggaagttataactacaagtctaccctcatacagatttgggagccacatttaccctagctgtgtagttcagaaatccgtatgccaagtaagttaatgtttaagaaggtgaggatgaatacctaagattcctgcagaagaaaatgcagaactgctttaggagggacatattgtcaacacaggcgtctcataaagccctgctttaacatgagttcaccattaagatttataaacatacaaaactatctgacctgagtgattttcagcaaaggaataataggattacttgcctaatactttaaataatataattatggaaaaatctaggaagtatatgtatttaaacacttaaaatttaggaattaaagtatgagaaagtatcaaaatgaccaagcagatcgtaaaaagagtcaaaagaacgtttggaaataaacatacatagttatcgaaatgaaaattttagcagatggattatacagattagacacaactgaagagggagttaatgaacagaggttgtatatgtgcttccacttattttttactattaagtattaataaatcagaactcaagtttcataaagttactgattttcttatagtaacctttgtagaaatgcagttgatttccat

SEQ ID NO: 38798 - DNA, 1044 bp, Homo sapiens
aatatggggatgttctcagttttataattagattagaagggttttgtttcagttagattgcttatgcaaacaggaagtaagagttacaataaggatgacatttattgatcatttactatgtgccagacattatactaaactataacacatatttaatctcctttaatacagcagtttaatgaagtttaagtgctgttttgacctctgttttataagtgggatgggaaaggtcagaaaagtcaaataacttccaagtttgcctagccattaaataattccataccaaagtcttagcttctaatacttaaacattttctgcccttctatgcagttcattttacatacacacataccagactaagctgcagtgctttagaaggggaatcctttcataagttgctattgcaagatttgagtaaaacaaatctcaatcttaactaaattctgaaataaattagtgttgattagtgtagattaaattaacatttcctatttgctttttcacagactgaaggggctggacttgctacctgtatagaactgtgtgtaaaggctcttcgcttggagtctacagaaaatactgaagtgaaaatatctatttgcaagaccatttcatgtttgttgcctgatgatctggaagttaaacgtgcttgtcaactgagtgaatttcttattgagcctacagtagatgcgtattatgctgtggaaatgttgtataatcagccagaccagaaatatgatgaagagaatcttccaataccaaattctttacgctgtgagctgttacttgtattgaaaactcaatggccctttgatccagaattctgggattggaaaaccttgaaacgacaatgtcttgcattaatgggagaagaagcatccattgtgtcttcaatagatgaactaaatgacagtgaagtatatgaaaaagtggtagactaccaagaagagagtaaagaaacttctatgaatgggctttctggtggagttggtgctaattctggccttcttaaagacattggtgatgaaaagcagaagaagaga

SEQ ID NO: 38799 - DNA, 1104 bp, Homo sapiens
tggatggagccgaaattgctcaagaacttctacagagtaatggacagccttctcttcttgccagcatgattctctccacaaatgcagtaaatttgcagcagccacaacaatctaccttcaatccagaagcatgttttaaagatccatcatttctacagcttcttgctgaaaatcgctcgccagcatttttaccaaatacatttcctcgatctggtgtgactaactttaataccagtgtcagtcaagaaggtagtgaaattattaaacaggctttggaaactgctggcattcccagtacatttgagggtgccgaaatgctttctcatgtttcaacaggttgtgtctctgatgcatcacaagtaaatgcaacggtgatgccaaatccaactgtaccacccctgttgcacactgtatgccatccaaacaccttgctgaccaaccagaataggacgtcaaactccaaaacttcctccattgaggaatgtagcagcttgcctgtttttccaacgaatgacttactactgaagactgttgaaaatggtttgtgctctagttcatttcctaattctggtgggccatcacaaaattttaccagtaacagttctcgtgtttctgttataagtggtcctcagaacacaagatccagtcatttaaataaaaagggaaacagtgcttctaagagaagaaagaaagttgctcctccactaattgcacctaacgcttcccaaaacttggtaacaagtgacttaacaacaatgggactcatagcaaagagtgttgaaatcccaactactaaccttcattcaaatgtaattccaacttgtgaacctcagagtttggtggaaaatctaacacagaaattaaataatgttaacaatcagttatttatgactgatgtaaaagagaatttcaaaaccagtcttgagtcccatacagtgttagcccctttaacattaaaaactgaaaatggtgattcccaaatgatggctttgaattcatgcacaacttcaataaattctgatttgcagatttctgaagacaatgttatacaaaactttgaaaagactcttgaaattattaaaactgctatgaattctcaaatac

SEQ ID NO: 38800 - DNA, 1087 bp, Homo sapiens
tatatgcaacccggtcgaatctcctccgacacatttttaataagcataatgacaaacataaggctcatttgattcgtccaagaagattaacaccaggccaggaaaatatgtcaagcaaggcaaaccaagaaaaatcaaagtctaaacatcgggggaccaagcacagcagatgtggaaaggaaggaataaaaatgcccaagaccaaacgaaagaaaaaaaataatttagaaaacaagaatgcaaagattgtgcagattgaagaaaataagccttattctctgaaacgtgggaagcatgtatattctataaaggctagaaatgatgccctgtctgagtgtacaagcagatttgtaacccagtatccatgtatgataaagggatgtacttcagttgttacaagtgaaagcaatataattagacattataagtgccataaattatctaaggcatttacatcacaacaccgaaatcttcttattgtattcaaacggtgttgcaactcacaagtaaaggaaacgtctgagcaagaaggtgctaagaatgatgtgaaagattctgacacgtgtgtatcagagagcaatgataattcaagaacaacagctacagtttcacaaaaggaagttgaaaaaaatgaaaaagatgaaatggatgaactaacagaattgtttattacaaaattaataaatgaagatagcacaagtgtagagacccaagctaatacttcttcaaatgtaagtaatgattttcaggaagataacctctgccagtcagaaagacaaaaagcaagtaatttgaagagagttaataaggaaaaaaatgtctcacaaaataaaaaaaggaaagttgaaaaagctgaaccagcatcagcagctgagttaagtagcgtgcgtaaagaagaagaaactgctgttgccattcaaaccattgaggagcatcctgcatcttttgactggagctcttttaagccaatgggatttgaagtatcatttctgaagtttcttgaggagtctgcagtgaagcagaagaaaaatactgacaaagaccatccgaatactggaaacaaaaaaggatcccattcaaattcaag

SEQ ID NO: 38801 - DNA, 1020 bp, Homo sapiens
tagataaaacactttctataaggaagttggatgttttgattttactgtttatagatgttagattgtacagatttgtctgtatttctcaccatatctaatgatacttttttcattagattggtcttcaagaacagtattagttataattattttggttattcagtatatagttagctcttacagtttagctttattcaccatatttatactgtggattcacagcgagaggtagaggttattccaggagagttgatgaccttcatttaaagtccaactaaaatcagtagtagaaacataagaaaacatctttgcaatatttacttttgtttctgtttgccgtaaatagtaacattgtttttttttattttgtgtttgttataaaacagttgcattcacaatattattggcctgagatattgatgatattgtgatggtatgaaaatgtgtacattccctgtgcaacatcagatttgcaggaaaaatgaagcacttactgaaatcgctggtactctgaataaataagcatggtcaaggagtgaactattttcttttggaaatttctttttaatttttattattaaagtattttatttttagggccttttgggttttattgaatagttcatttcacctgtttaagacttactaccaataagcataaaacctgacacgttaaaatccctgccctttggtgagcccactgttatttattaaaataaaagttattttatgggtgattaatacatgggttttctttttcctaaattaacaataatttaaataactgagtaattttaatattaaatttttgttaacaactgaatgtttccatacagttttcttagaaattgacctagctcttaaaggtgggcacttggcaaaactgccctatatagcacagtagcaagtaggtttatttctgatcattgtaactatgagccactgttaagtgaaaatgccaatgtattggggcttttcttttgctcattagcttaagaaaatttataactagacatttct

SEQ ID NO: 38802 - DNA, 1048 bp, Homo sapiens
tggaaatggtggtgtgagtggaaacggggagttaagaaaactgagatgttccaacagcacacatgttgggagcataatacatgttctcttacagaggaagcaatatagagcaagcccacattccagagccctgagaaggcaaatgaaggctaagaggtattttcagggaaaacaaagctacatgtacacaatgccctattcagcagggaataaatacttcaatgtccttggttttcagaacacaaacaaaattgtattaaataaaaaggattcttaagcctaccggaaaggttaatgtctttatgaattattaaaacaaagccccaaagattaaaaaggaaaaaatatgtttccctatgacatgtatcattgggcgtttgtctgtattactcaagaggatatttatgtaatcttactaaacatttgaaagtaccttgttgggcattttagaggtaggaggaaggtaagagactgtgttgctaaaagaaaggcaacaaaaaaaaagtgactgatctttgaatataatcagaggatgatggcatcaaatgtcataattatgacttttattttataaatgtccatcctatttttttaaaaaaattttttttcagatggagtgttgctctgttgcccaggctagagtgcagtggtgcaatttcagctcactacaacctccgcctcccgggttcaagcgattctcctgcctcagcctcccaagtagctgggattgcaggtgcccaccaccacggctggctaatttttgtatttctagtagagacggagtttcaccatattgactaggctggtctcgaattcctgaccttgcgatccgcccacctcagcctcccgaagtgctgggattacaggcatgagccaccgtgcctggcccctattttcaaaggatggaaagacaatggcattcttattctttacaataagaatatacaaaattaaatctgaaaaaaataaacctaataaacactatgaaatcagagacctatcactctttcatatgtatatatttggttcttgtaacaattggagaaag

SEQ ID NO: 38803 - DNA, 1067 bp, Homo sapiens
ttcttttgaagtttatatgccagcaggcctttttgtttttttccttttcagaatgtttcttattctctgaagcatcagcattttgaagtgtcttttatggaagtggggacagaaatgggggtaaaaatgagtgtaaacaaagcctagccctacggtcagtacccactggaggtgagaagcagaatggccttggttgtcctggcacctggcccaggggcctaggacagaggtcaaggctaggcccctgtgtctggccagattctgccttatagaattcaaatctttcttacaagggttctggacccgtttcatttctagatatatacctaattctccaaatcattgtcattgggcctcagtagtaaatcttacctctgaagtcttgcttcagtcgctattaatattaccaagtaataataacagcacaggcagagtttatcataatgttatttttaatttgtcatactttattatggttttgtaaggtacatgaaaatgtaattatgtgtgatttgtaggtattaaagaacttagctaattgaatttacatgaaactaaataaaatctttactactgagccccaaatatgtatttgctatgcctgtctgtataatgtacttcatatagtttaaaatgcacttcagtgatacaaaatcccttttaaagactcttttgtttttgttttccctgtgtattttggctatcacaaaactagggttcttctgtttttaacttatgcatttaatgacacattgccatcttttagaattttttactattcaacagaataagctgatgtttggtggcagaggagttattagttgcgtgaactgtcaagagattgcagtgcaggagggcaacagaaactgtacaaggtgcagacttgagtcatgtaagatctatgtgaatgaaccaaagtaactagagtcagtcaagcacaaagctgtgaaaagtagtgtgtggaaagaatcatactgaattttaggaacaagtacctgactatgatactttttacagagtgactacaagttgtaggacagtctttgtgtgtgctgagtgtcaacagc

SEQ ID NO: 38804 - DNA, 1024 bp, Homo sapiens
ttatctctaaataacaccctaattggatgggcacagtggctcacacctgtaatcccagcactttgggtggtcgaggtgggcagatcacttgaggccaagagttcaagaccagcctggccaacatggcgaaaccccgtctctactaaaaaaatttaagcaggcatggtggcatgcgcctgtaatcccagctactcgggaggctgaggtaagaaaattgcttgaacccaggaggtggaggttgcagtgagctgagatcgtgctactgcactctagcctgggtgacagagcgagactctgcctcaaaaaaaaaaaaaaaaaaaaaaaattttaaagtaccctaataaatgggtaaaagaaactatataacctttaaatagtagctggtagcataaaagtagatacatatagataacatgaggacgtttactgtacatacgtatgtatatataataagcaaatcaaattgtactataggtttccatctctcttttatccccgtaagagttttcagtctgaccttgagccttgtaggtattttcctaagaactctcacaatacttctctgatcctctcttcctttaaaatggtaaactaagggtgatttcatttcactcctgatatttgaaaatataagaagctggagagcagaggtgtttggaaaaaaaaactaaaatgtagggggagatcaaattggaatcatcttctaaaaacatcaattccaaaattgtttcttagcatttagtaagtgcttagtatgaatgattcattatgatctctaaagtgacttttcatacccaggacagtgtatctccattcttagatataccttaatgattgattccttatgccttatggaatatctaacccaaaccttaagtggataagttaaatctattgttagaaattaatcttttctattcagtgacctttgtcattgaactgttttaagttaaaaaagaaagaaagttgaaattgtctgttctttataagcattttgaaatgtccgtagaagagctagtgagta

SEQ ID NO: 38805 - DNA, 1094 bp, Homo sapiens
aatcctggcagtgcactatatagaactttgaaaaaaaatattaatacagatatccaaacacagacccactggatttaatactaatctaacacagagccactaaattaggacctctacggtcaggactaagcatgtgtattttttccttcacgtttaaataaccttttttatttcaagatagtttaagactcacaagttgcaaaatagatcagagttcccctgtacccttcatccagcttccattgatatcttacataatcctggcactttgtcaaagctggaacactggcattgaaacaatactattaactcaggtacagaccttatgtacacttttttcccccggcatagagttttatgaaatttatcatgtgtgtatattaatgtgccatcaccacaatcacaacatggagctgttccatcaccacaaaggaactccctcgtgttaccccttagctgtcactctcttctccccaaacttgaacccctgacaaccactaatctgttctctatcactataattttatcactgagaatgctatctaaagaatcatagattatgtaacccattgagattggctttcttcactcagcacaatgcccttgagattcatccaagttgtttatcaatagtttgttccttttacagtatgtgcatttttaaaaaaagctttgcagggatcctgttgtacaatcagggttgagaacaactaataaaaccaatgggatttaaacataaaagaggatagtgatagcctacacttgtatcacatttttatgaagttcaatacgttgatggtccatgcttagtcacattttgtcctagaaaatcttttctaattatttctacacaatgttgggcttttgcagtatgtgtccatctccaccgtaatatatgctgccctgtgtttttaagattcgctgatgaactagtaggagactctgtgccgccaaacatatacttttaattgctagtgacagaaacataactcagaatagactgcatgaaatggaatttcttgactcttttaacagagaaacccaagggaaatctggcatcaaggctttcaatctgtccatgcttacccttttag

SEQ ID NO: 38806 - DNA, 1025 bp, Homo sapiens
tatttttaagcctagacacttaatatttgaattgactagccaaatcttcatgcttttaatgtcgtaggtgtgtatctaataattgctgaagctggaatttccttcgtgtgcagtcagccacacctcgctatacctgtcaaaccatctcaattatccactccaattgtcatgcctctcgtgggttagttgtaaatggaacacaactctagcatgacattgcgacttaaaagagcatatccagtatttcgatgatcattctggaaatatatttcctcttcaaagtttttacctgtcagtgaggcatttaaattggggcattctcttgtttctgaagtctgataaaatcttgaccttagaatatttattggtaatatttattcattcacaaaattagttcttagcatatcctatatgtcaggcattagtctagagctggggctagaaaaatgaataagattgggttcctgaccccagcccaggctcacactgtagtaaagggaaacagacatgaacactaggtgacatggagtgttaggggcgctatggtagaagtctgcagagagtgcaatgggcgtccaaatgaggaagtgatcacttgcacaagagtgggaggcttggctggaaaggcttctctgaataggatgacatttgatctgtgttttgaagggcatcgttggcaaggtaagtaatccaattaaaggaggttgcctcagctaaagcacagtatgctcaaaggtgcggatcatttgaaaatttgagttcaggtgcagtaggggtaaggtaagtatccaacagaattttctacaatgatggaaatgttctatattgtcactgtccaatacggtagcctctagccacatttggccagtacaactgaagaattgaatattaactttcatttaattctagctaatttaaatttaaatagtttcatcagttagtggctaccatattgaacagtgcaggtttagagataaacagaggccagttgcaggagggtcttgcatcccattgaggaggactga

SEQ ID NO: 38807 - DNA, 1050 bp, Homo sapiens
attgctaataactgaagttttatactggagaatttgtgaatggagtgaacaagaaatagtttggtctgatgttaaactgccagagaaaatcgtacttaaaaacatttagtatttaaaagttgaaatacgtttaaaaactggtattccatgtcaaagcccaatctgttttgcacatacctaaacttatttgattacccttccacttagatcagtagttattttcaagaatataatatatattcccatatactcactatgcaaaaaggtattttttcaagttaatgacaatattataagtcagaatatgtttgtaggctatcaatatttggtttagtgtttaaatattcactttgttgtttttggaatcaggaacctgtacagtagctaaaataaagtactttttagtttatcagccctaacttctcttatttatgaaagtgttgataatctaggacatgagatggcaaacttttcctgtgaagggctggatagtctcttgtcataactactcagatctgctgttgtagggaaaaaaaagtagcctggataatttagaaacaaatgagcatggctatgttctaataaaactattcatggacactagaatttgaatttcctgcaattttcacatatcacaagatgttattacattttttatcaaccatttaaaaatgtaaaacaatcgtgagttcacaggcctcatgtaaactggcgacatatatagtttgttcaccctttatctagaagatgggaagtgccttctcttctactgattaaaggttattgctgtatatttttgaagtcatatttcttcccttgtgtaggaaagttttagaacaaaggaagtattatagtgatctccttcacttccttttatataaacactgattttttggctcctcagatcttttggaaagaaagtttaagcagttaaaaactatttcttctgttttactttttatttaaaacctgatatggtttttaaaaattgcctacaattcagaaaatattctttaatgcactcgggaaaatatttatattgaagaacct

SEQ ID NO: 38808 - DNA, 1048 bp, Homo sapiens
gcatggtattccatggtgtatatgtgccacattttcttaatccagtctattattgatggacatttgggttggttccaagtctttgctattgtgaatagtgccgcaataaacacacgtgtgcatgtgtctttgtagtcgtatgatttataatcctttgggtatatacccagtaatgggattgctgggtcaaatggtatttcttgttctagatccttgaggaatcaccacactgtcttccacaatggttgaactaatttacactcctaccaacagtgtaaaagtgttcctatttctccacattctctccagtatctgttgttccctgactttttaatgaccgccattctgactggtgtgagatggtatctcattgtggttttgatttgcatttctctgataaccagtgatgatgagcattttttcatatgtctgttggctgcgtaaatgtcttcttttgagaagtgtctgttcatatcctttgcccactttttgatggggttatttttttcttgtacatttgtttaacttatttgtagattctggatattagccctttgtcagatgggtagattgcaaaaattttctcccattttgtaggttgcctgttcactctgatgacagtttattttgctgtgcagaagctctttagtttaattagatcccatttgtcaattttggcttttgttgacattgcttttggtgtttcagtcatgaagtctttgcccatgcctagtcttggtattgcttaggttttcttctagcgtttttatggttttaggtcttacatttaagtctttaatccatcttgaatgatttttttataaggttaaggaagggatccagtttcagctttctacatatggctagccagttttcctggctccatttattaaatagggaatcctttctccattgcttgtttttgtcaggtttgtcaaagatcagatggttgtagatgtgtggtgttatttctgaggcctctgttctgttccattggtccatatctctgttttggtaccagtaccatgctgttttggttactgtagcc

SEQ ID NO: 38809 - DNA, 1044 bp, Homo sapiens
gaattgccctccatactgcactcaacaatccttactattatctcaaggtaagatgaacatttagttttctgatagtttagctcagactctgggcgtcattgtcataaaaatatactaaatttgcagttatgttttaatgagcagagagtcggcaattcagggttgcacgtctcatatatttttaaaaattctttagactgtagaaaaaaatttctaaccccataaagatagcaattagtagtcaactgttgctgccagtttttgaccatgtgtaatctttgcccttcacatgctaaagtcagatcataggcacaaagacttgagagtataatgttaccactcttgtgaaaataaaagaaatgtttcctgtaaacataacagcagacagggattaaacaatatggcctaataaattactgaaagaccgaaatggttgtttctagtgggaaagagaaatactttgggacttcatcttggattttaaaacaaagaaaggtctattctgagagcatctgcagagctgagtgtagaggataaccagcagtctgccactaaaactcctggggcagcacacttcagctgcccttgctaaagtccagacacagttatcaactcctggaagctctttaaacaatagttcaagacagctcacaattttagaaactagctttcttatgaccgggcaaaatgatcactttaaacattcaataagctgtatatacatgaaagagtggtaagttaaatacccagaaatcttgccacaataaatacttaagaaacaactccgtaagacctatgaagagcattccagtgtactggcttctcattgcaaaacggcacacaaacatgcagagtattacaagaatattgagtaggacgatataagtcaatggttttcagtgatggtgaaaaccactgaataatttcatacttaaccaaaaaatcagttaattttaatatataaaccataaattaaaacttacaaaatctgtcttcttcttggctggtgggtcacagaagagaactggtatgatttcagttgtc

SEQ ID NO: 38810 - DNA, 1033 bp, Homo sapiens
tgtcacatgaagacgttaatataatctgatgtccttatgatgagatcaccaagatgagtactaagagaggaggcaagcagcccaaggtcaagctcgggggcacacctatgttttagcaaaatgcagggaaatgaagattgggccaacagcaagacagagaaggagcagccagtaaaggagaaacgtcaaagcaagtgtagtattttgcaagccaactgaagagtgcttcaaggtcaaatgctggctgctgattagatttaacaatgtggaaatctttgctgccttttactaagagtaacagagaggagacgaactctaatcacctatcagatgacctaaccaagtgtccaaacttaacagcctggaaaagccgtaactgttgtgatgcaatatggagaccatagcatcaccttgcactcttgcacaacaagtttaacccgaaacttgcgaaaactttagacctttcagtttacagaaagttcaaagggatatcagaagttaaaattaatgacagtacaaagaaaaactcaacaagacaacaggcctagtatttccagaaagtaggaatcttaattgaatcgtgtttgggggatgagggtagctatttaaaaaagagacacatggaaaaatctgaaataaggactcgatgttaaattagggaagtattttaagtgggaaagtcaacttttctgtttgaatttcttttcctaataaaacaagttggtgaaaaaaaaggaaggggtaataaactggaggaagtttagaaaactgagttttgcttttataaaggggagcactaaaataatcactagcaagggatataggatcaaaagattttttaataacatgcttattatgcttttggaaatgatttagtagagaaagaaaatagatgcagtagagagaggagaggactgctggagctgtatctttgcctgagacataggtttgcatctcgtgctccttacctggggcaaatgcaggagcaagagaattgtgggagccatgtatccatgagtagacatagactatt

SEQ ID NO: 38811 - DNA, 1033 bp, Homo sapiens
tgcccaaccgcagcctcgccgtggcgggaggcactcctcgggcagcgccgaagaagcggcgaaagaagaaggtgcgggccagccccgcagggcagctgcccagccgcttccaccagtaccagcagcaccggccgagtctggagggcggccggagccccgcgaccggcccgagcggagcgcaggaggtcccgggcccggccgccgccttggccccgagtcctgcagccgcagccggcacggagggagccagccccgaccttgccccgctgcggcccgcggctcccggccaaacccccctcaggaaagaggtgaggccgccagggggccgttggggagtcgggcccttagacggtcgcggccgagctctggggctgcagaccctgcacccggggggtcgggcgggtgggggcggggtggggggggcggctgtttactcgggagggaagtttccgtgacgcccgctccattcttgctttgggggaagaagggggaaggggaggcatgcgctggcgcttctgattggctcccaggagtcggccaatgagaagcgccgctgcgccccagcaacagccccgatttagaaggctggcggcgttccagggggtttcggcgttccgggcgcgcggcggggtgggggcagggacagggcccgcgggagggctgacgtcagcgcgcgctacgtgcccggcgctccggcgcccatgaaggaggcgaggccgggtgggggcagctggggaaggactgggcccggctttcggcctcccggctatcgggagccccagtcctagtcggtgaaacgcggagacggcctctaacgtcccgccgtagggggtggagtgggctccgagcggctgggtttcgtttggttggagttgtgccaaaatgtgaggtgcccggtgtgggacgcgcagtccagttggggctctgcccgcctcgggcctgacctacttagtggttccaagttaagagttggcaggagccgcacaaaactgattttattacttttgccactgtggtacttcgtgttagtgtg

SEQ ID NO: 38812 - DNA, 1057 bp, Homo sapiens
ggtactgagatttttttcaagaaacagctgtcaaatctcaaggtgaagatctaaatgtgaacagtttactaatgcactactgaagtttaaatctgtggcacaatcaatgtaagcatggggtttgtttctctaaattgatttgtaatctgaaattactgaacaactcctattcccatttttgctaaactcaatttctggttttggtatatatccattccagcttaatgcctctaattttaatgccaacaaaattggttgtaatcaaattttaaaataataataatttggcccccccttttaaaatagtcttgactctttgtgtgtgactgtttctcatgtttgaatgtgtgactaggagatgattttgtgtggttggatttttttgacttctactttactggctgagtgtgagccgccatgcctggccataatctacattttcttaccaggagcagcattgaggtttttgagcatagtacttgactactctagaggctgagacgggagcatctcttgagcctgagaagtggagattgcaattgagctaggatcaggccactgcactccagcctgggtaacagacgctgtctcaaaaaaaaggccaagagaaagtaagggagacagattttgagtgggaatgttaagcaatcaggtcaagtaaagaagatcgaatatacaaaggaacttctgtttgatgttttgtgtgagtcaccattccttccttacaaatgcagatacaccttcctcacaaatggaagggaagctcatttagaagtttagtttgaagatgcccccaatttttagtcaccaattttagcttttgttagtaatgtgttgtaaatattaatactaatgactgactacagtgagttctgacatctctcccaaatcagtttgtgattctagaaagggacacattaacaggttttaacaacacatttttgcacatggttataaaaattcctacacaatgtaatataagtcctaccgcctcaaccacccttctttccttgtccaacatttctcagctcttgtcattttgagcagtatgtctgca

SEQ ID NO: 38813 - DNA, 1042 bp, Homo sapiens
agtgcatcgacgaggcggccgagcggctgggggccctgagccgcgcgatctggagccagcccgagctggcctacgaggagcaccatgcccaccgcgtgctgacgcacttcttcgagcgggagccgcccgcggcctcctgggcagtgcagccgcactaccagctgcccacggccttccgcgccgagtgggagccgccggaggcccgggcaccgagcgccacgccacgcccgctgcacctgggcttcctctgcgagtacgacgcgctgcccggcatcggccacgcctgcggccacaacctcatcgctgaggtcggggcggcggccgcgctgggcgtgaggggggccttagagggcctccccaggccgcctccgcccgtgaaggtgaggtggggcccgggtgcgggaccctatccgactgcccgggtcgggggcgacccgggaagggcgggactctcgtgcgtcccgcgcgcctcggtgccctcccgcccggggcaggtgtgtgtgggaccgcgctaaacctgcggtcctcgcctcggcgcaggagcagagctgaacccccagtcaaagtcagttcgcgttgccgacctggcgacatcttgcagattattgtttcctcctctctagttataaacagctctgctgagttgttcccttaggaaagaacttacacccaagcctggtgtttgttacgggttatttttggtaactgagagaggcaacagcaatttgctgacaaggttgtgccatcaatctcaggaggaaataacttcttgtaggtaatcctacggcccctttttattcgtctccaaataaatcttttgtttgtggcagtcctagaaaatgtgattcaagtcattggtatttggataggaattttcagtcgctagaaccaccagacccctagaagtatacaaataaaggggaagtgaatgagcattatacatagatgagttcatccttaagtcttaatttttttgttttatgattttaagaaatacctcgactctttaaacagggaaatgtcgtttatgtttgtcgtaggg

SEQ ID NO: 38814 - DNA, 1033 bp, Homo sapiens
gtgcttttccgatttgtctggtgctgaaaccttttatttgtctttctttatgttgaagaactcactttttagtacctaggagcacacatcattgaagtggtttggattttttataccagaaatttcaaccatagtagtaactatagtagttaatggtccaggcacaaggagccagtgctcagctgcttcagcaaaaccatgtgttttcctcagaagtagctcggtactgagggaatgatagcagaaccatcacagcagtgcttctagattgtacccgggtatcccacctcttagcaccttaccaggccctgttttcaaagggtgatcattttaactattagggtatcttccttcttatcactggaaattggtactgtggcagtaggaggaatctttgaactttggtttcaagggtggtggtaaactagtccatctctagaaaacactggggattagaaatctctgcccttgcctttgactagaaggggcctgcatatgcaggcaggctctgcagctcattacccttctgggacttaaggttaggcttcgtggtcttggttctgaagtcagcgcacttgaccccagaccttctcctagtatctgccttcttagctttctcactgatcatctcttttttttttttttttttttttttttgaggctgagtctcactcaattgctcagactggagtgcagtggcacgatcttggctcactgcaacctccgcatcccaggttcaagtgattctccttcctcagcctcctgagtagctgggattacaggcgtgcgccaccacgcccagctaattttcatatttttagtagagacagggtttcaccgtattggtcaggctggtcttgaactcctaacctcaagtgattcacccacctcggcctcccaaagtgctggggttacaggcatgagccatcacacctggccttcattggtcatcttttaagatagaaaagagaggtcaggtgcagtggctcacacctgtaatcccagcactttgggaggccaaggcaggtggatc

SEQ ID NO: 38815 - DNA, 1052 bp, Homo sapiens
ataactccagaatacttaaccacatatacttaaatagacttttcttaactttgtgtgttccaaggatctacggattttggaaatgttagttttgtggttcctggaattcatccatattttcacattggatctaatgccttgaatcatactgaacagtacactgaagctgctggtaagtgttgttggatgtgactgttttggcacacacactcttcttctggtagtagctgcctttctgtttaacctactatttcactacataacatcacctcagtaaatactgcactgtggtgggcagttggagagccagttgagatacgggtagctaacctgtgaaattaaatacagcttaaataagtaaggaggtattttattttctctaccttttagggtcacaggaagctcagttctacactctgcggacggccaaagctctggcaatgacggcactggatgttatttttaaaccagagttactggaaggaatcagagaggactttaaactgaaacttcaagaagaacagtttgtaaatgcagtagaataaaagacttaggggccacttataaatcaagaagacgtgatgatttttttcttttaatctcttttaatgaaggcatgcttgttttttaatcttaaaggagtaaaattctttttacctgataagtgaggacagggtgtggagaaaacatattaattacctcatatctaaagtgaaaatttttgcaaatccgtacttgataggattatgatattacaggagctggtatgtgatgccattctttctttttttttaccccgcaaccactcaccttcacagtagtgataccatttcttaacctggaggatacatggcatcatttttataaaatatgttagtaaacctttttgtaagccttaaatgttatgtgtatttttaaaagcttaagagatttcaaaccttatattcagaattgacacccatgagagtgttttgtggtatagggtggtaaacttgttctctaatcgtatattaattcctctaccagattgtatatttgaagccagtgtcttt

SEQ ID NO: 38816 - DNA, 1054 bp, Homo sapiens
ctaaagtgctgggattacaggcatgagccaccgcacccggcctgccagtgtctttttaatacacatgtgtgttggtatttttaaattgttacagtatctagcatattgcttactctgaatattcagtactttttgaataagcaaatattgcttccttgcttggaatcatcagagtttaaagtagcttcgtggatggaccatgatcctaagatgagttttaattttgtgtttacagtcatctcttgtacaacgtggagaagaaaagatatacttactactttgcttcaggtacacataagaaaacctcttttttaaaaaaatttttatttttttacataatagagacaggggctcgctgtagcttccaggctggcctcaaactcctgggctcaagcaatcctcctgtcttggcctcccaaagtgttgggatttcaggtatgagacaccacacctgcccatttttgtttggttttttaatgggcaggttcttgctctcccaggctggagtgcagtggtgtaatcacagctcactgcagtctcgaactcctggactcaagcagtcctcccacctcagcctcctaaagcactgggattacaggcttgaggcactgcacctggccctgaccattttttaaaaaggttaggcttagtgcaaagtttaaaattatatgattcttaaaatactgaattagtttctaaactaaactagaggtataggtggacctgcttgaggtatctttgtttttatggaacatttttattacatgcctttataatttttcattgttcacaccctgtactgaaacctttttctcaaataccaactcttggctatgttaaatttgtagactttaaaagatgttatctaaattaatggtttaaatatacaaattgaaaatattttctttttagtggcaattttaaaagcaggccttaatatgggacctgcttttaaagtaaaatatgtggtactatgaattactaaattgctatataccatgtaatagtgagtatagctaatatttagtatgccttttaaaaattttggactgct

SEQ ID NO: 38817 - DNA, 1976 bp, Homo sapiens
acccctcaggagccccatcggcgaagcctcagcaagtggcatctcccggggtccagagagtcggcgtgctgtctggtttgggtccagacatcagctcacccaagcttatcttgggcttttaagtgtgttgcttccggtagatctcggggactggaggggaagtgcagcattatttgtgacccaagagggacttgaatgtctcaaagctggtcaagaatgtttcccccgcgaggtagcatgagatgggtcacgtggtagtaaagagccacttcgggcccgtgagatggagttctgactccaccacttgttaggtgtgtgactttggaaaacccacttctttaaaccttagtttttagaactctaaactgcaggtattgtacataacctcgtagtattgtgttcatgcagtgaagtgatgggaatgaaatgcttggcattgtactcttgtgtgttagacaccttttgcgaacctgttggatgttgaattcattcatgcttaggttctgttaggccagtgtaagtggaaagaacttgggcaatgaagacaaacacacctgggtccaaggtggtcccatccatggtatactgattgggggtttctcatccccaaaacaccaatagcagccttggcggggtttttgttgttgttgttttgagacagagtttcgctctgttgcccaggctgtaagctttgacctccttagctcaaccgatcttcccacctcagcctgggaccaccacacctggctaattttgaatttttttattttactagagacagagtctcactgtgttgcctaagctggtctcgaactcctcctgtctcagcctcccaaagtgttgggattacaggtgtgagccactgtactggtctgcagccttgttcttgagtgtagtaggtgtgtctataccgatacatgttacactttgtcatctttagtatttgtttagcatatggtaacaaaaaattttttaaaaattagggatacaaattaaaattggggagtattttctgccctctaggtcatactggacatgggggaagggtagaagagggatgaagaggaattaaagagaccagaaaacaactagtcgcagtgttgggaggtataaaccaatggtaatttttaaaaatgtgaatttattaactccttgttttttcatggtggcaccaaaaattaatcttagtctcccacttaaactcatcagcctccccaaagcctttccagataagcatatgctccatgtaaaagcagactgcctgcgatccaactcagcttagagacaaggcacacttccaactcccaaggcctccttcttgtatagagatgctggtgctgccactgtgaaatacatcatacactcagacagtataaaccttagagtgcaatgtaaagaataacaatagatcacacccaagtacgagtcacccggctgaagaactagaacatcgccaggcccctggagcccctgagtacccctctccattgccttccactcacttctcgcctcccacccaaggaaccactattctggatgttgtgttaactttttcccttgcttatatgaaaaaccctgaggaaaggaagtttcccaacaagcatttccacaataacctggagcattctttatttttctttttttctcaaggagcattgttattgaacttaaaagcaggctattgagggtaagatacaaaccacaaaaaagccgaaagtctcaaagtcgggggatcttttagtctctgtcttcttccaagtttctcctgtctccctggcacggatcccgaaggtgtgttctgtctgtgtaggggagacccagtctcttccaacatagattgatggctgtgattttaaaagctttgcttgagtccctaagaagtgggaaaacagtaatttgggtgcgtgcgttttagaagtttttttaaaaatgcaaattatccagaaggcattgtgtgggatttgaaggattaagct

SEQ ID NO: 38818 - DNA, 1052 bp, Homo sapiens
acggggtttcgccatgttccctaggctggtctcgaactcctgggctcaagcaatccacctgccttggctccccagagtgctgggattacaggcctgagccactgcgcctggcccatcagcttggttttatacatttgagggaggcatagacaccaatcaggctgggtgaggtggctcacgcctatagtcccagcactttgggaggctaaggtggtcagattgcttgagcctgggagttcaagaccagcctgtgcaacatagtgaaagcccatctattaaaaaaaaaaaaaattagccaggcatggtggtgcatgtttgtagtcccagctattcaggagtctgaggtaagaggatcgcttgagcctgggaggtcgagactccagtgagccaagactggcaccactgcactccaacagagtgtcagaccctgggcaacagagcaaaaccctgtctcaaaaaaaaaaaaaaaaaaaaagacagcaatcattatctgtgaggtgtgtattggtttggttcaaagattttctcattggcaattggttgcaaaagttattatctaaagatctggaatcagtagacagaagtctctgggttacgataaggggttgtggagaccaaggttcttattatgtaggtgaagtctcataggtggccaccattagagaccacagatggcagatgttttctgtttaaacctttaaaagatgctggactctcagttgatctcattagcacatggagggactagagggggtaagatctagttatgttaatagagactctttgcagaagcaattttccccccacaaaagatggctttgtagggccatttcaaaatatggcaaagaaacatattttgggataaaatactttgattttcttctttatctgtcatgtgatactagagtcagattggaaattggtaccttattgctacaaagaatctgttttgtcagtttgaagatctctgttttaatcttactgctggtcagttgtgcctgaactccaaaagggaaggtataatgaagcacatctgcttcccccacccctgc

SEQ ID NO: 38819 - DNA, 1051 bp, Homo sapiens
aggacattttaagaattatgatacgttggccaggtgaggtggctcacacctgtaatcccagcattttaggagaccaagtcaggaagattgcttgaacccaggagtttgagaccagcctgggcaacatggtgaaaccccatctctacaaaaaataaaaaattagccaggtgttgtggcatgtgcctgtagttccagctactcaggaggctgaggtaggaagatcacctgagactggaaggttgaggctgcagtgagccatgattgtgccactgcactacagcctgggtgacagcaagaccttgtcaaaaaagaaaaaaaaaaaaagaattatactacatctactctgtctgtgccgtataaatggaacagcaaagcccagatgacagtacatctatttacaggtggtttactgaatatgttaagcccactgttaagacctactgcttagaaaacaagatttctttcaaaattactgctcattgacaatgtacctagtcacccaagagctctgatggcattgtacaaggagattaatattttcatgcctactaaacacaacatccattcttcagcccatggatcaaagagttaatttctattttcaagtcttatttaagaaatatggccgggtgcggtggctcacgcctgtaatcctagcactttgggaggccgagatgggcggatcacgaggtcaggagatcgagaccatcttggctaacacggtgaaaccccgtttctactaaaaatacaaaaaattagccgggcgtgttggcgggcgcctgtagtcccagctacttgggaggctgaggcaggagaatggcatgaacctgggaggcggagcttgcagtgagccgagatcgcgccactgcactccaacctgggagacacagcgagactccgtctcaaaaaaaaaaaaaaaaaaaaaagaaatacattttgtaaggctatagttgccaaagaaagtgattcctctgatggatctgggcaaagtaaacagaaaatcttttggaaaggattcacctttgtagatgccattaagaacattcatgat

SEQ ID NO: 38820 - DNA, 1030 bp, Homo sapiens
gtgtgactcattttattgtggtacttgctttattatgggggtctgtaaccaaaccacagtatctccaaggtatgcctctataattcaaattactaaaattcagccgggtgccatggctaacgcctgtaatcctagcactttgggaggccaaggtaggtggattgcttgagcccaggaattcaagagcaacctgggcaacatggtgaaaccccatctctacaaaaaatacaaaaagttagtagggcatggtggcgtgtgcctgtggtctcagctgctcggaaggctgaaatgggaggactgcttgagcctgggaggtggaggttgcagtgagctgagatcacgccactgcactgcagcctgggtgacagagtgagaccctatctcaaaaataaaatgaaataaaattcaaagtacatcctcttttcaggagctcatccttgtcaggaaggtagaaatacctttgtggactgcattctctaaagtttgcaaaataaacagccatcttctattattaaaatggtagctctgtatcatttctttctcccctccaaaatgtgtgacaggtctaatttctctctagataccataatttccttccattttattactaaatcctggagaaaagcccattttgaagaaaacagagcttacagctttaaaaactgattgttattttgatataccaaaacccagttttgcctttatgctcagtgcatttctgtcattgtacgtcctaaactaactaatttatattcttcccttggtacttaaagaatcaaaaaccctaacactgtacttgtaattgactggttgtgttaaaagtgaccatgtttttgtgcatctaaaaatagaacataaaatattgtatctgattttgctccaggacttctgtggtttcttattataaccccctctgctaccctttgaaattcctttaatgtcagggacatttactttaagagtaagataatacatcttaagagacttttaggctgggcatagtggctcacacctctaatcccagcacttt

SEQ ID NO: 38821 - DNA, 1053 bp, Homo sapiens
gtgtgcacatccacccacagtgaaagtgaaaccaaccatgagttgaatgaagtattatgggagtgtttgtgggaagcctgacaaacctaaagtttgcctctcattttctagtgtagtagtggattcttggtacggttataagctgttctagacagtgcgaaatctagtgttgatttcactttgatttgaaattatttgtgtttttactttggctcctttacagccagagtaaaacttaacttatattcttgtattccaagtttaacttattttccaagtttagcttaacctatattcttgacctgatcagaatttttggactttgggtcaaccataaagaggctcaatatataatgagaaatttgtctcactttaagttgtcagaaagcagcacccaaaacgctctatgtaaaacatgaatagatgcatgaaaatacaacttatttaagaaacaaacccaaggagcccaaacctaaaatctggacctttcttacttaagcaaaaatatcagagtcatgcacgtatgactcttattccatgactgtcttcaaattgactcatcacatccctgttttcaaattaaatagttgccatattctaaattctgtttatgaagttaggaggtaaacagaaaacaatctaaaacctgcttatttcaattgattctgtttgttagcatatctgtactggcatgaatatgattggaacatgcagagttgtagcacacccttatttctggttgattgccaaaaataaagacatcaaagaaaatagaaaaactgggcaacaaatcataactgcataggtttttaaatttagtagttattctagatctctctccatagcttttctgaatgaaactgtccctctcacagcccccagcctcccactgtcctagatagatgaggtgattgttctcaccacctttggatttgtacatgtgtggcattgttttcataggacagattcccagatgtggaaatgctcaaagagagtgaacatttaacaaatactgccagattgtcctccagaaaggttgtacccatgtgcaca

SEQ ID NO: 38822 - DNA, 1058 bp, Homo sapiens
ccctttacttggaggtggaattccaagcagagaagccagaggctgcctgtgctgtgatattgaagatagaaatactaccctgaagttcctggcatgaaaaatatcacagtacaggcagcctctggaaatggaatgaatataccatggttagaaaaatgcatcaggctgcaaaattttcaccaggcagtcctactattaataatgtcatatgatatattttttaataaagcaatacattaaaaaacgaatagtaactggaattgaaaaagtcctggctgtatcaccagatgtgtcttcttcagtaagccattgaatttctgagagttctcagaaatcgtgtaatgggggaagagcctaacgccctcctcccaggtccctaatctcccaggagattaaaggggctgtgggatgggaaagcactttggaaattgtaaatagctacaacaaagttaattgctattctcattagagctatgaggcttttagtggctttaggcattaataatagatgagctagcatccaggactgtgggccgtagttttaagtttctgttgattcttgttgtattttgatttattaggtccaacttaatctatttcaggccaaggcaatgggttgtgagctgagtaaataataaagataatgtgatgcacttaacacagtcagaagaggactgtccccaattagtcttttttttttttttttttttctagcacagaaaaaagcacagctcttactgtatctgaaagacactttggtaggaatgctcatcaagacggggcttgcacctgaggccatttcttaggagtagcttttgcctgcatcataatttcagaacatgtgatacttgggatgcttttcgtcattgaggtttacttgtctttatatggaacataatttgtacctgcaaaatcaagacttaacgattaattgttttcccttatggaagcctaaggcttgtttctacgtatttccagggttttgttctttaaggaacacatgcttatgaaaaaacacaaatactttcagcaaaaagtcttctgtgtctcccttcctc

SEQ ID NO: 38823 - DNA, 1022 bp, Homo sapiens
gagatgagcctgtgactggatagactgagtagagcagatggccctccccagtgtggatggggatcattcaacccctcagggccagtcctgatggaacaaaaaggcagaagaaggttgacttctccctgcctgagtccatgagctgagacatcaatcttctgcccttcaactaagacttacaaccatcagggatcctggttctcaggcttttagactgagactcaaatttacaccactggttttcctgggtttccagcttacaggggtcagattgtgtgacttagcttccaaaattgtgggagccaattccattctagattttttttaagacacagcctctgttgcccaggctggagtgcagtggtgtgatctcagctcactgcaacctccacctcctgggttcaagcgattctcctgcttcaacctcctgcaagtatctgggtttacaggcacgtgccaccactcccagctaatatttgtatttttagtagagacggggttttgccgtgttggccaggctggtctcaaactcctggcctcaagtgatcaacccatcttggcctcccaaaatgctgggattacaggtgtgagccactgtgcctggcctcattctagattttcaatatccatatctatctgtatatctcctatttgttctgtttctctggaggaccccaataacagtgagaataaatttgtttttggtttgttttttggagacagagctttactgtgttgcccagactggagtgcagtggcacaatcatagcttactgcagctttgatatccctggctcaagtgatcttccccacttagcctcctgagtagctgagactataggtgcataccaccaaaacgagatgatttttctgatttttagtatagatggggtctcactatgttgcccatgctggtctcgaattcctgggctcaagttaccctcctgccttgacctctcaaagtgcttgtgttacaggcgtaagccaccacgcctggccagattgctgttttaagccaccat

SEQ ID NO: 38824 - DNA, 1038 bp, Homo sapiens
tgtctgacagctcctatttttagggagtttggcaagagtgtggtttttcttgtagctgtaggaatttaggaattcggggctgtgcccgccaagccctgaaccctctaccctctgcccatgggtaacttttgtttccttaaccttagtgttcgtcttagtcgataaagggacatctattttagtctctcagatcacactgccatgagctgctggcttgtttgtgaggtaccaattatgtgtgtacacacactctggttgccaggggcttttaatgctccagagtggtctaatggtctaccccatccagtttccccataatctctggtgctgacatccagggagccacaaaagttgaacattcatgaaccaaagaggtggcagtttgagccttccattccctccttcagccttgctcctataccttttcatctatgaactctcaagaaagagtaacagcagctgtcagcccacagtagtcctgttggcaggctctaaaatgtgtcttctcaaattgcagccctggcctgagctggagagagtacctagtggaattctgcccatttcacagtggttcagatctgcaagaaacatatgccctgtttaccatttcctgatgggtatggggtgagggctcctaaactatggtattagtcagggttctccgagaaacagaatcaagaggacatacagacagaaatttattttaaggtagtggctcacacagttatggaaactgagaagtcccatgatctgccatctgtatgctggagacccaggaaaaccagtggtatagatctgaaggcctgaggggcagggagcctatggcgtaggctccaatccaagtctgaaggcctgaaaaccagaagagccaagggcaggagaaaattcccagctcaactgtcaggcagagacttcagccttcaagtgactctcccaccttggcctttttgttttattcaggccctcagcaggttggatgatgctcacctacattggggagggcaatctgctttattaagtccagcaattcaaatgcta

SEQ ID NO: 38825 - DNA, 1043 bp, Homo sapiens
catagttataaaatctaagtggacataaaatattgattattttttaactcatccagtgcctagcaaggtactcacatcccatctgtgccgaatgaggggaataatgttattgactgtgaatttcttacactttgatagcaattgcaaggtattaggtactcttgtaagagctctacaacaattaagtattttaaacctcaccatggctattatccccattttacagatgaggaaactgaggcaaggaatgatcaggtaacctgccctaagtttcccttagaaagtgtcaaaactgggactcaaaccctggccatgtggttcgagagtccttgctcccacaggaggcaaggaggaaagttccccttggcccttgaaggctcactgaaaaatcagctgacaaatggcagataaattgtagaagaggcataaaaatttatttaacatgtacatacaggagccttcagaatgaggacccaaaaatgcaggggaaattgtccatttttatgcttaggttcaaaagagtgtggatagccatgtagaaatatgattggacagaaagggcacgatctaatgctgattgcatgggaaacccagcaaagcctgtctgtctacattcttcttggcctttctgagctgagcatttctgccttctaggtatgaggcaggaccctctctggaatggagtgttaagacctacattcaactaggtcagataatttctttatggcttgcttttacgcagaaaggggaggaggggaaggttagagtaatatttttaagttttatggctggctttgagggtagcagattctggtttctatgacctgccttgggggaagagggattctagtttctatggttagcctctggggaggaattgaggggccagagataggagggcaggaagaggtcagagaaaaacttttgcttgtgaggccttccttttgggttgttttttgagccccaacactggtaaccatcatgtttccactatgtggtttataagtttagattgtgaactttctatgggctgctgcttgtta

SEQ ID NO: 38826 - DNA, 1016 bp, Homo sapiens
caggagccttaaaatggtccttttttggcctggcatggtggctcacacctgtaatcacagcactttgggtggctgaggtgggtggatcacctgaggtcaagggtttgagaccagcctggccaacatggtgaaaccccatctctaataaaaatacaaaaattatccgggaatggtggctcatgcctgtagtcccagctacttgggaggctgaggcaggagaatcgcttgaacctaggaagcagaggttacagtgagccaagattgcaccactgcactccagcctgggcacagagtgagagactgtcgtgggggcaggtgggggcgggggtgggccttttttggccaggtgcagtggcttatgcctgtaatcccaaacttttaggaggctgaggcaggcggatcacttgagaccaggcattcaagaccagcctggccaacatggtgaaaccctgtttctactaaaaatacaaaaaattagctggatgtggtggtgcatgccgtcatcccagctactcggaaggctgagacacaagaatcgcttgaacctggtaggcggaagttgcagtgagcttagttcgtgccactgtactccagcttgggtgacagagtgagacccggtctcaaaaaaaaaaaaaaggtcctttttacttggtacctacctttcttggactctatcctaaaaaggtaataaaacctgctattgaaatgaaatatggaaaagaaaaaaataagcaataaaaccagtaaaattttaccgacaaagatgttcatgacagcagtagttatatttttttaactgtggggagggagacttagaattatggttcattcatacagtggaatataattaatattaaaatcgtagttttgaaaataatgctttccactgttaaagaacatcacaaagagatataagatcatatatagtacatgtcccagtgcttaatataaatttgtgtatttaaaaatttaagcacagaagaatatcatcagaatattaacagtggttatctctg

SEQ ID NO: 38827 - DNA, 1079 bp, Homo sapiens
catgtttcctatgcccaggaagttatgaagacttcaacaattaaactgaaaccaggggaagcttgcttagttttgggtttcattataaactcttagcctcagtccaggttaatctgaagtttgaaagctcagattaagcaagccatgccaagaaactggacgatgtgtaagcctagactctaaaattcaagatgtgtgaaataatataagtcaaaagcaagaaaaacgtaatcccgtctgaactcaagtagtcattcatataaatttgaacacacctgctgtgcctagacaagtgtctttctgtaagagctgtaactctgagatgtgctaaataaaccctctttctcaaattcgtaattctccaactgttgacattttaatcacatgaaaagttatcagatttttgaggagaaatattttcatgatgtcacaagatccaatatatcttatgataaaatttattgaaaagtcagtttatttaaataatgaataattggctaacagctctggaaacaatgagatcaaatgagaaagattcaaattgtttgttattttctgtattttcagtcaaaaaatcagttatatagtgattttaaagcagattaatggaaaaaaattcatgtaacaattacctgaaaatttataacctattcctaatcaaacccaattatatcagaatacctttctgaatttgagatttttgctctacattttataatgaataaggctattttttgaaagtatttcattttgaattctgtcattaacctcaaaagctttctactgctttgcggtgaaggcaaaatattcgataactcaacttaggccccactgttccccaacttcatggaggccagaagactttactttgttccataatgaaatataaacacagaacaaagttgtaaaagtagcatggatatgttgaaactttggacaagcttcttgtcctttggaatatgggatttatattcatctcctcaatatcccatgtatgcacagaaacttcagttctatttctatagacacaggaacctagtgactattgaacgtaattgtaataaaatgctgctcattga

SEQ ID NO: 38828 - DNA, 1099 bp, Homo sapiens
cactattttgcaactcccagttaatccattaatcttggcattaagtatcaatggctgctaacatagcaaaaggggcaaaaaaaaccagactttagatagctcttgctgaaagaacataatgctacctatagtcttaccaaaaggatcaaacctctgatccagctgtcaatttttttttttggggggggtgatggagccttgctctgtcacctagcctggaagtacagtggcgcaatctcagctcactgtgacctccaactcctgggttcaagcgattctcctgcttcggcctcccaagtagctgggattacaggcttctaccaccacacctggctaatttttgtatttttagtagagacagggttccaccatgttggaccaggctggtctcaaactccttgcctcaagtgatccgccagcctcagcctcccaaagtgctgggattacaggtgtgagccactgtgcctggccccagctgtcgattttttaaaatgaagatgatagaatatgttaagctgcaccatgaatttataatcagaaaaactcagactgtgaaagattctacagatcaaaaactcaggtttttcaagacataaatttaagaaaaaagtatgggaggggaaactgtgaattataagaaatggcaaaatgatttaaatgtttgtgaacctccaaaattcgtatgttgaagtcttaataccccagtgtgatggtatttggaagtgagaccttttggaggtaattagatttagatgaggttttgaggatagagtcctcataataggattattgcccttataatgggagggaaagactagagtcccttctctctctgccaagggaggatacactaagaaggtggccatctacaagccaggaagggagccctcaccagacaataaatctgctggctccttgatcttggatctcccagcctctagaactgtaagaaatttttgcttgttgattaagttaaagaggttcagaacgtgcaaccccgaaacagaccattttgacatactgattattttgaagtaaagaaaaatcagaaccagccaactcagtgaaacgtctttacctccccaattgcctaaaataa

SEQ ID NO: 38829 - DNA, 1378 bp, Homo sapiens
ccgagtggaggtcggctgcccctgggaaaccagagagtcggagggagtccatctggagcggccaagtaggtcggggaagggccgcgcctgacgtctggccgcaggtagccacgttccctccgcccccggtgcagcttcagggcttgcaccctgcgtccctctgtggtccttcgagagggtctgggcggggactatgggtgggcgcgcccaggaattgtcccttcggcctctcgtcctgcccctcccccccaccatccagtctctccttggaatatactcttaaaatctttcggatggagttctttggagaaatgggtttcctggagtgtcaggtgatcattgatgttgattgtttctgaaatgtttatttaggcatcaaaccaacatgcctaaataagtttttcatttctacagcgcctagattcattcctagcacatagtaggccctaactcagatgtgaatgtaggattcgtaggagctgagcatttgtgcttcaggcatcaagttgtctttgactcttcgactcttccttggtctttttccattctccacacctccagcagcaaacctttcgcctctcctcaaggcctttcccccccatctccctcagcgcctctttgactggagggggacagaggctttcatggcagggattctcccatctcccttcctatccccgctatgccctccaattatcttttcctggcgttccgttttacaagagatggccttctttccaaaaacatttatattgtattgaatattcttgattttggccatcttgctttacagacagacctggggtctaatttcagctctgccacttaccaggtggttgccttgtgcaaatttcttgatcgtctgtgttttcctcatctgtaaaatggggaaaagaataatatggacctcatagaactctggggaggatttaaactaagtgaataatgtatttagatcatttaggttagtgcctggaacatagtaaatgtgccgtatatgatagcttttgttagtatttgccccttacctcttcttctggggtcttgctgtattagcctttcccatgagtgtaaaaatacactgtcttctctggctttttcctgtttttctctacaaatgcttgtgtttttctctaaattttattttttgtcttttagcgtctacattaaggacacattctcagtttcgtaatgatttttctttttcttttttcctttttttttgagactatagcccaggctggagtgcaatggcaagatctcggcttactacaggtttgacctcctgtgctcaagcaatcctcccacctcagccttccaagtagctggaactacaggtgtgcaccagcatgcctggctaatttttgtattttgtaga

SEQ ID NO: 38830 - DNA, 1079 bp, Homo sapiens
cctgaggatgggagttcgagaccagcctgaccaacatggagaaaccccatctctactaaaaatacaaaattagttgggcgttgtggtgcgcgcctgttatcccagctacttgggaggctgaggcaggataatcgcttgaacccaggaggtggaggttgtggtgagccgaggttgcaccattgcactctagcctgggcatcaagagcgaaactccatctaaaaaaaaaaagttaatttgtattttggtctgttttataaaattatcatttactctgtacatagcttaatgacaattttttgtttatttgttttgtttttgagacagggtctcactctgtcacccaggctgcagtgcagtggcactatcgtggcttactgcaacctctccctgccaggctcaagcgatcctcctgcttcagccaccaagtagctgggactacaggcacaggctactacagtcggctaatttttgtattttttgtagagatggggtttcaccatgttgcccaggctggtctcaaattcctgggctcaagcgatccacctgacttgacctcccaaagtgctgagattgtaggcatgagccaccatgcgtggccatattaacaagtttaaaatttttgttttatagttttgactttttcctggaaaatattaggcactttttttgataacacaaatctgcttttaataatgttagagagaaaggccaggcatgggggcttacacctgtaattccagcactttgagaggctgaggtgggtggattgcttaaggccaggagttcaagaccagcctggccaacgtggcagacaggcaaaacccggtttccactaaaattacaaaaattagccaggcatggtagtgcactcctgtaatcgcagctatggtacactcctgtaatcccagctactcgggaggctgaggcacaagaatcacttgaacccaggaggcagaggttgcagtgagcagagatcaagccactgcactccagcctgggcgacagagtgagactttgtctccaaaaacaaagaatgatagagtgaactttttcaatgtgtccaaattcgaaaattgct

SEQ ID NO: 38831 - DNA, 1074 bp, Homo sapiens
gatgatggtatatatgtcatgggttcttctaggtccccactaaattactaaaatatcaagagggcatctgtgctcatataccctattaataaacagcccttatactatctctcaattgtatattcttttctttctcaaggggattttctccattaatttctctcttttattggttggaggcaatattttgctccagagaggttcatattttcatagcctaacctctgaaaaagttgtctaaacttgtaaacttgttttcattttctttctttctgctaactcactttttattttttttaagatggagtctcactctgtcgccaggctggagtgcagtggcgcgatcttggctcactgcaacctccccctcctgggtttaagcaattctcctgcctcagcctcctgagtagctgggactacaggcacgcgccaccatgcctggctaatttttgtatttttagtagagatggggtttcaccatgttggccagggtggtcttgatctcttgacctcatgatccgcctgcctcaagcctcccaaagtgctgggattacaggcgtgagccactgtgcccggccatttttttttttttttttttttttgacagagcctcactctgtcgcccaggctggagtgcaatggtgcaatctcacctcaccgcaaccttcgcctcccaggttcaagcgattctgcctcctgagtagctgggattacaggcgctcgccaccacacccggctagttaaaaaaaaatttttttattttttgagatggagtctcgctctgttgcccaggctggagtgcagtggcgtgatcttggctcactccaacctccgcctcctaggttcaagcgttctcctgcctcagcctcccgagtagctgggattacaggcacccgccaccacgctggctaatttttgtatttttagtagagacggggtttcaccatgttggtcaggctggtctcgaactgctgacctcaggtgacccacctacctcggcctcccaatgtgctgggatcacaggcatgagccaccgcactcagcctacacccagctaatatttttgtattttta

SEQ ID NO: 38832 - DNA, 1025 bp, Homo sapiens
ctaggcttagtgtaacaaaactaccagaaatgggtggcctaaacaaccaaaatttgtctcacagtcctggaggctagaagtccaaaatgaaagtgtcagcaaagttagtttcttttgagagctctgaaggaaggatctgattcaggcctctgtactcttagatggttgtctacttcctatgtctctttatatcctctttctaaatgtatctctgtgtccaaatttccccctttttataagaacaccagtaatattgcatgcccaccttgaggacatcactttaacttgattatttctgtaaagaccctttaaataaggtcatattctgaagaacaatgggttagaacttcaaattatgaatttggtcaggagaggggacacaatccataacagggttcatatgaggcttacatattgttttaggttgtgtgtttttctaatcctctcttataacaatctgcctatatttctgagttttttaagttttgggtttttctacacatttgctactgattagaaaaagatatatgaaatttcagagaaattatggaatttctggaagatgaagttattaccagaagccaatataggccaggcacagtggctcacgcctgtaaccccagtactttgggaggcgaaggcaggagaattgcttgagtccaggagtttgagaccagcctgcgcagcatagtgagatcccatctctacgaaaaattaaaaattagctgggcatggtggcttgtacctgtagtcccagctacttggaaggttgaagtgagaggattgcttgagcctaggacatcaaggctgcagtgagccatgatcattccgctgtactcagcctgggtgaaagagggagaccctgtctcaaaaaaaaaaaaaaaaaaaaaaaaagctaaattgagctatctacattttattgctaggaaacctaccagtttttttaaacactaatataaaaccttaagacttagatttttgtttgttttaaacagtaaatatataccattctcctaggaaagaat

SEQ ID NO: 38833 - DNA, 1026 bp, Homo sapiens
tcgcgaggctgagacaggagaatggcatgaacccacgaggcggagcttgcagtgagccaaggttgcaccactgcactccagcctgggcgacagagcgagactccatctcaaaaaacaaaaaaaacaaacagtgaattgcctcagtatttaattttttgttatatgtaatatttaatatggacatgtcaaataactaaactttaatatacttttatcttctataaatgtgtttaatatatttttctcttctacagatgtgtttttaccaaattcagctcattctacctctaagagtcagtctgatctcaataaggaaaatcaaaagccaatttacaaatctgacaaatgtacagaagcagacacatgtaagaattcaccattagatgaattagaagaaggagaaattagaagtgatagtgaaacatctaaaccacaagaaagttttgaaaaaaattccaaacgtagagtgtcagctgatgtgcggaagtcaaagactatcccacgacgtgggaaaagtactgtgtgtttagataaagacagtaggaaaacacatgtaagaatccatcagaccaataacaaatggaataaaagacctgataaatctagcagatcttcaaaaacagagaagaaagataaagtgatgagcacttccagcttggaaaaaatagttccaattattgctgtaccctcttctgaacaagagatcatgcacatgttacgaatgataagaaaacatgtaagaaaaaattatatgaaattcaaggcaaaattttcattaatacaatttcacagaattattgagtcagcaattttgagttttacatctttaattaaacatctcaacttacacaaaatctctaagtcagtgactaccttacagaagaatctctgtgatattatagagtctaaacttaagcaagttaaaaagaatggcatagttgatcgtttatttgaacagcaactaccagatatgaaaaaaaaattgtggaagtttgtagatgaccaacttgattatttgtttgcaaa

SEQ ID NO: 38834 - DNA, 1048 bp, Homo sapiens
gaggatgcacagacatcccagcatgcaactttgaagccagaacgaagtttcgagattcttaccgaacagcaagcatcgagccttacttttaatttagtgagtgatgcacaaatgggtgaaatatttaaaagtttgttgcaaggttctgatcttttagacagcagtgttaactgtactgaaaaaagtgagtgggagttaaagactccagagaagcagctgctagagactcttaagtgcgagtctataccagcttgtacaacagaagagctagtttcaggggtggcttctccatgtcctaaaatgattagtgatgataattggtcattattatcatctgaaaaaggtccatctctgtcttcagggctttcattgccggttcatcctgatgtgttggatgaaagttgtatgtttgaagtgtctactaacctacctttaagtaaagataatgtgtgtagtgtagaaaagagcaagccctgcgtttcttccatacttcttgaagatctagcagtctctttaacagtaccatcgcctctgaagtcagatggtcatctcagttttttaaagcctgatatgtcgtccagttcaactcctgaagaagtcattagtgctcattttagtgaagatgccttacttgaggaagaggatgcatctgagcaagatattcatttagctctggagtctgataattcaagcagtaaatcaagttgttcttcttcctggacaagccgatctgttgctccaggctttcagtaccaccctaatctacctatgcatgccgtcataatggaaaagtccaatgatcatttcattgtgaaaatacgacgtgcaacaccatctacctcttctggccttaaacagagtatgatgcctgatgaattattgacatctttgcccagacatggaaaggaagctgatgaaggaccagagaaagaatatatttcatgtcagaacacagtttttaaatctgtggaggaattggaaaactccaacaaaaatgttgatggcagcaagtcaactcatgaagaacagagctctatgatacaaacac

SEQ ID NO: 38835 - DNA, 1051 bp, Homo sapiens
cagcttgagcaacatggcgaaattctgtctctacaaaaaaatacaaaaattagggccgggcgcagtggctcacgcctgtaatcccagcactttgggaggctgaagcgggcggatcatgaggtcaggagattgagaccatcctggctaacatggtgaaacccaatctctaccaaaaatacaaaacttagccagacgtggtggcatgcacctgcagttccagctagttgggaggctgaggcaggagaatggcatgaacccggggggcagagcttgcagtgagccgagatggcgccactgcattctagcctgggcaacagagcgagactgtcttaaaaaaaaaaaagaaaaaaaatacaaaaattagccaggcgtggtggtgcaggcctgtggtcccagctacttgggaggctgaggcaggaggatcacttgagcctgggaggcgaaggttgtactccagcctgggtgacagagcaaaactctgtctcaaaaaaaaaaaaaaaaacctaaagttacctagccaggcatggtggcaggcacctgtagtcccagctactcagaaggctgaggcaggagaatggccgtgaacctgggaggcggagcttgcagtgagctgagatcacgccactgccctccagcctgggtgacagtgcgagactccctctggaaaaaaagaaaagaaaacctaaagatatctaatctgtcatgtcttcatagctttatcatcctaaaataaggaaaatgaggacttcaaaagtggccaaaggtagttgaagatacattctagagtacagacctgctgtactgttgtacaatctagaacagtggctcttaaccagaggtgtgcagtaataccatggatatagcttttcacttcgaaaagctctattgtgaagttaaaaaaagaaaagtgaagtgaaaaaaagttaaaaagtgaagggaaaaagtgtgttttaacttcactgtttaaattaaaaacttacttcatttggaaggaactgctgtaagcacatcttagaaggaatgacaagtgatgaaacacagcaaaaaatcg

SEQ ID NO: 38836 - DNA, 1023 bp, Homo sapiens
aagcagagagacagaggcatttctctgggacactggagaggatataaccattaaagttaacagtgaatgaactcattccattacttttaataacattatatctgtgtttgtgtgctcaatgtaatgataacttagcgaaggagaattaattccacatattatctacataaaggataatgagggaaatcagtttcctctaaggaagtttcattaaatttgggtataagccaatctactttagattggtccctggctcttggatgactttcaagccttgaggctcctagagaacgaacaaggccatgtttgaatgtcagggaaacagacgcagaaggtttcagaggacctttgtcactgaaattccctttccttctggaaaagcaaactgctagtttgttgaccatcaggtacaaaatatattttttttctataaaccaacattgtatctgctgagatagttttaattcatgtgatttgtgactaaactatttgatttgtgggtctgatggctccttgaggtatttcaagtaataaaaacaacaaacaagctaatagtgaattagtaaatattcagtatcattttgtatttttatgttgtttttttttaacacaggaaatattttcttttttttaacacaggaaggttaaagcaatgtcttccaagttaaatgcctgttttgaaaatcagtccttgttaaattagtgttactaagtattgacatatataatgctagtgatccttgcagtgaaatttagaacatacaattttcttgtgggtttagaatgtaattaattttgcaagtttttaactgagcaaacagtttgatgtctcaaagacaacaaggcaaattcactaaaatatgcttattttaaattgaaaacaaaattttatcagaggtaaactgcacttaaattgctttatccgaaaaatgttagtgatccttaaaatatttctatgtacatgtagcagtcttatgtactaatacattagcgactcaaactagatggggaagagcaattcta

SEQ ID NO: 38837 - DNA, 1059 bp, Homo sapiens
ataggatgtaacattagagaggcaatagccaatttctcatttatgtcacagatctaaccatcgtgattcctctgatcccaggctttgccttcctccctgctaccgcacatggatttgtacaaactcgctttactgaatccgttttctctctcctggaatattgcttttgtgaaaacaatgtcagtcttgccattcagtccgttgataatttgtcatcgcttggccagatcttgtggggattcatgatttgtcaaacaaatgtagttattcagaaaacatgtttgctttcatggtgttttatttgctgtatgttttctgttaagtatatttcaaataattgataacatgtttgggaaatgatacataacattgtataaacatctgtgtcttagttgtgaatgtccagatatttgttctacaggagtaacttttactgataacttaacatcatatgctttgaaattgttaagtgcatagatatacagaaaaatgcaaataatgttaacaccttaatgttaaaatatatcatttttgtaggatatactggcttctgaagctcatgtctctcactgtttcttttattctgctgtagaaatttagcactacttgtatgattaagtgttgtgatgatgaaagctaataaagggcattttgtttgattcttactggcagattcccctgcacattggcggagaggatgaggcatctttaggcagcacgtgctctggtcttaacgtgtttgagttagtagtatttctttaattgtccaatttgttttatgttaccaggtggttttgattaatgatccaaaagaggtgaatttgtgtacagaagagagaaagaattataactgagatggttgcatttaggtcagtagaaatacataatcttgttactgatgcaacatttattctttccatattgagggggatgaagtagctaattaaaattccaacacttcctttctccttttcgatctttctaaatacttgtaaaagtctacagaaccatgaaggaaatgattttatttccagacactatggagattcatcaaaaaca

SEQ ID NO: 38838 - DNA, 1049 bp, Homo sapiens
cacgtttaagatttgttgttaaatggacatgtatgtgcagataaggaatgaaacatggagctgtacaaaccaagatctgtctttcacatgtcaacacaaatcatgcttatatcaccttctgtttgaggctttatgactttcaatatttacttttgttcgtgctattatgaagaaatgtttatctctttctatgttttccattttgtccactgccctttcatgtgatatcactgataggcatggccggtttcactctactggaacaagcagattggagagagcctggggcaggagcctgtgctgagtcagagacaggcatggagaggatgtgggtacaagtgggaggtgggaacaagccaattcctggcaagcagagcaaagtctttgttggtactgcaatagaaagaagtcagttatccaatatctaaatagggctgcatctctcattggctgtgtaaccttgggcagtgtacctaaccacatcaagttagggtaagtagtttggattgtatgcgaagcatattgaaaagtcaagggaggttttaaacagaagggtaacatgacctggattatgatcagaaagttcactcaggcttccagatggggagcagattgaaggaagagaagggcaaaggcagggagaacaattagaaggctagtgcagtggtccagtagagagatcatgtggctggggcctccgtgggtggatgggtgtcggtgttgaaatcatttagagggtgacaagagtacagattcaggattttcttttggaggtggagacaaagagactttctcattgattagagcaagaacagacacaaaaaattaacaacaaactaacaacttcttaaaatcacaggatgagcttaggtaatccatgctgttggagaactgtctttccattcactttctctttctctacctccttttccatcagtgtccccatgcagttcttagtggctgaggagctctccaggaggacattgtgatcagtttatttcttaagtcacttcctataatcacttcttatatcttacagtctccttggg

SEQ ID NO: 38839 - DNA, 1079 bp, Homo sapiens
tgagcatgtatccttttaatcttttcattgaacatgcaagaagcatatttagagcactttaatcttatttgaattaattgttgtgttggttcaattaatatgtttgaatttccttattcaggggcaaaattgtgataaagtatttaaatttctatttgcagcccttactgtgtggcatgcaaaaagcagcttatcttgtttcaatttgcaggccacagaatctattttccttttaatataggtacaagaaagactaagtaccttgccttactgctataagagagaacattctgggaccacaaacacattgaaagaagatgttgaattaactggggatgttctgctttattttaaatatttttactgcttggtaagatagtaagatatatcatattactctttgaattatttgctattgtgaagattcggcaagtcaatgaagaaatgccttttgaatttttttctttattattataaagtacctgctggaaggctcagggatatctaggttaatgtgtttctatttcagtaccgaaaaaacaaacgtgagctcttggaagggtcgtgttcacatcccggttgacaataatttcataggagcgagcacctgctgaaaagctgtgggttctgtggtagagcaaggggagtggggggagagaggctttaaacaaaaactttaactgtaaaagaaacaagtttttcctctgggaaattactcagagtgcaatacaagcatatttttctaattaaatagattagtttatgcctttggcacttaaaagaaagtccttagatccacagcctcctgagttacaagtatttcccgggttaattctctcgaaattaaatctggccctgcttcttgccattctgttacattttttttttctattcctttttctcttttcacctatggttcatttccttctttctctctatgatctgtccacctttctctttcctatcctcaactcttctgtctgttgaaatgagaccagctccaacattgaaatgagaccagctccaacattcctctccatcttcgtaccttgagtcagaatgaatcactgcatagcccg

SEQ ID NO: 38840 - DNA, 1018 bp, Homo sapiens
tggcttgggcctcttccaagttgttctttccttttcttttcttttcttttcttttcttttcttttcttttcttttcttttcttttctcttttcttttctcttttcttttcttttccttttcttttcttttcttttcttttttcttttctttcctttcctttccttccctttccttcccttctttactgttctaaagctttttaataaactttcatacctgatctgaaacttccctcggcctctttttctgctttatgaccctcagtcgaattctctcttcagaggaggtgaagagctgaagttgtgtggacctgtacagatacagtgctcgcaactcgagggaacttggatctctgccaccctaacaatgataggtaggtgtccagtttcattttctgcatatgattagccagctatcccagcagcatttattgaataggaagtactttcttattgctcatttttgtcacccttgatgaagattggttggttgtaggtgtgcggctttatgtctggcttctctattctgttatcttgatctatgtgtctgtttttgaaccagtaccatgctgttttggttactgtcatgctccattcttcagtgccattgaataattatgcagagtgttccttttcaagaaatattctatctcattgctacctgtcaaaatcctacctcattcttccaagcacatcccaaatttggatattggcttttctgtttttctctctcctccaaaaactcattgcattttgactttattaaagagcttttagatcacacagacctatactggaccttagagataactattatacaactatcatagtcgaattaacatacagaaaacaacattctattttgccactcatctgaccaattatggataattctatcagaatgagatttttgcaaggctgtacctgaatcctttttcacctcttgaagactggataagtgcatctgcagaaacctctgtcgtaatactcatcagatgacattgaacctccttgctgg

SEQ ID NO: 38841 - DNA, 1049 bp, Homo sapiens
tcacccacctcccaccctttctcctgagtccccaaagtccgttgtatcattcttatgcctttgcatcctcataacttagctcccacttatgagtgagaacatagaatatttggttttccattcctgagttactttactaagaataatagtctccagtcccatccaggttgctgcaaatggcattaatttgttccttttcatggctgagtagtattctatcatatatatgtatgaaatgtatatcatatatattcatatatctcatttattccatcatatatctgtatggatatatatataagtttctttatccactcattgattgatgggcatttgggctggttccatatttttgcaattgcaaattctgcttttataaacatgcatgtgcaaaaatcttctttgtataatggcttgttatcctctgggtagatacccattagtgggactgctgaatcaaatgttagttctacttttagttctttaaggaatctccacactgttttccatagtggttgtactagtttacatttccaccagccgtgtagaagtgtttgcttttcaccgtatccacaccaacatctactttttaaaattttttgattatggccattcttgcaggagtgaggtggtatccattgtggttttgattcgtatttccctgataattagtttgttggccatttgtatatcttcttttgagaattatctattcatgtccttagcctagtttttgatgggattatttgtatttttcttgctaagttttatgtgttccttgtagattctagatatgttagtcctttatcggatgtatagattgtgaagattttctcccactctgtgggttgtctgtttactctgtcgtctgtttcttttgctgtgcagaagctcttttgtttaattaaatcctatctatttatctttgtttttgttgcatttgcttttgggtacttggtcatgaagtctttgcctaagccaatatccagaagggtttttctgatgttatcttgtagaatttttatgttttcaggtcctagatgtaagtc

SEQ ID NO: 38842 - DNA, 1034 bp, Homo sapiens
atcattcagttcaaagaatttttttaaatttccatcttgatttcattgttgacccaatgatcattcaggagcaggttatataatttccatgtatttgcatggttttgaaggttctttttggagttgatttccaatttcgcttcactgtggtctgagagagtacttgatataatttccattttcttaaatgtattgagacttgttttgtggcctatcatatgttctatcttttagagagttcaatgcactgatgaatagaatgtgtattctgcagttgctgggtagagtgttccgacaacatctgttaagtcaatttgttctagggtgtagtttaaatccattgtttctttgttgactttctgtcttgatgacctgtctagtgctgtcagtggagtattgaagtccctcactattattgtattgctgtctaactcatttcttaggtctagtagtaattgttttataaatttgggagctccagtgttaggtccatatatatttcgaattctgatattttcctgttagacaaggccttttatcattatataatatccctctttgtcttttttaactgctgttgctttttttttttattatactttaagttttagggtacatgtgcacattgtgcaggttagttacatatgtatacatgtgccatgctggtgtgctgcacccactaactcatcatctagcattaggtatatctcccaatgctatccctcccccctcccccaaccccacaacagtccccagagtgtgatattccccttcctgtgtccatgtgatctcattgttcaattcccacctataagtgagaatatgcggtgtttggttttttgttcttgcgatagtttactgagaatgatgatttccagtttcatccatgtccctacaaaggacgtgaactcatcattttttatggctgcatagtattccgtggtgtatatgtgccacgttttcttaatccaatctatcattgttggacatttgggttggttccaagtctttgctattgtgaataatgccacaat

SEQ ID NO: 38843 - DNA, 1048 bp, Homo sapiens
gagtttctaggaacaaagagatggggttatggatgaccgctgttgacactggattatgaacgtacatcttgcaggctgctccctataaaataaaggatgaaggggcctctctgagctgtgcaaatagttgggtggaggggacaaacctgtcaaccagaaggtgcagatcaaagagaactgattactggggatggaccaccaagagaccaaggtgggagtaggggacatgagagttttaaaaggtgtgaaatgaaaatgggcaagacagtctggggatcttggggaatttcattaatttgtgatcagtgctcagtgtttgtgcaagtgatgcaacgggataatggagactaatacataaatgcactttcttaaggaaaaacataaggtggattgagacggaaagcacagactcttagaacctatgctctgaattgggggctcaggggtgtgaaataatatgtctagaaattaggacagttactgcaagatggacccttggatcttcagaacttgagagaacagctctctcttcttatatgaaaggagagaaacagaagatgaaatgatatgtaagaagtatttgaggctggatgtgaagcgttgacattctttcatccaatacatatttattgagctcctactttaagtgcaaattgctgttccagtgcttgagatatatcagtgaataaaaagacaaagaatcctgcccatctcaacttgtattcagcatgggtagcctaaagaatagttaaattacttagtatgtagaaggtgatgaacagtgttgaaagcaggcaagtggggcagggtgagggaatggcagtgccaggtgggtggttgggtcactgtattaaatggagtggtgagtaggcttcatggacaaagcatggtctgagcaaggacttgcaagaggtgagggaggttaggatccattccaggctgaaggaacagccatgctaaggctttaaaggcaagagtctcttcacagaactgcagctttaagtgtggctgttctcaaataagctaaaggaagaaaagtaggagacaa

SEQ ID NO: 38844 - DNA, 1051 bp, Homo sapiens
gtgctgggctccacggctactatgctctgcactggagcaggcatggggagaggagagaggccagggagcaggagcaggcatttctgagcctatggggacagggggcttcccaggcccctgaaagtgtagggatgcccagatctggagccgaggctgggtggctgaacctgcgcctgggagcctggggttcctgccctgccaacttggtaggaggcaaggctcccacctgttcctggcccccaccagcactggggtgcacacagccctggccacgcctctcccgctgcagctggcatccccgcagtggctgctccagactggccgctgccaccatcaatatcaatactacaaactgagtaaaatggaaatttaagtaaaaatagaaagacatcatattaaatagaagacaacaacaaaggtaaagatttgtcctgatgggtagacattattttgaaagattctaaagcgggaataggaagggtgcataccagacagaaagtatagtttaaacaatgaacaagttgggtggataagtgaatagatgatagttagctaaataaagagttaaagatactctgattaatgtaaataattttataattttaataatcaccaggtcattcataaaaagatttataagatattcttacgcagctagctcagagtcatagagttacaatttaaaactatttctgaaagacaaatgactattttaaaattttggatttcaatttttctttaacacttttttttgtatcaagtattattctcctaaataaaaaatatggaaataaaatataattcaatgttattctctctttgacgtctttttaaatgacagtattttccctttcttccttcctccctccctccctccttccctctttcccttccttccttcttttcttaccttttattaagcacctaataggtttcaggaactacataaatgtaggagaagaagcaaaggaaacttgcaatgatctttggctttttccaagcttagtagagaaaataaaagccacaaaaaacccaatagtttcctttatca

SEQ ID NO: 38845 - DNA, 1031 bp, Homo sapiens
tgcatcctaactgctgaattgttcaatgggcttttgcaaagttaagtaccattctgaaagataggatctgtacagttttcttaaactgccatgagtgagctatgagcctaaggtatagtcctcatcccatggaagaggtgaacaagggcctcatttttagtagcataaattccaagaatctgccaaggccgtaggaaacagttaaaagagaaagacaggaagtggcaaggaaattgatactaatcagaaatttccgaggcctctcatatggaatacgctgaccctcaaagtttctttttggcaagaagagaccatagagtttctatacctgaatacttaacctaagtatgggtgggttgaagtagagttgaagagatgtggactctttgtgagacctgtagccaaatacagttttcaaacttgatttgtcagtggcaggtgtggccacacaaataaaatctgcttttaagtttaattatatcagtacaatctcaagtaccatgtttacatattcaagactgatagttgatggatttttcctatattaaccatttaagtaagataattatttgccattctgtgacatttaattacaatgctatgactaatttatatagttggaagaaaaaattgctttatatgtcatttaagatttgtatgaacacatttaaactgcagaaaagattgcttagaaaaatgcagagctggctcccaagagctcttgattaccttctgtatcaagaccatttttttaaaattggctgtactatcacagcataatttcaaggtgaccacctgtcaaagagcttctgcgggaaaaaggcaaaatgtctccctgtcttatttgtacatttatttttataaacatttctaattttccagagggtattataggctaaaatttaatgggatggtaatagttagcaatgagtaaataacatgaattctcagttgatgtaaatttcatgccaggtttgaatgatgaaggtaaaagctagcatggagactagaaacacatttaatagcagatg

SEQ ID NO: 38846 - DNA, 1047 bp, Homo sapiens
tctctttgaagtatctaatgtcaacatccttttacctatccttttcctacttttcttactcaaattcttgttagtacattgtgactattagtatgtcttttaaaatatgagatttaaaatgagttagcactttctctctcttttttattcctaaattatactttccccaaatcagccagtgtcagtttcctatccacagctcgaacttcactcttgtatttaaatacatgttctcctgttcaggtccacgaataattgctgattgtctatgttattgtcagcttgtttctctttctcatcctccttttcttcttaagtccaaattttatcctcttcatttccacagaatagctcaggctttatgatcattccttcctataatatcacaattgtccctaaatggtctccacatcagctgctcctcttacttccatcactttattgctctgcaccctgcccaccatcattactcaaatgatgaattcatatgcttgtgcactgcagtcaaacccaaaacagggcccttgtctacgtaaagactctcaaggcgtgagctgtattttaaagttccaattgtaattatctgattatgattaaagtgaggaaagataagcaggctttggtctgtttttaagtcaacttattttgcgtgtgatattcctcttcctcctcttccttttcttcctcttcctcctctttccctcctcctcctcttttcctccttccatggctcctcatccttcctcttcctatttatttctcttcttccttcaaaaagagattcactaatgatttcatgttgatggtgctggaggaaaggtaaatgaggaagtatgaagagacttagccccagtcacgggattgggctatcatatgctcataataacaaagtaaccaaatagccatgggtaccagcagcaatctgcccagaatccaggaggagtctttagcaccatatctattaaaagctttctagacccatgaatgctatacttatatcctggtaattttctactttggaattaagtttgggatcaggagttgggt

SEQ ID NO: 38847 - DNA, 1047 bp, Homo sapiens
acaattttaatttccttgagcattttaaatagagaacatatttatatgttatcattttccaaatacaaatagatagtttatattttgttttcaaccttttatttgggagatgtctctttttgctgtttgttgctcttcctgattcactatgttgactcgttttattgtatagtttacaactttggtatgtactttctgtggcaacactgaaagccttgagatgaaagtatattcagagagaatacatatttgcttttggctggtgtctatggtaaacagtccaggccaactctaataaaatgtgttgacctcgagtttctttgatattatctatggtttatagttaaacccgaaaccacaggttggtaaaatggtgattacgaagaattctttatcccaacccacactctgacccccaacacgggtaaattttcttaattccctgggcttgtaattagactatttttcaagactcactctttcacgcatagcataggcttttgaaagtcttagtttcatatgaagtgtttctcaattccaactcccaactttcttcttggcctcatgactccatcaatcctaaacatcaacataatgctgctactttggttccatctttcttcatttttggattctagggatttttcttattgtgtttaatctcagatatatacctacaagaattatgagttttttggtctcctttattttaaagtgtttttttttttttatataggagattttctaagacatctaatccaccacattggtagaaacaaaaaaaggatatatatttttaaatctactaaatatttcacagtctcccatttacattttcagttttgccttaatgacatatgactctacataatcattaaaaaaatcccaactgacctcatggtttgaattgttgtgttttgcatgtgataacttttatgtctcaaattagaaacctgattctttctgcctgcatttttttaggttggtatctatagggcagtttctcaaaggtagtgtcatgactcttaaaaattcactttgattaaa

SEQ ID NO: 38848 - DNA, 1010 bp, Homo sapiens
tgcacctccccctattcttgccagtccctccctgtctggttgaactgatttctaggagatttaaaaggctaacatattttttttctcctttatttttctctttttcctttttcaacagctagacactgaatattaggaaaatcaaaggtgacggcatatacagggagattagaaaactactgcacatgcctggggagggggcaggctcacaaaagacttgagaagacctgtttacatctcgagctagtgcttggcacagagaaagcctatgataatcaaataaacaggaacaaaaaaacaaaaccaaaaacaaaaatccaagaaacaaaaaacagcaaaccctaggaagggggaaaatctgatctccacagttaacagattattggattcaaatgttcagttttcaataaaaaaattacaaaataaaacaagaaacagcaaagtatgaaccgtttaaagagaaaaacaaataataatccaacagaaactgaccctgaaaaaacctgatgacagatctactagacaaagactttaaaacaattgtcttaaatatgctaaaagaacaaaagaaatatgtggaaaaagtcaagaatatatcaacaaaatagcaatatcaataaagaaatagaaaacctaaaaatactaaagagaaattttagaactgaaaacttcagatttgagcagggagaagaattagtgaacttaaaaacaagataatgaaaattatcgagacttagcaagagaaagaaaggaaattgcggaaaactaaccagtcagggggacttgtagaacaccattaagtgagccaatatatgcatacggtactcccacaagaagaacagagaggaaaagatgagaagaaactattttaaaaaatattgcccccaaacttcccaaattttataaaagacatgaataaaaacagccaacaagcttaacaaacaataagtaggataagctcaaagagtgccaccaagacacattatcaacaatctgttgaaagccaaaga

SEQ ID NO: 38849 - DNA, 1173 bp, Homo sapiens
ttattggatttgtttaaagaaaggttcctgacacgattttccaaatgcagcctggtgagcagtccctgccatcaggtgatgtatctgacttaatggtattctttcagagctggagcaataaacattaagggaccttaattgtattctttgcagtgggagcaataaacattaggggccctattgtaccctgttccaaaatgtcccccaagcccaatttgggaagtgtcttgagatatagctctaatttcaaatcctctctcccattccatgtattttgaaattgggagactgaacaaaaacaatgaaacgaaattaataggcatactgccacatagcagcccctcatattatttacctgacgcatcagggccctaatagtgggggggaaaaaagatgctgagtgatctgacttatttttctatggtgacaacttttgataaactgcagctactagccacagagtcacaggggtaaaattgttcacctggtacatagagaagatccatggcacaaaggattaagttgccttgaagactgagaagactgtgggattttaagttgaatcaaacatgaggtgataattcatgatcatctctgactctatttcatctacatatttctgtttttgcttttttttttttggtgaaactgtatgctaaaataacaaatttcccatgaaattacaggagtcccattttaccatttgtaacatcagatgttcaacatgctatcaaggaagaaagacagttttaaaattattttcttaagatctccactggtcacattcatttcagcgagtcgttagactgtattgattttgcctgaattaatggtacacttgttttactcattttgttattctaattttgctctcctctctttttcacaattctgtgagtctcaggtattggcctgtgaactggtgttatgatagtatatcatttaaaatgataaccccatcatttcttccatagcatattttgtcataattcccaatacatgagatatttagctaaggtaaagtgcacatggaaaatttagagaggaattgtcatcagggtgaaatgctgtgtactacgcagaaggcttctggtttggggttctgaacaatcaaaattaaatagacataaatgcaattaatgatattacgtgaaaagtttgatactatgtccg

SEQ ID NO: 38850 - DNA, 1088 bp, Homo sapiens
tcaatacctacatttctcaagaaattgagacaggaattagatttaagtaggaaaaagagactcttttatagcaataagtggtaagaataaaagatagatgacattgtgcaggttgcatttttagtgttgggaagataaaagtttaatgtgatggttttctttttgaagtagcagatgaactgaatgtgagtggtagaagggcagaggaaactctgggattagaggagaaggttcaaaatgcaataggacaagcaggtgattttaaggactcatttaagttttgtgaatcaggggccactctgcaatggatcttcttccagtagcactcaaagctcaggagcagacaggatgagtgggaagcagttctccccagtagagtttgccaggtggaagcaacaagaagatagaggaacaaggatttagggtgttagccagaggaattttgaagtaacacaccatgaaatataaacaggataattagaaagtgaagaaaaagggactgatggattgggataaaagtagaaaggaccatcaacttaatcttagtaaggtcaaataaggatcattgtgagaggaattgaacacagcatctgaaagaagaggaggttgtaggtggagcctggggaaactcttgtcttggagaggtctgtagatccaaatctaaattggatacagctcataatgttaggctctcataaggtcttacatttttccttccttgatttttcagtacttgcaattctgtgtatatatgtataattttaaaaatttgccttttttttactagattataacctctgtgaaggtaaagacaacattttaaaaaaattatttatttttaccattgactctttagcaattagcatagtaccaagcatgtagtaagtgtttaacaaatattgtcaagaaaaattgaataaatttttaattaccaaatgatgttgtgtcttttggttaaataatgtgaacattttttaaggcatttaaaataattcaggcctaggatggtggctcaggcctgtaattccagcattttgggaggccaaggtgggcagatcgcttgggtccagaagttcaagaccagcctg

SEQ ID NO: 38851 - DNA, 1065 bp, Homo sapiens
tctagttttattagatgtttcaatcagatctttccttctggaatctgaaacttcacagaatgttacgagtcactgcatctgaatcactctgatagcaaaaacctagagaaaggttcccaaatttctgtatttgaatcgtgagaccttgtcagttcagaactccttttgattctggatactacgcatacgttcttcctttaaattctcctacttcttttttctcttgagtgaggtttgagccttatggtttatgctttatatagaaccacaaaaaggaagactgagcaggaaaatatcagagaagtaagaggggaaaggtataaatgttatatcatgaaagcaagttgagagaaaatttttagtagaaaagaaatggtcaacaatggaaatattgtcaaggagaatgtgaaaaaccagggaaggtgtgctgagtttggcaattagatcattgttgaaccgtgaaaatgaaggttcaaggaacaaaggtatactgtaccaatttaaagagcaaattgaataaagaggaaataaagacatttaagatatctgatgtaaaataaataccattttagttcaatgtgttaacaagtcaaggtatagctattctactcactaagttgcagataaatggccaagcttaagaaaattgaagtggaaaaatgttatgagatattcaataaataaagactttaatagctcaaagatcatggaatttataactcaacaataaacctttgctggaaaagaataagtgaataagaagtaagggatgatggaacttatcagttattttgagttgatgaaggaggtagaaatggaagctactatcatgagtctgttagtaccttcattagaactcagatcttgctgcataatttgggtggccaaatgcaaaacaaaaaatgaggggcccaagattcaaaaattaaaacagttataaatatatcatatcatgttcagggaaacattatttagaacataaggctaaaaactgaagaatgattaaacaccttatattcacaaatttatgttttgtttgtttatgataatcgtttcatcttaatc

SEQ ID NO: 38852 - DNA, 1031 bp, Homo sapiens
atactctcttgaaagcatagacctaatttataatttcctcaccgaagaaaccactgtttccttttgcctagagagtacatttcaaactctagcacttcttaaattttctgttgaaattggcctcaatctattttaattttgcacttacaggcatcccattctatctttctttccactagaagaaaacaaatgatttttattttctgaaaaattcaggcacttacacttcttgtttattaagtaatcaacttttgtatttttagtgaagaaatggttgtatgtgggaaacaatataacatttccctggtggtacatggtctgagactaccatctcaatgattagctaaggctctttttttgaggtttgcaacagatatgcctatataaaaatctttgtgacaataaatgatattatagcaaaattcaagtctttatgtgtgcctataacagatatattctactgatttaattaaaatacactgaaattgaatttaaaaaccttgtatctttccttcgcttgatgaattccacagaataagtaccagaacaaaattactaggatcttcatgtcaaattttcatgaaaataaaataaatgtattaattttttaaatgtgtaaatatatattaagtgtctctgaagaaattctgtatctataattaagcataaagaagtaaatgcaagtttctaaataaccaatagctttgtttattaaacctctactaatttgtgatcattttttcagaaactatttcattatatttatgaataaagagtttagcatataaatgattaaataaatctatctagttacttaccagtaagtcttatacaattcttgaaaatacattgcagtttaatttaagttatacaatttgagctaagttcaaagttattaaacgtttacacttgtctctatgaaaagaaaataactttaaaaactagttttagttaactttattatctattgtaaatgtctactgtctaattataatgttaaaggatttctcatttcttcttgttagttacca

SEQ ID NO: 38853 - DNA, 1050 bp, Homo sapiens
tttgaagcttctacagaataattaactttgctctaatctgtggtcacagctcatatcccaaaccctgacaaattgtctttgttcctaagaggagaccagatgaaagaagaggactgtgagaacaacaacccaaaagcacactcaatggacagagatcactaatgccatgtttatttataaaagatgcaatttagacacaaaacttttattatgtattttaaaataaaaatacgaaaattgatataaactatgttgtcacattggatacttctaaattagtgaactgaaaaaataaactgaaagataaaaaattagaataatctaaaaatattatttaccataatcatatatgattagaacaatgacagttaaataatataattgatagttacacaaaataaaccacaggttatatatttgctttttttcagaaggttagtataatgtttgatattgaaagttaaaggattttacctcaattttgttgtagttcacttatttttgctttatttatattcataaagttattagtgttgcttaaagagactggaaaatctagtattcattccagagtaaactgggattatttaaagattattttcatgcttgaaagtcagataaaatgagttttaaaactatatttccatttagaaataagtatttgtgtgtgtgtgtatgtaagtctttgccctcaaagaattcttttttgctctctagtagtattttggtacttttctctgataaatcttcaattttagaatattttgtacattgttcttcattctaaccaattattttgtaattttaaaacaatcaggcatttttctatttaatctggttgctttaaaaataaagtggaaaggctaatgtgtggcacatttttgtattttcttttttgtaaccaacttgtttatgcatatcatgtttgtcgtgcaatttacctataaaactattctctgggtttcataataaaatatttatatactgaatatattcttcttccacataatcttacctctttatcctggcatctcttagattgtgtatcta

SEQ ID NO: 38854 - DNA, 1030 bp, Homo sapiens
tccctgattctctgtttttttcatatacgtaatttctgcactcctggttgagatattctactttttgatggtgatttcattctcaaaacttttacgtgcataattgaattaacatgcttaaagttaaggaaagcctttaaaactgactgcttccaaggcagtgaaagcatcagcttaactctctggctttcaactttctctttacttttggccttggggaaatccccttgatttctcaggaccaaagctgtatatttaaaatgatatttgttatatattacccagaatgtcttagtgttttgaagtaggatgatattaatgatatcttatcttccatattattagaattaaaaatcttggtctcctgcttctcattctaggtttatttttttctttacttgtattctgtgcgttgtcctaactccaaattgttcctaaatttaaattttaacatgtagacatgccagtgagaaattgtggaaggggaaggaggaggtgctagctgaacttttgaatctgaagattaatgtctacctctgttgctttttgtaatgggctcaatttccttacactgtgctttgcagctatgtgagacatctgtgggatgtccagctccatttctgttcggaccatgtgggacctctgtatcctcagttcttcctggtcttggaccccaatcttatcagacacttatatgcctccttctgagatagtaatgctctaccttacttggtgaggtagggtgaaatcccttttcaaggaaataatattttcttcttcaactctgaactgaaactcaggattctattttggcagtaccatgacatttttttgtataatgtcacatacgcccctatttcccatcctccattctgtctcagtttccttatctgtaaaatattctgttttttcatagtacctaaaagtgaatttaaccagtgacacaatcataaattatttgggttatactaacaccacattgagctttttaaagaaatgttataaatcccatgttagtttttgttaaatt

SEQ ID NO: 38855 - DNA, 1033 bp, Homo sapiens
ttattttgttcctttcattttctgcataaaataattttttcgtaggtcccatgttgagaaaactttttgttgtcattcttattttcattggtgatattcttcttataagctgggctagtaatcttacaagattgtaagtgatcgcttataaaatgttggattgtctccagacacttttctcaccagcatttctctctaggatatgccttcctctggctagccagtttccctaaagcctcatatgttataggttattttttctatgtttcgttctagttgccattcttattttcagagtggataggggacataaggattatttttccattaactttgattttgttgtcctagatgggacttacttatttgtacatggcggctagcacaaaacttaggtcttaaaatttagttctccagcagtttcttaccttcaatttcttaatttccatatgcttctcttttggtaccattattatttatttctctgccttaaagagtctgtttatttatctagaaatttgtgcaatctttctaatgactgtccatttctttgtatacgtaatgaggctttgaattaattcatcttaaatattccgtctccagttagtgattttcatgtaatttatgcttctaacacataatttatcagttcaaaaataagtaggcaggcactacagagaggaacagtaattattttactatgttagaatcttctgttaaaaggtattgatctacacaaaaacagcatataaatgtttatagcagttttactcataatgggcaaaaattggaagcaaccaagatgtccttcattaggtgaatgtataaaataaatacaatggcatattatgcagcagtaaaaagaaatgagctatcaagttatgaaaaggtatgaaggaacctaaaaattcaagttgctaaatgaatgaagccagttctaaaaagctacatactttgtaattccaactatatgaccttctggaaaaggcaaaattataggcagcaaaaagcttagttattggcaggggtgagg

SEQ ID NO: 38856 - DNA, 1106 bp, Homo sapiens
ctgtttcttaatgcattgattaaagtttaatagttatcaaaatcacctaatttttaaaaatagctttcgttttgagttctggaaagaaaactgtcaaaatcagtatatactattagttatatttaaaaatatttttttaaattctttacagataatattatacttgttacccttcacaataccacatgagaaaatatctgagacaaaatgtatacaaatatattccttatggcataatttattgcatttctgactgaaatcaaaattctgatttgatggcaattgaattttcattttacaatagataaatgcttgtgctacctaaagcacttagcacacagttaaattatatttacatcctagacccaaataaataggattgtgtgtatatttgggatatctattgaagaaaaaaagaaaaccccttaaagataatgtacatgcttcatgtcatgtctttaaaataatttaatcaactttattgtcttagtatttagactctggataactctacaataatgaggaaattcttaagaataacaaaatcactgtaccttcctctcaattttgctgtgaacctgaaatggctttaaattaatactcttattttttatttaatttaattacataaattaaaccttaccatgaccaaattgtgttaggacggcctgctatctacagcacagtgtgtcatttgcagatttgtggttacctataccacgctaggtgttttgacatgtttagtgtttctgctttacagtgctgaattccatattttagaagctatgaaagtccttttatgaaaaagttactgattgcttctcagttattaggaaaacagttgtttcacaattattatgtagatatgatgcccaaatatcatttttagtatatcttgtcgatctttaagttgttactattgtgttattcatgtctttaaatcagataccaaatattttttaggaaagaaaaatgttattactgtcattaggttgtcttttaatactttaagttattttgacgaaaagtaatagagaaaatttacttagcattttagattctagagacatggaaatgaaaattattttatgtctagagtaggtcct

SEQ ID NO: 38857 - DNA, 1073 bp, Homo sapiens
ataatgactaaacctcctcgtaaatgaactaatagtattagaagaaaaagataccttatctatgaaatactcttagcaggatgttcctggtttaaggttgcttataaaacatcaatccagaatctgtggatttatggaaaatgagaaatataaaagctggctgacaatttagggtgtattaggccattcttgccttgctataaacaccagaggctgggtaattcttaagaaaataggtttaattggctcacggttctgtatgttttacaggaagtatggtgccaacatctgctcagcttctggggaggcctcaggaagcttacaatcatggcagaaggcaaagggggaacaagcgcatcacatggcaaaagcaggaacaagggagagagtatggggggcacactttacaacaatcagatctcatgtgaactcagagtgaaagctcggttattaccaagggaatagctcaagccattcaggggcattcgggggcatgatccagacacctcccaccaggacccacctccaacactggggattacatttcaacatgagatttaggcacagacaaatatcctaactctatcatggggtatgaaatgtaaatatttaataacttatgcttcactgttttgtgagatagatgaaggcaatgaagcattgcagggtcatggatggataaagttactggatctagtgagtacataaagtgggaagcaaaaagttttatctttggagacgtaatttggtgaaggatcctgaagatgccacctataccctgcgcaccaggcagatgcaccaaagtatctcagccaatttcattgagattcagactggcaaggagcttatggtaaagtctttataattgaattaaaaacttaagtaattgtttctgttatttaaactcactggaaaagcttcaaaatgagacaatgatttgaatgaaccagtagtctcttggttacactattagggataatagatatccccatcgatctagaacttataatgtcacaattgctaccaaagttcacaggacagttagtgtaaggaaatccagaactactcacatt

SEQ ID NO: 38858 - DNA, 1172 bp, Homo sapiens
taaaatattttttaagagtagtgacaatgtttattggtaccaattggagatgatattttatatttattttgttagtttgtcacctggatgcaaaaggaaggcattttaattcctttctatcttacaacattgtaaagcatcaaaagaagtaacatctcaagaaagattagaaaggatttggatcacgttaacattctatgcaaatattagtaacatatcaactgtttctaaaaggaaagaaaattagtatttaaggagagtataaagtgcgagcactgtgaagggcagatatctattaccaaaccacatggagagaaatatagtctctctcctaacttcattccattgtattgcaatcagtcaattaaggtgattttttttttctggatgtctcaatctagagattttgtagcattttgcaaatgggtatgcttcactactatccacagtgttctcccctttagtaattcatattgaatatatccatattcatatgcattttataaaacagttaacagaatctaaataagatatagccggctaaatctggaatgtgagtgctaccctaggttattagttcaacaaactaattttgagagagccacttaacctctctggaccttgtttgtaagctttcttctagcactattactcttatctaagatcgaaattgatatatgcatgaaattcctaatggaatttcaatgtccatctcaaagtaattttttaggatattccatacagatttccttctcatttctctgtgtagatatttaaagtatgaaattgattatttaaactaatatgtggaaagaacctaatccagagcttggaatatagaaagtgctcaattaactgacattcctcctgtatttcctccctccccttagttgtctatgacttttgaactcactgctcactgacatcttaattgcctgcagaaaaatcaatcatattttaggcattattttgaaatattttagagttttctgtactattcaaactcttattacaaaaatctaaagatatttattgatgcaaaaaatttagggagtcattggaaatacctgaggcaatcccaggctaacaataaaatagcataattttaagtaagctagattgagttcatttgaacatttagttattttttagctcatagttaacatatgtcc

SEQ ID NO: 38859 - DNA, 1023 bp, Homo sapiens
agaagccagcgaattttctgtaaaatgctatctgttatatgaatatgtaatttactgctttatataaacttactagcaagtgacagtttaattcttcagaactgaaaataactaagcaatacacctctaattttttatttggccaatgcttttcgtattatttcagattgattcaaaatttaagaataagcaatttctttctttctttttttttttttgagatgggagtctccctatgttgcccaggctggtctcaaactcttgaactgaagggatcctcccgcctcatcctcccaaagtgctggaatccaggcatgagccaccatgcctggccggcaatttctttaaaaatatagttctaagtatataatttcaagcttaagaaacaatacaaactaatcattaatagattttgtatttgttttccaggtaattaatgtggacctgattcatattgaaaatagaattggtgacattattaaatcagaaaagcatgttcagttagtgttgggacaactgatagatgagtaagtacaataaagtacaaatttaagagcactttgtttattttctttcttttttttatagtgtttaaatttaggccaattatggccagttagacatttcatttataactcttacagtgttgattttcatgataaggtttatttcacttaaaaagtaagtgtttaagccacatatggtggcatgtacctgtaatcccagctactcagaaggctgaggctggaggattgcttgaccaggaatttgagaccagcctacgtaacatagcaaagatcctgtctcaaattaaaaaaaaaaaaaaaaaaattcagtgttaatgtatggaatacttagaaataatataaacttctatttttttcttaataagaaaacgtaaaacgtaacttttacgttccttcccgtataatcttaactctgaaagcaaatttgttccaaaaatgttaatgaaaatcaaatacaaatttccacttaaaaaaatcccagcatgccagcctgggc

SEQ ID NO: 38860 - DNA, 1030 bp, Homo sapiens
atttcactaattaagtttgctaattaaaaaattagccaaatgtggtggctcgcacctgtagtcccagctactcaggaggctgaggtaggaggattgcttgatcccaggaggtcaaggccacagtgagccataatcatgccattgcactccagcctgggtgacagagtgagaccttgatgcaaaaaaaaaaaagaaaaagaaaaagaaaatgtattgtttgattaatcttacatttagctacactaatgagaaaaaagtatttgttagaatatgagtgatgagtggtgttcatgtacacacacatttcattacttttggggcatacttcatttcaacggaaattaaacataaaatgaggaaacagaaaaaacattcctaattcttttttctattattttcttgttttcactattaggaattatttggatcggttggcagaagaggtcaatgataaattgcaagaaagtggtcaggtcaccatatcagaactgtgtaaaacttatgatcttcctgggaactttctgacacaggtattttttttcctaataatacaatgtgtctttttaccaaaggattttaaacgaagactttgaatggaagggggaaaaaaaaatgagacttcctcaccatcatttgatttattgcaggtgtctgacttgatatatgttgtaccaatatatttggggggtacttctagtacattaatggttctgaggaggcagtttaaaaatgattgtaatcatcctaaaccaagagacaccctaaaactaatttatagactaagttctagggctgctttgatgcaattagcaaatgtacaataaatgcatggatttatttaatgcttttgataccagctatatagaaactgtaaccagacaattaaatttctgattgcccagttaaattttaagaaataattgatgaagataatttatagggggtactactggcttcttgtgagtaaaggtcaaggatgctgctaaacatcctacaatgtacagaacatcctgccaacaaagaatttttt

SEQ ID NO: 38861 - DNA, 1825 bp, Homo sapiens
tggaaaggacataagcttttgagatttttaaaagaccttgatttgaatactgtctgcaccacttatttgacatcaggaaaatcatttcatctcttttatgcttcacattatgtatctgtaaaacaggaaatattgtcttttttataggcttcattgaaatctagtgaaatatcttaacacaatggagaaactaaataatgctagttctttttatatttactgaaacaagggagaagccaaatctctctttaggtatctatcactttaagaaactccaacttgcaaaattggccaaaccgtaattgcatgagattaatgtataatacaagcagatttacttactcatattaagaaaatgagcttccctaattccatttaaaataccatttatagtatagatctgttttatgtagtatttcaggagctgaaattatattttacatgggcaaacatatgttaatcacaggacaaaaaatatatttttaaaatacttctttaaagtatccagctcaaatccaaatgatttcttataaaactgtttctgaatacattttagaaacgtagtttttaatatgtttcagttccattctgaatatagcagtattctaaaagctcattaagtttgaaaaaaacatttttctatatcataaaaataatgagctgagctgacttgagtagatttaacttatcttaaaatgtgaaatatgtccagacttatttcagatgtacctgatgccagtcgtagtatagctgtggagaaatactctgctgaacttgaaagaaggttaccaagaagtcagattatctgccatagatcttctggacggggataaatttgcattagagaggaaagcttttgaggtcttatgtttccctatgttgcagaatctggaataacatttatacttttagtattagaagctccagaaagggtcttctccaatacccatttgtatgtcttggctctctatatattggaggctgcctatatctagaaaccatcatatcaaataatcatcatattgatagtcatttttatgttagaaatagccctcattaacaagagataatatgacagctcaaccttttaacatgtaagcaagcaatttgactcatttcttggctctgccatgagatagtgaactttgctagacactgaatcttcactttagttgatatatcttgtaatctatgcttgttgaaacttctcaatcacatgactgatacctcagcatgcagcatgacttgagtatgactatgcaaatgcatatgtgtaattcttttcttttaaattaataaaaatgtacatctttacccacaggcactaactcagcgacttggtagaattatcagtggacatattgatcttgataatagaggagtaatttttacggaagcttttgtagctcgacataaagcacgtatccgtggactattcagtgctattacccggtaagtatattttaaagtatatatatttgcacatttctttgatcatggtttgcatttttttcctagcagcggaatctttttctttgttttaataaagtctcatttaggaccccagtttattaaacagataaaagggcagcttttgtaaaatagaaattgagattccagagttctagaatgcagcctctctctccagtccgcatctccttcctctccctaccttcaccacccttgtgaccccatacacacttttgcagagtgcagtttaaatactgctgcccagatcagtatataagtgtcacccttgaatcatggaaagaacatgcaatttaaagtcagaagaatttggttcatagctttatcacataatagg

SEQ ID NO: 38862 - DNA, 1034 bp, Homo sapiens
gcacaagggccctcaatccccaggctgccaatcagtaccagtctgtggcctgttaggaaccaggctgtgcagcaggtgagggtgggcaagccagcattactgcctgagctgctcctcctgtcagatcagtggcggcattagattctcataggagcgtgaaccctattgtgaactgcacatgcaagggatgttggttgcacgctctttatgagaacctaatgcctgatgatctgagatggaacagtttcatcctgaaaccatcccccacaacccgggtccgtgcaaaatttgtcttccatgaaaccagttcctggtgctaaaaaggatggggaccgttgaactaggagatacatatacacatgtacatacacccctctatacatctgtatttctgtatctttatgtgtattgaaaactgtgagtttgtgctgatacttccatttctagtccaataccgtaagtttcatttcattctagtttccttcttttccatgtttgtagctttgttcactgactaagaaaaatctaactcctattatccttaatgtatttagttacttgattaattccccttatgtgactggtttcccattgctactgcagctccctttctcatgtgggtgttctctttattccatgtaggctctgacagtctgtgccacatcaccctcctaacacaagaaatgggtggttgtttctggggaaagaaactgggtagctgggtggtaggaatggagagggattcttcagttttgtaacttttttgtaccctgttcatttattactttgtcaaaaactaaaaactaaaaatatctttgttcctatttataaatatttaccttttttctttgactaattattgtggtgatggtaattttcatcaaaatcagctgtgtttttctcattcatagtagtcctgagtttcgctatatggaggtaccatcaaataatgagaggaaaataagttttgagcctcaaaagatgttgctaggttgtgtggcttccagatagtaccatttaaggcaccatatctt

SEQ ID NO: 38863 - DNA, 1023 bp, Homo sapiens
tactcaaaagcaaaaaaaaaaaaaaaaaagattttaaatggatccctctcagtcaccctaatctagcctcatgtcattccaaacattttcagtgcacatatgatctcatttttcttcaaaaatggaatcatatgacatccacttgaatattcccaagtaaggaaagagcctcccagacagaaaaaacattgaagaaaaacctaaagaccaaggcaaatagttacgtatcatggaaatctgagaatttagtggaatggcaatgtaaactgatccttgattgcaagtacaaattgatttccctgatatttcagtagcaaaattccaattaaggatttaaaatttggtgtaatttttgactttattttttcttttaaacagtatttttcttaaattctaattatcctatttttaagttcattaatctataacactataatgagtaagaagtttttttttttttaactttccataaaggcctacagctgtgaattctttgatttcaaaatatggatttcaggagcagcttctttactgtgagtttggtttaaattatatttacttaattagctgctgaatagactattaatgtaaaacttactaactttaatgttttttcctcttttattgttaatgtaactaaaatatttcctggtttaaaaaagtttctttgtatcaagttttatatatgtacctatctgttacactcaccaaacgtttaatattggttagccctagaggagtataatgaaaaaaaaagtaagcatttataatgaaaatatatgtctcacacactctattatacatgtacatatagagatttaaaattgtaagattaagaatagtttttactttgtttcttatgattttgttacattatctaatatgaaagtaaattgtgtttcactaacaatttttaccaagagctgatagcaataaaagtatattcttatcattcaaacaacatattaactcgaaaataatctttgttcattatgttgtttgtgaagctcttgggaggttttg

SEQ ID NO: 38864 - DNA, 1981 bp, Homo sapiens
ttgggattttttactcaagtaaaaatttaacatggttatcacttttcttctttccttgggcttctccctctaaccacaaaaataaatttggaaaaaggtgattctgtcatgtgaactgtcaatattttaagcatttttctttagaaaaacaaaaaggaaataatattacttttatcataaatatatacttttgtcactagagattataggaccttatgccatcagaaagaaccagtatccgaacttggaaatacttcatcgttgttatcataaactttttcaaagcagaaattatcaagaatgaatccagaggggggaaaaaaagattatatgacttagtatgcaactcacatatggtaatttgtgtggggtaggggatggagggttcattatctttaataatctcaaatatccaggtggcattggaattgggagtctcaaaaagcgaaggagcatggggcatcaattaagctgtggtaaaaccagccagtaacagctggagaggattgcatctgattgcagctgtgtaatcagttgtgaagtgacaagataggatttctcattagttaataatgggtacaaaaaaggtcaagagcagcaagagaagagacctattttgggcaaggagaaacatttgccttagagtgacagctctgaaacaaagctctatagttctaagcaacaaaaccaaacaagaataattagtgagtatataaacaacttttatgcttttggaaatgctatgtgtttttcctaccaaaaaaagcatgttttattttaggaaatgaaaaataatcctgtgcatttaatcactgaagaagatctgaaacaaatctccactttagaaagcgttagtacaagtaaaaaggataaaaaagatgagcgaagaaggaaagcaacaggtaataaattgttaacaaggaatattcaaagttttgtatttgttgcagtgaactttgcatttatcacatttattatgccctttgaaaggccctttgttttattgatttacctttaaacagctaatatcaaccaaatattttgctaatgtgttaagttttatataataaaatggaaatattggtgattatgttttctgttttcttttgtgaaaactttattttatcatcatgctcatctcttgtttttccccatcctctgtctatgttccagcccagtagcccttttttgttttgttttgttttgttttgattcctaaacttgccagggtcatattcacctcaaagcttttacaccaactgttccttttacctggaatgccctctcccagactgtaagtaactggtgtattcttttcattcagagctcgactttaaatgccacttccttagagaggcctcctaacccttcggaatagtagccacagtcactctctgccacctcattttgtcagtttatttgcatcactttatcaccatgatgtgttttattgtttgggaactgtgttgatctcatttattgttgtactcttgctacatacccaaagcaccacttgatatattttaggtgtcctataaacatactaattaaatgaaaaaatttctgaaggacatatttttacatttctttttctaatctaaagtcactagaaattattctaggtatcactgatatgcttgtaatttgcaatggaaaagtaacatgtatttccatagtttttatagtaggaacagtgctgttagtgctttatcggaactgaagaaattcaatattcaacatttttcattaataaatacacttctaattctttgagatagtttatttcctcttccagaatctttttcttaaaacttttcaatggcattatgaaatttctctattcttccaggaaaattaataaattacttaaatcacagtaatattcatagctatggatattttatcatatatttgaagatatagttataaatttgccttactcaattgatgacttatgtcagtataactagtctatttaata

SEQ ID NO: 38865 - DNA, 1050 bp, Homo sapiens
tgtttgtgaagaattaaaatgttatttcacctatttctgcttttggaaaaaaaatcctacacatttactccctactaagaatatattattcttcaatttatttgtttattctttcatctctctactatccttcggagttcaggtgttagtagcaccatatttgcatcgaatattttcatttgctaaattaaaaaaatctcagaagtatctttacctttttttggtaacattgcacttttatagcattactgagactttattttctaggaatataaggctaaaatgaaatttaagtcataattcaatatggtgaatattttaattcttgacaaaaatataacttttctgagatatatttattttatgaatgcacaaaagaaatatatatatgagttaatgaaagcttccaattgacatttttagactggaagttaactgaggccagctaaacgtgttaattagttgactgtcatttttaaatagagatttacaatatgagtttgaacttattaatattatgaatttcattgttgttttcctgtgagctgtatgaaactcaccacagtagagagctggatggtttcaatatctaatgactgaacttttcacctcaggccttgggtcacattaggctttggtttcaagtgattgacagccatttcatagtaacctgaaatgaattgggggtcaaaatcatccaaatgatggagagaaaatgcccccgttagaaaaaaataaaggcagaagtaaactaaccagtgtagttgaaactaattggcctccttattggcaaaggattgaacgggcacagggactgaattaatctcttgaattcggtggcagatccttgcaggttgaaattgtgaattggcaggttagcataaggggtggctgtatccccctagcatgtgatacttctgttctgtgaatttccattttgtggagctgtcaatctgaggcttttgtgagcattaaactttctttagaaacaacaccactaaaaaaagaatgaccccacctcctaaactaccacataaatcagcttgatta

SEQ ID NO: 38866 - DNA, 1033 bp, Homo sapiens
cccacctaaaatgttgcaaatatgtaaactatcaatagttttccttgagatttccttcttaaggttttatatttagaaagtctttcacacagaggtcaagttaaatattcatttaagggccaggtgcagtggctcacgcctaaaatcccagcactttgggaggccgaggtgggcggatcacctgaggtcaggagtttaagaccagcctggccgacatggtgaaaccccatctctactaaaaatacaaaaattagctaggtgtggtggcacacacctgtaatctcagctacttgggaggctgaagcaggagaatcgcttgaacccaggagttggaggttgcagggagccgagattgtgccactgtactccagcctggcaacagagggagattctctcctctaccctcccaaaaaaattatttaagttttctccttgttttcttgataatttgttttatacaattaagatttttatttgaaaattgtatgggctgggtgtggtggctcatgcctgtaatcccagcactttgggaggcccaggcaggtggatcacttgaggtcaggagttcgaaaccagcctggccaacatggtgaaatcctatttctactaaaaatacaaatattagccagtgtggtggtgggcacttgtaatcccagctatttgggaggctgaggcaggagaattgcttaaacccgggaagtggaggttgcagtgagctgagattgtgccactgcactccagcctgggtgacagagcaagactcttatttccatctggtctcgaactcctgacctcaggtgatctgcccacctcagcctcccaaaggccgagggagccaccgtgcccagccacaaaacttattttctattaccacacaaacacacacagagataccatttaggttcctgctgcctaaattttcaaatattgtgaattaaacaattttaatcaggaaagtcttataaactattatggctagatgagcagtaaatctcacatgacacattttaaaatgcaataagttactggttat

SEQ ID NO: 38867 - DNA, 1031 bp, Homo sapiens
gccggcctacacgtcaccgccccgctgcagcgccaacgtcggcacgtcgactcgtcgactccgggccctctgccccgcccgcgtgcgcgcgccgctccgcctcccgcctccagcctctagtccgctgggttcggaggagcagaggcggaaggtcccggcggcggcgaggatgcgccccagggcgggagcgggacgctccactttaccctggctgcccgcaacgggccaggcctgccgtctctacctctctacctgtgagttttttccctgcatttacttcagtctgccgcgtcttctccccgcccttctctgtaaggtaaatatgtggaggaaataattcctattaaaggtaaaggaaaggagagcaatttgaatgaagaaacaggtagttgctatcgtcgttttcagccaaagccctctggctgctagagagtatacatggttctctggtgtcaaggcctgttttccataagctttctggattctcagcttagttccctcaaagtgatctctgcaagtcggctcttcggtcagaagacctcctccaaaaacagaaagcccaaagattccctaactcgattgaaaagataggaagatacgaagaaaaactaacctaaagaattgtgtggtttatctgcaaagagttctagactaaaagccaacaatgcaaagatagtatgagttaatatgtttgttgtggctctcttctgccattcccgcttcctcaaggtaatgtgccccgatgcctggtagaactgttttgtagaggcagccaatagtgatccagttattgtctttactggtcagaccacctctgaagtgctgtgttcagcatttgaagactttaatcaagctggcattatatcagggaagagcaaaatgatgacgagaactcaaaaacagggcaagtgaagaaggattgattaaaccttccaggactcacctagaagagagaaaactactggactctctccaaatatgaaatgacctatcatgtgaagttgatttgtttcatgtgatgcaaacttcag

SEQ ID NO: 38868 - DNA, 1134 bp, Homo sapiens
attattttagaggcctttttagttttataagcatttttgaaaacataccaggttttatgtctatgtactattttgttgtgaaaggatatgtatcataggtgattaggaattttaaatgttcaactggacctatgtctactcaaaatttttaaaatatatgacatagttttttttgaagtgtttggaagtacatgtgtcactggattttttttttgaagtattctgaaacatttttaataatgtatatttggagaaataaaaaacaaattatttgtgtccttaataaatacataaaaatttatgctgaggaacctaggatactttttctcttaaaaatattgattgcatgtaacagcatatcaaaacatattcagttgcttcaaaataaagagaatatatatatgtgtgtgttttaaaattgagctgtgtatttgtagttatgtatatttatagttacataactctacttaaaatttattggcagtaataccatcaaactttcttgtagttcctgtgatgtcaccaaatcctcaaaaagaaacacatgcctaggtgctgtactttgtctctctttagtctctctttagacatgttgataaatgctgtgagattctgctatttgaggatggtatgtaaccattgatggtttaaaatgacagtcttcatttgattttctaatgttaatttgtaatttaaataatcatatttttatgatgtgaaaatatatattctgacccatgttaattgtgaaacattgatatagttcaataatgaatattttatttttaaaaaattaacaaaatatgtaagtattatatttgtgaattttgtcatatctcactgttgaagtttttaaaaaatgtttaataaaataggacaattttgatgattttatttttaaatatatttaagaatttctcgagtaatacaaacacagatttgtttcaaatgaagtaaggatatacgtggttaatacaaatttgttacgtctaaattcttttattttttttttgaggtggagtctcacactgtcacccgggctggagtgcagtggtgagatctcggctcactgcaacctccacctcacgagttcaagcgattcttctgcctcagcctcctgagtagctgggatta

SEQ ID NO: 38869 - DNA, 1149 bp, Homo sapiens
tatcagggagcctgaggtaaaaggatcacttcttgagcccaggagacagaggccacaatgagctgagatcactccattgcactccagtctggacgacagagcaagatggtctctaaaattattattttttttgagatctggtctcactctgttgcctaggctagagtgcagtggcaggatcatagcttactgaagccttgacttcctgggctcaagtgatcctcctgccttggcctcccaaagtcctgggattacaggcatgagcaacagtgccaggcctagaatattgtttaaagtatcagggtgtaaactgcagcttggaaatatttttgttatgcagatattttggttttaataattgttgtaacataagattttacctgtgtaagattttacctgtgtacatatgcatgtgtattcattataagctaaagaaaaaatactgttttaaataggcctgttgtgataatttaataccattttttggttaataattatttaatctttgtaagatagtatagaatgataaagattctggtcaaatcagtattcaaatcccagtttattagatacctgtaagggaagtaagttaccttgtcagtgtctcaatggcctataaatcggaggacaaaaatagtacccactttgtatagggctgttaggaggattacatgttattacatatgtaaagcacctaacacaaacttggcagatagtagggactcaatgtgtgttgtacataattagtattataaaggagaagtagtgtggtattgtgagaaaaaaaaccatgggaatgagtgtttggcttcggctctgccagttggttggtttataacttttggctggtcacttccagggagcttcagtgttcttatgggtaaaatgtgataaataatatttttcatctttattttagagggttatggtaagggtcaattgaaataatacacatgaaaataatttaaaaactgtaacaatctcaggttttagtttttatctttttttcaagagctatgtttttattaatcattttaattataagagtttttctggtttttgttttgagacagagtattgctcttgctcaggctggagtgcagtggtgggatcatggctcactgcaacctcaaactcctgactcaagca

SEQ ID NO: 38870 - DNA, 1185 bp, Homo sapiens
atgctcagctaattcttttcttcttcttcttcttttttttttttttttgtagagttggggtttcaccacgtcgtccaggctggtctcaaactcctaagctcaagcaatccgattaccccaccttggcctcccaaagtgctgagattacaggcatgagccactgtgcctagcctagtgtgctatgtcctgatgaagaaaatgatcatagaatggctgattgcctaatttcacacagttgagccagcagtgtcaccccagggtagtgctcttaaatctctgggttctagccacatgtagctgttttaattttatattaattacttactttgtgctaggtgctaaagattcaggtatgagcaaaaagcagagagggtttctgacctcgtggagcttaaagactagttaagggatcagacaatttcatcacacaaatgaaagtaaaattagtatgataaagacaaggtacatggtgctttgcatgtataatggtgaggggcctgacctagtctcagggtgagaaaggcttctttggggcagtagatttgtgatgaagaatgaagaacgagtaggcaaataaacaaggaaaagagcattctaacagaagaaggagttgtgggcagaggctttgtggcaggaaggacaatggaactttattgaacattagctttacaaagtgttaagatgacaaagatcagtaatatccagtctctgtctttaagagcttatagtcatgtgtatgcatgtgaccaacagttcccacagagtgtaaagtgccaagataacagcattgtggtagcaattgccaatgcttttagttgcagggaaggcttttacaaaggaagagtccatttgagatgggccttggaaatacctaggaaattgtcagcctgagaaggcatttcatattgtaaatgagcaaagatgtggagaggttaaagagcctcttggaaaggccaatgtctggttagagcatggggacttgatgggtgaagggcaaaagggaaggaggtggaagatgaagctcaagccaaggttgggaccagcttgtagcaggcaggcttatactttttgttagcccttaccctgaacattgctattggtgaatttatttaaagtattcactctctcagaagttgcattgcctatttgttttctgaataaaatttagacatcatagccagatat

SEQ ID NO: 38871 - DNA, 1103 bp, Homo sapiens
attaaaatttataggtttatacaagttttgatgaatctatatgtgtaaccatggtatattaagtaccttttagtgtcatttgcagttgagagagatgagtttttatctctttgagaaaggaagatgttttgtctgaccacagagtaatgaggaaaagcattttggtagcaaaaatgatgcaggtgttaaaacgtaggtgttaacagtcttttgatcttgaaattttgtgtgacatggagttcccaggaggccctctcaactttatcatcccagattggtttcagaggtgcacaaatgtatatattccttttatgattagaaggtcatatgctgacctgaatttaaatggcaaatgtacttcagggtctgtcgtgtgttacagatatttaaaactgatgttaaaggaagaagtttcattcaatatgaaaggaaacagcctttatgccttttgtaaatgttcctttttctacagtgatggattcattatctgcttatccacatatttattggtggtcactcatgtatcttctctatactctaggatacttcctctgcacacagactgaattaaccttttcatatcatgtccatataaattgttggctgttctactcattttatcagcagagccactagaaacagcccatttctaatctgttagtaattttattgctactatatattaaaatatatgccaaatgctgtcatattctgccatatattttcatgctatatattttctctcttgtcttctgggtgtttagcccattcttaagataatgccaagcagaactaaggttggacaccacaacaggttctggaacattttattttagctagtaaaaatacagtgtaataaaggatgcaggacatagcttttcacattataattcaccttagcctttgtttttttgtgtgtgctatcatttcccatccttctgaaaacactgctattttaaaatcattctactcatatttgcttctctcaccacttgggttttttttcctcccctttttctcaacttctacccccactcactctttctggtgttaaaagcttctgtagggaattgataatccatgtctttctgctttaaagtctt

SEQ ID NO: 38872 - DNA, 1031 bp, Homo sapiens
tctttgccgaattagataacagtttttgaatactgtaggaatatttcctaaatttttgtgctatttacaacataagtgctatagatatgacacactgttaaattttatctgcattattaacattttctccattactttcctaggtgtctagacaattaagaaaacaaataaagccctgatttgtagcatttccgaatttccatggtaataaatacttccaccatggccaattttaagctaccagtgtgaaatcactgaatgtggatttgagaaaaaatgcacagtgacaaactgtaggggagggaacaaaaatatttttgtcttactcttccaggttctcaggctggagcttgtaagttggactaacaaatgagagattaacaaaagaaaagcatacacatttatttaatatgagctttatgtgacacagaagcattcataggaaaattaagacctgaagcaactgttaagcctgagtgtttttaatactaggtttgatgaggagtggaaagtcaatgaaaaacatgacagtacaaagggatatgacctaaatatagtaaactgggggaacttaacaaggtgtgtttgttcgaattcctgtttaagtgtgttttgcctatacttcaattgattgttcttttttattgatttgtatgagttctttatatattcttgatagtacatatcttgatatgatacagtttttatatatttgttcagcaaatatcttctcaatatgtgacttgccttttttaccttcttcatagtttctttggatgaacagaatagttttaaattttgagtaagtccaatttatattttatattatatgtcatattatatattttcttttacaggtagtgttcttatgtcgtgtttaagacatctttgtctacctcatggtcatgaagacattttgctgtgttttcttccacacattttacaggtttagctttacatttacatctatggtccatatacagttaatttttgagcagctagtcaagtagatgtcaaggtttatttgtttt

SEQ ID NO: 38873 - DNA, 1062 bp, Homo sapiens
cactagcttgttgactagaagtgatgatagtgggcatctttctcttgctcgcaactcggggaaaatgtttaataactcatcattaagcatgatactagctacagagtttttataaatatgtcaaattatggcaattctctttcattcctagtttgctgatagtttttattatgaacaaatgttttatcaaatgccttttctgcatggatggagatgaccttacggtacttggctttattctgttaatgtggtaaattgtgtttttatccagatataaagcctgatttataagatttgttgagaagcctttcatcttttttctattccttggaagagtttttgaaagatttgtattttttttttttttttaccttaaacgtttggaagagtctaccagtgcagccacttggcctgtagtttttctttgtagaaaggttttaaactattgatttgatttttaaactacatataggaagactacctagatttttttttttttttttttctgagacagagtctactctgtcacccaggctggagtgcaatggcaccatctcaactcactgcaacctccgcctcccaggttcaagtgattctcctgcctccgcctccgctttgcgagtagttgagcttacaggtgctgccaccatgtccggctaatttttttgtatttttagtagagatggagtttccccatgttggccaggctgttctcaaactcctgacctcaggtgatccacctgccttggcctcccaaagtgctgggattacaggcgtgatccactgtgcccagccactacctagattttcttttcttcccatgtcaacctttgcaagttgtgtttttcagggaatttgtgtatttcatataaattttcaaggctgtcaccattaaagagtccataatagcctcacattttcttcatactttctatatgatctgcagtcgtgttcctgccttctgtccttatattggaaatttgtgttttctctgtcttgattaatcttgctagggatatatttattttatcttcgattttgttgattctttttttctgtatt

SEQ ID NO: 38874 - DNA, 1078 bp, Homo sapiens
caccaacactttgggaggccgaggccagtgaattgcttgagcccagaagtttgaacctagcctgggcaacatggagaaaccctgtcattgcaaaaagtaaaaaaattagctgggcatggtggtgcatccctgttgtcccagctacttgtactgagatgggaggatcacttgagcctgagaggtcaaagatgcagtgggtcgtgatcagtctactgcaccctagccagggtgacagcaagaccctgcctcaaaaaaaaaaaaattttttttaaccattctgttaggcgtgtggtgatatctcatcatggttttaattttcatttccttaatagctactgatattaagcaactttatatgtatttttgtgtcaccctcatatactctttgacaaactgtttcttcatatcttttgcccattttttactgggttgtgtgttttcttattgcactttaagaactctttgtgtaagttttttttgccagatacatgatttgtagatattttctccctgactgtggcttgtcgtttcaatctcttaaatatcttttctagaacaaaagtttttaatttgaatgaagatgatttatcaatctttacattttctgtttacatcaatgatccatttagagttagtttttatataaagtgtaaggcctaggtagaggttcatttctgccatgtgtaatatgaattgttcaaacatcgtttattgaaaagaatatcctttttcttgaaatgtttttagattagaaagtttagtttctgtcatttttggttaaaaattgaaatttcaaagttttgattacatggtattaatatgtttaacaaattccaaatatgatttcatcacttgagaacttatttgttcaattctaatgtttgtatataaggtagaatcatattttgtgaagagttactccctgtggcaaaaaaaatgtaaaataattttgaagattccactttaattattagtagactgtttataaaagaaaatgggattattttattctctcttaaaattctgcttaatttagcgtccacttacaactttctggttactcaaggtagtaaatatt

SEQ ID NO: 38875 - DNA, 1033 bp, Homo sapiens
gaaaagttttcttaacatttcaaacgaaataatttctgatttttttctatttagtttttcttaagttcattacaaaaagagtaaagaaatttaacgagtctatacagctgtctttataaaaaagtgaagattgttaataaaaaattaagaaatgttatatttcttctataaaactagcctatacttgggactttttgttctctttaaaaacatgatttactatgaagaaaaagagtgagtgacttccaacataatgaaattatgggtgagggtggtagaattattttctttgccacagttgatttctattatttatatgaaataatcatgtcagcctgtagtacataattaaatatataatataattttagtttatattaacagatatgttaaatatgtaaaaaggatttagactaaaatggtctggaaatcttttttatatatagtttaaatgtttttactccttaatacttggtgaataaaaatgtgcataattttaaagaacacaaagtgcatggatatgtagtgtatatgttggttgtatacatatagctttgtaatttttaactgttcatggtttctttttttacctcctttttaaattccgatttttttagagtagtgactgtcttttttgtttttcttaaccttccacatattttgacccaaccacatattccaagaagtgtcattcataataatgcagtgttgacttgaatttttaaaaataacttagaaaataatacattctgctgcttttatttcattttgttcaatatttagtttttataactacgttagtatgagtaagctttttgattttctacatgagttaaagtggtaatatattttgtttagaaagaaggctaatagactgttaaaaaaaagatgtttgatgttactacttttggcttggaagcttggggaatttctttagtttgatcatagtagaagaatttgttaacttatcatttttaagatgctacttatttagatttaaaaattgattgtgaaatttaacattccttgtagt

SEQ ID NO: 38876 - DNA, 1050 bp, Homo sapiens
actggcagaggctcgagttgaataactaaactattgcatccaaattttcagtcatccatatggtgactaaggaaattagtaaaaccagtagaatacccaagtcttcttaattcttctgtatttttaattctatcccaagtttctttattatagcctaattttaggatggttatccaagtcctttcttcttgtgattatttggccagggatctcttaatgaggcaattatagttgtttccttcattcacattatcttagcagatgctctccctgctgtgacctctgttcagactgggcagacaatgtgccattctcatcaccctctgccagacattgtgtggagctgagcttcatttggcgctgcataggtctcccaagatgccattggaatggtcagaagccaagtggcaaataatcagaattttaggttgattttctgattgctgattataataaataataaaataatgcctacagaaaaaaagttccagaagcaactctaataatagttcaagtagaaattatggatttaagaagtaacttagctttcttgctttagactgtggccttggtgaaattagatcatatatttattgtatgatttcggtacaagggtattgtgataatttggtagtattttagaaatttgatatcctttctaaaaaggaaattaatttagcctctaatattaagtatgtagatgtttaaatgaacattatgacattgttcagagtatcacttgtaaattttaacgtcacttaaattttaaaaattatgcttaaatgtcttaaacataaattatcatgatttatatctgctaactatgacatccaatctgttcctgtgtgaacagagtaagagctgatcaagatgaagactgatcaacagaaaattttgttacttgcactgctgaatccttccactgaatttgttacttgcactgctgaatccttccactgaaatactagttctgcatcccaaaccccagtaacaatctaggggaatcacaaagttttcagcagtctccagctagactttttaaattctaca

SEQ ID NO: 38877 - DNA, 1094 bp, Homo sapiens
gggagtctctggagaggcctgtggaaactgctgcctccgagtggaccagtggcaggctgctgttggtcagcagggccaacagttgggaaaacaagctgagcacagagcaccagagagagaacagctgggacctgctgggcaggtctgtgtctgttaccaagtctggccaggtccaagaataatgacttcttcacttccaaatcttgtacaagtttctcttttggttgactctacctcagaaccatccagagaaggagatttctgtgaaatacaggtgctagccgtaaccaaactgacatttcaatctagcatcattaatataaacaaagttagagtgggaaaagatatttccagtgcatgtaattgataaataattaatatccaaaaagcactacaaatcaaaaagaaaaaacaaagcctgacagaaatgaacaaatagtaattcataaagaaaaatattcactgaaaaactgtgtggcattactaacctaaatgagacatcatttcactcatgttgaactagcagaaatttcaaagtctgacagtaccaagcattgtgaagaacgttccacaatactgatgggattcttgacactaccacttcatagagcaatttggcaatatctggtggaagattgttcatatctttttactccacttctgggtagatttttcatggcagtgtttttcaaactgtgggttggggcccactggtggctttgagatctatttgatgggttatgaccagtattattaattttaaaaaatgagatagaataaaaatcatcagagcactttgcatgtagtaagagtaacttgtttcataaacttttgagttgtggtgtgtgtatttgtgcgagtactgaatcaagattgaaaatgttttctcaatgtggggcatggtcattttcacacaaagagaattatgcaaaaatgttacttagagcattgtttgtagtaacaaaaaactagaaacctaaatgtctgtaaatgagaatttttaaattatagtatattcttaggatgatatggcagttaaagtgaacatattagagctacatctcaaggataactccttttttaaaaaccctact

SEQ ID NO: 38878 - DNA, 1761 bp, Homo sapiens
ctagacttaacctggggtgttgagctcagccattgtgttttttttcttctttcttccaacaaacctctgggtaattttgatatattgtaagtttgagatcccttggcctggcatgggagggtgatgtgggaagaaatctgttgaatcacgtagtttataattccaggaattaaaatagttcagatacatctggatttgagtgctcaatcctagtgccaagagggatagaattcccagcaattctcacaaaagttcagaattaattttgttgatctagcctagaatgtgataatctgattcgctagacatgaatcatttgcccactctgtgctggggagtcaggtgaactcccacccccatctaaaccacaagaattaaaagtaggggaaagaggattctccagaagaaaaagtgccattatgagtagagacactgaattgggggaagggggtaggcaaaaataactgatacacataaaatagcactggattacagagtagccagtctgtaaactgttactgtttttcaagaagacaatgagcttgtactataatctaagttgatataccacttccttcattggaaggccttgctacaaaaacagtgtgacctgtactaaatattcctttcttcgtgtgtttagaaatttcctctgttatttgtttatatgtttctttacttttttccttctctcctggaaatctggttacatagctattagtgctcctaaagtttcatgtcttttctcagcattttcatctgtcgtcttgctttcttttgtaagatcattattttgaacattaattgaggtcttctagaacatcgactgacttctcagatgtgactgtcttctttcactgttttttttttctatttagtttcaaaatttgagatcatgtttttagttccagagagctttcttttctgtcctaaactggtttatgttaaaaattatcttcagatgtcagtgggagccaggttttctaaaagtgcagctctctctctcaggttactttgtccctatgaaatactggagtttttctcccctctcattgtggtttttcttcctttaacatgagtacagaggtggcttttagcctctcttaaacagagacaaacctctgatttatggaagtgatttgtgatttctgctcttgtgagctgacagtaagcaaactatcaaagcccaacccctctgctatgggagatgggggttgaaggatggaagaccaaggaaagaacctctgaactgtcctttgctcactggaagaatatattccatttgccaaaggaacaaaaaagtgaaaatacctaggaataaagcttaatgagagatatacagagtctaaatgaagaaaactgaaactggccagacgttatggctcatgcctataatcccagcactttgggaggctgaggcaggtggatcacttgagatcaggagttcgagaccagcctggccagcatggtgaaaccccatctaaaaatactaaaattagccgggcatagtggcgcacgcctgtagtcccagctgctcaagagcaacagagtgagactctgtctcaaaaaaaaaaaaaaaaaaaaaaaaaaaaaaagaaaactaaaactatacaaagttagtataaaagaaaacacatgagtaaaactaagctcagtatgaagcctaccctgggatatgtttgtttgtgtatgtgtgtgtatcctattcaaaatgaaatcttttcctccttttatttttataaacttaataagattgataat

SEQ ID NO: 38879 - DNA, 1032 bp, Homo sapiens
aagccagccaacttgccttcctaaacatgtcctctacttttctacttcggtgttatactcaggccatttatttgcctggcatattttctttcccatctctgcatctatttaaaccttactcatttttatttttattctaatgtatttatttattttagacggaatattttcttaaatggtactgctccttgcggagcagggctgactctgaggcagggctctcagagtcagcctaaaccttactcattttaaaataacttttaagtactatgttgcagccaggccaactcctttacaaagtcatccctctcgctctcagtaattgtgattgtgtcattgttctgttttgttttgtttttgattatgtcatttttggaaaagacataacactttctatcttacagcatttaacaaaatctacattttattagccattgctataccaggaagaacagtcgtcagcaacagttaccatttgaccccaatggactgttttaaaatatatttttaagtgatattacaaataatttagaaatatataaatcaaatcctgctttaaaaactgcattggaaattagcaagaatttaacaaactcaaatgtttcttgcatgtgtttctggtatgaagatactaattttcataatgggtgatttccgttgaatgcaagtaattctgcatgaatgatcctggaacatacctattttggaaatactgattcagttttcaaatacgtttctaagaggttccagcttattgttcttggtggttcttgcatttacatcctcaaaatgaaatacttttgaaagttttcagggctcgtaattttgttagaaggtggtcattttctttagcctatgacaaaacattttcatttttagacattgattagaatgatcaatttgattgatttttttcatttctatgttatttcctttcagtcagtgccttaagcatttgtccacttatgagccatatttcttatgtatggtttcttatgtaaatttcttagtacaaacctcataaaaggtaaa

SEQ ID NO: 38880 - DNA, 1047 bp, Homo sapiens
gatcaaaatgtaaggaaaccaaaattatatagcatccttaaaaataacttttatagcccaaatctaatggtaaatgcacagatagagggtaattgaagatcccatttgtgaaagtagaatactgacatcaggctcctggtcaatgagtgggcaaaatggttccctgaattggataacacagtgcataccacggtgactgataaaattgatgtgtctgcaggagagccagccctattactgaagcctttaacctattttctgtctctttgaaaatgagctcctgagtggaagttatcctcaaggaagtgaatttaattcaaaagaagatattttatagatgggcaactttaatttaagaattcacttatctattgtagaggagaactgtgtgggaaaatatattattataagtaatgtggttatatttttcaaatatgtcattttttagtgttattttgagaacctgaattttaagcattagcaagtaaactttattatttaatcttacactctcttagaacatatggctgaaacaatattgaatctgcactgtaatactttattaagatatgtaattatacaatgaataatttaactacaacatgtgatttcttgtttttttttctctttttgaaaatatgattcagtctgtcctaagataaatacttgttaatcattgcaaagaataaaagcccatcttataaattcattattctaaagtatataaggtaatattgctaactggagaagcaggcaatagttaccctaatttttgccaattaaaaaattcactgttcaatttatgccaggagataaaatactaaatatcctatatacactgcttagtaggttgttagtaccttagtagtttgtctatgaaatataaggtagaataaattattaagtttgatgttctcacacacatacaaatatgtcatcataattcacttcttgttgtgagtctggacttaagccaattttctcagttaacactttttttgttgttgttgttggagatggagtctcactctgtcgccaggctggagt

SEQ ID NO: 38881 - DNA, 1027 bp, Homo sapiens
ccagatgtgtggatgatgcagcaattgtgttgggtatttatataattctatatcatttgcaacagcttctctataaaacaatatatctgtcattcataagtattgctccttacaggtgcactggccggacctgaccccagggactctaccacagtacatgaacctattaataaaccattcatgcttcccagtttggcagatgtgagcaaactatgtataggaattccaaaggtaactttttcctttcattactttacagaaatactgtcaagtccaatagagagcacagacttgggaggcggattgggtgggtttgaatctctgctctgccacttttattaatcatgtgagttgagtatgtgacttaatctcttttagctcaatttccccatctgtaaaataggaataataaaaatactgacttcagagaggtttgtgaggatcaattagacagtcatgttaagtctgtaaattgtttctgtaatgggcaagatagcaaatattttagattttgtggaccatgcagtctttatcataactgcttaactgccattatagtgagaaagcagccacagacaatatgtaaatgaaaaagtgtgtctctgttccaataaaactttattttcaaaaaccagctggcttgtcacatctggcctatgggccatagtttgcccatccctaatgtaaagaaaggactttagcccaaagccacaacttgcatagtaatgcctcaaaaaatgttaacatctttactgttattattattactactgcatctattacagtagcaattgagtaatgaatacatgaatgttataatgttaaattactaaccttttaaaaatattaagcattgcaatatattaatactttaaatcttttaggaagataagttaccctgcagaataatgaagtttcacaacctcagcactgttggtgtttggggctggtaattgtttgttgtgggagactgtcctgtgcattgtaagatgtttagtagcatccctggcctctacccctacatgca

SEQ ID NO: 38882 - DNA, 1038 bp, Homo sapiens
aaagcacatggggggctgaactttccctcttagaatggcaccaatcccactcaagagtggagttgttatggcccaatcacctcttaaaggccccatctcttaatactgtttcagtggcagttaaatttcagcatgagttttggaggggacaagcattcaaaccatagcacagggtaaatcccatctccattactctatcttggatggaagcagttcttcttctgagccatatttaaagtaggaagaaatttaatagaaaacaagtatttgttttgttttgttttgtttttttttgagacggagtcttgctctgtcgccaggctggagtgcagtggcgcgatcttggctcactgcatcctccacctcctgggttcaagagattctcctcctgcctcagcctccccagtagctgggactacaggcgcccaccaccatgcccggctaaatttttttgtatttttagtagagtcaggatttcaccatgttggtcaagctggtctcgaactcctgaccttgtgatccgacgcctcggcctcccaaagtgctgagattacaacatgagccaccaggcccagccagtatttgttctttataaaattcaggttttggaatatggtgtttaaaccacttaggtgttgtcagtgtgtaaattatatgtgatgcctgcattggtctctctgtagacctggtggtcaaataagagtaaggacctatgatatttctgtaccactcttttagagtaaaacatatttcacgtttttatcgtattttatttggccctcagtaaaactggagcaggtatatccatttttactgttgtggaaactgttgtggaaaagaatggttagttctttttttttttttttttttttttttttttttttttgagacggagttccgctcttgtttccagctctccacgctggagtgcaatggagcgatcccagctcactacaacctccgcctcccaggttcaagcaatgctcctgcctcagcctcctgagtagctgggattacaggcatgagccaccacgcccg

SEQ ID NO: 38883 - DNA, 1025 bp, Homo sapiens
gtgagtatccctgttgcactctcaaaccaagggttgccaataggactgcagtttattggacgtgcgttttgtgaccagcagcttcttacagtagccaaatggtttgaaaaacaagtacagtttcctgttattcaacttcaagaactcatggatgattgttcagcagtccttgaaaatgaaaagttagcctctgtctctctaaaacagtaaacatatcttacaaattaaaatgacttttaggctgggtgcagtggctcacacctgtaatcccagcactttgggaggccaaggcgagcggatcatgaggtcagaagatctagaacagcctggtcaacatggtgaaaccccgtctctactaaaaatacaaaaattagccaggcttagtggcgggcatctgtagtcccagctactcaggaggctgaggcaggagaatcacttgaaccctggaggtggaggttgcagtgagccgagatcatgccactgcactgcactccagcctgggtgacaaagcaagactgtgtctcaaaataaataaataaaataaaataaaatgacgtacagagattctatattctagagagtcaaatggtcttgctcaattcttgtaattaggttcttgttaatacagtcattccatggaattactttttaaaattcctgtgacaattaataataaataacgtgtcagcatttagtaagcatccactaagtgtacaatacttctacaataacacaagatacctgttcctcaaagacaatgcattctgccataatgttcattaaagagtttacagtaaaaataagattagggataaacttctcaaaaattgtacatctgtgtaactaaagcactaacaaaaacatgaatagtccttctagaggtaacttggatagcctaggcaggcaacttatcatgtggtgaaggccgcctcaggggttgttaaaaatgcacagaaacaattgagtgcgattattggcttctgagcgctgagcagagcaggtggaagaggaactttgagcacagg

SEQ ID NO: 38884 - DNA, 1050 bp, Homo sapiens
gcaattgttttgagtatatttctatattttaaagcactttacctttaaaaaaaatagatttgaggccggacgcggtggttcacgcctgtaatcccagcactttgggaggccaaggcgggcggatcacgaggtcaggagttcaagaccagcctggccgacatagtgaaaccctgtctctactaaaaatacaaaagttaggcatgttgatgtgtgcctgtagtcccagctactgggaggctgaggcaggagaatcacttgaacccaggaggtggaggttgcagtgagccgagatggcgccactgcactccagcttgggcaacagagtgagactttgtctcaaaaaacaaacaaaaaaaatagatttgagggtacaagtgtagttttgttacgtggatatactgtatagtgatgaagtctgggcttgagtgtacccatcacccaaattgtgtacattgttgcttttttttgttttgtagcaaagtggaagatgctttctacaaaggtgaactcaggctgaatgaggaaaaattatggaagaaaagcagaacggtgagatactaacctaaaatgacagccagatgttttcgtctcttactctgctagtaactcaattaatgctgtcccaaattttccctctggctcctcttctttctctgaggtcctttgtggtcctccacgtcaagctggtgggaatcagctacaggcttcagacacacaggcactttcacttttgcagccttaatgatcttctgatgaagcttctcccttttaaaattttagaatacaccactgttagaactggcagaaatccattaattaaacttccaggtcattaatgttagccctcatggaatcctcataatcagatttcaaagaaacatttgatccacgtagaattgttctttggccagtggtatctgagcagatgtgtaattctatacagctcagcagtacccagtgagtgcttgctggatgcacggctttgtgtgcagagcagttatagaaaaggatgtgttctgtattttctgacaagtccatatcaatactgtt

SEQ ID NO: 38885 - DNA, 1048 bp, Homo sapiens
ctgggaggcggaggctgcagtgagctgagatcatgctactgcactccagcctgggtgacagagtgagactccgtctcaaaaaaagaaaaaaaaaagtcctttcatattgaggtcttagatatgtcattaaaatccatttacctgtcaaaatcacttgtaattgtgtttgtctactaattactaatgtaattggtgtatcatataaagtttgccttattgtgcccctgttctcctttggttgattgttttgtgatacggaggggtccacatttatttcccaaggaccaaagacatattttacgtaggccaagtgggaaaaaaagggtaactaattttgtaaatgtagagtttacgtttgaatatatgcccagtggcttaggggaggggagatgatgatgaaggtatcagtaaggtagtatgagtaagtgacaagtacatggggttcagattcagacagattgggttcaaatctaggctttgtcatgtaccaccctgtgaacatggacaagttacataagctctcttcacttcagttttctcatctgtaaaatggggatcccagccctacctcatgtggttgttgtggagatgagataagaaaatgtatgtaaggccgggcgcagtggctcatgcctgtaatcccagcactttgggaggctgaggcgggcggatcacctgaggtcgggagtttgagaccagcctgaccaacatggagaaaccccatctctactaaaaatacaaaattagctgggcatggtggcacatgcctgtaatcccagcttctagggaggctgaggcaggagaatcgcttgaacctgggaggtggaggttgcggtgagccaagatggcgccattgcactccagcctgggcaacaagagtgaaactcctgtctcaaaaaaaaaaaaaaacaaaacaaaaaagaaaatgtgtgtaaagcccttagcatagtgcctgcctcacaaaaccagaccttttttctttttttttgccctagagttatcatgcacataaattgtgcataaaaaggtgtgcatccaaatgcaaatt

SEQ ID NO: 38886 - DNA, 1030 bp, Homo sapiens
ctgaatactttaaaatgaaatgaaatgtgaaaaaaagagggaatatacttctctttatgcatttatgtggcagtcttgaataaagtgtcttttacctcaaatgataagtgcccttattctcatttcttaccatgtttgcacatgtgaagtaaaaggaagagcctgtccatacggcacagacaggtttgtgtggagcaacataagatcgatcccctaaaaccagcttgatttcctgtgtgcagaaatgtcttatctttctttgaaaacaatgaccatttcctgtcctccaggatggtttgcttttcagttagttttccaaatttgagttccattatagtcagggaaatatgatatatattttcaggcaaatcttgaaattcctaaggggttataagaactggactctaaggaaccattagcttaacggagaatatggaaacagtcacgtgatctgctaacctctatgtatatagctgagtaacccacagttaataagcatgttactttttggctcttataattctgacatggagttgtacttgcagggaaatgggaatgagaatgtggtttgcattatggtcattatttattttatctgttattcaatattcttggggcttgcatatgatgatgtgttccaaatagccattgagaaaacaggatttaatcaaaattgctttggactttatttatttgtccaacttttaaaatatgattattaaataaaattacctagagttaatgggatttggatgacttactatttatgtaccagatgcaattctcaaaaaaaaaaaaaaaagaaagaaaaagaggttcactgaaccctcagttttcccaatcacttaggataaggacaggaggaattaacgatgaatggcagaaatgtgagtacttaataatgtaatgatataatctcatcatagctaatagtttttgagcatgtattatgctagtagatttatatcatttaattttcacaactctttgtggatgctattattaaccttgttttacagatgagaaaact

SEQ ID NO: 38887 - DNA, 1031 bp, Homo sapiens
cttaaactacatacataaagtactaaccataatggaaaaagttaattacatataatacaattaagaatgtttgctgattttaaaaaatctttcaggttgcttggtggatacaatatgtgttgttccagtgatggatacactgaaggccttgaattcgccatagtgcaatatatcaatatagttaaattatactcatatcccatgaatttatacaaataaaaaaagaaaaaatctttccaaagaatgaaaaagcaaatcactgagtaccagatgaagtttgtaatgcatttccctgtaaaagacttatattgacaatgtataaagaatctctgtaaataaaaataaaacagctcaatagaaaaataggcaaaaaatgtaaacaggcccttcatcaaagaaaatatccaagttatcagtaaacatgaaaagtttttcaatctcattactcattagggacatcagatttaaaatcatagtgagagaccggtaaacacacatgagaatggctaaaatgaagaagattgacaataccaagtttgaggaggatatggagcaactgggactctcatgcatagctggtgagagtgtaaatacatgtaaccactattgaaagctgattggcaatatctattaatgctgaacatacacatatgcaataatttatacaattaagtgttcttgaaaatgtataatgcaataattctatcttaggtatgtgctcaacacaaatgtgtatatatgtgagccaaaggcacataaaataatcttcatagcagcatttattcataatagctaaaaactgggaacaacccaaatgttcaccagcaatcattaacatacacttgggattccttagatgggcttaggtgggtaagtgtaggtcatgaagttgactgtggaactgtgtgtatatcatatgtgcacaatttaggaaaggctgtttttttttttttttctcaaaaagatccttgtctcaaaaaatgctaagaattcctgcctgcatacgagacctagatttccatagtttttaa

SEQ ID NO: 38888 - DNA, 1067 bp, Homo sapiens
aattaggaggagtttaaaattttcttagaaactatggaaatccaggtctcatatgcaggcaggaattcttagtatacacaatttcacagtcaacttcaggacctacacttaaccacctaagcccatctaaggaatcccaagtgtatgttaatgattgctggtgaacatttgggttgttcccgatttttagctattatgaataaatgctgccatgaagattattttatgtgcctttggctcacacatatacacatttgtgttgagcacatacctaagatagaattattgccttggctccctccattcccccactgggtatccaacacccaaggtgcacctagtaaggatgcttttcttctccttgtgctgaggtcccaggtcagacattttattctagtgagcaaaacagatatgctcctgtcttaacctggctcatagtctggtggaagagacagacattaaaacacacacacacacacacacacacacacacacacacacacacacacacacaaactcaatcaagtctgagaattaccaagtccagagtgctgtcggatctgaccaggtttggggtcagggaaggtctccctaggatgaggtttaagataagatacaaaggactgaattcatcagtaggactaaactggcaaaggattttagggttgtgagggaggaagcagcacatttaaaggctgagtggagggagggcctcaaggaagtgaaagaagccagaatccagaaagcagacaggtgtgaggctggcctggtcttaggagccatggagaccatgccaggagtgccactttcttcttgagggcagtggatgccactgaagagttttgagcaggtgagagcagtggtcatattggtgtttcagaagaattttctagatgcagaatggagagaaggaactacatgacagtgagttagaaggctacttgtagtttgggcaagaggtattggtggcttcactgggattgagggtaacaaactccatgaagataaggcacctagaacagtgcctcacatataagtagacttgataaatattcatcgaatgaatg

SEQ ID NO: 38889 - DNA, 1028 bp, Homo sapiens
gaacatgagattgcacagaactaaaacaaagggattgtggttagctgttattcccatttataaataggaacagtggtgccattacagcagcagatagctcagaatatagtttcctcagtgtaagtggcctaggagaggctggccaaggactgtattggatgtggggagctagatgctttggagtagaagtctgatgggatgaggctgctgttacccatcaagagttaactcgtccacacattgaagctactatctttgtggctgaaaactgtgtctgctaaacagaaggaaaagagaagtgttcagaagaattgtgacacagtctgaggctaaatgcttcaagttcaggtggccaaaggagtagaagtcttgaagactgcagctttcaccattattaattaatctatttatttatgcattcaacaaatatttgttgaacagtaactatgggagttgccgtggccaacaaaacctggtccttgctctcatgaagcttatagtccattgagggacagatgtttatttaaataataacgcaaatgtgaagtcgtcactgtggcaagtgccatgatagtattgggcacagtcccatgagaacctttatcagggtgagttgacttgtcagaagatcttgaagcttccctgagtaagtggggctagcactcaaatctgaaggataaagaggtgttaagtaaggaaagagagaaggaagagcttattgggctgaggacaccacagtgtgatttctaattttggcattgatatgcgctttctttgctaatttcatgttctttatgaaggaatggcgctttacccacaaacaagagaacaattgaacaaacaaatattccctggaatgataaccccatttatccatttgtttgcaaattcattcattcattcattcattcattctaccaatccttggggattagttgcttgcctgctggcctctgcctgctctgacttttcgatcagcttcatggactatagagttagcacattaatactaaatcatttcggagagt

SEQ ID NO: 38890 - DNA, 1079 bp, Homo sapiens
ggacatggatattgctaatgagaggtatctgaatctctcttcagatgccagatgggagagatgacccttataaggctagctacacctttacctgcctcaggtgactgtgaaccagggactgcagttcagctggagtcagcagcctcctctccagatctagtagctcctgaaagccacacataatgacagtcatttccaaaagaggctgattttaaaactgtgctgaaaatggctaacagcaggctgaaggttaaagtaaaaaacttaaaaaccataaaatctgcctggaggctatttaagcaaactgttttagaggcacagatggttcatatacctctgagccaaaaacaaaaaggaaaaaggggacagtaaagctggcgtgattaagcagacaagtatgaaagttttattagtactaaaaaggcatcctttagaaagtaaaaaatccgtctcaggaaatttggaagacgtattaaagaccaatgggaaatggagagggcacacagatgacatttcggaaagcaaccaaaaatagtgaagactgtacgcatggacattggatatcagaagctgtgctccaaggaccttaggaagcagtgtaagagaaagatgccgtatatgggcaattgggagtagcttccctgtcctgtatcaatctgtgatgtagagcaggttttataaggattttttgcaacttaaacagtggtttgaatctttaaggaaaatcagttgaagcaaatttgagaagcttaagtgctgtaaatcagagggtccaaaacatatgaaggaaataaagtatgatgttgctgatagcattaaaaatagcacgtatacttgagagtggagaagtcactggggtgcaagggcatccagcctctctcaagggtctgctttgctgcatcctggatgcagtcctccaggtatcttcccatgagcatgctggcgcctgcactcatgtgcacacagaaagcctctggatttgaaatgggtgagtgtccattatcataattttgagaaaagccagactctaaggaatgacagaacagtacaaagtttgcagggtcactatttgaggaggc

SEQ ID NO: 38891 - DNA, 1044 bp, Homo sapiens
ttattcagggggcagcagtgggggagagggtggcctgatgtcctggttgtctatcagagggagcccagaaaaagacagaaaataactaattcaaaatgaccctttcacagttaaaataatggtacgtgccttagaataaccattcttttctctcctctagtttgtctggtggtttctacttagcagcttcctgccttcaccctaccaatctgtttttaaaaaacaggatttcaggagccttacttatccttccccagcccaagaggtgttcagatatgttcatgcagctctctcctgggtctcctgtgtagatcctggtagtaaagataggagtagccctggaaggatttgagaattttcacaggggtctgttacaggactgtgtgaagccagggtgagaagtcaaccaagtgtgaatcttgaagtccacctgctccctttccagggtctcacctttgtccacccaatgacggattccttcctctctggattctctccttcaagtacctgactgtccaggcccaccctccctttccccaaaacctgacctctggagccttcctgacccctaacaggtagcatcctcttcatacacctatggatactcacggtttctcccatttttaaagttttcactatattagatactgggctaagcattttatattgtttaagcctcataatgccctgatgacaaagatgttagtgtccccattttacaggggaggcaactgagactcagagaacttaacctactcaatcagacagcccaggagtgaccgggctgggaatggactcaagtctttttccccaccagactgtggaggtgggtatacatggccatgttcacggcctctgttgggttctgcttctcatcttgtctcctattgacgcaactgaaatctctggaaaagcccaaccaccttttcaggcttttttacttgagagactcagaaatgtgtgcttccagctgggaagcagcagtgagaccattgtcaataatatactcgctttcagtttcataaacacttctgatgcatgccc

SEQ ID NO: 38892 - DNA, 1016 bp, Homo sapiens
gttcagagtagagaaaaacagaacattccaggccttggcttaaggaagaatgagagctaatgaatccattcgacatatatttacaggattgtttgttatataagggacttcatacataatgcatggtctctgccgtcaaggagtttcagtctggtagaggaaataagacatggatggtaaccaaggagtctcagacagacctgggactctaggagaaggtgagatatcagaaacagggaacaaggtgcacagttgcttaatctaatcaaggaatggacttttgaggatgagaatttgttgggcaaagaccagaggatcaattcaacagggacgtggaggagagaaacgtggggcaaaaagatgattggccaaagtccaaattgagtgcaagatcttctgtgaggccaagaccatggtatctaaccaagtaggaggagcaggtgttgggcagaagtgcatcgaatagttggtgaaggtctaggtgtgaggcaggtgtgatcagatagctccaggagagccgtgctgagactcgggtatggagaagactcctgaggttcagaggcagaacactcaactggtagggactggagtgtaaggctgaatatccagcgatagcgttaaaggatagaaacccattcatttattcattcgctcactcggtcatttatggaacccttataatatgccaggcactagtccaggatctggacatttgaagctggtcagaacgcagtttccacactcaaggacctgtttgattagtgggagaggcagacacacacatggtcataatgcaatgcaataaattggtgtggaatggaaatacagggacagagggtgcagagcttaggcaaggaccaggaggaagagtcactgatggcttcctaaaggagctgcagtctgaacgaaggcttaaaggtcacataaggatctgccagcagaaggagagatggaatctagctccaccagaaagaatgggagtgaaggacaggagacccagttgaagggcactaaga

SEQ ID NO: 38893 - DNA, 1040 bp, Homo sapiens
gtgcaatgaacaatgcgcactgaaaaactaaggtggtggtaattgccaacaaaattatttgattttggtttgcttgatattgttttaaatattacaccacaatgaatttgcatgttcaaactaaacaatgtaaagaaaaataaatcccaaattttgatacctaaaaggcgtactgcgtatttaaacaaacttcttaatattgttgttatttctggattcccgtttgttgaatgatctgagctgttatgctttttagctttttttcttccattatttgtaagtccctaaataggccattatatttcccttcaggctagagatgaagatggacatgctgaaaattttccccagcagcactatgctaaggaaactccaaggcttgccttcaagaataactgcgaactacttgtaagaataacatacttacaacaagtctagaatgttactttagcacagtgaaaacagtttttgaaagggtttgttcatgattacataattgatgaaatattatagttttctgtatagagttctaaatgctaattctgatatcactgaatattaattttaagatctcaaattgtttgcaaatcttttatatctgattatagagcttgaatggccctgtctttattagcttgttgtgtttagtagtttataagcagccacttggagaatggctagtaaagttaaaaatatagagaaagacagttgatatatgtagcttgggaaaaaagaacctcaccctcacccctcctcctacgtcctcattgtacactattttaggagacaacatggtaatattttgttctgctagggaagatagcagagttgacacgcagtactccctttagaattcaagtattcctccactctcttgccaaacttaatcgtctctcctatgcagaaggagtcaaagcagtgacagggtgcggggatgtttacaagtcgtgagagggaggatatcagctgtgacattgagactctgttccaatgcagggttaatttgctgttcattttagcatttacagccagacaagatg

SEQ ID NO: 38894 - DNA, 1059 bp, Homo sapiens
ctctccaattacactttattatcatgctcatctccgtaaatcaccctattggagaagaggaggatggggggagggagaagagattaacttgggacacctaaatgtgtgatcatgaggttgcagggcagtggtgaaatgtccagtgaacccatgagctgggccacctactaaatagagctggttgcctcattggcagaatgtcaccaaattttcttgataaggacgggattccatttgtaaagtgagaatgaaacctaactcttacatgcatatgtcaactgaacccaggccactgagtcctatttgcctggcagggtgtctttcctgttcatggggtctccttcctgcagtttggcaccaagcagcatcccccagggtaggcctcaagcgtcactgaccagctttgctctctcccccttttggggcccagcggcttagctgatgagttgctcacctttgcaggtaatgggaggcttcgatagggaagagggtggcattgctaaagtgagtgacactgcacatctctgacctcatagacagactcctgcctaatgccaagtgagccgccaagagtgagttaaatttttcaatattgggaaggggaactaacatgtgtgcctgtcataggcagaggtggcctcatttgctcctcctgccaattctggtggaataggcatcatctgtatctcaccaaggaggcagatgaagcttagatactgtgcccgaagcagagctggtacgtggggaagccgtattcaactcaggcctgttggacacagcccaagctctcccgtctatccaagcgggcatcaaacaggccaaaattcagttgagtttatcaacttcttatggagaggaagaggagagatgagcatttattgagcacctaacttgtacactgctccttccagggactagggagatacaaaggtaaatgatggcgtgcccccatctggtgggagtgcaaactccaggaggaaggaagcgggggccaggagagtggatctcgtaagatgaataattgctcacatttgtatgcaggctgtcttctaagtgttt

SEQ ID NO: 38895 - DNA, 1042 bp, Homo sapiens
tgacaaaaaaagtgacggccttcagaaagtcagaaagcattgggaattgtcactttaaacacattctaatatcactcattcaggtgaggctgaaaagaagaagaatgggagggtgagagattttactattataccatcattggagtgagaagtgaccaggtcaagaatagtgacactaacatatgagtagcttgggaccaaaataacataaaaacataaaatacacgatggctatttggatgatatatgtttctgaataaagaatcagtcttgtatgtggaccagaatcattaaaaatatcaacctggctccagccaatttcagaagatgtggtgatgaaattgcccactacctcttgagattgaagagttctttcaatgatgggtcccccaagaaattacagcttttctttaaaatcagaaatacagaaatactcaggctttgtcagctacgaaagggtgacaaggcaagtgatttaagatgggggaaaaaccacctctcctccactaaatcacatttcctcttgccctcagaagttccgtgtcacctcacagcacagtctcaacctgccacaatttactcacattctctggcccttcctggtttgttttatttatttatttagttatttattattttttgagacagagtctcaatctgtcacccaggctggagcgcagtggcgcgaccttggctcactgcaacctcggctgcctgggttcaagtgattctcctgcctcagcctcctgagtagctggggttatagccacgcgccacgatgcccagctaatctttgtatttttagtagagacagggttttgccatgttggccaggctggtctcgaactcctgacctcaggtgatccacccacctcggcctcccaaagtgctgggattacaggtgtgagccaacgtgcccaggccccttcctgtttttttgtgcacatgtggtgctgtttttcttctatgccttcagaaacccagaccgttcatatggttggggaaattggaagtgtatccactaaataaaggaccgtatggc

SEQ ID NO: 38896 - DNA, 1032 bp, Homo sapiens
gatctgccattgcactccagcctgggtaatagagtgagactttgtctcaaaaaaaagaaagaaagaaacggggagaaaacccaattaattaggtcctagttcatctcttatggtccaatgggaaatgcagattttaaatgttgagatacgatacatttctatctctgcccagagagttatccctcacaactatttctgcattttttaatatgtcaagtttaacactataattactttaaataacctgatcttccccgccccccttttctttagattttaaattattagtaattatttgtggagacgggatctcactgtgattcccaggctggtctccaactcccagcatcaaagtgatcctcccgccgtggcctcccatatgtgctgagatgacaggtatgaaccaccgtgcttggactgatctgtcccttgaactgcaaatttcttttctttcttgctttttttttttttttttttttttttttttttttgagacggagtctcgctgtgtcgttcaggctggagtgcagtggcgcatcttgtcttactgcaatctccacctttcggattcaagcgattctcctgcctcagcctcccgagtagctgggattacaggcgtgcgccatgacacccagctaatttttgtgtattttcagtagaaacggggttttgccttattggccgggctggtctcgaactcctaacctcagctgatccgctcgcctcagcctcccaaagtgctgggagtacagaagtgagccaccgtgcccggccaacagcaaccattcttaataacactaagaaacactggaataaaaagaaattacttggccgggtgcggtggcttgcgcctgtaatcccagtactctgggaggccgaggcgggcggatcacctcaggttgggagtttgagaccagcctgaccaacatggagaaaccccgtctgtactaaaaatacaaaattagccgagcgtgatggcgcatgcctgtaatcccagctactcgggaggctgaggcaggagaattgcttgaa

SEQ ID NO: 38897 - DNA, 1043 bp, Homo sapiens
ctcttgtcgcccaggctggaatgcaatggtgcaatcttggctcactgcaacctctgcctcctgggttcaagcgattctcctgtctcagcttcctaagtagctgagactacaggcatgtgccaccactgcccagctaatttttttgtatttttagtagagacagggtttcgccatgttggccaggctagtctggaactcctgacctcaggtgatctgcccaacttggacccccaaagtgcagggattacaggtgtgagccaccagacccatcccctgattaggtattaatgtgagtagaactaaccctcctatatatgaattggtatagtttattttttatttatttgtttatttatacatattttgtttctcttttacatgttacttgccaaggtacaatttattagtagtacatattactagttaagaaaatatttgtctttggacttactgtctgtttcccttaatactcactggttatagcgtttgaacttactttttttttttttttgagactgaatatcactctgtcatccaggctggagtgcagtggagcgatgtcggctcactgcaacctccgtctcacaggttcaagcgattctcctgcctcagcctcctgagcagctgggactacaggcgcacgccatcacgcctggctaattttttgtatttttagtagagatggggtttcaccatattagccaggatggtctcgatctcctgaccttgtgatccgcccgacttgacctcccaaaatgctggaattataggcgtgagccaccacgcccggcctgaacttacttttaattatccaattagatgaatatctttatgtgaacttatttcatgtttcttggatttttgttaatatttattatattagaaaagaatgtcatgcctatccctgagactgattatctttatgataatggaggattttgtggtgctggtgggagtatagcagtaaggccaaccaggggtcactctcatcgccatcttggttttgcctggcttctttactgcaagttgttttatcagcaagg

SEQ ID NO: 38898 - DNA, 1043 bp, Homo sapiens
tcctcccaccttagccctccgagtagcaatagttcctagtagtagtaatccctataggactagaggcatataccattatgcctggctaattaaaaatttttttttttccatctgtaaagacagaggtttcactatgtttcccaggctggtctcgagctcctgggctcaagagatcttttcacctcagcttcccaaagtgctgggattacaggcgtgagccactgtgcttggccaaaacaatttttatttatcttatttttattttttttagagatgaggtcttgctatgttgccaaggctggagtgcagtggccattcacaggtatgatcatggtgctctgcagcctccaacttttggtttcaagggatcctcctgcctcagcctcccaagtagctgggactacagatgtgtgccactccacccagcctcaactttaaaaaattaggtattatttatttatttatttattttgagacataagtaaatatgctctgtggatggtagtctcaggcctgttgtgttaacccttttctgcacattatttgtactaaatataatcctctgaagtgaggctgttgggaaataggggtggtgtgggtatgtgaatgagggggatatgaaaagggtgggactttgtgcccccctttccacttttctctttaataaattgaggattctatggaagattttgtatgtaaaaaaggtacagctattaaaaaataaagttggaaaaccactcctttaaacaatgagacgaatttcaagccaaagattgataaaatcacatttggattttagtaagatcagccctggagttggcagaagatatttgacagatcatggtagtggtaaatttggcacagtggtggtgatcagagtcatacatcagtacatggaggctatacattgatttgacctaaaatagtgggacatcttgaagggagtggcccgccggtcaaagctggattaaaagattttctgatttgcaattggttaaggaaacaaagctttgtctaaaaatttcgggtcaacagaaaagaat

SEQ ID NO: 38899 - DNA, 1034 bp, Homo sapiens
cctcgtgctctgcctgcctgggcctcccaaagtgttgagattacaggtgtgagccactgcgcctggctcataaattccttttctttataaattactcagtttctgaagataaaactctgactttggactgtaaacctttgtcttgggtatgaaaccttgacattgttgaaagaagagtggaaactgtaagggacaacaagtttcaccacagcacagtcttctttctctgataggccatccgaacagctaaggagaagacagatcactcaagaacttaagttgtttattagctacagcatgtttgctgctttgatacacattcagccattttggaggaaagctaagcagtactgactgcccattttcgtgaactttaaataacaaatactatttctcaaggtcttcattttatcattaaattcagctaattactacctgtttaaaaataaataaataaataaatttcagaatatctgaaactcaatttcagatattctgttataagcgacagaaaatgaactaagacatgtgctaagtaggatttatgattttatgaactttggattttgttttcaatacagttgtttaaacttcattataggctgggtgtggtggctcatgcctgtaattccggcattttgagaggctgagatgggaggattgcttgaggccaggagtttgagaccagcctggccaacatagggagaccccatctccaccaaaaaaaaaaaattagctaggcatggtggtacatgcctgtggtccacctaattgggaggctgaggtgggaggatcacttgagcccagaaggttgaggctgcagtaagccgagatcgtgccactgcactccagcctgggcaacagagagagactatctcaaaaaacaaaacaaaacagaacaaaacaaaacacaaatagacttcattatggtggacttattttttttccctcattatactcctaagaaactttctgtaagtctatgctataatattaaaataaagtataccttcttcataagataccaaatttat

SEQ ID NO: 38900 - DNA, 1034 bp, Homo sapiens
ccttctttttctaatttgtttactgctaccttgcattgaatgtccgttttgtatttccagatttagctaatctaataagagagaataatttagttcacaaaagtgaacattagagattgccccttaaaattcttcaggttcttgaaattacagaaaagaaggtcaaactattctttttcttagttcattggctaattggtacttttgagaccaatgtatacttacttcttattttgaaagcagttataacagacacttgatcaattttatgttcctgcacctttgggcaccattaatgattctcatcttgttgtcaggtctcattctttgcctcctgagaacatctacttccagtaccttcactttcatattaagtcatcgctaaaatcaacaactttgttcctcctgttaccttaaccacctgaccataaatggagatggttaaagaagcataactgcttccacttctgtaaaagcactttttttttaaaaaccctatgaatgttgttggattttagtttagaaaatacagccatatggtaactaattgaagggaagcatattacaagttattcatctgagtgtttgaaagcaatagaaaagatgtgatagtatgggatgttcatatagtttgggtaggtggcaacctttgtttggaaacatccttataatatagagaggggaagagaaaggaattctgaaatgggaagtgagacgaacattttggtggctataataagtttagttcagaccacttataaaatatgtaatcggccaggcatggtggctcatacctgtaatcccagcactttggtaggccgaggcgagtggattgcctaagcccaggagttcaagaccagcctgggcaacatggcaaaaccctgtctccacaaaaaatacaaaaattagcctggtgtggtggcatgtgcctatagtcccaattactcgagaggctaaggtgggaggatcacttgagcctaggaggtcaaggctgcagtgagccatgattatgccactgcactccagtctgggca

SEQ ID NO: 38901 - DNA, 1065 bp, Homo sapiens
gatggggtttcaccatattggccagactggtctcgaactcctgacatcaagtgatccacttgcctcggcctcccaaagtggtgggattacaggcgtgagccactgcgcctggccggtagttctgttttaagttttttgagatgtctccaaactgctttccacagtggctgaactaatttacattcccaccaatggtgtataagcattcccttttctccacagcctcaccagcatctgttattttttactttttaatacaagccattctgactggtgtgagatggtatctcattgtggttttcatttgtgtttctctcgtgattggtgatgtggatttttttttatatgtttgttggccactgtgtgtcttcttttgagaagtgtctgttcatttcttttgcccatgttttaatggagttatttgttttttgcttgttcagttgtttaatttgcttatagattctggatattagacctttgtcagatgcatagcttgcaaatattttatccctttctgtaggttgtctctttactctgtggatagttgcttttactgtgcagaagttctttagtttaattaggccttacttacaaatttttgtttttgttgcaattgtttttgaggacttagtaataaattgtttcccaagactgatattcagaatggtgttccctagattttcatctaggattcttatagtttgaagtcttacgtttaaatctttgattcatcttgagttaatttttgcatatggtgaaaggtccagtttcattcttcggcatatggctagccagctatcccagcatcatttattgaatagggagtcctttccccattgcttatttttgtcaactttgttgaatatcaaatggctttaggtgtatagctttatttctgtgttccttatttcattccattggtctatatgtctgttttggtaccagtaccatgctattttggttaccatagccttatggtatagtttgaagttggttaatgtgatgcctttggctttgttccttttgtttagggttgctttggttattttggctcctttttggttc

SEQ ID NO: 38902 - DNA, 1066 bp, Homo sapiens
acaaaagtagcagacaactcctgaattggaaagagttgttgctttcccccacaaactgtatgtggtaaaatatttctaaaattatcaagttttagtctaagtctaggaaatctacccaagatattttattaaatttatttaatttattaaattaaataaaaatatatttttattttattaaaaaataaaaatatatttaatattaaatatattaaaacatatattccatatatgtttggaaaaatttatttaagaaaattggctgtagtaacaggcactaaagttttatttgtaatggtgtttttgtgctgtgtcgttgcaattaataaatatctaagatgaaaatggttgtgatgtggatttaaaatacagtccttttccatcttcataacagaatgtagaccttgtattagtcagggcctatctatagaaaagtaattttaggtgtatgccttttaaaatattttctctaattatctcatataaaataaaaataaagatttttcgcgacatatgtaaattatatatttgtagttatctggaaaaaaacaagctattgcttacatgtaaaatatatactgtttaggacttgaattctcttctcttagaacaataaatagttatttttggttaaatcacaagatatcaattatttgatgacaaaaatggcttaaaggaagtgtgtcttaaatatggattagctagttctttgaatgatgagataaattagtttaattacacgtggcaattttcttggctagtgatgtaatgtgaaataaaattctccctttcccctccctgaaaactcaagccaattaatagaacttttaagctctttgtcataggccaccatggaggtctgcagagaagaactttaatccaataaacatttcatttagatcatgaaaagaaagcatgaggagaagctcctgtaagagagggtgttactatgattccaaccatgaagagatgtgaggaatttgccaaattaaccaagaggtcctcatattgaacgcataaatgtgtcaaaactaacagaatcattatttaatttgcttgaactcta

SEQ ID NO: 38903 - DNA, 1038 bp, Homo sapiens
ttttcttcctgtgtttgtgtttcattttgggtagtttcttttgcagtgtctaatctgttattaattataatccagtgtatttgtccatgttagaggtggcatttttcctttttaaaagctaaacttgggtttctttcccttttcttttcttttttaaaaggcaaagtcttgctatgttgcccaggctggtcttgaactcctggactcaagagattctccccccttagcctctcagtagttgggactatagacacacaccaccatgctgcgggggtttcttttttatatcttctttgttcttatactcatgccttcctctaccttattgagtatatgcagcatatttataattgcagttttaatgtctttgtctactaatactatcatctatgtcatttctgggtctgtttctattgataagtttttgtcctttttatgagctgattttcctgcctttcatgctttttttttattgtgtttcagatactgtgaattttatattgtcgggtactggagttttttgtattcctttaagtactttgagactttgttctgggacacagttaagttacttggaaacaattttatcctcttgaggctaggctttgtaaagcagaaccagagtgcctttattctagggctaattattcctgaagcaatacccttctgagaattccacctgataccctatgctttagtaggactttcctctgactagagggaacatgaactattcctggccatgtatgagctccaggggtaatgctttgtgattccagtgggtcctctcccacctgcccgtttcaagtagttgcttatgcatacacagtttagtactcaactaaagactcagggaagccctctgcagatcactggacttctgtctctatatctttttttccagtattataccttgcaaattctagctgtgctagcctccccaaatgctgaattctattttctcagcctcctaaatgctgagtgtatttgtgtccctattcctgaagtctggaaactcactaggcagtaaattgaggc

SEQ ID NO: 38904 - DNA, 1768 bp, Homo sapiens
cattcactctggcgtttgggaggaggtttgggggctgggccgggccgtaatggcttctacctgtaaatgaacccgaagagagactctctaccgttccttatcatcctcttggggcacgggacacgtggtagggagagaggtgtggaaaggcctatgatgtaatgacttcctgcagttgggtatccaaagagattaactcctctgcccctgctgggctgctgatatccagctgctttcctcttcctaggcacctccctggccccttcccccaagacagtgtgtgtcagtaccaggccaaagagtcctgtgcgattggagatatacatctcttatcagctgcccatatttgcaatttagcttagatttttttttgttttgttttatgtaaaagaagtagttgcttcctccttccctttcttcattgtcattggggagccctctgtcttcctgggtttcaggaggtataaaaataagaacagtttaatcttagtggagaattcaatggaagcactggagacgagcctgtagatgaaaaagttaaagaacttaatgtagagaatgttttattttgcttctagaaaacccttgcaaagttaaatacggcttatatcagagaggctttgtattagatactttaaaagcaaaacacgtgtgctttgatattaatccactaatgtgtctcatttcttttaacaaatgcttacattatgagtcttatatttggtttaattcaattgctttgtaaaagaatgccaggtgtatgatacgagagttctttacagaaaggatgaaagttagacaattccatttgaaaagagcactagtgtgatatgttttaaaactgggtttccaagtggatgggaagggttaatcagtgtatagtatcaggaaggcgtaagcggacaggatctgagaacatggatttgggggttcgaaatgtttttcagatttctctcacttgaaatttagtcttgcatgtttgaatttggtgaggagaatacgttagtgaaaagttagttaactttaaacttagttaaaacgttaacgtaggaaggcgttttcacctttcctgtgatttttaaggttacaaaaataatttaatttcacaaatatttcttgttattttgtttatagttaaatataataagtttaatgaactttatttttggggggaagatttacatgagataatggtattaccaaaagtagccgcgaattgagattgggctagatacattttcatatagtttgtaggacttgcaatacagattttgggactagtcataaactttatggttttatgtcatcgtttttttgtcttatggttttttttttttacccttctctgctatctcatttctcttcaactaaaatcttagaaaatactgtaaattgaaattctcaaggcttaatatgcttaatacagggcacacattttatgattcttttaccttaaaattttttaccaattccatttctgagtgtcacatgacaactaatccttgacgactaaagggatataattttgttagagtttttataagatgatcttcatcaaaagatgcagccatgcaggaactttcaaatctttgatgatggagaaggccctttgaaactggagctggttttatattttgattatgactaataggcaacctttttttgtgtgtgcttgtggtttagtggaagaagagggaaaagggagagatcaggagctaattgtgacccatttccaagtgtccaagtttaggagttgattcttgtcatg

SEQ ID NO: 38905 - DNA, 1050 bp, Homo sapiens
aagaaggatagcattttaacaaaaagaggaagcccttggttacttacatttgtcagatactgtgtcagggagaaggatgatgactatctcacaggttcccttacctcgggcattaaagtagaaatgaacaatcagatgtggttaagaggggaaaaggttacatttcctttaattcagattaagcttgcactgcacccatgattgaacaagtgagttctctcagttcctcttgtcttggggagacctctaaggacgccagggcttacctggtaaggcctatctatcacttatttcgttatacacagcacacatctgcttttcccatgggtcagggtgtaatcaaattaggcagacttgagtttctgtagtggttcccataatttcacaagtgtgggggatactgtgttaagatttctgctgctgctgctgctgcagaagataattcttcaagagtccgagtcttctttcatgtaagaatgtgtattgttatggcttcttgccaagataaaaagatgagggctgtcctgtcacataatgcttatttgtgtcctcactgtttctgttctttagattaatacatccagttccttttcaacacactgtattaggaaaatgttattttaactgcaactctgttttaaatttttttttaatttgaaaatgactaagtcataatcattccacattggctcataattttgacctcagtcaccttttggagtaactcaccaaaaggccagttatggtcgtgtgtgaagaatctgtctgcttggcccgtgttgccaaaatgtcgttttgtaatttcctttggcaatagtgtcttcgtcagtgattctcaactaatatacttcctctttctacagccccagtacactagagggactgtttttcctctttttcaaagctgtgtcattgacctctgaagtgaagaaattggcccttttagactttgatctgtgagtcccatgtaacagagactctttaaaaaagaagctaagtgtgtgttttgatatgtttatctccttcttagaaaatgaaatgaaactacag

SEQ ID NO: 38906 - DNA, 1061 bp, Homo sapiens
tggctcatgcctgtaatcccagcactttgggaggcccaggtgggtggatcacctgaggtcaggagttcgagaccagccttaccaacatggtgaaaccctgtctctactaaaagtacaaaaagctagccgggcatcgtggcgcatgcctgtaatcccagctactagggaggctgaggcaggagaattgcttgaacctgggaggcggaggttgcagtgagccaagattgtgccgttgcactccagcctgggtaacaagagcgaaactccatctcaaaaaaaaaaaaaattagctctgttgtggtggtgcatgcctgtagtcccagctgcttgagaggctgaggcaggaggatcccttaatcccaggagtttgagactgcagtgagcacgactgcaccactgcactccagcctggatgacagagtgagaccctctctctctcttttttttttttttttaaagcgtgtgttcataccactgtactgtagtgtctactgcctaccattgtggtttcacagctgttcatctcagtgctgtttgcctcaagttcttcaagctcttcacttgctgtcttctgcttctcctcccctcttctaggctagctcgcactggagtcgctgtgtttctccttttgtgttctccatcagcactctctacttaccttgctaaatgccttttctttcaacgccaccttaccctgcccaccccatggctgctacctgtttattttgtcattttgctaagactgttgaatatttttaagcacagtataagaggctttaaattagggaatgtgtctgccagacaaataagtgtttctaatatttggagctgctttttggattttataatcaacccatatggatagccttagttctggggctgtgactctgaaaggggctgatgtgactcaggagtgagctggtgtcatgagtggagtcttttggatacttgcagctctgaaggtggcatcagctttagacctcctagcatcgatgttgatgtgatgtggtgtaaatgtgagatgatgctgtgctatctggggtttcttgcagtgccttgtt

SEQ ID NO: 38907 - DNA, 1024 bp, Homo sapiens
agtaatgataataataaagacttatgatattggccgggcgcggcggctcacgcctgtaatcccagcactttgggaggccgaggcaggtggatcatgaggtcaggagttcaagaccagcctgaccaagatggtgaaatcccgtctctactaaaaatacaaaaaattagctgggcgtggtggcacatgcctgtaatcccagctactctggaggctgaggcagagaactgcttaaacctggaggggcggaggttgcagtgagctgagatcacgccactgcacttcagcctgggcgacagagcgagactctgtctcaaaaaaaaaaaaaaaaaaaagaagaattagcgcgtacctgggtctttaatgggagagtaggaatggcttgagaattctgtcagaaacctgttggtttggtgattctgcagttctctttggtcactgccaggtgtgaccatggtttactatgggtcagaggcacagtgtattatttagaagaatagagtgacgcatggtaggtagaaatcttttgggatggggccttatcgcagaaatttctgtgttgggacagtaggatatctgtgctttttataggcttcaagcacgtagatgaatgcaggcagcaacatcaagaaaagcagatttcaggaaaaaaaaacatttacaaggagttcttggcagaagttttgctgccaaatcagaaatcataatgaaagatattaaaattattttgtgaggtggtcgtctctttgcagtgcagttactgacgggtttaagagcaggctgccaagatagagacagaaaatgttgcataatgcaagttgctggccaggttagtgtttatctctactgaagagcctacttgcttttgtcttcaaggtaaaaatatgtatgaataagacctaaaatggtggttttaattggccacaggaaggcagtgccgtaagataaaatgtagttaacagaatagaatgctaattatcccattttgttctgtgtatgttggaaaaaaattacagaactctcagtt

SEQ ID NO: 38908 - DNA, 2059 bp, Homo sapiens
tccttctcactccccaaaaggcagaggttaagaagaaagttaaaatatcaagacacactaaactgtttttgtggtgagtcaagctgcagtgcctcgctgactgggaaacaatgggctgggcctcctagaatatagtaggctggagaaacagaaaatacagcttgactgggccttgccctctcactccaagcctcaacaggatgctagagctttagcatgctttctgctgtgctgggattattttctgcaactagacaaaaaacccacaaaactccacatggtttgttctcaagcaactggaatatggaaaggcttgaaggaatacttacactttttgatggaaggtaatgaccttagttcttcagtatttattaggtaagcatgggttctgcagtatagcatttaaaaattcatgttcctcagggtttcctaagacaaaatagagtgtgtttggtccagtgtgatggagaagtttgatgcaaatccgtcttaaggaggagaatggaggctgtcatggagtcctgtggactgtttcgcaagtagttgttttccatgttccagttttacttaacttcagaaaattattgtttttgaaaataaagaaaaaatctaagtggtagagagaaatataggctgtatttaaactggcctttataatttttcctgggcacacgcagcccacattttggagctctgtgacataagcaccccctgccccggagctgggagtcttgaccgggccaggccttggctgccctgggctacacagacacaagcacaacccgaatctttgtttacttcctctccaagtgctggggacattcagtactaagaaggactgtgtgcttgcacaaacactcctgccagcattctctcagccctgccattcctgactgtcttggaaagttcttcgtttaaggcaggcttttgttcttagagtgcatgcattattccccagtcaggcagccttttccgggtttccagtgcagacttgcaggtccactcccctgcagcctagcccaggggtggaaccttagctttagttgccattaagagcaggaggaggagttaggcaggggtgactggctgttcatgtgagttcctgtgactgatgtctctgaagaaaccaatgccttcttcagatccttatgggaaatttaggggacttttggattacacagtgttgccttttgctgattctaagatagagccttccaattgtaagtatgttaaaaacacacaactatttcctactgaatgttagtcaagctaaagagtgaatctgcaatttcatgaataatcaaaacaaaagcatgctgccaggatgaactgttgcaagagcaggtgctatttttttccagaaacttttttatcctcgatcacgttatgggtattaagagagttattcttaaaggatatcatgttcagtgcaatgtcttaatagaaaaaccttaaacataagtatgcaggcaaacacaggtacatagctgtataaagttaaatatgaagactggaattcattaataggatttaatttaaatctttttttttttttgagatggctttactctgtcatgcaggctggagtgcagtggcatgctcactgcagactggaactcctgggctcaaaggatcctgccacctcagcctcctgagtagttggaactacaagcgtgagccaccacacccagcacccacctttttttgagaaataatacagattgagcatccctaatttgaaaatttgaaatccaaaatgctccaaaatctgaaactttttgagcgttgacatgacactacaagtgggaaatttcacatccaatctcatgtaaggggttgcagtcaaaactttgttctgtgcacgaaattatttaaaatactaaatgaaattatcttcaggctatgtgtatgaggtgtgtatgaaacataagtgaatttcctgtttaaacctgggtcgtatccctaagatattttattatgtatatgcaaatattccaaaatctgaagaaatctgaaatctgaaacacttccaggtaatttggatgagggatactcaacc

SEQ ID NO: 38909 - DNA, 1530 bp, Homo sapiens
tagagctcatcctagctcagctgcctcccctgacagcagacgaaactgaggcccagcacttggtggtgggctcagagtgccaaactagttaatgaggcagagtagacaggcaacagccttctcatgtaggtaggcctcatcctttagaagatgttgctgcctgcccttgtgacttgtaaagatctgtttgaagcatgagtaaggagatgggggctcaggagtgttacagcatttcacatctcaggtgtagctgggacttatcgggtgaccttttagaaactgtttattttcatttttgtaccccacattgggataagtatggtccactgacattgagaataaccaggcctgttgtagacagccagccatcctgaaactactaggtttatacttcttacctgttagaacagagtttcccaagttgtattcccttggaaacactagcagtcgtgcatcatttgggcagttaggttacacaaaatttaaatggtctatttattttcttttccagacagaactcagggcagtcccacctcaagggaaatctcattacatccttctgatggtggggtagctgggagtcagcatgaaatccaaaattctaaatcatcgggaaaaagcagaagggttggaacccaaattaaactgaagtcctaaataaagttcacttttcggtcaggcattcaggaagcagcacgtgaaaatttgcttggatacagtttcctcatagttcttcagcagcttgaaataacatcttgagctggctgtaaacaaaacatctcaagttatcgtttttctttccatttgattgagccagttattgtatagggaggtgacacaaaacaaaacttcgtgtttctgaagccgagattttgggattgtactttatgcaaagttacttataagttctgattactttgagagaaaaatattacagtatccttaggaagttttatgtatttgttttaaagctaagcaccaccctctttttagttaaaaaaaaaaaaaagtttggaaaatagtgacatgtcagtacaaagggaatactgctctacaataagaaggaacacgccacagatacatagcatggatgaatgtcaaaaacattgtgagagaaaaatgcctgaacaggagagtaactattgtttgattccatttctgtggaattctagaaaaggcaaaactaacttatggcaacaggaagcagatcagcgattgccaggggtgatggggattggaggaggttgactgcaaaagggcagaagggaacttttcagggaaatatgaaatgttttatatcttaattgtggtggtgcttacactggtgtaaatatatttgcccaaattcgtgtaagcatatgcttaaaatgggtgcagttttttgtatgtaagttacacctcataaagttgatttgaaccgaaaaaaggggttagaaaaggctgtggttggaattttttgtgtaacttaaggccaaatagtccatttacgccagtttttacagtattgtaagctatgccctttgtgttcac

SEQ ID NO: 38910 - DNA, 1028 bp, Homo sapiens
gcctaggctggagtgcaatggcacaatctcggctcactgcagcctccgcctcctggtttcaagtgattctcctgcctcaccctcccgagtagctgggattacaggcgcccaccaccttgcccggctaatttttgtatttttagtagagacggagtttcaccatgttggccaggctggtcttaaactcccgatctcaggtgatccacctgccttggcctcccaaagggctgggattagaggggtgagccaccgcacccagccccccttctattgctgtcttatagcaacagctacctcctttcccctgcctaacttgacccctggcaaccattaatctgctcttcatttttataattttgtcatttcaagaatgttacataagtgatcatgttatatcatacagtatatggatttttgggattgactttttccattaagcctgatttcctggatccaagttgttacacatctcagtagtgtgttcctgtttgttactcagtagtgttccactgtatggctaggttacattttatttattcactcatcactcaatggacatttgggttgttttcagtttggggctattttgaataaagccttgtgctatgaatattaatttacaggtttttatgtgaacgtaaattttcatttttctgggataaatgcccaatgacttcattttaatgatggcaaaatatttcattgtatgaaataaatatttcattaatttagctgatttcttctaaatgggttgttaagggtttttccccctagtttttctgctgttataaatatcactgatgaaaatattttaggtaaatcttaatgtatatctacttttatttctagaagtggaattgatgtctgagagcatacagaattttaaagctttgctttttctagtcactcttttttttctttcctaaaatcttcctaaactcctaccatcaatgtatgaaagtgcccattctcatacccttgccaacacagagcattattactttaaaaaatctttgtaaatttctgcc

SEQ ID NO: 38911 - DNA, 1066 bp, Homo sapiens
atggtattgaggatgatcacatcctgcaaacaactgcagcctcagactactttgactaaaaggattctaatgtgagtggttggaaggaaaggaggcagcatcaggcacaatttattgaagaggtcagaagtagctagaggagaaaccaactttttactcttaaataatcaagatttttatgtagatattttaggaaagatatggtcattaaaatttggaattatggtgaatgaaataagtaataaagaaaaactggaaaacgacagtacgcactgttaatacatttcttggtgactaaatgaggtgaaagtcattgggttcctttgccctcttcagtggcaggttaagtttttatggcttattatacctttggatgattgtgtagaagaacttcctgatatattttttttcttttcgaatttaaaggtaatttaacagcgacgtgcctttgcctgaaatgagtagaaatgttatatgacttattagtatgtaatattacttctgacactgacatttgtgaacaaggaataatcagtttgctttcttgttcattattatgttttaacaagaaataagtgttacagtgttagagtctctactagaactgaatttgaacaacaaccagtgaatgcagccaaagaaaacagccagtttggatgtttcaggccccctcaactttttgaaggttgggttttttttttccttgttgctttttgcttttcagtttgtttggtttggacccttttttaagtatttgaaggattgtctaagcttaagtttatccttatggagatgccttcacgtggggcatctgaatgtcatgagtttggtgattctaagccttcccgttttgtgacttggctcacttatggagtgtaaaggccctataagaagagagaaaaaggtatttgaagtcaaatgtttctgttttgcaaatttactttatactgttccaccacaggatgtggcctcttggctttattaatttttatttttaagcttaagatgttgcttaggccaaaataaactttttagttgagataaatgaagttcatagtcacactct

SEQ ID NO: 38912 - DNA, 1061 bp, Homo sapiens
gcttttaaggctaaggtatttgtgtttctgggttagccacttgtgccaacaaagcgacctctctttaactggaaagcagtttggtgttctcactcatttcttcaggacatatcattacaggtctttgagttgtagttaggactttacacgtatgaatatgctgctaacacgcctggaggacttaactgttgacaacagggctccttttgcctagactagagttttttcattaaattcaggagatgtgcctgttgaattttttttaaatgtacacatacatgcacacatatgtacatttttgaaaagaaaacagttgggggaaacctgtcaccactcctcttatctgagttccttgcagatttggccatatatgcatgcattgtttgcttggctgcagtaagagattttttttgcactttgctttgtttccccttcccctccccatatacaggctttacaatggctatttaaaatcgttgctttaataggacaagggttgaatggatttataatttatttaattatttcctcactggagagcccttgatttttttcctctttattttaatattcttcaatattataggtattgtttttgtaattttaaaataaaaggactgagtctaagagtcctgtaaattgcttagattctgttaataactggactccttatcaggaactcagagtaaactggccacaggaaaatttgcctcacaagaaactcaatagaattaaaaggagaggattcagtgttcttaagtacaagtgaaagtcatgggactggaccgcttagcttcatgggctgagcctcttcacctttgtgctctaagaggaaaaaacagtggagctttctgagttttgtgtgtgcccctgtgttttggtttttaagagagagaacgcattcatactctgttgtctttgcaagtagatagaagtgataggacagggactgggtgaagtctgaggcatttaaatacagtgtaaaacagtgcagagagcagccctccccattttcctatcgcccacaccttttgttccttttcctccctccacatcttgta

SEQ ID NO: 38913 - DNA, 1027 bp, Homo sapiens
tagctggaattggagatacaagccaccacgctcagtgttttttgttttgttttgttttgttttttaaagagatgggatattgctttgtttcccaggctggtcttgaattcatgggctcaaatgatcctcttgtctcagcctcccaagcagccggaattataggtgcaagccactgcacctggctgcttgacatttttatagactcatactaaaaagtttattcattgaatgagtactgtgtgcatagggttaaatttatctgacgtttgttataatttaaacaggagtgttgataaaactgtgtaaaatgaattagcatatacttgccattatgtttttatcttaataattgttatgtagtttctatgaaaagttcagttacttaacatttccatgcttttttgtgtttgctttatttaaccttaaaagagtgattgaagtaatagttttgttaggtcattagattggtgatctccccttttgtatagtcaaatttaatttcattgtttaagattgaaaactagtgcaaattctagtttgatcacaggaccacagttaaaggtgcattcacatatctcatataagatacctattttcactgtattaatcatttgcattaatcaataaattttaacttttaaaagatttgatggttaaaaagatgatggaaggaattatttctctaaaactaaggaaatccttgctctgggaagctgtgttgagaagagttctaagctctgctgcctgtgtcagtgttctctggaaagacctctcttggaaggatgctgtgatgtggagtcaggaggtcaggacccagccctaccctccctaccacctgccagctgtgtggccttgagtgagccaacaactttgccaggagtcatttgccttatctttaaaataaaagatcactaccatgtcctgggttgtttaagtgagattatgtagtattagtagggtgcctcccaccacaggtcctcagtacattgaggtttctttccctgcctcctgcctccttgcaaggaaa

SEQ ID NO: 38914 - DNA, 1051 bp, Homo sapiens
ccatacccattctgcatatttcagagtgaaatgtcctttcgggacaatcttattaaatcactaatctgaaattttatgttccctagttggccatgccagtattttggttagggttttaggtgatttttatatccactgtaaacttggatataacttaccattaaccagatacttaaaaccagggtattttcctaaggtttaacattggaagtggtatgtgagctgagccttgaagggtgacaccaagttttttgacacgaaaaggttggatgagctagctaaagggcttgttttttatcctgtagggcaggagtggttgtagatgccctctcatgtgctgacatactgattgatggtggcttctaaggtctctcctgagtctagtaggaggcaggcttcctaactgtcatggacaccaggcaggcaggtaggggaatgaagcaagatttggcagcgcagctgctgtgagtttgctctccagtggcttggaaatgggaagttaaggattctgatcttatgtgagaccattttcagactgtcctagtctgccctcacatatccctggaatggacacatacaggctggtcagggctttcttggggcactgaggtgggagaagctggaggcctgggcagggtagtggaactgagagtgagaagccccctacacttggatctcttgcgtatcacacgagactcatttattgatgactgcctagctggctcataatactgatggctgaatgggggtatgaaaactggtcctcaagagtatccagtcttattggaggaataatgcaaaaacaaacaaacaaaaaaggataaaataaaagaaacaaaagcccaggtggtaaattttccagtcttcttggagaagtaacacagaaaaaaaggtaaaataaaagaaacaaaagcccaggtagtcattttgcagtagagctcagtgactaagggcagagtaccttgcagaggtgttcagtattttggcttccctgggccacactggaagaattgtcttggggcacacataaaatacactaacactaacagta

SEQ ID NO: 38915 - DNA, 1049 bp, Homo sapiens
acctccttaggagcttactggctgaaatcgagcaagttctgtaacctctctctgcctccatttttcacaggtaaatcctagtcgaggattaagttgaagctatgtatattaagtgcttagcatagttcctagcaaaaagtaaatttaaaatgatctgttactattagtggtggtggcggtgtggtgatcaccagcaacagtcagagggtggtggaccaaggaggaagcagacagcattcttaagagagatggaaattgccctctacattatagaggacccatctgagaccatctcccagttcagttctgtaggaaaggcaggtaagattgagaataagggttgtgtaattttcgggtgccttcttcctctggggctcttaagatctgagcacagtggattcaagtaaggtaaggaaagactaccagtagggagaggtctggtagttaggggtgtcagtttagcgggaggttttttgtttgctatttttttctttttgtcttagacactatgttgaacttttttggagttgtgaagtcaaaggatgataatattgtaagcaaatattctcttttcagaaaggattaggagcaggtaaaaactttagttagctgatatttttgctttatagtaaaacctctccggcagaattattttataatcttttttttaacacctttttttttctgacaggagatattaagtaagaaaggtatctactttgtatgtgttgttctctggctttttatgaataaagtattacttgtctttaagcatctctgataggaatttagataataagccagtgaaatatttttcctccataaattcctgtggccttgatggtgaacctgtgatcaaaatattagaaatactgactctgaaattgattcagatacatttgcttggttatataaattctgtacttttggccctgaaatagaaaaagcctacttgaagctttggggaccttcttactacttccaggtcatcctcgaaggtcttaaaatgtttttaaacatgaccagttcttttctactatattggtcta

SEQ ID NO: 38916 - DNA, 1075 bp, Homo sapiens
aactctgctgccctttcttcctattttctctctttgccaccaagggttgttgtactccttctcaaccagtcattaccgaaaggctattaattaattgattagaatgcaaaaaataatcttgggctttgggttcctttattgcctttcattccatagggagttttttctttttgtttaacatgtataaatgtctaagcctatttattgtagacattttatagtagtttttctaaaatgtattaaattatactgctttcttaaactaagtctggaacttactttatcatcatgaaccatcagtgttttccaaatcaactggttttcagaagactgaggtggttaggattgtgagtacatttactcatattcatttgagtgtgttttatgtagatgggcacctggggaaatagtggcaagcaagacagacactgtctctgcatgttggaatttagtctgtaaagtctgaatggtgatgatctggaccagcatagtgtggaaggtactggtctgtgttctggatgatttaggttaccatgccatctccagataaatggagtattgctgtttagggccctgacttatacacttggtcatttccacctctggtctacagttgcctaccccgcaatccatatgcaattctgcatatggctttattttctaggaggtggagggaggaaaagaggtgaggatttgcgtgaagacaagctagtgttggtccaggttttttctgctttctcaattatcctataatctttgaaaacacattggtttttttttctctcttgacatttttcccccctttcctctcgtgaggactttaaagcaaatcccaggcttcagatatttcacttctgtatacttcagtgtgcacagaataacatgggcatatgcttacctgaccagggtcattatcacacctaactgtaggtactgtattttgttgtataacctaatgcccattgtataattttaaaaatttctcccttgtacaaaataactgttctttatggttttgttagaatcaggattcacatgtgacatttggatattatgtctcttaatcaagggccat

SEQ ID NO: 38917 - DNA, 1061 bp, Homo sapiens
ttcttgaaatccaggttgacccaaaacaagaagtgtcaatagcctcatcataatatagcctcttagctataaatgtattaagtccctatccttaatggcctccacatgagaacttctaaaacttcagggccaggaggattactgttagccctgccagtcggcaacattagaagatgatagaacccagcacacatacaagtcattcactgaaaagcacttttaaagtgcctgatgacacatacatcagggtaggtatagaatataggcacataaaagtctttcttgttaggtgtttctattgcattatcttaacatgaacagaaacctctaattaccattattaatgcttggaattttataatttttaaaaaatctaatttatactaaagttgagagagagtgtgtgtatacacacagagataacatgcaggagggcatgtcagtaaaattaattcctaaaaatagaattgttgagttatcaggtaggattaggtttggctaatggaaaacaaatttaatagtgaattattctcatgtaaaagaagtctagggcttgtgtggccactgtaagaagtgattgatgctcagactcctcttattctctgccctctcatctcagcaagtggctttcatcctcagggtctcctcatggtccatccgaatggaggccaaaaggaggaaaaacagcacgaatgaagagactcatctctcacctgagtagctgcctttaaatagtcttgcatggaactcttccacttccatgtcattctattttcaaagctaagtcacatagccacatctaacttcgaagaaggctgaggaatgtagtctttttgtctgggcccagctaaaaattggcattgtgtgagtaatgaataagagaagaatggagtagtctgttctactaagtcaaaggttgtgtgcagtatcaacagatagtgataaacagtccttcaaaaactttgcacccactttaacactttcaccaaccaatccaaatttttttttcccaaatcttaattaaaaacaaaatgtcctctactgctgtatttgaattgtgt

SEQ ID NO: 38918 - DNA, 1040 bp, Homo sapiens
aggtgtcatttctaaaaaattagtgttagcagatgggcagatgtggctccaacaaggcttgcttcatggcttatcatttttccacattttccatccctttcataagcctagggaccacatgctgaacatttaattgaatcacacagattttgtagtctttaaagcttcttattccttggtcacttgttagtggtgcctccctccttggtcagtttggtgacttcagaaggaaatacacagtgcagtggtgagagcttcacttttgaagttagcctcaggcttgatttctagcaccaccacccactagacaaattgcttaacctttctgcacctcagtttcctcctgacaggcttgtttagaaaataaaatgagatcaaatttgtcaagcacagagcattggccctggtaggcaccacatacatgaatttccttcagattgtaggtgaagtagacttgatttgggatttctcttgttacctaggtgcttgtgtagaggagactttagaaccagaatgtgttatttgtggttttgagtgtgcctgggactctgagccaactgaattaccaagtaatgggggccccatggcatcccatgacaggtggagagccggctcttcaccctggatggacctgaaatgcctgctaaggccttgctccaccgagtagcacacaccctatcagtttgcccttctttccatctcttattctagagaccttaaagcctacttgttggtatatattttcaggtttttggaaattgggctgtttaattgaagttaataccagtgatgagacttttcaacctgagaacaacctagatgctacttcacattttgcagtggaagcttacttccatcttcactcatgtaggacattctttggtctcaatgttttatcacatctcatgttaaagtataattcaggtctattttgtggctcctgcccccttcccattaattcaatggttaaacagatacaattttttgaccccctactatgtaccaggccctctgccgggtgctaaagctatagtaaaaca

SEQ ID NO: 38919 - DNA, 1068 bp, Homo sapiens
gtcatagaaaggttaggtaaaaattctcatcggttcttcattcacagaagtagttaagaaaaggtagacgttgtgcctctatactagtggaggaggggaccatgagaaaataaaatagccctccaccaggtgattaattacccttagagagccggggaagtttgttgcaaagtgcaggggacagaggagtgtggtagtaaattccaagtgtgaacttcaatatgggcaatataattacagaaaggccagtaattaggggcctttcaatatgggcaatataattacagaaaggccaggaatttgaggaaaactactatcagtgagcttatctattcccagcatctcttggacatgaaatcatctcccttccccctagatatgaaaactgccatttaacatgtcattttattctcaaagagggtcatgcatatatgtgtctttttgaattaggatggattttttttaacctttgaaattgaggcagctttaaaaaatgaggagttggccagcacggtggctcatgcctataatcctagcactttgggaggccaacgtgggaggatctcttgagtccaggagtttgagaccagcctgggtaacgtggaaaaccccatctgtacaaaaaatacaacaattaactgggcttggtggcatgcgcctgtagtcccagttacaggtgcttcaggatcgcttcagcccaggaggttgaggctgcaccactgcattccagcatgggcagcagagtgagaccttgtctcaaaaaaataaaataaaaaatgaatgaggagtctgatttactatatcatctgggtgctcggttttggaccattctggttcatactctgtattttcttttctccctgcagaactccatccggcacaacctgtcactgcatagtcgattcatgcgggtccagaatgagggaactggcaagagctcttggtggatcatcaaccctgatggggggaagagcggaaaagccccccggcggcgggctgtctccatggacaatagcaacaagtataccaagagccgtggccgcgcagccaagaagaaggcagccctgc

SEQ ID NO: 38920 - DNA, 1024 bp, Homo sapiens
agtggtgtaaaaagcaagggaattcaaagctgtaaaaacttgagccttgtttaaccctctgccatgatgaaggacttaacaagggtctcctatggtgagctcactccagctcacgggtggttgcagaaaggggaatgttaagagtgttgtgatgctaaagcctctcaactttctcaggcctaagagacccctaatggaactcagatatctgatttcagtcatttaatagcccttgagatggtgaaaagactgtaatggaagctaagtagggtggtagtacttccatgccagccagctcagttccataccagaacttgggctagtggagatttgacttcagaaatgtagatatttggcctttagaagactagtttgtcttcctttaaggagaagaatatggaagatttgtctttagaaatgtagatgtttggcttttaaaagaataaatggtttgtcttcctttaaaaataggcttttaaagacacaagtaagttttaatttgagtgtaattgtaaggaggccactttctagttcgttggaaaatatgtgttcagaagacaatgtagtatcagtttttgtctgatttttcaagtgttggtttcccttttggttgaacagcagatctttctcgtatatgtgtaattctaaaggattgtacagaaaattaagggagatctaaatacttagatttttaaagtttatctggtgaactctgattttggtgatgataataaatgactgcattgaggataatgcatttcattgttatatcctaatgaagctttagggtcatcttcgcctcagaatattttgggggaggttgttttgagaagataacttcttcagctaaaaatgaaaagtcaccaaattttcctgaaagtagactagctcagtatgaccacagagcatttaaagaaccatccaaaggacagtgggggctgtgaggggatctagtttctggtttaggatttccatttttgcttagaatccattgttctttcagcagccaggagcacatgcaacc

SEQ ID NO: 38921 - DNA, 1048 bp, Homo sapiens
aatcccagcactttgggaggccgagacgggtggatcatgaggtcaggagatcgagacggtgaaaccccgtctctactaaaaatacaaaaaaattagccgggcgtggtggcgggcgcctgtagtcccagctactcggagaggctgaggcaggagaatggcgtgaacccaggaggcggagcttgcagtgagctgagactgcgccactgcactgcagcctgggtgacagagcaagactccgtctcaaaaaataaaaaaaataaaaactaaataaacttgaaccctaacattttgtctgtgaaatggacctggtgaagtctatgttatgatacagagctagaaagaaatagtggtgtactagtgtggcatcagcaggctgcagtattggaagccatttggaatttacgtgtaggctacttcccaaaaggagtaaatctttgatgcttgtttgactgatgtttgaatgctgtgattctagtatgtctttaaaatttatgttggggataggactaattctaaccaaatacaggtaatatagactgtatcgtgttttttattgatgtagatatttctgttttagggaatgtaacatctgataaatatgaatctgttatgaattacctggagaatatattctgctatttgtacctatgactatagtcttcggttatagtatgctagcctgaagaattctgcatcttcagggatctttattcttaccttttaaaaaaagccgaaagtctgaactgtcattcagggagagaatgttgggatctttttagtgtcgatgagcgcgagagaaaattgatatggccataaaaaggggttttctttgcagaggctggtacactggctacatacgctgttttttcctggaaagcagtgacatttagcatgaaggctgctcttcctgggcctgttggttttataaaatgcacctgttttcacctctggccagcctgctaagcatggagacagagcctgagtggctcctccttcaagcagttgtatttataaacagctttctggaaggtctcttctgtccagagag

SEQ ID NO: 38922 - DNA, 1106 bp, Homo sapiens
gtttctcggaatactagatcctcaagatagtcatagatcctcaagatagtgaaatggaaaatggattctgtggtcaaataagtttaagaaataccatgttaaacaaagagaaattgcattatttccaagagaacttctcagagccttaaaggttaatacacattatgaactttttagggtaggatatgttatgcagtgtttcctaaatgtgtttgatatcttgaatcaaatcctttttcttcaagaaaccatagcaccagtgttctaaggaacccccttaagaaatgctgtcctagagttttgctgaaaggagtcagcacccccttggagacagggcttctttgcccttctcctccctttcttgctgagttttttgtatgaccttgtcatatatctagtgtttctcagccatatccatgcatgggctagctgcccggcaaagtggtaggcccgtgttggtagaagtgctcaagaaaggcctgaaatcattaagcacagttcatctgttgagtacctgctgggcacaggggatagaagtgggtaaaaagggtccctcccttaaagaatgcgtggcctagtggagaaagtggtggcagtggcgatgacagtttgtcgtagagccaaagactgccttcctcacaaggttggagcagaggtgcatgtggtgtggcagcctgatgtgcctggttttctgggacacccctgcattcaggggttctgttccattatcacatggtctattccacaaaaacacagaccctaagacttgaggagctccatactaacaggtcagagttcaggctgaatccagatgctggtttcttttaaaagctctgcagagcactttatgtttgatttctagagctggtgagttcatcacggttggacatgagccgcccacttcagcacactgtccctggggctcagctctgagggagctgtggattaaaaaagcctcccctgcagcccactccaagttaagtgagatcctgtgggatggcagaggagctgtgggacttgcagcagaaggctgcctttttcatggctgtgtgtcctgcagtcaagtccctcatctctcagtttcagtttgcttatttataaaatga

SEQ ID NO: 38923 - DNA, 1138 bp, Homo sapiens
taagggatgctgccctgtgtggggatgcattgcagaggcactagtagcatgggggctagagtggggagcgagatgtaaaagggtggggggataggagaattccagagtgcttccagcattagggtcctgagaacttctgagttcagagaaacatgcaaagtgactaacaaaatagctacttacctttgcagttttacagaccctgggagctgctttgggagtgagaaaggcaaccctccaatgtgtttcaactttaaaatgttgaattcttttcagacatggtatctcatttattctccttttctagcgtttgttgaatttcaggcagaatgtcttacagaatgtcctagaaccagattatcatttaatctgaaacagctgaggaagggacagagaaggtacaagggcaaggcagcacaaaacagatcaggagaatgaagagggaatgctttggttttttgttttgttttgttttttctttttcaagtaactaaaacagcatctacatgtagagtgttgtggagagctgagaccagggtaaagtcaagtgcagcatcagtactgcgagacccaccagcccctggagagggtcagccgagaatctggtagtgaagcctgtctagggtcccggcaccctcaccctcagccacctgcagagaggccagggccccagagactagcctggttctgaagtgggcaggggtgctgccagagccctctgccccttatgttgagaccctgctttcaggacaggccagccgttggccaccatgtcacattctgagtgagtgtcacaggtccctaacaataattttctgatctggagcatatcagcagaatgcttagcctcaaggggcctggcagctgtaatgtttgatttatgatgagaactatccgaggccacccttggcctctaaataagctgctctagggagccgcctactttttgatgagaaattagaagagtacctaatgttgaaaacatgacatgcgctcttgggatctgctgttctctccagggctccagaacctgatacctgttaccaaagctaggaaagagctttatcacaagccttcactgtcctggcatgagaactggctgccaggctcagtgtaccccattaactgtgaatgaatc

SEQ ID NO: 38924 - DNA, 1048 bp, Homo sapiens
cactggggcatggggccctggactcttaacaccttccccaggtaatggttgccaactctaggtagaggactagtagccaaattcctatactaatacacatgacacaacatgacacgactgtgcactacactacactacacaccacattactgtatatactacgctgcacataacactgtacactacaccacagctccctgtgctacacagtgtcatgctgtcccctaccacactatgcgatacgactgggcttcctcctcagttaaatgctctactttctcattgatccatttttttttaattttctaaaagtagtttattttttaattttttttttaaagtgttttaatttacatacagtgaacttcacaccttttggtatccagttgcatgaggtttaacaaatgcatagagttgtgtaactgccaccacagccaagatacagaacagttccatcccgtcttccagattcctttgtgctccccggttctggtcactcccttcctgcacacttacctctggtaaccactgatctgttctccaaccctggagttttgagggttccagaatgtaatataaatggaatcacacagtccatagcctttcgaatctgactcctttcacttagcataaggcattcgagattcatccatgttagtgcatgtaggagtatttaattcctttttattgttgatattctgttgtataaatgtaccatggttgtttatccattccccaaccaagggacatttgtgttgtttctgggttttggtgataaactcaatgatccaaatttaatgaactgattcctttctctgggagaggagaatctcgtatattggccatgtgataaaaggagtaggtggtgggtcaaagaaaatggcctacacatggtttctgccatgggccacctatttaacagtccagggtcagccatggaggacccatatttgaccttatgacaaacttgctggtcttccaaaaatcataaaacaaccaggtcttcacaatgctgcagcgcctatcttttacaaataaaacaaagggc

SEQ ID NO: 38925 - DNA, 1092 bp, Homo sapiens
accttctcagaccttgagcaagaaacagatttcactaaaagtgagtcttttaattcagaaagatgtactcaatatttaattaaagatatgagatctaacgatgtaggcaggctgcgggagcagggagtatgccctgtgtaaggactccattcaagatccagatcaagaagtgagggggaagatggagctgaggatgacacacactcctggttacatgtgagccagctagtttgtgtatgtgtgtgttttgggggaggggcttgatacattagaatttaaggaacccagcatgtgaaagggcttttgtgtgcatcacagcgacctgctccacacaaaccaagggaacatatactcccaggtcagcaaaggtaatggatttggtgattgcaagtttaagaaaacagactaaaatttaagctacagaatacctccgttcgctctctctatggatccttattcagcgttaataaataaatggctctgtttaaagataaatactattaagataggaaccaacgtgggacttgagcttagatatataaggaacatagcaaaaaaaagatgaaggaagtggatcacagaaggtattaccttccaaaaacatggaaagagttcaaacaattttccatagtctcagagaaattatagataatgtgatcattctcttaaaaaaaaaaaagaaagggttcaggcatggtggctcacgcctgtaatcccaacactttgggaggccgaggcgggcagatcatgaggtcaggagatcaagaccatcctggctaacatggtgaaaccctgtctctactaaaaatacaaaaaaaaattagctgggcatagtgacaggcacctgtagtcccagctactcgggaggttgaggcaggagaatggcgtgaacccgggaggcagagctttcagtgagccgagatcatgccactgcactccagcctaggcgatggagtgagactccctctcaaaaaaaaaaaaaaaggaaaaaagcactgttctttgggttataagaatttaaatgagagattctaagcccatataaggagatgaaaaataagcttacagtacgcaaaaaagaaatgaaagaaa

SEQ ID NO: 38926 - DNA, 1050 bp, Homo sapiens
ttataaaacaggatatattgtcctaggttaaaagtaactgataaaatcttctcaccaactcttggcaaaatagattagattttagtattgtagtgattatttgtttcatctttattatgccagatactgtatacatcaagttaccattaaaataatagtgtatttttagttaaaaaaaattttgtgggaaatattctttcttgctgtgggtagaaaataaaggtagaaatatccagtgaaatgctacaggccaaatccaaaaatataaaatactagtaaaaacaaccataccacaaatacaactttcaaaacaaatgcaggatcaagcaaactgaacaaattgcacagtgcaattctatacaattttttcctctttatttctatcactcaatacatatccttctccttggagagaagaaggttttcagaggatttagaagggattttcaagagttacagatttcatcactgttatatttagcacagacctcagatttgctcaaactgacagagcattacctgcaatatagacacaaaaacactgtgaaacaatagttaacagttttcttcattttgcttcagtttgccaaatttatattctaaagcagtttccaatattttctgtgactatcatcatgaacaacacttcttttctcttcaaatactacttaaaccatttgatggttgtagttccctaaaaaaggaattaaagtagaacagtttgctttgtcattatcattaataatctccttcacccaccattttaggagacactttattttcttttttagagataggattttgctctgttacccaggcagtaatggggtgatcatggctcacagcagcctcgaactcttgggctcaagtggttctcccacctcagcctcctgagtaggtaggactacaggcatgccaccatgactgtcttaatattttgacatttttgtacagatggggtcttgttatgttgcccaggctacatggactcaagtgaactcccgcctcagcctccaaaagtgttgggattacaggtgtgagccaccttgc

SEQ ID NO: 38927 - DNA, 1025 bp, Homo sapiens
aaaagtctccaaaacttagtcgactttttcaaaagattcagtcatttgcttaaaattagtttgcttttaaaaagttattatttgagaaaagtcgaggtttgaacggccatcagtggactgataatcggtgtagattttaattctttacattgcagaattgcattgcactaaattctaaaaatttcgtcttgctaggcactgagtatacaacaatgaaaaagacagtcttactagttagaggaactagttgttagacatacggttacaataatacatgatatcactgggatgtctagaaggagatgacttagcccaatcttggaaagtcagggaaatcttcatcccaggggaaatgaagaccaaaagaacagcatatgctaaggcccagagtgagagatagggtactttcaggaaacgtcagtaagccaaatcatgcatacttggcggtgtggggtgggacgggaagggtgctttttgtgtattgatgcacttagaagctacaaagagacaggtattgtgaattctttacatcgtttctgtaagtgagctatttttgaatagatgcatagttctgatgaattggtctaatttcaaaagccttgttacattctgacacttctagtttgaatctgaattttaaaaagggaataacttatgagtgtgattgaaaaagcaaaacaaaaaccattccgttttcatctcctttttgggatcttcattctctatccagcccataaagggtcgggtagtttcttaaggctgggtgcctttttatgccgtagttaaatatgatctcatgtatacccatggcttcaccaacacctatgactctcaaatgaatagctccattcagcttcacctctcagctttcacaatatctcttggatatttcttcttggatatctcaaaagcatctcaaactcaacatacctaaaaccaaatgcatagttatctcttatgaatctaattctttttcagtgttccttatttcagcaaaggacactactatccatctacttgtgaaa

SEQ ID NO: 38928 - DNA, 1033 bp, Homo sapiens
gtttttgctcttgttgcccaggctggagtgcagtggcgctatctcggcttattgcaagctccgcctcccaggttcaagtgattctcctgcctcagcctcctgagtagctgggactacagacacccgccaccatgcccggctaatttttgtatttttagtagagacagggtttcaccatgttgggcaggatggtctcgatctcctgacctcgtgatccacccgcctcggcctcccaaagtgctgggattacaggcgtgagccaccgtgcccaacaatgggtacttttatttagtagagtatgggagacagcgagtatggatgcagcactcttttactgtgttctttgtccagattgttctagcctgtctttaactcctcttcttgcaggtctttgctcaaataatcattttctcagaggtgtccctgatctaattaaatactcttcttgtaaatagacctattgcaccgtaaaccttgagttgctcttatgttaccaattagttttgcagttgtgccatgatttgattaaagtgtgtttatttcagtagagcttaagcacacaagaggaactactgtgcttgtttttgttgatcatcttatctctacctctgagtacagtgcctggtacctagtacaaacttaataaatgtgtgacgcaagaataaaggaatgaatgaatggaagaatgatataatgccacagaactttcaaaggtatggcatatttatctatcatttacaaaaacacaaagtaattaatggatggacgagggtacattataataaaaacattttagaaagttcgtcctaaaaaaaacaaagccgggcacagtggcttatgcctataatcctagcactttgggaggctgaggtgggccgatcacttgaggtcaggagtttgagaccagctcggccaagatggtgaaaccccgtctctactgaaaatacaaaaattagccaggcgtggtggtgggcgcctgtaattccagctacttgggaggctgaggcaggagaatcgcttgaacccaggaggc

SEQ ID NO: 38929 - DNA, 1040 bp, Homo sapiens
acgtgttcactcagcaggggcaggagaaaagaactagataatgagtaatggagagccctatatgccctgaggaggtctttattctgcagtcactgaagagtttgaagcattgaagtaacatggctggattttaattttaggtagatcactctaggggcacagtaaaaaatagttttagtgaaacataattagtagtaggaaaatcacttcaaaaggctacgtaatgggaccaataaatgatgagggcctaggctgggacacctaatcagtggtggtaaggatgggagaggataggtgagtcaagaagtgttttacgtgttgacctcctcaggacttgagaatggggagtaggaggatgatcctattaagtgagattacaaatataggaagaaaaactgttttgaggcaaagatggtgctttaagttttggatatacgtttgaggtgcctttaggacattcaagtagacatgaactctgttaaaatgcagagaaatggtagtcagtacttgacaaaaaaatattatcttaggcagaagtaaagaacaaataaatgagtgcaaactccaaagtgatattgtctcttaagaagggctgggcctggagaaggcattaggtgtaaaaattaggtttgtgcaggagcagtataaagttataagtaggttatgtggggaatcaagcatttcacttgaaaagtgatatactgtttatagattacctattggagacattaggattatagtatgatacaatgttaagaaacactggatataatgtagtttttgatagttcaaaaaagattttttgattttgtggtttctcagtatcatgcacatcagtgattttactgacaaaaatttggatgaaatatccaaaatataaagatttctggatatcaataataggcaacatgtgttgagtgcttactgtgcactaagctctattctagtacttcatgttgattcattacatataattgtcttaaacaggtagtcatattattcccattttatagataggaggaacgtttaagaaacctact

SEQ ID NO: 38930 - DNA, 1042 bp, Homo sapiens
gacacttacccaggcccctactaccatccttcttcagaatttgcttactcttattgtagacacacttctaataaactcaatgtcattgttacacatttctttgctcattccttcagtgatcttcaaactttaatttatataagaatcagttggataattatcaaaatgatatatttatgggccgtatccctagaatttctgtttccatggaccttggtggggcctaggaatctgcatgtttattaaaaataaaaattctcagggtattcttacctaagtgattgaaggaccacacttagactgcatactctatatctaactcagtactcatggcttcagctgccatctatgtatattgatgacttccaaacccttatctttgtttttattattattattattatctactgactgagctagctggggccaaatccttatctttaaacaattcttgaatgtcaaactcatctataaaattggcatgtctctattaaagacagaatacactccgaactaggatacctgggttcaaatcccagctcagccccttaatagctgcatgaccctgggcaagttacttaacttctcagatgccttatgtaaaaagaagttaatacctcatagtgttgccttcatgattcagtggctcaatcaatgcatgtaaacttctttgaccagtgcctcacatgtagcaagctcaatataaatgttagctgttttttaaaaaatgttatttcacaagcacctcaattatgtctaaaataatgttttataccacctccactgctttcaaaatctgttttctaccttggttacaactttatttcattcttccctgtcacgagttttccttgttctggtcataagttctatgaatttgacatcctaattttctctagtttttctcttcctttccataggattagtagcaggaaatacctaaatagatccacttctggccaggcatggtggttcacacctgtaatctcagtactttgggaggccaaggcgggcagatcacctgatgacaggagttcaagat

SEQ ID NO: 38931 - DNA, 1035 bp, Homo sapiens
taagttgtggatgtttcagggactgcctggggttgtatttttcatctctgaatgtttaatgaatgaaacttgattgctttgttgtttcttatttgctataggttgggaaaccaattagaaaggagtgttctgctagaaacaggtaggtagacagcaagggaagaggtagcaagagatgaaaagacagaaaacagagtctaggatagtctggaactttccagtgaaggggtaaacaatacaagtatcacacggggtccctaagtatcattgtgcataattaaaatgctatgatgctatccttgagtcatcctaaaggttaaattgtgttgaatatactctgtctaaaaggaaggaaagcagtttaaacactttaggagtctttcttttaaaactagtcgaaataaattttggtactgaactaggcaagctttagttatttatcattgtccaatagctcattcctccttaggcagcctgactaatcagtgaagtcccacaattaattctgactattaagtctgctcaacctgtggaaaaaaaaatgtaaaggcctagaaagtggatttgtagcaactaatctgagtgccattagtttttaaatgctatatatatatatatacatatatatatatatattttttttttaaccagtttctgaactctgtctgtctttactaagtttaccatcaaccattctaaagagaaaagggtgtggtggcacacacctgctgctactcgggaggctgaggtgggaggattgcatgagcctaggagtttgaagctagtctaggcaacacggtgagaacctgtcttgactgattgattgattgattgattgattgatagacgggtggatagagatgtttaaagttcaacaaaaataaggatagtatacttttatccttataaatataataaacattataagaatgttgaaaccctttcaaaatcacttattttttaacttagaattttttgaagaaatattaccagtaatattttcaaatcctaagaattatgctttacttaaataaa

SEQ ID NO: 38932 - DNA, 1050 bp, Homo sapiens
agtattttaacgtttaaaatagaaatgtaggaggatcttaaaattgaattaggaaaacattttattactccaggcatattttaagctgtgcaaattcttttctgagatgctgatatcacctacttttaaaatcttctataataatggttgctgttaataaataaactagttttgtggaataaactataagaaataataatgcaaatcaatgtgccagctacagatatcatgtaaagaggaataaatataatttatttatctcatttataaaaacaaaatggtaatctctagcaagcatctttctaatttgatataaactatatgacagttaaaactctgaacttatctgaagcatgaagatattaatatagttgaatataagtcacagtagtatagaatactattatctttcaggtctgacatcaggtaaaccattaggttataattatcctggttcttaatactgcatcatggacaaagaaacagtaaatatgtgtgatttgactaaaacggaatacctcaagaactgagaaaaaaagcctataactttaaacctaaattgccatgttaattagtagaaattatattttaatgttcttattcatatttatactcttatgctccccagactgtacattgtctttaagtcctttcatttgtaaatattttattaaattaaaattgtggttattacctttctcagtcttagaaaccactaaatacaataatagatatagtgtttttacaagatatattagagagaaaatgtgcgcctcttcaaagtgttagtcattatttttcattttttgaagaatatgcattacttgtacatttttctggctcagtaacaaaaatatactgcttatttttcttatgttactttgattgtaagtgttcagaaactttcacttaaaatatcaacaaaattttttttcaacagctcttattttagccttaaaaactcttcaggaaaaaattcatcgtttagagctggagagaacacaagctgaagataacctgaacattctttccagagaagcagcacagtat

SEQ ID NO: 38933 - DNA, 1038 bp, Homo sapiens
gtgtgtttgtttatgtacatgtttcttaagatatttatattgtgttttgaattctcagaaattgtattattcttgttccattggcattacttgccaaattcagggttgctattttatttttatcctttctaggcccagcttcagagggaaaaagaacaagatcagatgaagctgtatgcaaaacttgaaaagcttgatgtcttagaaaaagagtgtttcagacttacaacaactcagaaaactgctgaggtaagctttctttgaagtgatgacaacaggaatgaatctttagtgttaagcataattggtattttatgtgaatgtagagtaaatcttagatttataaaacttcatttacaactttttataatccagatatgaattctcacctatagagtgaaaagttaatgcgttctgtcacagtatgaatgagctgtcttttgatgtgaaattgtaattttgacttctaatatggcaggatattttcatttgtcagatactttacctaaagggtattgaaaaattgtctttcaccacttgtagtcaaattaagcctataccagttcccctcttcatcctttttccctccaaatcttttccattttatagggttttctcacagtcgtacttcccctaggaagtcctccttgaactctccaacactcaggaagttctccctttgaaatagtactgtcctcctattctgaaccacaccacagatgtaagacataatacttacatatataaggttatatgtatatatggtgcctgtcaagttatttccttgctttgttgttttgttgttttatgaatattgctctttttttcttttcatacaatacaggttgggtgtccttaatccaaaaatccaaaatctgatatactccaaaatccaaaactttttgaacactaataataatgttcagaagaaatgttcactggagcatataggattttgaatttttggattagggataccgaaccagtaatgaaaatattccaaaatctaaaatatctctggttccaaacacttaagat

SEQ ID NO: 38934 - DNA, 1030 bp, Homo sapiens
ccaatactgtactctcagaacagacagtcactctccaacccagaaggacacctctcccaggctggccctcagagggcgccttcttcctctttctgacacacacacacacacacaccgccttctccctctgtcacacacacacacacacacacacacacctccccatcccagttatcctgcccgcctttccttcaggtcacctgggctgtgggccatgctcttgaaggcactgtggaagtggctgaggtaggcaatgaggcccagtgggtcactccctgctaccacggcctgtgcagacaccaccggtgtgatgcccagctcattctctgccacctttagtgcccaagcagttgcttccagagctcccagcccctgcagctctgagggttccctgtgggatgtcagggagaaaagccaactagagacaagaacctagccccactgaggggaggaagggcagcaggaggggagggacagcaagcagcagctggggtacaagaaggcttgaaggtaggtgtgtagtctctgctacccagtgcccaacccagtgacactactcctggctttgggggcctgtgccattcacaaagctctccactatctgaatgcattagagtctcacaagactgtcggcagatgcagggaagcacactgtctctaggattcaactggatatgctaactcctacactgagatcatgagagagaggtgggtctgccagggactcacagcaggccaggctgcagccggtacaccagggcacacagagctagcccatcagcccaggaggaagacaaatcggagacgtggactcccgggtacccagctgtctgctcctggcaccagcgtagcagctcctcctgggtgcctgccgaccctgggaaagaaggctgtgctgtgcccaaggccccctctgcccatcccaggcatatagggagcccagctgctgcatgtgggggttctgtaggggaggaggagtcagggacccacctctactagggcaccagcctaaagctgactatcagcagct

SEQ ID NO: 38935 - DNA, 1047 bp, Homo sapiens
tattattaattctctcgtgtaatgcattgaaagggcagagaaagtttagcttttatgaatcaaatctaagtgtggtatagtgtataaacaaatactcttaacagatcatgttttgagaaaaaaatggtctttattaactgctattcagaaccattacagtcttttaagctattatcttataaacatacttttaatttttcacttcatgtaagttttgtaaaactcattgctgtttaatacatttatctggatatgctaaaattatgtttgatgaaattaatttattcatagagaaaaggcctgacatcataataactgccacctattggaagtatttgtaatacactaggcttattctaggccccttacgtgccttattaattcatttcgtccttaaaacaaccacgtggtacaggtgagggagcagaggtgccgtgctccctaagtaacactcttgattgtgcctgaccctgctgatgagaggcagagccaggagttggatccaggaactttgacctcatagccctgtgctcaaccgctacttcctgccacctcttgactttatttatatatttgtaacatgtcctcaatttccttgtcattttcttttctctcaagaactctcacaagtcagaaaagggatttctttgactttttacagaatcaacacaatgttctggacatgaaaggaatgatatccactgaaaatggcaatgctattaaccaagcatgttactttgaagttaaaaacagaagttaacttaaaaatgagttgaatgtcagccaatttccatatctttctgataccaaccttttttttaattgatacaaaatattttgtgtatttatggactgatacagacttttatttttcaggggtatttgggatctgtagtgagccttatatgaaatatgtatggaatggtgaacttctggatataattaaaagtactgtgcatcgtgactggcttttgtatattattcatgggttctgtgggcagtcaagtatcctttctgaagaaaaagtaagatacatattactaaact

SEQ ID NO: 38936 - DNA, 1050 bp, Homo sapiens
gttctaatactgtattgttaagggaataatgacaataaaaaaggtctgcacgtattcagttcagatgcaaccatcgtaggcctaactacattttctgtctgagattggttgactctgtggagggaacccatggatgtggggggctgacaataattaatactccagtgcatctgaaacatgtgagaaatatgactaatatgcagatgttctgaaaagtcagctatcttagagttatgcagtgctttgaggaattataaaatgtctaatgttgtggagggtgagccatttctataatatatgaaatgcggtacatgtttaatgtagagacaaaaatagcaaagcacctccacccaagtagaaggcagcactcatcacgggaagtcaattcttgataagaagacgaagtggagcaaggttcaggaaacgctttgccctctttgtcttttttgcccatactcctttttctgttcatcgctaggaaataacaacagcaaaaatgcagccatccttccatcagccgtgttctgtcctttgagtgctccgtctctgtttgcaatagacaacttgagttttgagtggatgtgtgatttggtagacagattgagtgaggcactgggttttgatcctggcttaaaatagcaacattgttcttaaaattatatcaacagtgaaaattgttacagctggtgctttaaaatatcagaattttgcagctatattatttacttttgaatattcaaaggataatcagacatgttattactgcctctaaaattattctttattatgtccttatatacttctgtaagtacctcaaaaccctattttttccttttgtccattaggcattatttgaatctcactcctttcatttcactttggtcttcagaattgaattttgatattcttctagtcttcctcacctcctgtataatttcatgtaattgtcatttctttccctctctcccatttatttaaaccagctgtttcctatctgacttgtattattagagattaatttgtttttttctagtctattctctgctactt

SEQ ID NO: 38937 - DNA, 1020 bp, Homo sapiens
agcataggagacacagtctctacaaaatttttttttttcaattagttgagcatgatgcacacctgtagtcccagctacttggaggctgaagttggaggatcacttgagtccaggagttccaggatgcagtgagctatgattgcaccattgcgttccagcctgggcgacagagtgagaccctgtctctttataaaaaaagaaaaaagaaatgttatgcaaaatcacttgtgtagtagttttcctttacttgttaggggtctgtggctctaaagaggttgactaacaacccactaacactattacactatggacagacaatgcatacagcagattcttcacacagagatgatacgaaggttgctcaaacaacatttcctctccatcccacgaaatgtcagatttgatataagcatttcaaaaagattttgtttccctagttgattttaaatgcttttgagaaaaatttcagatatataatttaattttctccgatatataaataagcaaaatttattttcatcctaaactgatttaacactgttcttaattcttatctaattatttcatttgatgtattcagctgtgctcaatagctacccctttttgtttctacagtagttatctcattaaattcatgacaattgaaaagtaatctccatgattgaaaacagcacaatctaattttgatgccaacaatagtgccttaacaccatttcagtctcactattgtgaaattaattgtttttctttgtttctaagtgaaggcttgatcagggtgataatgaaaatggcaaatttttataagttacttcccatatgccagctgttctataaaaactcaccatgctctgctgctggattcggtttgccagtattttattgaggattttcgcctcgatgttcatcagggatattggcctgaaattttctttttttgttgtgtctctgccaggttttggtatcaagatgatgctggcctcataaaatgagttagggaggagtccctctttttctgttgtt

SEQ ID NO: 38938 - DNA, 1024 bp, Homo sapiens
accacaggtggacaccaccacacccagctaatttttgtatttttggtagagactgggttttgtcatgttgcccaggctggcctccaactcctgggctcaagcagtctgcccattttggctcccaaattgccgggattacaggtgtgagccactgcacctgccctgttactattctttaaggagataacattccctagtttttaacatttattaaagatcatacgggatgcccataaagtctggaaacttagataatgtgacttattaatgtaatattaataaagactttattatttattcatgagtgttttgaaatttgtggcatgctgtatcttatactgtgtttatcaatgatacaggaatggtatagataatggcgtggcatatctatgccatgaaataatacttttcttgcacaataagggaagagggaataaacttaactctacctagagtcattggaacaaggtcctcttgagataagtacttcgatgacacaaaatctcacattgactgatctgcctaaaaccactaattgaagctttgttctgaatttgattaatatggcatacaatcatctaagattccatctaatgaactggtgtttagaatgtcaccaagatgtttttaggtattaagcattaattatttcattgactcctagagttgggagatttcttggcctgccccctgtctgatatgtgagttccctttctgtttccctagggagagagagaggtaatctggcctatgcttgacaagttcttgtttgtcaactgttgaagaggcagttgttttggaacagttcacttacacaattcttcctcatgtcatgctgagatctgcttctctgtaatcttacctattaatcctagttaaagaccttaaaaacaagatttcctcatccacttgataatcttttaaatatttgaagttgagttcatacactttcaaaatctcttcttctactggttaaatagccccagtttcttcagctgttcctcatatgctgtggtttcaaggc

SEQ ID NO: 38939 - DNA, 1041 bp, Homo sapiens
cttttgtgacttgtcttctcacttttccctgttgtttacaaacaattatttatgtagtctgtgcttgtcaaattattcctttatgtatcgggttcctgttgcttgtttgagaaatccttaactcatagtcatgaaaatattctcttgtattatctcttgaaagcttttcacatttaagtcattaatccatatgaaattaacttttgtctatagtgcgaacattcttaataatatggcttgataggtgatagggcagttcccttgcccttttttgttggctcttcttggccctgtaattctatatacagtttagaattaagttggaaagttctgctaatacccagttgggattttgtttgggagtacattgagtcataggtcaacttggagataatgttatgtccgttcatttgtttaggcctttttttagttttgtttttttttttctcccaaagtttgtaattgtctctgtatcaaaatcttgtacagttttattggaggtatttctcggtggatcttatttttatgctgttaataaacagtattgtatttttcatttatttaactttctaacttaactactatgtaagtactttctactacttacatagccatatcagctgcaaatatgacagtattttttctttcttttaatcattatttcttttatttattgttcttgccttgccatgcttactaccgcctccaggaagatctaaaataaaaataaaaaggatgtaccaggcaaattttaaccaagaaaaagctagcactgtttgtgttaacatcaataaaaatagactttaaagcagaaagcattactggagacaaaagagtcacttcatcatgatagaaggttcagttcacaaagagatataaaacaatgtaagctcaaaatatttcagcaaaaattgacagaactacaaagagaaatggacaaatatacaattacagtgagagatttttatatctctcaataattgatagaacaagtaaaaacatatcagtaatgatacagaatatgtgaacaacaaaattagt

SEQ ID NO: 38940 - DNA, 1005 bp, Homo sapiens
taagaaccctttttactttgtactttaatcagcccaaattgttttactgctccagtgtggcttttaaaatcatggccaaagttaaactttgaaggacaaaatattcccttgtgtagatgatttagtgccatccattttgtggacatgtaacattcattgaacaactattggtagtacactgccacattgtaactgttgtagataaagcaagttaagcaagaactgaaaaatatgttgatttaactaaggtcccgtgataaccttcgttggaacatttttcagtgaccactcaagtggttaggttatttaccaggatgtttaaaaaagcctgaaatagtaggtgttccttgaatcacctaaaatcaacagcctagcaaagagagtatcatggacggagtccggtcggtggggacatggggccagccccagagaccccagggaaggataatcggtcatctagaagaataaagcgtgacatgttttactcaaatgacgtgattaagtgcatagcctctggaataacaagatttgaattcaaacagcatttaatagctgtgtgagctgtttcctcatctgtaaaatggagacaataatggtacatagctcatggaagttgtgaagaataaataagttaatatgttatatgtagtacgtaaactgttatctttaacactttaaagacaggatccctctatagcccaggctggagtgcagtggcaggatcatggctcactgcagccttgacctcctgggctctattaagatgtgaataaactaaaagtaggttaaaagatgaacagatggaattaaacaaatctgtttataaagcataataaacatagggacataaaaacgattaagagaatgaaaggcttaaatgtccaaagagagcattagtattgatgctaaagacaaggataacaagataaggatatgagggagaaaaaaatcctggaaaaatagctttccaaaactaatgcaagaagaaatggagaacccaaaaca

SEQ ID NO: 38941 - DNA, 1046 bp, Homo sapiens
ctgaattcactgccgcaggaaggcaccctcagaatctaacttctggtcagtctagctttactcaagaatgatctggttttaggatgccttttacctaaagactgcttactacctggggtagaggcaccctgatgaatgtactgtaatgagagcctctaaaacagacctaaaaatatgaggtaagagcagaattgagaagctgcagtgactttggataaattacctgaactctgaaaccagctggttttacattaggaagtaatgagtaatctaatgacctggaagcttttcaaataaaaatttgcaggcatcatcctcagaaagtgtctgacctaactgggtatgggaatagcatctatgtattgagttttcaggtgattagagcataaccctgcactaatgggatccttctgtatttaagttcttggtcttttttttttttggacagtctcagtcacccaggttcgagtgcagtggtgccatctcagctcactgcaacctccgcctcccaggttcaaatgattctcctgcctcagcctccctaatagtgggtactacaggtatgcaccacgatgcctggctaatttttgtatttttagtaaaagacagggtttcgccatgttggctaggctggtcttgaactcctgacttcaagtgattgagccatcgcccctggtccctttgtccattttttaatcactttttgttgagttgtgtgtaggtgtgtcttttgctttggatattgaccccttatgaggtgacttgcaagtattttattctgtaggttgtcttttcactcgtttcttttgatgtatagaaatgtttacattttaggttttcaagttccatttgtctgtttttgattttattgtatgtcatatccaagaaatcattgccaaatgtaatgccctgaagcatttaccctatgtattcttctaggagttttattcgctgttaatgtttaggttgttgatccattttgagttaatttttgtttatgatgtaaggtaaaagtccaacttaattttgtttgcatgtggacatcc

SEQ ID NO: 38942 - DNA, 1053 bp, Homo sapiens
aacatttagtgtaacgtggatgtttctaggacataggttttgaagcctcaccggacagttcaaggtgtttgccgtcttttcctcccaattggtaaagaaggacctcttaattagaagttcaggcaaagggaaagttagcttctctatacaaatacagttgtctaattggtatataaaagctcatcaccttttttgtagttgcagagttaatttattccataaatacttttaatgcttatagtatatattgtgatgggccttgctgggggatactggactaaacagcccctccccccctttttttttctgaggcggagtctcagtctgtccaggctggagtgcattggcgcaatctcctctcactgcaacctctgccgcccaggttcaagcgattttcttgcctcagcctcccaagtagctggtattacaggcgcctgccactgtgcccggctaatttttgtatttttagtagagacggggtttcatcatcttggccaggctggtcttgaactcctgacgtggtgatccacctcggccgcctaaagtgctgggattacaggtgtgagccactgtgcctggcctctctcttttttttttttaaactaagtttatattatgaatatacgaatgtttatcaaaatgcttaccatgtgccaagccctggggatgttttgtatactagaaaaggaaaagaataatgtgttacttgcttccttgagatcctaatatttaaaagtactagccaaaattgtaaatgataattaaattggttgattgcaccctcagtagtacattagtattgttataatattgtgacttttttcaactgcagtgagagtagcatgtttgtctccaagagacgtttcattttgaagacatgtggtaccaccctcttgctgaaagcactggttcccctgttgaagcttgctagggattacagtgggtttgactcaattcaagtaagtaagcaaacatttaaatatttttcaggcataaatgttagcgttcttatcctgtaatatgcgaagtaaataaatttatatacttactgcc

SEQ ID NO: 38943 - DNA, 1071 bp, Homo sapiens
catttttagtaataattgttgctggactcttctgcgtggggactaaattttatttttcattctgtaacttttaagttcagggtaacaagtgctagtttgttacataggtaaacttgtgtcatgggggtttgtcgtacacagtatttcgtcacccaggtgttaagcctagtacccattagttatttttcctggtcctctcccttctcccaccctgggactaaattttggactcaattgaagtttatttgtcaaacccttgttaaactcggtctttttccccccccaggagagtggaattcgtgacctgataccaggttctgtcattgatgccacaatgttcaatccttgtgggtattcgatgaatggaatgaaatcggatgtgagtagttatatattgcttcaataattatttaaatgtgaatagtctttccattcttaacactgtgaactttttctctcagggaacttattggactattcacatcactccagaaccagaattttcttatgttagctttgaaacaaacttaagtcagacctcctatgatgacctgatcaggaaagttgtagaagtcttcaagccaggaaaatttgtgaccaccttgtttgttaatcaggtaattttatattttattattaatcaggttatttgatttttaaaatcttaaaggaaatgagacagtgaggcctaagatgtattctgagatagcacatataccagccactcagatatccagaagtaatattgtttgaggttactggtagctgagaagctttgtttcattagacctgtgtcagtccttgttttctgtctagccaaactgatgggttcctcctgtcttgctattgacaggcctctggtgggaggaaccataagatgccctggcccctccagcacataagaaggcagctaaaataactcagatgtcttagtttcattaagataaaagtctgtcacttaactgttttggttgaaaatacttctctggattgcaaacactaacggttatttaattttttcccccagagttctaaatgtcgcacagtgcttgcttcgccccagaagattga

SEQ ID NO: 38944 - DNA, 1640 bp, Homo sapiens
caagcagtcttgctgcagcttcccaagtagctgggaatgcagggttctgccatcacacttggctttgtcattttctttatttggcaacattttagttccacagtcaaatatgtaataagctgaaaaatcttatgaaaatgtatattctgatctttctcagaatatgcttccgttagaaaatatttcctcaattttcattaaaaacagatggtgttcctagaaaagcaaaatattacatatctgtgcaatatgtaattcacaagattcatttgccaaaaacaggtgagtgaatttgggggttcattagtaagcagtcaccaagtttctgtcacagacacataactggaaatgtgattttattctcctggatggacaattgtgatggattttttgggttccgggcttcaggctttgcaatctcatcttctttgcccttcctcttgtcataatggaagaggtgctgctaatttgggttccatcctttcctgctttcagagactgtcctgtgatttcctaaaacatttccattagtttgtttgaattttctgattttcttcccttagggccctccacaggcctctgtgctagtgccttgaatgatggcaagtgtacaaaaaaaattttttttctttttaagacgtttttgttctgtcacccaggctggagtgcaatggcgtgatctcggctcactgcaacctccacctcccaggttcaagtgattctcatgcctcagtcacccaagtaactgggactacagggatgtgccaccacacccggctaatttttgtatttttagtagagacaaagtttcaccatgttggccaggctggtcttgaacttctgtcctcaagcaatacgcccacctttgcctcccagcatgttggaattacaggcatgagccactgcacctggtcaagtgtccaaattcttactccaaaactgaactttgggctgggcgccatggctcacacctgtaatctcaaaagtttgggagtctgaggtgggaggattgcttgagcctaggagtttgaggccagtctgagcaacatagtgagaccctgtctctacaataaataaaaggaaattgaggctgtaatgagctgtgattgtaccactgtactctagcccgagcaaaagtgaaaccctgtctcaaaaacaaaaatcttgacttgtgcaatagccacagttttcctggattctcaatagaaccctatggtgacatttgaaacacaaagctagaggtatgtgacttcaagatggtaagaaaaccatgaaacagacttgtcaagggatgtctgataaattgttggatatctggcctaggggcccagacaatagattttagatttgtaaacatcttaatatggagggttttgtgtgtgtgtgtatgtttgagacggagtctcgctgtgtcaccaggctggagtgcagaggcgccatcttggctcactgtaacctctacctcctgggttcaagtgattctcctgcgtcaacctcctaagtagctgggataacaggcacgcaccaccacgcctggatgattttttgtaattttagtaaagatggggtttcatcatgttggccaggctagtctggaactcctgacctcagatgatccgcccacctcggcctcccacagt

SEQ ID NO: 38945 - DNA, 1050 bp, Homo sapiens
gaggccaaggcaggtggatcacctgagattgggagttcaagaccagcctgaccaacatggagaaaccccgtctctactaaaaatacaaaaaaaattagccgggcgtgatggcacatgcctgtaatcccagctactaaggcggctgaggcaggatagtcacttgaccccgggaggcagaggtttcagtgagccgagatcacgccattgcactccagcctgggcaacaagggtgaaactccggctcaaaaaaaaaaatatttaaaacttgagttgcatttaaaggacataatgaattttcaaaaggaagtttgttatagatctatttttataaagcaagtttgagttttaaaaatatgactcttccttcagatgtttttactttttttttttttttgaagcttgggtcttggtatgttgcccaggctggtctcaaactcctgagctcaagcaatcctcctgcctcagtctcccaagtagatgggactacaggtgtacaccatcacacacaattggatacttttaaaacaaggaacactacctgaattattgctaacagatgtcagttgctttcctagagttaatcagattcttatttgagtgtatagtcaaccaaaactaaatgaaaaaactggttagtgaaatcaaagattgtttatagtaaatggagaatgatgaatggactttcagtatgtgatgatattggtttcttccttaagaaaatcatcaggggccagacacagtagctcacgcctgtaatcccagcactttgggaggccaaggcaggaggatcgcttgagcctaggagttcgagaccagcttggaaaacgtagcgagaccctgtctctatttaaaaaataaaaataaaaaaacttaatatgattatgttttcttgataggaacccattgtttattttgaaatagggtctggctctgttgcctaggctggagtgcattggaatgatctctgctcactgcagtctccacctcccagactcaagccattctcccatgtcagaagcagggactgcaggtgcacgacacgatgcctgg

SEQ ID NO: 38946 - DNA, 1049 bp, Homo sapiens
tagactttggtaattatataattgctttttttttttttttttagaacagtaaatgtcctgagggaacaaaacccatgctgatatttgctggcgatgatttcgatgtaacagaagattatagaagactaaaaagtcttcttattggtaagtattttagtatttattatcttcagggtagctcaggaagacagtctcagactctcactggtggcactttgctactttaggtttgtaacttcttttttctcttattttaaaaataatatttatatacttaaaataatggagtgcttcacaaatttgcatgccatccttgcgcagggaccatgctaatcttctctgtatggttccagttttagtatatgcgctgccgaagcgagcacaacttctttttcctcctttttttggacctttctcttttttttttcccttaccagcagcaggaaagcacctaagtatctcgggagagttaaagcagctgttgtactgtgtagatgattatttctggatgtgttagtaacttaggtattacttgtatagtgttttataaaattcctgcacccatctcctgtcattcctagcatcatttaaaattaaatttagaaagttgagggattaaaatttcaagattgtttgtatcaccgacttccaactcaaaaaccttaattagtttttctgagttgaatatacaaggcctttcacaatatataaccaatgtagcttggccttcttgatctcctattgccttctttttttccattagaaagggtttattgccaatatattattcacatttctattgtgtattctgatattgctcttatttatccagtttctactattcatttaagtgtcagatcatcaagtttcttttccgggaagccctcagtgaccttcctggctccttttttttttttttttttaaagatagagtcttgctctgttgcccaggctggagcacaatggtgtgatctcggcccactgcaacctccacctcccgggttcaagcgattctcctgcctaagcctcccgagtagctgggattacag

SEQ ID NO: 38947 - DNA, 1016 bp, Homo sapiens
aaacaaacaggggctctgagaagttaaatgagagctattaagtaggtaaggccaagttgaaacccaacgcttccaaagcctgagcttttcttcccctactgtccatcttgcctgtggtaaacatattcccatgatcccttctagaatctttataggttcttatccatattttccatgaattaaattcatacatgaaagacaatgactaatatttccttctctcaatattatatatcccaaattatcaagggtatttttctttctttctttctttctttctttctttctttttttttttgagacatagtctcactctgttgccctggcatgatctcagctcactgcaacctccacctcccagggtcaagcaattctcttccttagcctccttagtacctgggaccacaggtgcatgccaccacacccggctaattttttatatttttagtaaagactgggtttcaccatgttagccaggctggtcttgaactcctgacctcaagtgatctgcctgccctggcctcccaaaagtgctgagattataggtgtgatccaccgtgcctggtcaagggtatttttccagccaaaatgtcagccagattttcagctaagatttccattacttgtactccattgacctagattttctgcctttttctctttcccctaggtctcccatataattgtttattgtcagtgaggcagatacttacaatttgttataacagagagagcttttgtttgcatttgtttaaatgttttttgtattttaataagccccaccttctcattattttgtgcttccactagatggcaggaatgatcacataatgcagtggtgaggggaagggagtgaaaaccaaaaaggaatctggacagaagcagaaaggtagaagaggaacagattcagactgtagggcaccaagggaagttgagttttcagtataaatatgaagtaaaacaactgctctttggtttatgttgtgtgttcaaatgaaatatcagtagggagcaag

SEQ ID NO: 38948 - DNA, 1053 bp, Homo sapiens
aatgtatgaagggctttcatttaggaagttccttttttttttttttcttaattgaccagaaagaaaagttaactttttttcatgcaagatacccattttgttcattcttaatttgtttacatcatttttttttttttttctttttttgagacagggtctcactctgttgcccaggctggagtgcagtggcatgatcatggctcactgctgtagccttaactttctggtctcaagcaatcctcctacctcattcccctcagtagctgggaccacaggtacacgtcaccacgcccagctaattttttttatttcttgtagacatgaggtcttgctgcattgcttgggctggtctcagagtcctaggctcaagcagccctccagcctcagcctcccaaagttggaggtgtgagccaacatgcgtggcctattcttcccttcttaaatggtagcatattatatatatggttgtttaaaaaaatttggagtagaggaatttttaattctgattttcattatacaattgagaaaactgaggcctggacaggtgagtagcttttctaaggtcatgcatttaccaagtggcatattaaagttttgaacttaggtctctccaaagtacatgcttttatttcttatttgtttattttttgaaatggagtctcactctgtcacccaggctggagtgcaatggagcaatcttggctcactgcaacctccgcatcagctgttcaagcgattcttctgccccagcctcctgagtagctgggattacaggcattcaccaccatgcctggataatttttgtattttttgtagagacagagtttcgccatgttcgctaagctggtctcaagctcctggcctcaggtgatccactcatcttggcctcccaaagtgctgggattacaggcatgagccaccgtgcccagccatgcttttatttatacagtattattatactttaggttatcaagttcataaagttatttatcatacttcttggtcaaaatcctaacagtgtatataccacttgcatgacgtctttcccaacta

SEQ ID NO: 38949 - DNA, 1041 bp, Homo sapiens
gctgcaatcttggcactttgggaggccaaggcaggcggctgggaggtggaggttgtagctagccgagatcacgccactgcactccagcctgggcaacattgagcactgagtgaacgagactccgtctgcaatcccggcacctctggaggccgaggctggcagatcactcgcggttaggagctggagaccagcctggccaacacagtgaaaccccgtccccaccaaaaaaatacgaaaaccagtcaggcgtggcggcgcgcgcctgcagtcgcaggcactcggcaggctgaggcaggagaatcaggcagggaggttgcagtgagcggagatggcagcagtacagtccagcttcggctcggcatcagggggagaccggggagggggagggggagggagagggagagggagagggagagggcaattgtggttcttgagataagtgtgtgacttctcttttttaaggcgttggtactggctgacagagcccacagtttcctaaagaatacactgactcccacaaattgcctttctctgtacattgagtttagactttgctgtacattttgagctatggtgtggctggtgttgcagcctgagagctgacagcttggtgttgacagtgtcttctgtacagtagtgttgtttgtccaaccatttgtatctagcattttgtacatcgtttttattttgttttcttcacaatgaaaatacatgactgaccagctttatgtcctatgaatgtccaaatgaaacttaaatattcacctcttagctgataatttccatcttgggctcaactgtattaaatcagagacatttagttctttttctccatataattaataccaccgcttctgtttttctgttttcctctcactaaaaataaatgaggcaaaatgcagtaaaatacccaatgatcataagatgtaattagagactttatagtaatttttagctggttaagatcgaaagccccttaagtctcctgtttgagtttccatatgtgatttgggagcttctaagtatgtattatactataca

SEQ ID NO: 38950 - DNA, 1041 bp, Homo sapiens
ttgggctgggcgcagtggctcatgcctgtaatcccagccctttgggaggccaaggcaggtggatcacctgaggtcaggagattgagaccagcctggccaagatggtgaaaccccgtttctactaaaaatacaaaaaattagctgggcatggtggcggatgcgtgtaatcccagctattcgggaggctgaggcaggagaattgcttgaacctgggaggcagaggttgtagtgagccaagatggcgccactgtactccagcatgggcaacaagagtgaaactccgtctcaaaaaaaaaaaaaagaaaagaaaaaaagaaaaaagaaagagcaactttgttttaactctgctagatactggaaaacccatggaactaatgaagagcctagggctttttatttgttttgagattgtgccatttcactccagcctgggcaacaagagagaaactttgtctcacacacaaaaaaagtgtaaatcaaaacattaaaaattaagtagtttggaagtagattatcaaaaaggtcctgaaagggaggttctttggctataatctttaacgcaactctacactccctgtatggagacagatttctttttagatggttacagtcacaaagtagggttttcagtagcatttagggatgaatgaatcttgcagcacctctccatgtatcttgctagcccctctgaaacttcaggtcagttagtgcttcctcagaaattgttccccccacaccaagttttcacatttacagttatactgatatccacattgtactgttgtatgtgacacctagattataggaaattttggctatagttcagaaattaactgctatgttttgcctttacgctaaagagattttgttttgtttagtaggaaaagcggcctgcataactagccatttctgtatcttagaaaaatttttagtaacagtcctttgttgagctagttacagtgaacaaataatctggttcatggtcctatacatctttcactataagaaaaatacctgattgttatttacactggaagagag

SEQ ID NO: 38951 - DNA, 1035 bp, Homo sapiens
gtcaggtgggtctcaaactattgacctcaggtgatccacctgcctcggcctcccaaagtgctgggattatagatgtgagccaccatgtccagccacccatttaattttttgagcacaaaatatgtactgagagccacgcaagaaacaaattcgacttattccatgctcttgagaggtcatgaggggaaacaaaatgatacataagtaactctgagagaatatgctgcacatgctaaatcctgtgcaagtaagatataggattttagaggaagggagaatgacttctgattgagctgactagagaaggcttcagtttttgagttaggtgttacgagattgggagacttttctcagcatatctaacagaagagggtatccgaggtgagagtgtaaggcctgggcaagggttgggaggcagttctaatactgaatgttctgactgtggtttactatgtatttcaggttattttgtttaatctatccagtaatcctttcatgtaacaattatgatgtgtgtgttttaggtggggctactaaggctagtaagtagtgaggctggatttaaacttaagtctccagcttcgtggcccaggttctttatacttgactccacactgggcttattaagtgaatgacaaggagtttgatttgtcgagggccgaggatatgtagtgaaaggtcatagactataaggctggcaaagaatggtggagctggggaacggaagatctaaatgccaaggtaagcttggacattatttaatagaggcaatggggagatactgaggatttctgaagagggtttctaagtagtgctttaaaaagatctctgggttgcagaggcaagaaataggaggaacaccaattacaaagccccgaccgaaagccgagtgagatttgagggtcagccatggaaatgggaatgaagggacagatgtgagacatttcaaaggatagactgcaggaattctggcaaagaatgggttggacagtgatgaagaacacagaaacagcattgatgcctacatctggagcc

SEQ ID NO: 38952 - DNA, 1029 bp, Homo sapiens
gactggattgtgtagggtttgtaggccagggtaaagagcttggatttcttctgagtgtaggattttgagcaggggagtgatgtgtcttattttgggcgggcgctaggccaggtactgtgaaggaaataatggtatagaagaaatatgtctttcttgctagaatcttatgtgacatacaactagtggtggctgatcagcaattagaactgcagtgttcttgctggtgtactcctaatctgatcattggatgatatttatcacgtatttttgcagcagtcatctctaaagtggcattatggttctagttatctatcattggatctgtttgctctaacagtccgaaggggcatgaagggtggaaacagagtagagggaaatgggtgaaaaggctatttctaaacactagacacaaaatagggattaggaagtagtgggggttaggagaaaaagcaaaatcctgttgtgcatggagagggacattgttgaaactgtggcttcttgagattacatgagtgaacctgcgtggactgggtcgtcttccctattcaccaagctgaatccaggcccaatccaagattactgctgcctttgctctgaggctttagactgttagtagcttttctcgtctctactgaggccaaaaggggcagtgatacccttgaattttcttcttaaaacagggtttcatttccttggaagtttgtttctttgaatctttctgtcagtttaactgttatcatcaattggttagcattctaataataattataattatagtaaacatttattgagtgcttacgaagagccagttccaagcttttttatctccattattctgctactttccttctcattttacagatgaggaaaatgaggcacagagtggttaattaatctgtttgaggtcccgtagcaggtcagtgatgccagggttcaaacctacacttaactctacactagagactgttttcttaattatttcttcacaatcatatgtttaatgattacttattgattatttagtggtct

SEQ ID NO: 38953 - DNA, 1147 bp, Homo sapiens
tatgcggatgatttacttttagccgcccgttcagaaaccttgtgccatcaagccacccaagtgctcttaaatttcctcgccacctgtggctacaaggtttccaaaccaaaggctcagctctgctcacagcagagggctatttatccctaaatacttagggctaaaattatccaaaggcaccagggccctcagtgaggaatgtatccagcctatactggcttatccttatcccaaaaccctaaaacaactaagaaggttccttggcataataggcataacaggcataacaggtttctgctgaatatggattcccaagtacggcaaaatagccagaccattatatacactaattaaggaaactcagaaagccaatacccatttagtaagatggacacctgaagcagaggcagctttccaggccgtaaagaacaccctaacccaagccccagtgttaagcttgccagcggggcaagacttttctttctatgtcacagaaaaaataggaatagctctaggagtccttacacaggtccgagggaccagcttgcaacccatggcatacctgagtaaggaaattgatgtagtggcaaagggttggcctcattgtttacgggtagtggcggcagtagcagtcttagtatctgaagcagttaaaataatacaaggaagagatcttactgtgtgaacctctcatgatgtgaaccgcatactcactgctaaagaagactggtggctgtcagacaactgtttgcttaaatatcaggctctattacttgaagggccagtgctgtgactgcgcacttgtgcaactcttaacccagcgacatttcttccagacaatgaagaaaagatagaacagaactgtcaacaagtaattgctcaaacctacgccgcttgaggggaccttctagtggttcccttgactgatcccaacctcaacttgtatactgatgaaagttcctttgtagaaaaaggacttcgaaaagcagagtgtgtagtggtcagtgataatggaatacttgaaagtaatcctctgactccaggaactagtgctcagctggcagaactaatagccctcactcaggcactagaattaggagaaggaaaaagggcaaatatatatacagactctaagtatgcttaccta

SEQ ID NO: 38954 - DNA, 1009 bp, Homo sapiens
cctcccgcctcagcctcccaagtggttgggactacagacatgtgccaccaaatccagctaatttttaaattgtttttaatagaggtaagggtctcactatgttgcctaggccagtctcgaattccaggggctcaagggatccttttgccttgtcctcccagagtgctcggatttaaggtgggagccactatacccacccaacataattcaattatttaatatttcacatgttttagtattcctttgatagggatgtgatgtttgggtgaataataaagtaaatcaaagacatatatttgaaaattatgtagttattctaaaaaattaattatttacctttattttagcaaaatcagtgtgttagcataatcaagatattttggtattctagtaacaagatctagtcacagtaatgatgtaaagattaaaaaataaaatataataggaaccagtataaacaagtggaatttaaatttaaaatgcaataccagctgggtgcgatgcctcacgcctgtaatcccagcactttgggaggccaaggcaggcggatcacctggggtcaggagttcaagaccagcctgaccaacatggaaaaaccccatctctcccaaaaatacaaaataagttgggtgtggtggtgcatgcctgtaatcccagctacttgggaggcggaggcaggagaatcacttgaaccagggaggcagaggttgtgatgagccgagatcacaccattgcactccagtttgggcaacaagggcaaaactctgtctcaaaaacaaaaagaaacaaaaaacacagtaccatttacattagcacccctcaaaatgaaatacttaggtataaatccagcaaaataggtataagagatatataagtaaaactataaagctctgatgaaagaaataaaagaaccaaataaatggacagatattccatgttcatggataggaagactcagtaatgtcaagatgtcagtccttttcatctttatctatagattcagtacact

SEQ ID NO: 38955 - DNA, 1035 bp, Homo sapiens
agtctctacttcttcttcaatatcattttcttcaatatcaaatcaactcattttcttcaatatcaagtcaactgtagactgacagtgtcctacttcaagacttactgtaaagctacagtaatcagaacagtatggtattggtgaaagaatagacaaacagatcgatggaacagaatagagagcccagaaatagacccagacaaatacagttaatctttgacaaaggagcaaaggcaatagaatggaggaaagatacccttttcaacaaatgctgttggaataactggatgtccacatgtaaaaaaatgaatctagacacagaccttacacccttcacaaaaatgaacacaaaatggatcatcaacctagacatgaaacacaaaactatacaaatttctgctctgtgaaagacaatgtcaagagaatgagaagacttggaaaatatttgcaaaagacacatctgataaatgattcttatctaaaatatataggaactcttaaaactgaacaataaaaaagaaacctgattttaaaatgtgccaaacactctaatagatatctcatcaaagaagatatatagatggcaaataagcatatgcaaagatgctccacatcataggtcatcagaaaaatgcaaattaaaatgatgagattctactacacacttattagaatggccaaaatccaaaacactgacaacaccaagtgctggtgaggatgtgggacaacaggaactttcatttattgctggtgggaatgcaaaatggtatagccactttggaagacagtttgcagtttcttacaaaattaaacacactcatcatatgatccaacaattgcagtccttgatatttacccaaaggagttgaaaacttatattcacacagaaacctgcacatagttgcttacagcagctttattcataattgccaaaactttgaagcaaccaagatgtccttcaataggtaaatgaataaataaactgtagcatatccagaaatggagtactcagtgctaaaaaggaatgaggtatca

SEQ ID NO: 38956 - DNA, 1051 bp, Homo sapiens
ctgggcaacctggcaaaaccttgtttctacaaaaagtacaaaaattagccaggcatggtggtgcacacctgtggttctagctacttggaagattgaggtgggaaatttgcttgagcctgggctgtcgagatcacagtgagctgagattgcaccactgcactccagcctgggcagcggagtgagaccttttctcaaaaaaaaaaaaaaaaaaaggcaaaaaattaaattattagtatggtaaagtttcgtttggacttaatatgaaactcatttctagaaatgatgatcatttgcatagggcttaacttcctttgctaagaaaatagagtagtatactaggagacttccagagctgcatagagcttcagggtcatctaccaagacagacaatttgttgtcatcatcagtgttaaactctaaattattaagtgcttatgtgccagatactgaagtttatatacactttctctaatctttaataattctagaaaggtatgtgtttgatccattttcaagataagaaaactcattcagaggggaagtaacctgaccaagaatacgttgtagttgtagagctgggaatatgactcatgtctgttttttccatagcccattttcacttaggttccattagtttattatatattttagaaggacttacagacttgatttcctcagcgaagtcagattactcatttctttggcacagaattatgattatttgtatttaatatttctttcctgttggttttcatttttgagtttttatggaatctgacttctgattctcaatttttttattgtgaaatataacataccttcagaaaaaaagattaaacatatctatggttttataaatgattataaaataaatacccagtaactattatccaggtcagcaaatattctactagtgtatgagtcaatttccatggcaaaagaactaagcttaggcactatactcaaaaaaactaaaaataaaatttttctaaatgtgtattatatcaatggaataaatacaaatataacttaccatgtcataattcccccc

SEQ ID NO: 38957 - DNA, 1071 bp, Homo sapiens
tacacttctgggaaaatgggaattctattcagaggaatatctgagaaaagttactcaagatctaaatgaggaaagagaactatggttttataggaaattaggatttcaagtgctcaagaagtttatattgtttatttctatttcaaaggcaaaattcagctttgttatactgaaatacgaataattaatgtctagactggggttggtgcctcacgcctgtaatcccaccactttggggggctgatgcaggagttcaagaccagcgtgggcaacataaggagacttcatccctacctggggaaggaaaaaaaaaaaagaaggaagaagcagtgtctaaagtatctgcccctggcaacgtttgttcaaaagtgttcattatgtttcttccttttttcttttgtggctgaaaatgtatttacaattcaccgtaaatgataaaaatggcattggcacacatatttgtatgtttgtgaacttggatttttttctagcttacagtctacttttggagatttgtgcaatttttctttagttaagaaataagtataaatataaccgatttacggactatcaggctacatcctgatctgatagtccattttcatactattaggaaagtatagccgaaccaacttaaggtaagtttcctggaatatagatctgttgtgacaggattaactttaccatccaacctctttcatagcttctgtagtcaagagaacatttattgtgtcctttcttaaaaagatgagtagaaattctttttcttttttttcttttttccagacagggtcttgttaagttgctcaggctggcttcaagcaaccctcctgcctcagctaggattacaggtgcaagccaccacacccagctttaaaaaaaaattctctttggtactaccacatgaacacacctagagaaatcataactcagctttgctaatactagacatttaccaaaggaaaagtggtagatgactgtctagttatttttggttatatatttataatttgtaaattaatttcacatatattacttcatttgactttcacaataaaccagtaaagcaga

SEQ ID NO: 38958 - DNA, 2103 bp, Homo sapiens
tcctatcaaaaagggtttatatttcagatctgtttcctaaaaaaaaaaaaaagtctgatgtctgagatgtctgaatcagtcctgtggctgatctagaccccctacagagccacacttgttctcccttggtgacagctttttcccttctcagggttacttcgtgacaaactgggctcctatgatgtggcattctacctcgctggagtccctccccttattggaggtgctgtgctttgttttatcccgtggatccatagtaagaagcaaagagagatcagtaaaaccactggaaaagaaaagatggagaaaatgttggaaaaccagaactctctgctgtcaagttcatctggaatgttcaagaaagaatctgactctattatttaatatcttacatacctccaccagactggacttgctttttgaattttaagcaagtttcctttccttttatacaaattgcaaatttcatatttttttaatcacatcctaggaatagcacaataattgggaaatagaacccttatcactagaagaaccattttctgccactaaatatctctgatgtttccatgagtctgagggcagagactctggtatatgaaaacgtctgaaagtcacatattgtgaaaatttgaagctatctcagtaaaaagcagctttggaaactgtgaatgatctttagcttgtacaaatgtttaaaaatacctcaggctatactgaaagggttgcagtttggttaggagtggaaatattttgtttgttaatgatgtcttcagttctggtacctctgttttactttcttatgctctttggaaactttttgcaaaatttaagcctgggttctagataataccagatctacctaaacctcaagtctatgttaaagttgctttcctgctgttaaataagctatgatattaagatattctgacttgctccagtgtcaagggaccttctgggagcaggtgctaacatagtgttcagaatcaatatgtgagatgaaaaggatcccctccaggaggatcctgagctgttcagaaatcatttaagtttacagcgttgttccctttgcgtttgcagtgcgttttactcaagtagccagaaacaccccacgtttctgaatttgtttaaactgtaacaataaagtaaaatagaatgcatgaaagatattctggcgattgtaacttagaatttttctgacttctggatttgttggcactagaacctgatatttaaagtcttactgagcagctatcaagtggcagttacaggcacaaattggtggaggctggaggatggggaggggagcaaaaccctttatatttgtgaagaaaatatctgtagctgatagaaataattgcttaaattggtttatgaaattaatgagtctgaaaaggttaaaagcacttataaaaagaaccaagtcctacatttccagaactttctggcaaaaatttgcactcatattatttatcctatgaacattcccattgtttttttttgctatttatatacagattatcataagaaagctctcagtttgaggacccaaaataaaaccaaagtcatgccatgacccatactcatttacaaaaacaagaacactttcctctatccctaaaattatgctttagtacttgaggcctttaaaagttagtgcttttgattgtgaagacattcagcaacttactttgtcatacatgcagttgcaccttaccacttctaatagtgtcatatttcatattcaggggacttagataatttgcctgtggatggttcttttgcaggaaaaaaaatctacattttgaccatactaccctttcatgtccttattataagcttttagaaaatgatttcattcagtcatgtccagttatataaaacgttactttctcatttttgagaagttcaacaaaacatactactaagaccaatcatcaaacccactattataaatgttaattttggctgggtaaggtggcttgcgcctataatcccagcactttgggaggctgaggagggaagattgcttgagcccaggagtttgagaccagcctgggcaacatagcaagatcctgtctctactaaaaataaaaaaaaaaa

SEQ ID NO: 38959 - DNA, 1050 bp, Homo sapiens
atttacaatgcttactccatagccctgctacaagacttaaaatttccactgaaaattgcatagttcttgtattaagattcaaattctggctgggcgcagtggctcacgcttgtaatcccagcactttgggaggctgaggcaggcggattgcctgagctcaggagttcgcaaccagcctgggaaacacggtgaagctccatctctactaaaatacaaaaaaattagccaggcgtgtcggcatgcacctgtagtcccagctactcgggaagctgaggcaggagaagaatccaggaggcagaggttgcagtgaggcgagattgcgccactgcactccagcctgggcgacagagcgagactccatctcaaaaaaaaaaaaaaaaagtaaaagtacacacagtttaaaagtaaacatgtttacttcggataattctaatccttttagctgcatttaagaatattttaatttatacgaatgttacttgaaattggcctatgtccagatgacttttgatgttaaatcaatggaaaactgaatagaaaatatgacacgagatcggggagggggaaggcaacctatagcatgggtggctctgaggagttcctgctggtgcactttcatgccctttcttatgtaccttttgtcttactcttcttacattattcttatcctcatcattttttcatttccctttacttcctcctatccttcaaaaacctcctgaagagtccattaacatccatgcttagttccactggttgcatggctgtatttcctactgatccctgtagtttcactgaatggatccccacccaatttcgtgtatcctggtgaatggctttctctcagccttcgacttagttctaatgatctacattgaatttaaattacatgactgaaatatttaagggaagaaataaatttcatacaaattagtatcttttatgctaacatttaaaactgtatttaaatttttaaggtaaatgctttggggaaaaaaaaaaccattgccaagtctttagcatattttcagagagcgtaattttttactt

SEQ ID NO: 38960 - DNA, 1073 bp, Homo sapiens
cagagcatgattataaacatacgtggcaagatttctactaatatgctggaaattagctaatatttttaagaggcaaaatctcttgatctgaaattttagaaggctatagaagtgattttaaaatatgactaccatgctaaaatgtattttttataaaataaatattttgtacacgccgaatgtcagatacacaatatcagtgattctcagtgttccatgacacctagaattctttaagtgttgatattttggctcttactgaattatattttgggggatggggcctgggaatctgtattgttagcaacactacttgccaccccgtgattcttaagcaaaataaaattgagaatccttgtactatattataatcagtgtatccataacttttaaattataatattcctaactagaaaatggtaaaagcatcaaattaacagatttgcgatttctagaagagggtttctttccccttacctcttgaatcaacattatttactttaagaaaaggcagttgcaaccacaagtcaaatccttctagaactccaagaatgttcactcttgaagaaaaacatttgcagcatgaaattaggaatgttgtgttcattgcatgtaatttagttttaagttgatgctcaaattgaaaacctgacaatagccccctaattaaccactatcaaatgtgttttatatgtatattcttcctgaagtaagaaaaagttctggaattttgagtcagagaatgtgaatattaaaccatcatttagctaagtgctcacttattttttggaatttatttcctcatctgtgaaatggatagtaattcctgttttaacttctcagggatgttataaggctcaaatgagataatgtatgtgaaaatatagtaaaatgttcatatccagaagtctgattcattgagaaacagtaaaatcacttggaattgacttatctacatacagtatgagaaatgcaaaaattgaactctatacttaatatccttaatgctttttttttttttttttttgagacagagtctcactctgtcacccaggctggagtccagtggcaca

SEQ ID NO: 38961 - DNA, 1042 bp, Homo sapiens
tttttttttttttttttttttttttgagaatgattcttgctctgtcacccaggctggagtgcagtggtgcgatcttggctcactgcaagctctgcctcccgggttcacaccattctcctgcctcagcctcctgagtagctgggactatgggctcctgccaccagtttttttatttttgtagagatggagtctcccaatgttgcccaggctggtcttaaactcctaggctcaagggatcctcccagctgggcctcccaaagtgctgggatgataggcatgaaccaccattcccagcccatttcctttttccctttgcacagtaccagatatatggttggtactgcagaaataatttccccctgccctctacattgatcatttgatgaccaaatagtgtccgtctagccacttatttatgatttgtacaaaacattccgctttctgaggtagacagtgatattctgaagccatcagtaagagtaattttcagtttgttgaaagtgaacattctttgtgtaaaggtcagcctgtcaggaaatagcatgctactctgttcttttaagattatttttaaaacctttgaatatgtgtgtttttacactttaaaaaaaaaaaagtagtgagaaactatacctagtggtctcaccagatgttttcaaatcagaactggggcaatctagttgtaatttattttcacaaatttatgagaataagagctgatatttttcttgcttgaattagcaggtaatttcattctccattcctctttagtggggaaaatctagcctttggatgaaaatgtgaaccagaggttcttgccaagtctgcaaagcagtataaagattagttttatgaatgaaggaaaacactactcatttttcttaggaggctgcttacttctgcatttgtataacatgtttttagactgaaagctcatagagaaaagagaaggatcctcattctagaatatctgctcccctgtacttagcatattcatagtctttcaagacttaatttattaaagatgttaaagactttgaca

SEQ ID NO: 38962 - DNA, 1043 bp, Homo sapiens
tattaacaagccgtccaagtgattctgatgcacactgcagtttgaggaccaactgaactagagcttgaaatagagattaggagtagaaataaagatgtgtaagtcagatacataacagtcactcttgagagaatgaataaactccctagaagagtggaagagagaagatgagcccttgaagtaaatggaacaatcaaagaaataaaaactagtggagtacaataaaagcgggagaaatttaacagtggtatgaaatgacctatagtgtcaggtgctgtacagaggccagcatggatgaggatcatgccaaagctgtaagactgaccattaggagaattttggtgtcagttaaaagagaagtggtacagataagagtaaatgcaaaggaatacaagcaaaaactaaaggatactttttgcagcagtttgggaatacaacaaagggacttagaataatatggtcaggatgaggtttttcagggtagatgcatcatttaggttttgctgtataacaaacactctaaagtggcttaagacaataattattattatagctcacatgtctgagggttggctcctcccagctgggcttgctcatacatcagcagacctactgggagctttgctctaggctggacacttacctatcatcctccttctgtgactgtccagctcacttaggcatatctttctcatgaagatggaagaagtgttgaagagggcaaacagaggctgggcgcggtggctcacacctataatcccagcactttaggaggccgaggcgggcggatcacctgaggtcaggagttcgagaccagcctggccaaaatggtaaaaccccgtctctactaaaaatacaaaacgtagccgggtgtggtggcacatgcctgtagtcccagctgctcgggaggctgaggcaggagaatcacctgaacctgtttgcgccactgcactccagcctgggcgacagagtgagactctcccaaaaaaagaaaaaaaaattgggggtggcggcaaacacaaacacatggactccaaactgac

SEQ ID NO: 38963 - DNA, 1031 bp, Homo sapiens
agactactgcctaggacctcatttgtttccttgaaaactcctaggaaaatattgggaaaaatggcagatgattggtaatgatagaattgaggtaaaaaaaattaattgtgtatgatgggggaattggaagtaatttatatgcctatttataggagtttgcctaaaagcaaattccatgaggattaggactaacactgaccaacagtatgttcactgtactctcattatctactatagtgtaagtatttaatatttgttgattgaatgaataaatgtacatatacatttcagtcctgaagtaaaatgcagccattaaaaaagatgtcttctattagcagtctcactcatatgtatgtactcaaaaacctgaaattcaatgtttatatcaactttattcataactaccaaaaactggaaacaaccctattgtctatcaactggtaaacagatcaacgaacattcatataatgtacatccatagaatagaatactactgagcaataaaaaggaccaaattacaaatatatgcagaaaacatggatgaattgcagcagcattaggctgagtgaaagaagccaggctcaaaaagcaaatgtatgattccatttatgtagcattgtagaaaaggcaaaactgggctgggcccagtggctcacgcctgtaatcctagcactttgtagggggccaaggtgggcagatcacctaaggtcaggagtttgagaccagcctggccaacatggtgaaaccccatctctactaaaaatacaaaaattagctgggcatggtggcacacccctgtaatcccagctattctggagactgaggcaggagaattgcttgagcctgggagatggaggttgcagtgagccgagatcgtgccactgcactccagcctggccgacagagtgagactctgtctccaaaaaaaaccaaaaaaggcaaaactgtagggattgaaaatagttcagtgattgctggagaaggagcaagtgcctctaaactacaatcaggcacaaagacagtttgagggt

SEQ ID NO: 38964 - DNA, 1022 bp, Homo sapiens
atttaataatgtaattttaataatgtaaagatttaaataatgtaatttaatgtagttactagaaaattttaaattttatttgtggtttgtatttttggcttgtatcatattgctattggacagcactggtctagaataactgttaataggattttacttgtattagcttcacattgggtcttaaatcaacagcgtaatgcaggaaaaggattagcaccccattaaagaccaaattgacaacttctgtgtattaatatgaacatacctaggaattctcaaaatttataggtagaagttgagacaaatagaaataatagaattttgacctggaaaggaactttgatgtcatcaagttcaaaccccttgtcttacagaattatttatcaacctggcaaagatatatttggtacttaaggcattctaggtaagtattgaataggtatgtctgtgataggtgagtaaggtgagatgcctaccctggagaagctaagaaggattgtattagactgtaacagcacttactaggcatgctgacaggagtgctctcaaacacagaggcagaggcaaatacgggctcaaatttttgttttgttttgttttgagacagagtctcactttgtcgcccaggctggagtgcagtgacacgatctctgctcactgcaacccttcgcttcctggattgaagcgattctcctgccccaccctcccaagtagctgggattataggcacccatcaccacacctggctaatttttgtatttttagtagaaatggggtttctccatgttggccgggctggtctcaaattcctgacctcaagtgatccccccaacttggctggattacaggcgtgagccaccatgcctggccagactaaatttttttttaggaagaatcagagacgctccagcactttgggaggccaaggcaggcggatcacgaggtcaggagatggagaccatcttggctaacaaggtgaaaccccgtctctactaaaaatacaaaaaattagctgggcgtgg

SEQ ID NO: 38965 - DNA, 1048 bp, Homo sapiens
cttacacccagaccatactatggaagattcctagtggaaggaaatggaaataaacagtattaagtcataactgcgtaaaattaactgtactagtgtaatagttttgtagcaacctcctgttgctgttgcagtgagcttaagtgttgggagtatccatttaaaattctatgtgatgctaatcaatcatctctgagtgaacagttcgcctccagtaaattgcatatctcagtaaaaagtgatctctaggggttctcgagtattttttttttatcttgtttagttcaatgctataaaccttggatgtatgggaccatggggcccatatgaagtgccaccagtgatgctagaaatgctcccaataagcagagaaaagtcaagacattaccagaaaaggttgaattccttgatatgcaccatagattgaggtctgcagctgcaattgcctgccatttctagatgaatgaattcagcctaaagaccactgtaaaaagacacagtggctcatgactgtaatcccatgctttggaaggctgaggtgggaggatcacttgagtccaggagttcaagaccagcctgagcaacatagcaagactcctgtctctatggaaaataaaataaaataagtctcatgttaaaaaaaaaaaaaaaaaagccaagcatggaggtgtgcttgtagtacttgtagttcaggaggctgtgctgcagtgaactgtgattgcaccactgcactccagcctgggcaacagcaagatcctgtctcttaaataaaagaaaagggaacttgggaaggcattgctgcagctatgccagtgggcatgaaaactttacactttttgcaaaatacaaaatatgtattaatggactgtttatgttatgggtaaagcttcaggtcaatggtagactattagtagttaagtttcaggagaatcaaaagttatatgcagattttcagctgcatggtgtggggaccccccccccccgccgcccgcattgttcaagggtcaactgtactttaaaagaagtataccatgagaaaagtatgtatttt

SEQ ID NO: 38966 - DNA, 1078 bp, Homo sapiens
aaacatcttttgcttgtgacccatacaaaaccaggctgtgggttggatttggcctgtgggctggagccaccaattgctgttctaaagaattctttagggctactttagccatacttttgttattaaatactcctctgtcgagtcagagactattcagggtctgagattttaccctactttgaagccagtaaatgagcttgccacagtttaacagatgctggcagaagacatgagactcctaggtcagaaacagacaaccttattattcacagtacagcaaatagcatgggctttatgttctcttggttttccttgttctccaaaccaagacaatgaggacaatgtgagtgggtccaggtaaatgctacacatacagttggtctgtgtcacatctgaggagccccaagcttaggaaacccctaatcttataaggtaaccgctagtaaatctgccacactttgtcctggaagaagccattcactttatttttctggtcaggaaacaaatctgtcctctgtgctggagggtgacactatgccttccaaaggtgttggctagacaaacatcctttgaaagatagtctaggtcaaaatttgtcacaagacacacagaaatgccgtggagaattgttgcttagcacccacatgttcaagaggcatttccactggttgtaactcaaatgcttgtcagccctgtgaaagtgttgctgaggtctcagtgccccagtagttcttcctctgagagttgttctaatagttgttctctgcctggccttacatagtcccattttatggatgtacatcttagtattcacgtagactcaagatgatttttatgcagatttctggagctctgtctcttgacagctttctcttctcttgtggtgctctctttctcaaattgtggttgccctcctaagttcctgtctctctcttaagcccagcaaaaccactgtactctgcttaggttctccttctttgtatatcagtcgatagagtgcctccaggcagaaggctggaactcagttcatttttctttcccaagggatcacagtcctcctgtactacctgttgttcag

SEQ ID NO: 38967 - DNA, 1280 bp, Homo sapiens
atacctaattactacatatttgtacatatttaaggaactatataatgaaaattatttaagtcaacatggggaggggtttcaagagaacttttatcctttaaagaaaaagagatgtgagacacactaatcaatatggtggctctctttcagtctcagtgtttgctcaaccaaccctcttgacttttccttcttggctagctcacagagtgggctgtgttggagatgacagtgaaacctcatttcttggaaaagcagaatcagaggagaggatagcagtgttctacctgaattcaaatcttcctttttaataataagtataatatgaacacaatactgtctttcaagttactttttaaaatactttcaaatccattatcctatttttgaagccccattgtgaatctcttaagtaagtttcctttaaagtcaaacatcattggcagattttgatatgttatacctttaattattctagccagtgctgctaggagctttgctccttcgcaagatgttagaggaaagacatctcaaggtgctctgaatgttctgtgagtcagctgtggcctctcccaggccttattaagaaaataaactatgctgatgagctcccctgaaaaattagatggaggttttcagcttaaaactcatattgttgacctctcctaggctttctttttaaaatgaaagttttttttttgttgttaggatttgctgtttaactttttggaaataaggtaatagtcaaagtccccataatcattaactgtgggatagaaagcaagaaggaaagagcacgaaagaaaggaacatttaccgagtatttactagatgccagacagtattctagaagctttctattcttcatcttaccttattctaactatctccatgggagtcggttctgtcgtccccatatcattggctgaaattctgagaagtaaagtaatttgcgtaaggtcacccaacttgtaataagtaaactgaggttcaagcccacctttgtctggttccatagctacactgtgtgagtgagaaacgtgaaaacacctcacagactcagcttgggcagtgttttctgcaacagattttgtctggggaacttggacaatgccaatattcattcatagagtttctttgcccattccagcaaattatcattttctgctttctcgctcagttatttgtatacttagctgatggactcaacttcacacatttcccacaccctacttagcagagtacagaaatccatttgctctctcccagctggttccaacact

SEQ ID NO: 38968 - DNA, 1565 bp, Homo sapiens
actgttgacatataaatggaaatctgattttgaagaccctttaaagaagttgctaccatattagatagcatctttattattttcgttgccagtattcccacgagcattctgctgagatgaacaatcagatgacctcgtgtgagatttggaggagagaaggaaatggagagcatgcgtctgccgcttctgtggtttctgtcggtaagcacagtgatgaggtgctgagttttccccagaaggcctcccagtgtcctattaccagcttcacaagcgtcgagggcagggcatgggcatctattgttcaccagtggagatctatctggcacagaaccgatccaaccattgcagtggtcacagcggtgttggctttctgattctcaaccttcctgaccgccagaggagacagcctctttggtggccctgttctgtggtattgtgctaaccggtggtgggactaaaactgtctctataatgttttatttcttaaaaaaaaattctgaagcaaatgtgacaatatgttaacattcttaaaatctgggtagtgggaacatggatgttgttatttgtggtgtgtttgaaattgtgtcatattataaattttaaaaaaatgttttgactacaaaatctctatgtatatgcccagtttttgtagattgttgcttacgcttttcatatttttacccaaggagtaatcaggaattctaaaagtcttatgtaacaggatttaaaataaaattacacagaatctcaactgtactatattttgaaaatatgaatgattaagattattttttatatttttattaatatagagaaaataatttctataaaatatgctttcagctaatgggggatcccattccatatttttttctttttcttttttttttttatttctccaagaaaaactcattccagttcttttgcattaaattctcttataccaaaaaaattgtttcaaaagttgcttagttgttatagaagatgattgcttatatgataaagaaatgttaaggccttgataatattcaaaagcttctgtataaaaacaataccatggaaattaatgacagagtaaactttctgaattaaagttctctttcaaactatgagtaagaggagaattagctggcttcttttttcttttttttgaggcagggtcttgctctgtcacccaggctcaatcacagctcactgcagccttgacctcctgggctcaggtgattttcccaccttagcctcctgagtagctgggaccacaggcatgagccaccacacctggctaatttttgtattattttggtagagatgggatttcgccatgttgcccaagctggtcacaaacttcctgccttggcctcccaaagtgctgggattacaggcatgagccactatgcccaacctcagttggatgggtttgtgtgtatgtgtgtgtgtgttttgtttgttttttagtttttgagacagagtctcactctgtcacccaggctggagtgcagtggcacaatcacggctcactgcagccatgacctcttgtgctcaggcagttctcctgcctcagcctc

SEQ ID NO: 38969 - DNA, 1048 bp, Homo sapiens
tcatcttctagcacaccattctctccttgctcactctgctaggccccactgacttgcttttggtatcttaatgacatcaagctccttgcttccttagctccttgcttccttgaccttctcatcctttaggtttcagctcagatgtctacttaaagagattctctggtcaacctgtctattaatgtctgttccaacaaccagttacttcccttatagcacttataatttgtcattctgtttctgacttctacttcttatccatctctccagtagactgtgaattccatgaaaacaaggacggtgtataactatttgctgaataaattgataagtggatggacaggttctgtttccaaatttcattgactcccttctttgcttccctcccaggccaaaaaaaaaaaaatggcttttccaaggcttcacattacaaagactctactcatgattaaggctcactcctttccccaggaagtagagaacagatttctttttattcattcaacaaatatttattgaacctcgatggccaggcacttggtgaacaaagataaataggatacagttcccttgggattagctcaaaataaatggagagagaaagagaaaatctatgtgtctgtgggtgtctgtttttaaacacaaacccacactagttagtgtgtgagaaggggagacatatgagtcgacagccacctacttgagaatccctgttcagaaatagcttccctgcggacttgtccccaatgcctacagttccatcaagagagttaattctgtaggagagggaaggtggatgatgtgatagacaaatgatttgctagcatggtaactcctcagttcagaggcagtgttaatcacaaagcaaaaatgaaaatcttgcacaatcacaaatgggcgcccaggactgtatgttatttgtcaatcctgtgatcttcttggcctgagtacacacgatcttcatgttactgagcttttaccatttggaatatgtaaaccaaatcctaaatgaggttttccatttatcagtcacaacatgcaacatttt

SEQ ID NO: 38970 - DNA, 1066 bp, Homo sapiens
atcagtcaatactgtagggggaaaaaactcaacaaaatagtagagaatatgaaaatattcatatgggctgggcgcagtggctcacgcctgtaattccagcactttgggaggccaaggcgggcagatcacctgaggtcaggagttcgggaccagcctggccaacatggcaaaaccctgtctctactacaaatacaaaaattagccaggtgtgatggtgggtgcctgtaatcccagctactcaggaggctgaggtaggacaatcgcttgaacccaggaggtggtttttgccgagatcacgccactgcactgcagcctgggtgacagaggaagactctgtctcaaaaaaaaaaaaaaaaaaagaaagaaaaagaaaatattcatatgtagtaatgagatgaatttttatgctgacaattgaataagggagtatttttgtacgattgagagtgtactacaaatcagagaccccaaccacacatgaggatccagttgagaagaaaacaaaggcagcagcacgtacctctggagggctgctgcctgccctactctgtgctctgttctgggacagacccagcactgcgcctctcccaccacatgaaagctccaggataagtagagccgttctcactctcaaagcctgctgcctggatacgcataccctcctggcaggagaaaaattatgtattctattaatttaaaatatttttcctttcaactctgcctggttggcagaatgcatatagaagtaagagtaaatggggatagcaattctgtctatagaaaatatgttcttagaattgcatcttaaaaacaatgaagctggccgggtgaggtggctctcacctgtaatctcagcactttgggaggctgaggcaggtggattgcttgagcccaggagttcaaaaccagcctggccaacatggcaaaacctcatgtctacaaaaaattagctgagtgtggtggcacacgcctgtagtcccagctactcgagaggctgaggtgggaggaacatctgagtccaggaggttggggctacagtgagccatgattgcacactgcacttcag

SEQ ID NO: 38971 - DNA, 1033 bp, Homo sapiens
gtttaatttttgttcacagcctcaacacccggggcggtggatcagtccgtttattcagattccacgggacgctgcgttggcatctctgttcaacaagccctttattctaatagaaaatgaacaatggcgttgagcaaagagaaaccccagagaaatagtcatgtcagggcacaattgaaactagatggttatacgctttgacaaaaatggcaaagctaaggtcacagacccaaccagtatttgttgaacgctgtatactccccaaattaacttgtaggctcgctgggaagattagaaagaaattaaggcatagatccagttccaagaagcttacaatctaattgaagacatacacgcgaaatacttaaagaattgtgtggcgttgactataagtgcaataggattcagtggttgaggatgtagatgagtatgtagaagtctgatagaagacacgagattaacactaggcatttagatgggtatttagatgggataggcaggagaagattaaaaagttaggcattatgacaattaccaactacttaaaattgtcaaacattaaaatatgtaaacttctattgatcaaattagaccagattttaattaagaactcaagtacttctttaatgaaattaatattttccacaaaaattctgaagaactacgaaactctaagaagtcttctttgtttaataaaaagttatatggtatgtgctatgaatatgtgctaatatgaactgtaatattcaatggattagaacactttattgtcccaccaagacacgtagtagttactattaaatttctctggtagccggtaggtttaaagttgcaatggattttatatcttttggtaataggcagctttcggtcagtaaatttttgtaggctggatttattcttaacttcttactgagtatggggtcagtggtagaggtaaagttgggcattttaggtcttgatgctaaagtcccaacgtctggggcttccaaaatttgcaagtcttggtccagtttgtaggcagtgatgtgaa

SEQ ID NO: 38972 - DNA, 1081 bp, Homo sapiens
ttgcctgtactgagaaagtcaactgctgcaaagataatgtgtattaatttagttcttttttgtgatacttacactagaaattcattttttcagatttctccctaaagccctttggctactcaggaaggccctgcgtgaaacttgccaaggattccatatgacaggtatccccccgactcccctgttgcctggcacatttatcttaggtgcccctgtgggcaggtcaggtgatacacccctcaccccactggagagtacttttgaaaggtaggaaatctgagtcttgctagctgaaaactctgactcagccttaactttcaaagtagaaatgcccatacaaatacagtgactttttgtttctgacagaatttaaacctcattgctatggtattaacggggatgctacggcaaccataaactactaactataattttccctgaaaacagctgccatggagctgtggaatattttccttagactttaaagcattgacatttcaaggaaaactcagccttcttggcacagtagagcttactcaaactaagatgtcttaaataaactatttgcacacatgaaaacttctataaatgtgtataaatgtattatcgtaaatgactcataccctcaaaaatgatataattttatataagttatattacatatcatactatggtaacctataaagggccgatgccttatgtgaaatacttaaaattttatgataaaaaatttaattggccatgatcatgtctgttaagtcactcagccaaaagtataagggcaagagcaccagtcttagaatcgggatcactgtgatataattatggctttgatttaacaaccgtgtcatcttaggtacatccaattggaaagctgctctttagagtgggtggatttcaattgttgatgttactgatactagtgctccaacccaaaagccctcttcattcattctctcaggaagaaaggcagcttgctgacttgctgtagttgagccacacacatagagttcaagtgatgttcagtggttgtctattagagacataattcagaattttaaaaaaaaatctaattaatagt

SEQ ID NO: 38973 - DNA, 1057 bp, Homo sapiens
caacactacaagtcttgagttaagaaggaaagaggaaaaaagaaaaaacaccaatacccagatttaaaaaaaaaaaaacgatcatagtcttaggagttcatttaaaccataggaacttttcacttatctcatgttagctgtaccagtcagtgattaagtagaactacaagttgtataggctttattgtttattgctggtttatgaccttaataaagtgtaattatgtattaccagcagggtgtttttaactgtgactattgtataaaaacaaatcttgatatccagaagcacatgaagtttgcaactttccaccctgcccatttttgtaaaactgcagtcatcttggaccttttaaaacacaaattttaaactcaaccaagctgtgataagtggaatggttactgtttatactgtggtatgtttttgattacagcagataatgctttcttttccagtcgtctttgagaataaaggaaaaaaaaatcttcagatgcaatggttttgtgtagcatcttgtctatcatgttttgtaaatactggagaagctttgaccaatttgacttagagatggaatgtaactttgcttacaaaaattgctattaaactcctgcttaaggtgttctaattttctgtgagcacactaaaagcgaaaaataaatgtgaataaaatgtacaaatttgttgtgtttttttatgttctaataatactgagacttctaggtcttaggttaatttttaggaagatcttgcatgccatcaggagtaaattttattgtggttcttaatctgaagttttcaagctctgaaattcataatccgcagtgtcagattacgtagaggaagatcttacaacattccatgtcaaatctgttaccatttattggcatttagttttcatttaagaattgaacataattatttttattgtagctatatagcatgtcagattaaatcatttacaacaaaaggggtgtgaacctaagactatttaaatgtcttatgagaaaatttcataaagccattctcttgtcattcaggtccagaaacaaattttaa

SEQ ID NO: 38974 - DNA, 1043 bp, Homo sapiens
ctgctgataaagacatccctgagactgggtaatttataaagacaaagagatttaatggacttaccgttccacttggctggagaggcctcacaatcatggccgaaggtgaaaggcacatcttacatggtggcagacaagagagaacttgtgcaggaaaactcccctttataaaaccgttagatcttgtgagacttattcactatcatgaaaacagtacaggaaagacctgctcccatgattcagttacctcccaccgggtccctcccatgacacctgggaattgtgggagcttcaattcaagatgaaatcagagtggggacacagccaaagcatatcaaacagcttgtttgtttatagagaattaactgcatatcaaatatgtgagtcagacttaaagtcatagagaactgaccacagcaacccctgcatgaggctcagatttggaaagatctcttgttcctggcctcctcatatcatatatagttactttatcattacttttagctctgtggcttgcactaagtctcttggtctctgttgcttcctgaaaattgacaagaaatgaataatccaagtgatctaaccccttcaactctgtctgtctcacaatgcatccttctcctcaccttaacataggtattggcaaggttaaaggaaaaacagttggaaatctacattaagacatgatagagaacaatgtctgggttcactagctttctgggcttccacagagtctttccctttgtgtcctgcatgaaacggtggacacatctgctctcccatccccagccctgttctctggaaaatctgcctttgaattttatagtgcccagggcaaaagagctagacaatcctcatcttcccacctaactccaaggtttctagtgagaatcaaatgaaataacatgtacagaagtgctttgtaaggcaatataaacacaatccatatataggtatgaatataatgtttttcttaaaattctcacttcacatctccttttcttatttttgtctctctttctaatatgtgtgcatagaactgc

SEQ ID NO: 38975 - DNA, 1065 bp, Homo sapiens
gggcggtgctcgagggcgcgggaggcgggagaggctgccgcgccgtgtgccctggcagccgcagccccgccccgccgcgtccggcccggtcctgtcccgcagcgtcccgccagccagctccttgcacccttcgcggccgaggcgctccctggtgctccccgcgcagccatggctcagcacttctccctggccgcctgcgacgtggtcggattcgacctggaccacactctgtgtcgctacaacctgcccgagagcgccccggtgagtggcgcgggctccggggcgcactgcgcgcaacctccatggcggctggggcttgagtttcctccaggtttgggcaacggcggacgctgcccggggcctgcggcggccgagtcttgccgcagagcgcggcctccagcggcgagaaggggcggaagtgtgcagcctccgctccgcgccggtgccgtggggaccggcacatttacctcagccattagctaatgttgagagggatagggaagaacgaaggaggggcaaactgcgcaagaccgggctggggaatcggtgatttctagggccgaggaggggcggggtcagggggactagggctgtccttgaagatctcacgtcgtggaactttctctgcatgtctttctggacaccagctgattgtggacacagccacttgatttggtacttgcattttttttggctgcatttttctgtttgcacgatcaaccacccatcagtgtttaaactgcaatctgggagagatgcgtagtatatagtgtagtgtattgaaaggaacactagttgaaaagtcattaagatcttagccctagttttaccttctatcaagagaagaaaatacatatttattgcgcatcgactacgtgctccgtgcactttgaatacattccagtcctaccaacagtctgcgaagtttgggtcctcactgtgccctgagggagggggacatggagtatgcatgcttccagacctgtacactcaaattaattgccctccctccactattcctttggtttcccaattcccaaggaaactaattttgaaaagttacca

SEQ ID NO: 38976 - DNA, 1045 bp, Homo sapiens
aaaagtaggtactttgctgtgtatcttacttaggatttaatttaagcttaaatattattataaagttggttctgactacattttcagaagtccttttatttgtgcttctttcatggctataattgcccatattccaagctgtgctgttacactctcctttaccacgcctgccacgagggtcattctgtgagttccctagaattgaagtccagttttgctttttcatggcctgggcataagggttggtgacttgtaaccattagtgtagtagttatagacaggtgggcaaaatgtctgccggcagaaattttgttcttgttgcttaaggaacaaaactggctgacccagagtgagggcagagatatcaccaatcttgagcccagagttttacctttccaatcacagctttgcttggattacacaagattgcttctaaggaataaatagatgcctttatagtatgttacctcagtgacttgagccacattgtcctgattaaactaataggatgatggattcttaagagtagtatttttcagcttggaaaaaatgttgccttgtgattgacaaaaaaattgcttgcctttttaaaatgtaattcaagccatcaaaacaattttaaatattataaccaaaaacatgtcaagacaataaatagtaactgcagaatatttgttcaaactgcatatttctctgtcacctgcttctttccctcccaggagaaaattacaactttggggtgattttgtcatttttctatccctagtcatcagcccttgaccctgactcagattgcatgtggttttgtgggtacctcttcacagtcaacaatgagtggttgggtctgtgggaataaagatgcatcaccaatatagggacatatccatgacaactgtaaaagccacccatcactttattgtcctacttttttattaactttgaacaatgaaaagccttgaaagaatggttgagaacagcaaattgctgctttcaaattaattcagcctaaaaatctattgatgttattttattgcgtcgtaaataa

SEQ ID NO: 38977 - DNA, 1068 bp, Homo sapiens
aaataaaccagctaccttctttatacaattggcagttatttttagcttaaaatttttaaacttgattagttttgattagatcaagatttctggattacatgcagttatttgtgcaaaagcagcatctgagaaaaaaatttgtacacacaaaagttctgattttttgcaggtatatctttcaactatattttcaagtatatcctttctactacacttattggatattcttgttctacttttttcacagatcactttgttgtaataatttgggctaattcagaagttggaaagtaacaccaaagttaaatgcattttgttaaagagattattaagattatagaaagcaacaagcaacttgttaatagaacaaaatatacaattcaatttacctttactctttatggtgtagggaatgaagaactgtgtcttggtgttgggtagtgggccttttatgcctgtgggcatttggtatcgttcagcgtaaaacactccatgaaccaagttcaaggatactagcagcaaaaagggtatttgtggcagcatattctcagatggattctgaaaaacagaaaagaataactttatacagcattgttattaacctatttttttattctcatgtttcacagatgagttctttatacagttatctacttttttaacctatcctatatatttttaatatgtgccataaataaatgagagatcattttttagttatgtgaatatatgtcttagttatttttggaagctatactcaggtaatcaagtgaaaataaaatgatttacctaaaggaaaagaaacagaaattaggattggatgtctgtattaaataatctaggatctttgacatagcctgaaatatctaatagtttcaaaatacactgaaattcggattagggcaaatttttacaatatggttttattgggactatcatccacagactgatgcaaaaagaacttttggagtgcattttagtagaaacccattttttaaatcactttaatacttctaatacttgagaaaactcaagtatttaaatctttaaagtttctttccaagcaag

SEQ ID NO: 38978 - DNA, 1035 bp, Homo sapiens
aaaaaccattcttaggtagatggttatagctattttttttaagttttgtggggttttttttaaaagaagaaaatgaagcttattaagtggaatgactcatccaaggtcatttagctggtaggcggcagaactggggtttgaacccaagtttttcttccacaccacataacacttactataaattgctgttattatttgagtcaaatttcatttgtgaaatctcagatgtgacttactgttctgatatggcagtatctatctttcatattaataaacagataaaaatccatatgctgttatcatgagtttggaaaacaaagtgttatcacagataacaataagctattcttggccttagttccaacggtttggaatctgttactcagaacaagaagccctcagattcagatacgaaacagaatatttagtcacaaatgcaaaaatctgaaaccccaattttgagccatttctgtacaagaagaatccagcctgtgtttgtcgtgatggatagtatataaactaagaagacctgaagaggtcatagtgttgacaaaattcaacccgatggtggaatacacacaaacacaggaaacaaagctgggcctttccacaccactgttaagtccttgcagtgacttcattttaagtcaccgtctcttcatgccacacatattcaccagtgtttgcttgatgaaataccacaaatcggtggggtctccttttctgcagtcttgcgtagatgtggctgccaccccaaaacccaaagggatgtctgccaccaccacttcctggccaggagaagtatttttcatgatttgactcagaccagatttcaacatatcgtctccatatagaaaggactgctgtgctccaggttttatccacactttatacttggcatagggtgcagggtaatccagagctgtgatgttcaactgaaacttgtaggttttggtgaattttctgaagcaggtcacagggaaatcagatatcagtgccagcttcagaatcttctcactcacgtagtacacctgg

SEQ ID NO: 38979 - DNA, 1070 bp, Homo sapiens
gtgtatgggaactctggactatctttgtaatttttctgtccatctaaaactactaaaattaaaattttattttaaaaagcatagctaaataaaggtaagacactattataagtaatggttattttatccagaaggatattatcgagctctggtatataattcccttagttttaaaagtctattcatgaagtcattcctcaacttctctctctgggtgatatttaatgtccttatggatcgtacttcatctcttctcccactagcttggagcagtttcaggttcccagctaaagaaactgaaggatatcacataacagttcttcaccttcttggcataaatcctgtggcagaccatgtttactttttcttctgaggaaatccacatatgctcccttcttcttcccccacccactcagaaatacagctgccttacaacttaccagtgcttttttctaaccaaggtctgaaaggttctctgtttagtttctttgttctcaagaggaatggaaaaaagcgggaaggtactatggtagcaccccacagcaccaacttgcccagtaggagtgaagtactaacttgcccaataggagtgaagtaccaacttgcccaagaggtactgcacctagatgtgtgcagaataagaaggtgagataaggggatccttcagaatgagtcaccacatgtaaaatcttggagggacaatacatgagcagataaaaaagtttaatataggtaactacaattagttacctctatgatactcttgcctttttggctgtagccattataactaactgtgtaattggaagtcattcccaccacctttatttcagtgaacagtattgtttattcattctgggcatattgcactgtataaaggtatgtatttgaacatagtttgttacagaaattgaatttagaatcactccagtatatagagtagtgttctgtaatccgttggtggagaagaattgaccaatcaaatttccctaatgagaccagtgacttatgggactgcctcggtaatgcttttcagttctgagaacttcagtgaggtgagcatttgccag

SEQ ID NO: 38980 - DNA, 1027 bp, Homo sapiens
ttagccattgcttacttattcatgatataagtggagaccagtagataacccattatgtgaacattctagaaaggtgtttaaggagttggctggagctacaagcaaagtgagtttctttagccttttaacttatccacgctctcagggatgctaaataaaagctccatttagcaatatttgcttctgatgtgtggcaccagcaagagctacattcaggtacaggaatctgtgtccagaggtaggctctgaacccattgttttaccatctgtcttccagccccagagtgaaattcttgtaggaggaagttgagtggggagaaatgggggaagtcctgggcctgattcacctcctaactcttagggttgcttgggcagcttcctccatctctctagaaatcagtttcttcatcagtacaatgaaggaatagccactaacacttactgaacattatgtgccaggcactgctccaagtactttgcatgtaaaatttgttaaatcttcagaactctgtgagggtgaaaaatcaatacacacatactctctcaattctctctgtcctgcttttccctcctattgtctcatcaccttctgagatatatatatatatatatattcttttgtatgctttatatttttgttattttgtcagtctccttgctttagaatgtaaatgtcataagggcaggaatttccatttgtttcatttactagggtatacctctaaaacagagcctggcaagcaataattacaaaatcgatgttgaatgaatgaagtacatagattaagtaatttattaatgttcaccaagatagtagtggggcagagttgggaattggtcccaggttgtttatctccagatcccatactctaaagcaccgtgttatactgactaaaattaggcaaccaatggcttccaagccatggttcatcatgcttgtttcacatgagaatcgtatgtgatgttttaaaagctacaaatgcgggctgggcacggtggctcacgcctgtaatcccagcactttggg

SEQ ID NO: 38981 - DNA, 1033 bp, Homo sapiens
tgtgagaaaaaaaatgtgaagggatcccagagaggctggaagagcccttaatgcaagtctgaccctgaggaaaagatagaaagagaaggggaagaatggtgtaagcatttcagactgctgttcagttccatgaaaacttagcaaggctgttggggaatcctcaagccaaagccaactattagaggagtcactcatctcatgggattgggcctgcctttgtatttctgttgtacagtcattggccgggagcagcctgtgggagaatgtggacctcagtggatttcagaacagagcagctggggctttcagccaattctgccccctgcagtcaaaatctaggaggcatattgttatggccaatattctcatatttagacatgatgttctagagattccgggaagttactcttggatatgtgtccaagatgtgtcctttccagaataatttctctttacacattctttaacctggttattatcagtcttgtgctgaactctctaacccatgtggataatttttagtaaggatgcttagtaatttaaaaacataaaatccatgctgctagtctctaaatcttctacgaaaagtttaatgctaaacaaaaggggtgtgtgtgttgtttgtatcatgtatatgtacatacaaatacacacatacacatagtattgagaaacataaacttattcaactggttattatagaccatgaaaggaattgtattgccgtatctaaacaaagtgtgcaattgtttgggtttatgtactctgtgcttatgagtgttgtgaatttgtcacttgggctttcacctcagaacaagtccttttttatttctacctcttgaaataatagttgttcactcaaagctcagaggtggtagaaactggtagcagatatcaggaaaacaagaataattgtcatttactattattggtcagtttggttctttattatttccttggaaattatacacaatcagaacaactacttgagggttttttaaacctcaaatagtataaaaatagcattttatcc

SEQ ID NO: 38982 - DNA, 1050 bp, Homo sapiens
gtttgttggccaaatatgggttttagattagtgcccaaagattacattaccagatttcacagaaagaatagacagctttaccagcagagctgttaggaaagggaccaataccaggattgcttatataagaggatgcgtagccagatgcctcctaggtatatattttattgcaaaggttactctcaacatcagaatgtgttcctgcttagttctacttgtgggactttctgaatcttgttttctcctttggtaaaaatgagattttctggcaagaatatgtcaatttttttttatcctccttcaagagtctaggatgtatttctagataaagaacttattagatactagataagtcagaaaatataaactatgctttggagagaacaaaacaaaggagagaacagtgcaggttggggcaggtgaaggagtcctcctttagggaaggaggtgtattagtttgcttgcgctgccataacaaaataccatagactcagtgaattaaacaacaaaaatttattttctcacatctggaggctggaagtcaagatcaaggtaccagcagcattggtttcctctcctttgcttgaggtggccactctattgctgcctcttcacatggccttttctctgtgcatgcacatccctgatgtctctttcctgtgttccaattttctgttcttataaggacaccagtgatattggattagggtctaccctaacgacctaattttaacttaattacctctttagaggccctatatccaactacacttaaacattctaaggtactagggcttagcatttcaatatatgtattttaaggaatacacaactgagctcctaacagaaggcaaagaaggagtgtactaaggcgatggagagattgagatagagctgacatgctgcacatgtcagcaggcttgcttgtgctatgtgagattgttgaatgggtcactgaaacatgacttccttagaaaagcagttctgcaactcttctgtctctgctccatcttcctggtattgcttcccaggtcacactttcaaatactc

SEQ ID NO: 38983 - DNA, 1031 bp, Homo sapiens
tgatggactatgaaaatagatggaatttctatatgcgagtgtggagtatacaaagatatgaattgcatgggattttaaaagtcactgagaaaaaggattgaggaaggaacaaagtaaagaaacagtcaagtagtgtgaggggactcatgagagtacagaatcacagagagccagagagaagagtttcaggcagaaggtttatctgcttgtggtttgttgagcttcttgaacctgcagattaatgtttttcgtcaaatttagtatgttttcagtcattctttttaaaaatatttttctgtctccttctctctcttgtttccttctggagctctcattatatgtatattggtatacttgatgtcccacaggtctcttttcttcagctgggataatttctgctcatctgtcaagttcattgattctttcttctgccattttgaatatgctattgagggcttctagtgaattcttcacttcagttttcaaatccagaatatgcatttggttcctttttctaatttctatcacctgagagtttctgtttattgattcattgctgtcattttttttattattattattctactttaagttctagggtatatgagcacaacgtgtaggtttgatacataggtatacatgtgtcatgttggtttgctgcacccatcaacttgtcatttacattaggcatttctcctaatgctatccctcccccagcccccaccccctgacaggccctggtgtgtgatgttccccgccctgtgtccaagggttctcattgttcaattcccacctttgagtgagaacatgtggtgtttggttttctgtccttgcgatagtttgctcagaatgatggtttccagcgtcatcaatgtcactacaaaggacatgaactcatccttttttatggctgcatagtattccgtggtgtatatgtgccatattttctttatccagtctatcaatgatggacatttgggttggttccaaggctttgctactgtgaatagtgctgcagtaaacatatgtgt

SEQ ID NO: 38984 - DNA, 1034 bp, Homo sapiens
aggtggaataggtccagcctgaatataaaggcctgagaactaggaccactgttggtgtaaatcccaggcaaaggacaggagaagaccaatgttccagcccaagcagttaggccgagagaaaatcttccctctctttttgttctgtttgggcccacccacattgggaggacagtctgctttactcagtttagtctcttctggaaacaccctcatagacacatccagaaatgatgtttgaccaaatacttgtgtaccctgtgattctgtcaagttgacacaaaactatcacaactggtaagaaaagaagtcacatatgtaaacatcaaagggggagaattggtgatacagaattaaagatatttaatttacagattcaaggagttacattgccagttgaaagataatatacattggcatttgtggaaagtggaaaatgtattttgattaaacatcaaaattttaaaaaattatatttaagtttataagtaatttttttcatctgttgcatttcatcaggacttatatttctgcatttaggattttttgtgactgtgtaagcatgtttttattagtatggtgaatcagttagctttatctgtatatagactttggttgatgaagaagtagattggtaattgcttttttcctcagatctgtttggttacttggaatatttagctgaaagttataaatgtgcagttgagcaggaagaagaagaaaacttttggcatcaaatattctatatttctcaaaatatttgatatttttagtctcctgaagagactgcaaggttgagaataaacaatgcattgtacatattttaaaaatagcattctctgagtgatagttttgtgagcgtttcctcctggggtcatggtgcacttcccctcagttggactgacctcgatgttctcattgagaagatgatgatggctgctagtatttattgagcactttctaaatcctaggcaccattttaatgctttaagtatatcagctaatttaagcttcacagaaaccctatgagggaggta

SEQ ID NO: 38985 - DNA, 1027 bp, Homo sapiens
agggctagagagagctcattttaaatgcttagaaaaaaatcagtgaatgcacctaatgctatgatgaattacatcttaacatatcacaggggtgaaggatggtggtttgcaagctttccgataaatttctggaattttgtaatgaaaagtattatgcaagagttggcattaaatccatatcagagctgatattttaggcctgttgctaagtacatgtagtcattttgaagtttataatattgtaggttgaaaagaattttttatttgatttatttcaaagcttagccatgtatgtagttgtttctgactttgactgacattaactgatcttattctattcttgacaccaagaaagaaaagatgtatgaaaacttatctgatatttgaattaccagattacattatcaaatgctacagtaactcactgattgatttgttcaattagtttaaaatagcaaccatatttacattatttagaaagaaacctttgtcatctagaagggtactttaaagtcctttttgttttagataagtagattttggcaaattaagaaattgatgtaaatgttccagagatagagcctgtagagaaccgtgtatttaatctcacaagaaagtaatggactgtgaaataccatttttgatggagattgtttagcacaatacagtaacatgagaattgtacaagactagtacagttttctcattataatgtaaaatatttgggtatataaataccaatgaatgaatgctgccattaggatgagactccttctatgaaaagagaaataaataacttgaaagaaatattataatttttacatagtttccacaagtccagatttattgatcactggaggtgtatagaaacttactaggggtctagtactttattcatggcaatattgatagaaataggtataactctaggccattatctagtaaactaaaagccaatttttgacttaatagagctgaacagttgacttctttctcttgaccttcaaggtaaaatcttgagaattta

SEQ ID NO: 38986 - DNA, 1074 bp, Homo sapiens
acaaaaatttcaagacgtgttatgtatctcttttgcctggagttgttggtctatggaagatataaatactaatactattagcatattaatactagtagtgggataagtgctgtgactgggaaactacagtgtgtaatgggaagatctaggaatactttgcccaacattggagtgtcagggaaggctttcctgctgagtcctgaaggacagataggaaccagccacgtgaaggggaaaaaggagccgtgcttgactgttcaagcacaagtagctgctgtacaaaggcctggagataaaagaaagcagagtgcttttgaggaactgaaaatttagtgtagggaggaaactagcaagtgttgaggctttgggtagagagccagatgctgccaggccttgtctactatataaaggagcttggacttttttttacaagtactgtgaagccactgaaaggtgtaacagggcagtgacatgatcagatttatgtatgtacgttaaccttttcattgaaaaataaaagtagaatattatatgaataaatgtgtagctgataaagtattttgacgcaaacaccctggtaagtacaacacaggtcaagaaataggactttgccagtcactccctgaagccccttcatgggccacatcccagtcccagttccctcccttcccacaaagactaccctgatgccccagtgcctacaggcgtcatgtccttgtgttcccttatagttcatccaaatgtgcatctctaggcattatcatttaatcttgctcattttttaaatgtcttttaaggcttcaaaaaaaatctacaggccgagcgtggtggctcacgcctgtaatctcagcactttggtaggcagaggcaggcggatcacaaggtcaggagatcgagaccatcatggctaacacggtgaaaccctgtctctactaaaaatacaaaaaaattagctgggtgtggtgacacacgcctgtagtcccagctactggggaggctgaggcaggagaatggcgtgaacccaggaggcagagcttacagtgagccaagatcgctccactgcactccagcctg

SEQ ID NO: 38987 - DNA, 1481 bp, Homo sapiens
gcatgaacatcctgatcaaaactcatttacttttgctcccaatggtgtgcctttcattactgaggctctgtacgggccaaagtacaccttcttcaacaatgttttgatgttttccccagctgtgtcaaagagctgcttttctccctgggtgggtcaggtcacagaagactgctcatcaaaatggtctaaatacaagcatgacctggcagctagttgtcaggggagggtggttgcagcagaggagaaaaatggggtggttttcatccgaggagaaggtgtgggagcttataacccccagctcaacctgaagaatgttcagaggaatctcatcctcctacatccacagctgcttctccttgtagaccaaatacacctgggagaggagagtcccttggagacagcagcgagcttcttccataatgtggatgttccttttgaggagactgtggtagatggtgtccatggggctttcatcaggcagagagatggtctctataaaatgtactggatggacgatactggctacagcgagaaagcaacctttgcctcagtgacatatcctcggggctatccctacaatgggacaaactatgtgaatgtcaccatgcacctccgaagtcccatcaccagggcagcttacctcttcatagggccatctatagatgttcagagcttcactgtccacggagactctcagcaactggatgtgttcatagccaccagcaaacatgcctacgccacatacctgtggacaggtgaggccacaggacagtctgcctttgcacaggtcattgctgatcgtcacaaaattctgtttgaccggaattcagccatcaagagcagcattgtccctgaggtgaaggactatgctgctattgtggaacagaacttgcagcattttaaaccagtgtttcagctgctggagaagcagatactgtcccgagtccggaacacagctagctttaggaagactgctgaacgcctgctgagattttcagataagagacagactgaggaggccattgacaggatttttgccatatcacagcaacagcagcagcaaagcaagtcaaagaaaaaccgaagggcaggcaaacgctataaatttgtggatgctgtccctgatatttttgcacagattgaagtcaatgagaaaaagattagacagaaagctcagattttggcacagaaagaactacccatagatgaagatgaagaaatgaaagaccttttagattttgcagatgtaacatacgagaaacataaaaatgggggcttgattaaaggccggtttggacaggcacggatggtgacaactacacacagcagggccccatcactgtctgcttcctataccaggttgttcctgattctgaacattgctattttctttgtcatgttggcaatgcaactgacttatttccagagggcccagagcctacatggccaaagatgtctttatgcagttcttctcatagata

SEQ ID NO: 38988 - DNA, 1787 bp, Homo sapiens
gggtcttgctgtgttgcccaggttgccctccaattcctgggcttgtgcagccctcccacctcagcttctcaagtagctgagaccagaggcacgtgctgccatgcttggcttcttattttttattgttattattatttttgatctgaggttggttgaatctgggaatgtggaactcacagatatggagggccaactgtacctataaatctcctttagtgaactcaccatgtttctttcttctttttttctgcttcatttttatctgctcctgaattaataagcatagtactgtcattcctaagatttgttttctattccttgttaatcagatatactaaatctgttaatgtatcagatgttatctttcatatgcaacagatgtgctttttaagttttcttgcaaaaattcttagatacctcataatccagtgtgtaaatatgtgcttttttaagtgctataaaatgaccatgtgtattccacttacacgcttactgttggtaaaagatctgagattgaaagtgacgtgaagtagtctgtgcagccaaaagctagcccagaaatttgacttctcataaataccttagatcttcctagtataatgattgggaaatactcaaatattcagaattttaagttataaaattgataggtttcttttgtccactcaaatgaaaacatggaattctatggcaacttaatgttttatggaaagctcaatgtgtaaactgatttctctttattacagttgttcaaacgcagaaatgtctatttgcccagaaatgatgaatctatgcttgaaagtcctatacaggatccagatattagttccactgtacccattccagaggtatactttaccaaaatatgtttcaaattatacctcaataattttagcaatagtatgtataacaaatatttatgcatgcaaaattattcatgtaaaatatgtaaatgttaattatatttttgtgtgtgtgttttaggaagaagttgttactacagatatggttcagatgattttttctaataatgctgatcaacagctaacagcaacacagaaatttagaaagctgctttctaaaggcaagaattattttcagtatgcttatttgatattacacgattttttagtagaggtttattttattgtttttttttaaattttaaaatacctttctttgctagacacaggtgttatattctctgcaaaatatattgtaaagtaacatccgtttttgaacatgatgttaccaaagtaacatatgttgactgtagaaaaatcgtaaaaatataaaagcagttaaagaggcaaatataaaaagattaatcctgctgccaagaaataaggttagagatatatattttttaattcttgtagaaatatttttcagacatgattttttatttttatttgtatttatttattttttatttttttgttatactttaagttttagggtacatgtgcacaacgtgcaggtttattacatatgtatacgtgtgccatgttggtgtgctgcacccattaactcgtcatttaacattagttatatctcctaatgctatccctcctccctcctcccaccccacaacaggccccggtgtgtcatgttccccttcctgtgtccatgtgttctcattgttcaattcccacctatgagtgagaacatgcggtgtttggttttttgtccttgcaataattttctgagaatgatggtttccagcttcatccatgtccctacaaaggacatgaactcatccttttttatggctgcatagtgttcca

SEQ ID NO: 38989 - DNA, 1029 bp, Homo sapiens
tgtcctaaggagtcttttaaccatggctgaaaccaaactaaaaaataaaacaaaggaagaataaccagtacccagctatgtagtaatagttataaaaacaatttcaggctgggcgtggtggctcacgcctgtaatcccagcaccctgggaggccaaggcgggtggatcccctgaggtcaggagttcgagaccagcctgaccaacatggagaaaccccgtctctactgaaaatacaaaattagctgagtgtggtggtgcatgcttgtaatcccagctactcaagaggctgaggcagcagaatcgcttgtacccaggaggtggaggttgtggtgacctgagatcatgccattgcactccagcctgggcaacaagagcgaaactccatttcagataataataataatttccaaaaagggtattaaaaagttggaaagtttcagagtttcattataaaacttcgtcttagaaagtttcaaagtatttaaaaaaataagaaaagtaattaaaaggaagttaagttagatactctctctggagttgggcaaaaggaaaaattttcagcttaaaaaatgattatgcaggccgggcgcagtggctcacgcctgtaatcccagcactttggggaggccgagttgggtgggtcatgaggtcaggagatcgagaccatcctggctaacacggtgaaacccgatctctactaaaaatacaaaaaattagccaggcgtggtggcaggcgcctgtagtcccagctactcgggaggctgaggcaggaggatggcttgtacccaggaggtggagcttgcagtgagccaagatcacgccactgcactccaacttgggtgacagagcgagagactgtctcaaaaaaaaaaaatgattatgcattatttgttgttcacattgtaattcacatttagtaatgcttaagtaaatgtaaaacttattaatgtatcattttatctgtttgagtgatattttaatttattttattagtattcatttgattctcagtaaatgtaaatcttttac

SEQ ID NO: 38990 - DNA, 1076 bp, Homo sapiens
gggaagtgtttgattagaattctatatcttgttatagttctatttagattttctattcttaagtcagtttggtagtttctgtgtttctaagtggtttttcatttcttccagcttatctttcttggcttttgatgataatattctcatataatttttttttgttgaagtgctgatagtaatgtctctactttcattcttaattgtagtaatattattttatatatatatatatatatatttttttttttttttttttgagttggagtcttgctctgttgcacaggctggagtgtaatggcatgatctcgactcacggcacactctgcctcccgggttcaagcgattctttcacctccgcctcccaagtagctgggattacaggtgcatgccaccatgcctggctaatttttgcatttttgtagagacatggtttcaccatgttggccaggctggtcttgaactcctgacctcaggtgatccgcttgcctcagcctcctgaagtgctgggattacaggtgtgagccaccgcgcccagccaaattgtagtaatatgaatctttttccttttgtccatctagataaaggcttgtttttgttgatttttttttttttttgggtcaaagaactgcctttttgtttagttgattttctgtagtgtttttctattctgtattttatctctggtcttaactttattttcttcctcctgctagctatgagttttgtttactctaatttttgtaatttctgaaggtggaaggttatctttttttcatatggggtgttaacaactataaatttttttctgagtattaatttcactacatcccttaagttttggtgtgtttttttttttatttatctcaaagtattttctgcatatgtgtgtgtgtgtgtgtgtgtgtgtgttttaactcactagttatttaagagtatgttactctactcatagttctgaattttctagttttctgtctgtatttttagtttcattccattgttgtcagagaagatactttttatgatttcacttttcaaaaatttatcagagctcaagtgatctgcctgccttggtc

SEQ ID NO: 38991 - DNA, 1033 bp, Homo sapiens
tgctgtttttaatggttgtagaattggattttctcagactgtatgatatatgtatttttttcaccaattcatttggcaaaactagaggttggatcctgacctcggtcaccaaatcttttttcagttttatcagttgaactctgagaacatttgtaaatatgaaggatacacctctgattttcattttattgggttgagaacagggcagttccttatagtggcaggagactaggtttatcaatagcagacgtgtagaagacagcaagttttactttgggaggaatttctcctttcttaatttcactttctagaatgggttttgtacatctaaataattcattagtagattttcatataggttatttactataaaactttttgtttccatttctaacttgttttaggtaattttgaattgttctgcattaccctgtctcttacatttattgagtagcccaaaggagtcaattagaaaagaagcctgctggactgtttctaacatcactgctggaaatagagctcagattcaggtaactacccttcagatctgagagtagaacagcaaggtctaagaagccagtttggacaaaagttaacacttttactaaaaaagattcctttttaaaaagataccgaaaaagtattttaaagaacatgggctttcctcctctaaaataataacatttacttgtagtattctagtgaagaacatcaagtgtgtgtgtgtgtgtgtgtgtctagcacagtgcctgacacataatggtttgtctttagaaagatatttttttgcattagttttaaataagttatgcaataatcttcctctcaaagcttttaatgatttattagggttctatcaagcttcttgtgtcagtgattacttatccattttgatcagtcacatggcttgtgctttatcatctctaaaatttatattttgctattctccagtctttaaaaagctaatttcctatgtaaaaagaaaaatatttgaaaagtttgctgacagaatagaaattaaaaatttatttta

SEQ ID NO: 38992 - DNA, 1033 bp, Homo sapiens
taagcatttaaatacagttttatttatttccttaaatatattacttgggtaattaattttagatttgattgcaaagagcactgtatagcagttgggaccagctcttggcttggcttggcttggcttattgttaagagtttattggatcaagactaacaaataactttgtgatgaaaattcttcaaaaatatagctactcttttcaagtataccatttaaaatatttcatcaggcagagccctgaccaggaaaaaaaaaaaaaaagaaagaaagaaaagaaaaaaataaataaaatgctccaaaaagtgttttcagtagtcttcactggcccttgtgggaggaaaaatacttttttaacttgcttttctaagatttgttatatttaaatccaagagaaactatgccgaaaaaaagtgttataaagaggaatgcatgtagcattaatgcaaatatcaagaaaatacttgaaagagtccttttcatttatttaattaaatttggtgttttattttgtctgaatctgaatttctcctatttaatctatgcaattatgcttgttttatatttataagcacttgactcactgggtgtggtctttttactgtgttttatttcaaaacgttgttttaagtgatagtgtccttaaattttagtgtcatttggtcaacttactggtaacaccagaacaagaaagcaaaaaagtaataaattctgctggcacagaactaacatatcatttggtaactgtaaaacctatttgcagttaaaggttgatttattggataagggactaaaagaagcatatattacctttgcctttatattttttcttcttttaagaaggagcattatggaaaaataaatataaagtcttagtgaatttttgttatggttctcaattcagcaatctactggctgcttgcgaaactgtgaaatcaaattgttcttaacctttattcagtttagtttatagcattactgttttatgaaatgtgacattttaggagccaatataatagagctctaaaaggat

SEQ ID NO: 38993 - DNA, 1031 bp, Homo sapiens
gtttttgaaatctagtgtgtattttacacttacatcacatctcagtttagactagccacatttcctgtgcttacccccacatatggccagtggctttattgctttattggatagctcagctttagacacttgcaaaaacataggtcctactttttgaattcttttgaatatgactctcctcattgctactttcatagcctggccttgactctgtctttcttgtccattcatgcaatttttccaaactgaccttttaaagttgagattcaatcatatctcttccatgttcaaaacctccactggctcataatttctactattaacaacaaactttcctcaacttgacattcaaggtccatcatgatttagtccaagttcattttactatgtcacctatttcttactttctagcatgtagtctatgtgctcaccaaataattatcccagtaacctttgattcactccaactgccagtcttctgtttaagtttatgctgtcttcccctggagaatgccttttcccatatatgtatgttgaaattttacccatttgaaagaatgtctcttgaacttcttcctttagatctttttttagtccattgatttattgtaggtcccttctctgcaccctgtggcagtttgctggtacctatcttaatgtgaaattaacttatctcctcctctaaacagataatacatattttgaggacagaaactttgtctcattcacttttatattctttctgttggtcgatatataatagattatcaattaatacttatttaattgattgcaattaatgttaacattattgtggcctggaaagaataaataaagtgccagattcaaaaaggcaaaatgggtcccttccttctaaccaagtcaactttatttcaaagtttgatcagtttaactgactgatttctactgaatttgattcctactgaattgtattggttgaggaaagatcagatagtgtttaaagtaaatagatagggggaaaagaggccgagcaatgaagagaaaccctc

SEQ ID NO: 38994 - DNA, 1306 bp, Homo sapiens
tattgcttttcaagcaacttattttggaaacaatgttatacccttaattgtataattttgtactataatatttcaaaatgctttagaaattattctgcttttatgtacattttataaatcaaaatgaattttggggattaaccagaagttactgtaaaggaaaatcagtgtgtatgctgcatgtgaatgctgcatgtgaataaaattcttaccatgctttgcaaagtcttttaactttaaaacttccccgaaaaaatgatttttttagtttatttgagcaaatttaggaggcccctagaataacatttttgtaataaaattttctttactacctaatgtgtttgacctttgtcttctttttacaaaaaacaaaacctatctcttgggttgctcacagttaactagttccagcctattgcttgtctagagtaagccactttcccccttggcttagttcacaatcagtcagaaattatcagtctgagcgtcaagctaaatttcagttggtaaagattataatcatacatatgtattgtctagtaaatttggcctttcaaggaaaaaaatgccatataccagtcatttgtgctggtataaattttgaaatgtgccacaagtgtgctttgtttttaggtccatactgtggaagtatgactgttcccaaagaactcttgttgaacacaagtgaagtaaccgtccgctttgagagtggatcccacatttctggccggggttttttgctgacctatgcgagcagcgaccatccaggtataacggaagaatcaacacaaatctctaaatgttatctgtctaagaattcctcttgccacttatccccatccctggacataattgtggactcagatgcagaattaagatatgagggagaagaggaacatggtatctttgtaaatggttaggtctgaactgaatcatattgcagcacaggtgtgtccaatcttttggcttccctgggccacattagaagaagaattgtcttggggccacacataaaatacactaacaatagctgatgagctaaaaaaaatttgcaaaaaatttttataattatgttttacgaaactttaggaatttgtgttgggctgcatccaaggccatcctgggctgcatgtggcccaaggggcatgggttggacaagcttattagcatgttagattgatcagttgacttatatgggataggattcatctcatttttcctaaaaaccttggataacacacttttgtgttcccctcctgacccttcgaagtcttcactattctctggagccctcccccatcctcct

SEQ ID NO: 38995 - DNA, 1050 bp, Homo sapiens
ctggatctggcggcgctgctgccgcgccgcctctgccgcggtcctagcgccgctcggcttcacgctccgcaagcccccggcagtcggcaggaaccgccgtcaccaccggcacccgcgcggggggtcgtgcctggcagccgcacaccaccggatgcgctggcgcgcggacggtcgttccttggagaagctgcctgtgcatatgggcctggtgatcaccgaggtggagcaggaacccagcttctcggacatcgcgagcctcgtggtgtggtgtatggccgtgggcatctcctacattagcgtctacgaccaccaaggtgaggcccggtgcggtggtggggggtggccgaggcgtcttggaccgctagaccgctggtctggcgggtggtgcccatggcacgagttgccgcggcctctctgcaaatcacagcgctagcgctttcgaggaagggagatcagctttattgaacacctactaattctctggatttgactcagtagctttttaacattttaaaaatatcccttggccgggcgcggtggctcatgcctgtaatcccagcactttgggaggccgaggcggacggatcacctgaggtcgggagttcgagaccagcctgactaacatggagaaaccccgtttctactaaaaatacaagtttagtcgggcgtggtggcatatgcctgtaatcccagctactagggaggctgaggcaggagaatcgctggaacccgggaggcggaggttgtggtgagccgagatcgcgccactgcactccagcctgggcaacaagagcgaaactctgtctcaaataagtaaataaataaataaaaataaataaaaaatctcttattcgttataatactgcagtaatgtagatggtatttgtatacccttgccaaggtttaaaaacattaactgatttgcccaaggccacaagatcgtaatggggccacaaagatcggaatgaggatattggaattttagccattctgtgctttttcacaatctttgcctttggttacaccacactgtttctttaagagagcttc

SEQ ID NO: 38996 - DNA, 1044 bp, Homo sapiens
ctttgctctcaaatttgtacttaaattcgttctaattatggttggatctagataacaacatttaatccttagactaaaagatctattatattgaccttaatttgactgccagcaaactgatctttttgtttttcactacctgcaatatttcttgattataatagagtctgcaagtaattctttcatctttcaaaaattcaggttgttctctcaggacagtgatcaggaattttttgagttcagaattctagcgagatttggctgttctgtctatatgattataatttaagaaatgaccataactgggatggtacaagaaccaggggttggggtaaatggattttattgttctagccttagcagtgttgtttgcctgtgtctcacatgcaggtacacttggctccaagttatctggatatgtattgttatcttaagtgatggaacttgttcttatttcctggctttattgtgccttgctgggaaccttgctgttgattggtatttttcaaaacctgtctgtggaccatctgtgaattagtcattggggatgcttataaaaaatgcagattcaacacacttagtaatcaaacttaatgagggaactgggacctgggcgtctctgtttttatcaagctacctgtatgatacttctgcacactgaagtttaaccctaacacagatcaaaggatactctgctacttgccttacattagattatttatatttcatgttccttttcatgattgaggataatttggggtaagccttaggattatttgctgtaaattggaatgatccagaataaggcattgccttctgtgtgagaattcaacagtaagacaacaaattttttttgtgtgctgctctttctagtgctatttccttagtttatttaaatcgaagctaggttgcttttgaaatggtttttgggtacaggtttctcacagtaacattttaaaagtctgcccagtgtatcctatcttttcaacctgtttctcaatgctttgcataccttttgctatgtctgtatttaggtatttaatg

SEQ ID NO: 38997 - DNA, 1028 bp, Homo sapiens
taagatacaaataaaaacaacagaaagttttaaaatggggagatgaatgtaaagtatacagtttttattagttttcattttgtttatttgtttatgcaagcagtgtggtaatcagcttaaaataatgggttatgacagatagtatttgcaagcctcatggtaacctccaatcaaaaaacatacaagagatacacaaaaaaataaaaagcaagaaattaagtcataccaccagagaaaatcacctttcctaaaaggaggacaggaaggaagtaaagaaggaagagaagaccacaaaacaaccagaaaacaaataacaaaatggcaggagtaagtccttatcgataataacattgaatgtaagtagactaaactcttcaaaagacatacagtgggcggatggataaaaaataagacccaatgatctgttgcctaccagaaacacacttcacctataaagacacacagactgaaaataaagggatggaaaaagatattttatgccaacggaaacccaaaaagagcaggagttactatacttatatcagacaaaagatatttcaagacaaaaactctaagaagagaccaagaagtccactatctagtgataaaggggtcattttagcaagaggatatgacagttgtaaatacatatgcacccaacattggagaacccagatatataaagccaatattaatagagctaaagaaagagagagagagagaccccaatacaataatagctggagacttcaacaccccactttcaacactagacagatagagacagaaaatcaacaagaaacattgaacttaatctgcactgtagaccaaatggatctaatagatatttacaaaacattttatccaatggctgcagaatatacattctccttgtcagcacatgaaacattcgcaagaagagaccatatgttgggccacaaaacaagtctaaaacattcacaaacattgaaataatatcaagcatcttctctgaccacaatggaataaaactagaaatcaataagagg

SEQ ID NO: 38998 - DNA, 1029 bp, Homo sapiens
ctacagagctatacttatagttaccaaaacagcatggtactggcataaaaacagacacagagaatagacaatctagagacaatctagagacaaatgcatacatctccagtgaactcattttttgacaaaggtgcccagaacatacaatgggaaaaaccagtatcttcagtaaatggtacagggaaaactggatatccgcatggaaaataatgaaactagaaccctatctcttgccatatacaaaaatcaaatcaaaatgcataaaagacttaaatctaagatctcaaactaagcaactactacaggaaaacactggggaagctctctaggacattgaactgggccaaaccctacaagcacaggcaaccagagcaaaaatgaacaaatgagatcacatcaagttaaaaagctcctgcacagcaaaggaaacaatcagcaaagtgaaaagacaacacagaatgggagaaaatatttgcaaactactcatctgacaagggattaataactagaatacataaggagcttaagcaaatctacaggaaaaagatctaatctgattttttaaataggcaaaagatctgaatagatatttctcaaaagaatacatacagatagcaaataggtatatgcaaagatgctcaatatcactgatcattggagaaatacaaattagacctacaataacatattattgtaaaatggcttttttctaaacaggtaataacaaatgctaacgaggatgtggagaaagggaatccttgtacactgttggtgggaatgtaattggtacaaccagtgtggagaacagtttggaggtttctctaaaaactaaacattgagctaccacatgatccagtaatcccactgctaggtacataccaaaaagaaaagaatatgaactcctatgtttattgcagcactgttcacaatagccaagatttggaagcaactgaagtgtccatcagcagatgaatcgataaagaaaatgtacatatggaccacagagtagtattcagccataaaaagaac

SEQ ID NO: 38999 - DNA, 1525 bp, Homo sapiens
agagttttgtgtgaagctacagcatatctaaccagagaatttctgattccttatactgtgattatattatattgaggcatttgtagtgcagctgaagactgaatttatgccttttgtaaacatgataggtataaatgtcttataaacattctggagtatgtatagctttaatgaatgaaatttaatggacctgattaaaatgaagggatttaatcgttgttaaagttaagttagtcaaataaattacctactggaatatagcccaagccagtaaaggtttaatatttgcattttcgtgcttttattttctccttccattcataagtatatacttgaaagtacatctgtagcctatgatttgagtctcttgaagttctaggaagaggcaaactacaaactactaggattctgatttcagatgtagtcattccagaaccttctctttatgagttcacctgctagtacaatctccacaacttgaatggcattggttgttctgtaattcctgccaaaagcatcacaagttgtacatcatcaaggctccctttgcactcccaagaagaactggtaattttaaacaaaagtatgtgtctttatttgtattggaaaatactgtctttaaattgtttcttgttgacactccccacaatggaaaaattaccgaattaaacctgttttatggatggcagcttggagcatagcaagaagttggaggatttgaattccattcccagttctcattgtgttttgtttcttaaaactataataatcggttactgttataaagtttaaaaggtggttttaatgtgaatagcaaattctggtatatcgtgactaacgcttaagaatgcctgtctttgagaggaaggtgttataatattaatgaacagtgccaaatacactgtgcatatctgcaatttaatctttgaatgtatgttactggattagctccctcctcctgtgtgatggtaccatgcatagagtcaatcaaatccttgtgatgttttgtatggactttgacaatatgtaaataatgtgtaaagccagtttttatgattaaggaatcaaatttattgaattttattattgaaagttgaaacttaacatgtatgaacaaaaaccaataaaagaatatactcttttcattgactatagtattatgtgaatgctacatttgttctgaacacttaggggctgcaaaaatgtaataagaaatgcatatgactagatagcaatagtgttttttttagatggtatgctcttgattgaaatatattctcacttttaccaggttaaacatttggaatcttataatgttacttgctttttgatagataatagtgaaataaattcagctttgccattgctggagttgtcaaaattccacagtaattaaaatttgaatttttaccgaatatgaaatttccaaattaaaaacgtatatgtgtactcttttaaaaaggaatttgatagttcttgtcaaatgagaaaatttaaaggtaagagttatggtttgtcttatgct

SEQ ID NO: 39000 - DNA, 1060 bp, Homo sapiens
gtggtttgcagcagagccatttatctgcttggtcttggtttcttcattgtaaattatgtttaataatacagtacttgttttacttccctaccatgattttgagaattagataatgctgaagaaaacacttggaaaagtataaagatctacatgaattaatgtattcaactcattttttttctaaggtaagcctatggggtaaacataggcaaatgaagttgaagtcatgctacgttatgggtagaaccttgtgtttctaatgaaacgatctgtgacatgagttgtactagtcccagtgtatagaggaggaacttatacttatgttgggttgacggcatttcatcgcaggtatacaaccgtgaatggaaccctaggtttgtagcctttagacttaagctaaaacaattatttatttatttgtctttcaaagttattcaaaattttcaatataatattttgtattgagtaactggcttttccttatccttaaaggataagaagaaactctttgtttcaagaaagaacatttttagtaaggagactgaaaaatctgagcaagttttaaaatctcaatggcataatttatttagcatgctgatgggcttggcttttgtgccataattatgtcaatgagagccttaatagtggctatagagtgattaggctctaggtaaaagtgagagtatgggggagagtgaatttttgagattctgcagagtgcttggatgtggctcccctctggtttgaaccctcatgatgtgttggactagtcagtaatggatatcaggcaggcccattggggcctaatcataagcatctttgtcaattttctaagaactcaccatctgcttactttctccttttttgctttcttcttttcctcttcctccttcctgaatacttcacccacattgccctgtccactcattgtcttcatttgtcttctttcctctacccttggcatgcagcaacttagctcctagcagaaagtggttccaaatcgggaagctgggagccaatataaaaaatatccctccaacttttgacatgcagatatatg

SEQ ID NO: 39001 - DNA, 1889 bp, Homo sapiens
catttgatttagaatgaactgatttccaacttatatttagatttattttcaaatttctgaaacctttttgaatataaaccaaagatcgttaaggatatacatagaagagtttgaagcaagcctacataaaatcaatgtccaagtaggaaacttaccatgtaaaatgggacaatatgtgtacatagcctttctgagtcattaaataaggtggacagaacatcatgaaccaatggatatgactgaactctaggtattccatacagttggtggaaacatataatttagatgatcctttctgatcaagtgagaaggcttttgttaggaaattaatggtgagaatcttcctcaagctgctccgtctaaaacatgtcaaaatgaaaagaggaagatcagctagtaatgaggttgattaatataaaatattccaagtggaactgggtggtgtgattaaaaacagacttttctaagatcagtagtaaagaaaagatgtctgaagggtgcatttgtttttaactaaaaggacaaaattataaaaataaatgattataccagtatacttgtatttatgcccagtgcttggagaaactaatgttcacattaaagggatatttggattacctcagataaagatgatgtgttttcaggtaattaacgtgtattaaaatatacttgtctttgtgtgattttctttgaacttttactttctcaaaatccttcagtgtcttaggggcatcttaactgatgtctgttttcactgtacacatctatagatgtagaaggtataggcaattgagctgctgctcatatcgctcatatagctctaaagttacttaatgcaagagatgttttattatgtagttgccatttctcataaaaataatatggagcatgtgaaagtaccaccaccagattttagtttagcttgcttgttcatttgcgttcaggccaatgagcatgccctgtacattgttcagacacattaattcttgattatgcttctcaagaagtatgcttaggaagacaaacttcagtagatgtatggaaaaaacctatgaattttgggcatgtttcttaatggtaacatgaacatatacaggtctatattcatttattcttaagcagtaactgtatgctgagccttcttatggaatacacacatgtgacgaaacattattcttgggccaaaacctcaaaacctaactgggaaacttgacatgtgtatcactatttagaatgaacgttgtaattcataatctgaattgttacacataatgcctaaataaatgcttcccagtgtctagatattggaataatgtaaatgagctgttcaatatgcaatgcgtattaaccttgttctgacactttggaattatacagggaatccttgaatgtacaatagttaagaaggaatttcacaagaaatgtcaaagaaaacaataacaataaatattctttaggaagtattttcttagaaaaaatgttagtggcaactcagttagttagtggcaacatgagtataattttttgaattatattataatttaagttttaaaaatattgtttcagccaggggcggtggctcacaactgtaatcccagcatttgggaggccaaggtgggagggtcatctgaggtcaggagtgtgagaccaacctggccaacatggcgaaaccccatctctactaaaaatacaaaaattatctgggcgtggtggtatgcgcttatagtcccagctactcaggaggctgaggcacgagaaccacttgcacccaggaggcagatgttgcagtgagccaagatcacgccactgcattccagcctgggcaacagagtgaaactccatctcaaaaaaatccccccaaaaacaaaaacaaaagaatcctatctatc

SEQ ID NO: 39002 - DNA, 1689 bp, Homo sapiens
tttattcaatgagtgtttattgagtgactattatatgttgggcactgctggatcacaatggctagtatggcctctgggtgccattggtggagtttctgttattaccctttgaatataacccatcaagggagcaatttaactaaaatagaaataaagataacatatacctctcaaaatgctatagtttcaaaaatgatgttttcaagctgatctgacaaaaaatccccataaattagttgtttcacttttaggaaaactgcccaggtagaagactgaaacataataaaattactcaacgtctacatagattcaagaagcagaccttttttgatgaataccattgagtttgtttcacttagggcttaaaaaatattaaaaaaaaaagaggaacagctattaatgttcatccaacttcagaatgttagaaggaaaaggagaacagatttgaatcccattcttctgttcagggtgaacctatcaaggtccttgccatgtaactcaagaaaatagagttttctgaaaatattaatgtgctgacagtgcataggcaactttttgggacttggggacatgtttatgcattgcagatggagagatttaaaatatgcaagagtatattttatatatggatttttatatataatttgatacaacctaacgagagtgtttgagatgtttgagttaaaattagcatttagacaatgactcaagttctctgattttaccttataaggcatatactttatagtataaaacattacattgtatgtttttcttctaataacaaagattagtattcttatccttttctagagaagaaaacaaatttatgtggtgatacagctaagtgcttttgtaaaaccacagaggagggagagagcatgctaggctggagaaaggtcaggagggatcagggatggcatttgtccttggcaatgaaagatgggtaggaaaggaatatgtgcagggagagggaggtgagacaggatgagccgttcatggaagtaagagattggggaagaattaagtgtccagtttgacaatattataggatgcgtcaatacaaagggaagaagagggaattaaggctagatttgtaggatgggatcagataactgaaagtcttagatgctctaataagcagttagacttattaagttattttaggttactgagtagagaaatgacatgatcagagatgtgcccaaatatgatactctgggggaaaatctataggacaaaaggagaaggaaaagaccagagtttggggatcagttaggaggctactgcagtcatttagaggggaagaaatgtgagtctaagtggggtggaggcagccaggacggagagggaagtgctctgatttgaacagaatctggaccaggtcagctaaaagaagatttgattatttttgagaaggcactcagcagtgcctgtcaaataatgggtatttaatacttgtttgttgaaaggttattgaaagccactacaggaaagagatctgctctccagggcctagggtgctgagtgagctagaggctgctgggaggacagcagctagctattcagaccgtgggctatggatgcctgccggactacagactgtgtggccagaccgtgatgagaacagaaattgggagtaagcatttagaaataactgtagcagtttgagagagcacttttatattt

SEQ ID NO: 39003 - DNA, 1055 bp, Homo sapiens
agaaaggcaggcaataaaaacatgaaaaaggtatccaacagtggcaaataatatgcagagaatcaaagtggggtgatgtgacagagagggaacaggtggtacttcaatttggctggtcaggcctctctctctctctctgatgacactgaagctaagattagaatagccaaaaggaaatggccactggagggtctggaggaaagtcattccaggcagagatgctaagatgaaacaagtcttcataatgatgtgaaagaaagggaggctggagagcaggaaacaggagagcataagtgaggaggtcagagagggtcagttgtcagttctaagtgggctggggaacaagtggaagattttaagcagaggagttgtctggctaatgttttgaaaagaccactctggctgctgttggagaatggattgcgggagaagtacatacctactagatgaaagagatgttggaagctggctggcctgtagcaacagaagtggagacaagcggttgtgatctgcagtggtttgcactgggaggtggagtacacaggactggttgagtgatttgacagggcagatgagggagaggaataaagaaacatttccagttttttgggcttgagcaattgggtgagcgatggtgccattttctaaggtgggaaagactgggagaggaacatgtttgatggtaggaattaaagagtttactttggcaagtaaagttagagatgtgtagtgaaacggtcaaaagaaagctggagtgtggaattctggggagaagtcggagtgtggaattctggggagaagtcagagcttggaatttggatttggggatcatgagtcctggatgcatgtgtagatagagagaaagaggggtaccaagaacaatttggggggcacactaaccctcaaacacagaaggactcagcaaaggaactggagaaggaaggatctgaagtaggaaggaaaccaggagagtatggtgtccagaagccaagagagaagatgtttccagaaggaggcaataagcagtccactgtgctgagagtaattgaggaaag

SEQ ID NO: 39004 - DNA, 1030 bp, Homo sapiens
gggttcacgtgatgttcccaccttggactcccagtgtgttggaattacagccatgagccatcacacctggtgatgagatgtgacttagcaatcacttcaaggttttatgtctggtccactggagtgatggtgtcccctttagcctgtgtcgtatgttttgtttcaggaaaacagcttaacttttgggggtttcaattctctcatttgtaaactggttaaaataattctagtttttcatttccccttggatgtttgggaattttacatgcaataacatctgggagagggcttggaaagctgccaagcaccatgtaactgttatcctggtcccaaaattaaaaggagagcctgggttttcgtggctttgcgctgtcatctggcctgtgataaatgctgaccggcttcctcggctcgcagtgactttgatgcatagtccctactctggggactgtcgtttttgtcatgagccttgtcagtcagagtctgaagtgaaacccaccgatctatgaactaggacactaggctgtttacttcaatgtgttcatgtttgtttatatatatgtgtgcatataaagtataaatatatgtaacagaaagtaaaaatgcatatgtatttaataaaagtataaatatatgtatttatggaaagtatatagcaagcctcctcttgggaaggcgatttcagcactagcatatgttctgctgtctaattgtgcctctcagcccaggagctccgcggtacctgtggttcctgaaagagagtttgacaggcttcaggaaagggttagtgcctcttgaactggggagattacaaaacgagcgtgggcctaaaaggctccacagaggcaggcagcgggatggatagagcggctcagagggaagggacagagccgctttaatgtgctaatgaggggaagcccagatgccagcgggctcagtggagctctttgtgacgccgggttcccggggctggctggagtctctgtacctatctggatcctgctgcaggccggggaaacactgcgctctt

SEQ ID NO: 39005 - DNA, 1048 bp, Homo sapiens
gtgagaaaatgcctttattgttttttgctatagttgcctaatacattgctgtggtttgaatgtttgtatccctccaaaatttatgttggaacttaaatcccaaggtgatgattaagagtggggtctttgcaaggtgattaggccatgagaggtctgccctcatcaatggcattgatgcctttataaaagaggtttcagagagctgcttggtccttccatatcttctgccacatgaggacacagtgttcatcttttttgccctcccactgtgtgaggacgcagcaaaatgcaccatcttggaagcagagagcagcgctcactagacacgaaatctgctggcacctggaatgtggatttcccagcttccagaactgtgagaaatacatttctactatttataaatactcagaatatggtattttgttatagcagcaggaacagactaagaaatacatttcaatttttttgaccattatctatatttcaaggtataagaaactaaggcacatgaagtttaaggtaacagatcaagtagtagagctgagagttgaattcagacagtttggctttagtgtctattctcttaaccatcatactataacgacatagatggcaaaaaagaacaccttttaaagcttctgtcatctcttctcagataaattaactttctgtacccaaatccaagatgaaaaatgttagataaaccaaatctcaagcatagaggcttttcttctggatgaccaagacattcaaatccttcatttctagaaatgtactctgtagtgtaattagcattgtctgaactacatcttttcaaggatgatatgaagttttcaggaaatgaaaacaccatgtgggacttccagaacttggagtaacttggagttgattcccattttcctttggaggtgactggcaaatgcaatctttaggaagctcctctgacccaagagacatgcacacatatttgagtgggattccagggcccgtgagccagcagttttcccaaggcttatctcctgtcctgcaccatcccagatctccctga

SEQ ID NO: 39006 - DNA, 1023 bp, Homo sapiens
ggagtagataggcataaaggcttagtctgacatttggatctaattccctactattttaattagaaaaaattacagttcttttaaaaaaaaactttgtattttaaaaatgttcacacaaagatgtctcaaatctggatatcaaggcaggatttgcatggaatcctttattgatggcttatgtaggcatctataagaataaacaagtagttccaatttattattgttactgttttacttactgtatgattttatctgcttcaatgatttcataatcattgaaaaatgctttatattagttaccttttatgtgagcaccttctgcactctaacatgtttgcatcataacaatggatgccagacactttatggttcattatctcactaaattctcacagaggtcccataaggaagtgattgtcattctcattttgaggatgaggaaacattttcactgactttaatttacctgtgggttccaaataagtagtagagttggggtctgatctaataactcttcgactccaaatttcttcagtctgccacactcttatggaagattggcattcattccataatgctgattattagctttctgcttgtgtactcatacacataagaatcaggaaggaaggcagcgcactacgaggagttagatgcacattgcagggactgcgtggtaaacattgaagcatatgctacagccttctattattgggttcttcttcatgttagaatgaataactatttaaaagttcatctttcaaaacaaattaatgctaaatttactgtcattatcaaccactaaaaaactcctgcccaaattaaggcatagcaatcaaacacttatttaaggaaaagagttcttttctccccagggttttttatttgaataaacagataataaatcaagaaatactgtacccagcaggcctttagctcagaagagctaaaaaattctcccagtgtctcaacatctatgatgtaaaaacaaaacgtagaagaattataatgattggatttatg

SEQ ID NO: 39007 - DNA, 1045 bp, Homo sapiens
atggcagagttgagtgggatggctttgccaggtcatacttagttctttgcctgcctgggatatacgcacatcacaaggtagctttgtctgaatagatttaagtgccagcttactgaatgctatccccctcccccgccctcaggcccctggcttgctgtgttagacaacttctgctcctaaaaataattttgttttacaggcagtcccctctgtcctccctgaatccagtgtccattccttttacttccgaagttctaccagatatgcctgtatgtgcttgaattcttgttctttttttttttttttttccggagacagcctcctgctatgtcacccaggctggcatgcagtggcgtgatcatggctcaaaatcttgagctcaaatgatcttcctgcttcttcctcccaagtagctgtgactacaggcacgcatcaccacaactggctaatttttaaaatttgttggtattattttgtagagacagggtctcactgtcttacccaagctatacttgaattctgagcagagacatgattcaaatgtttccactaccccaccaaggcctttcaaccctaatgaatatcagtagatgcaaatgtgtcattttgagaaaaagcagcgcttagctctatttcccagacagatctgagtctgacttcaccccagccagggactgcatgtgagttttgcatttatttattttcctcgggttcttgcccttcctctgatacttttatgtttaaacagcaagttaaggtatgctaagattctgtggccattctggatcttgatcttctgtaaccctcaatacatctttgaaattttctgacactgaaggttactaaaaaatttcagagtcagttggaatccaagtaatacttttgtcctaatagtttcctgaaaagtaccagttaaaaaggacctaaagggaataaacccggaaatataacaaggacatcttactgtggagttgatggaagagaaaaatagggaggagatggttttttaaagaagtgaaaggttatgctttttttttcacttact

SEQ ID NO: 39008 - DNA, 1052 bp, Homo sapiens
aagcaagtggagtggggacaggtcattgcatccttgttgcctggtggggtcagagcggtggagggtcctcacacacttttcctcaggtcctatagccctgtggcccagcacagcatggaaggtagaatgggcaaatgaatgtgcatgacttcagttgtcttcatgccagtctaggagcacacagtgggtgctcttttaaggcagcctttaccttgctgattagagagaccctgctgtcaattagccatggcaatataaccaagtacatggaggcactatgcaagaaaaccatttttcatttcaaaatgagtatcttagagggagagaaatacataagggtcaatagctctttctgtgctgattgcttttgattcattatatatctgtttgtttaatacctagagggatcaaaaacaacaaaacaagcacgagtcttctattcactgttgggggatagccataggtactttttgttgaagtgctgatggaggatggagttttctttcattactgagggtcatctgggacatttaatctatactaggactgtctgtacgtgctgcatttgttcttgcttatttattcatttatttatctatttattcagcattattgaagcataactgacgtataaaaatagaactaccatgtgatccagcaatcccacatctggttgtatatccaaagaaaaataaatcagtatctcaaagagatatctgtacccccatgttcattacaagattattcacaataaccaagacatggaatcaacctgtgttccgcaacagataaatgaatggagaagatgtgcttttttttctcctttctttttttttgtgtgtgtgtgtgtgacagggtcttactctgtcacccaggctgtagtacagtggcataatcacagctccctgcagcctccacctcccaggctcaggtgaacctcccacctcagccacacgagtagctgggactacaagcacatgccgccacacccatataattttagtattttttgtagagatggagttttgccatgttgccaaggctagcctcaa

SEQ ID NO: 39009 - DNA, 1030 bp, Homo sapiens
tgttgccaaacatagtataaatttggttgttaggctcagaaattcagagccatgctgcaattgaaaaatgctatgaatagcttaaaagttcaaaatatattgaaaaaatactgagtattgaaatgctagttattatttttgtttttattttctcagaaaagctttcaagtttgttttttgagatccccctctcccaaaacacacacatacacatacacacacacacacacacacacacacacacagaatatattctaaatgcaaacacatgatacgtattagttgatttgtttcaacttactttactaccatccctatggatgcatctgttctagagagagaatgcctgcatataaacaagagaaatttaactaaactttacaggattccagttttaaggagtaatttgtaagcagtttttgagatgtgattcttatttcagtatgaagccattcttcttttagtttcagttttgttgtctaaatctgagtgcttttactgtgttcccaaatggtctggatctgtctttgacaaggtacagcaggcttagggggcagagggcatttgtttaacaggtattaactgagtgcctgctctgtgccaaacacatttttgggtttgggggaaacaacagtgaacaaagtagacaaaaatctgcattcatggagcttgcatccatttgggggaagacagatgataataagttacatatataaatatatatggtatggtaatggctgaggaagatccctcttggcagggcatttggaaaagctgtggggctccgagggccagtgctgtccccatccgtgggtcatctggcaattgcccagtcctcctctaatgctgctcagtctcagttgagttgcactactgactcttcttaagtcacttagagatgaagttggcactatttggaaagatctgttgcagcaaagggtatgtttttccttaagttatttgttttccacatatagtcacaaatttactactatttattcagtacttgctacatgcattgtatggctta

SEQ ID NO: 39010 - DNA, 1051 bp, Homo sapiens
atattatgggtatataatactcctcatagcttttctgaaaaaataaaagttaagtgctcatgatgactattttagagagagttgcaagagtttaaaatgatcactgcttaaaagttagtagcagcattcttttcccgattctctagtttttagacctgcaagtaaagacatgctttcagtattgcaggtttaatgagactctgctgtcttttccccactgatgccatgcttcctggagttgccatgtgtcttcacagcaggattgaagggaaacccttttcttctgcatagtaacaagcttttgctttcactttgtaggaccatttttaattttggaaaaagtgtaagttgctcaatattatggtcccccagagtgaacttttagagatgggtctcggaagatcttaagaccaaaacatcaaaagagagagaccagggtcctaagagaatatgagagttgttaaaatcatgagcattttccgtaagctgcagagagttttgaaagtaattgcagtttatgttgttgtcttagaactgaagaacagaaactctctttctttgtgctccattttcctgaccagaccttagtgcaagaataaaaggaaaatgaactggattgttttccctgtggcactcattttcctcccttctcttcacacctagcttccaagtcctgacctgtttccagatactttttttttggaaaaggttgaggtttgagtaggagaagagtagtctaaatgggtttgcacctactcccaaaaatatggatttaaaaattattatcttaataacaatgacatccatataaataaactgattatgaaagcaatctgcaaattgccaatcaaatataattctcacaacaattctaagataaaaaataatggctgattttgtgcttcttagttcaaataagagtcagctgaagttttgagagattgatgcatctgctcacagaggtcctaagggctggagcttgggtaagaattcagatcctatgacatttagtccagtgttcttcagttcactattactttccaattttaag

SEQ ID NO: 39011 - DNA, 1026 bp, Homo sapiens
tactatcatcctgaggcttgaaccatgactggctggactccagagacacagttctctgttactgtgttctgctgcctctcccagttcttaacattaaggactagtgattttgattttgctgattttgtttgataagcacttattgagcatcatttattgagtactctgtaccagctgccatggaagatccttggcatatataaatctgtgccttcaaggggcatcactcttcagtagagtgactcaaaagatggatgtgaatgacaatggctctggctattgacttacttcaaacattcttggcacacatagccacagattaaagtaaaatagatgatttccattataaaattaagatgatagatatagagaaaccatctgaaataacgtttacaatttaaatgagtattgaacattaacagtaaacatgattaaaacatttaatttgaaaatgtgcagtgttggaattataattccttaaattacagttaaggcacagaagaaagcaggtgttgagacatcaatgttgataaataagggcctttaaaatagtctaagtcatttctaagaaatggaaataaatttttttcatattatttaacatatagtcaaataatacattcttaaatatgtctaaactaaaataaaatcacagacatgtacaactgaatgaattactttactattcacttatgtctagatgttctattcttaggctcgaatgggaacatttctcttcataagttttcatataatttatcttgatagcatgaatgcaatctatgaaaaagatgtattgtagggtttgcacagagcccagaatccttccagaatgtactgagggagctttggagaaaggctggaaaagtctaaagatttgtggatgaaattcaaaaaaggaagggcttaatctgtgcttttacaggaagaaaaacaacaaaaaaaccaaaatcatactagaaggagtaaagagttttctgctgtttgaggtcgaaaaacttagttatgtgtcttgataatggtcta

SEQ ID NO: 39012 - DNA, 1830 bp, Homo sapiens
tgtctgtaaatccatttggctgcctttgaagcagtagcaagaagaaccctctgtagcaactgtcaatatttcttttccccgtggtgtacatcaaactcgagactggagacagattcttcttaattacaaaggagagaaagaaacaccccaaaagacaaatcaaaaactttaccaagagaggattgatttggtcttcagtctaatcatccttagaaacagagaaaatcctattttgcccatcaataatggccctgtgtttataatttttagcctaccagaactaaagaagaacctaatttggggaaaaacttttgaagattggttattgggctcagtgaagtcatctagtttctggttttcaacaaaaaattatttcaaacaaaatattactgagaaccttcacctataaaccagatacagttgtaactgctctggttgaagcagagagaagcgagagaagtgagcaggaagtgggcactggtccatgttcatgggctccactggacagtctgtaaagatactcattgagggtatttctttttcttgacactgatggtagagagtagttgttattgtttatttttattctgccttttaactgtttgcataaatgttattttatatccctcattggtatccttttctctcatcattttgggctacatttggcagagaatgtaataggtgagagctaaaatctcttccattctaaaattcaaaggcaaaatacctttactttcttgtggttatatgttgacattttcttacacagttgtcacatgacaaccttattatttgctttattttttattgaatttttttctaaatatggctttgtacacatatatatcgacatgtatttatttatatacatgtcatatacataagagacatgtttgtataactcttccatagttctttctgagagacacatatatctagtggtagacagtaatatggaaaatcttgaaactcctatttacaaatccacttaccaatccctgaaaaaatcatttttatagtccacttacctgtccagaagcatgaacaaaacctcacccagtgtaaaagttgttgtttcccatctgtgggtcagccagggaccagaacagtaggccaaagaagcagacatttgtagttacatttgtatttgtcttataagtgaatgttccagagtccccaagtggttctggacccctacaatctgggagtatggggagattcacatctacaagtaggccctatatgaaggtgtctaagtaggtgggtaacctgccattgtcataatggggcacaaagcagataatttattgttaaaactgggatcattttgagagtgatagaaagggaacatgaatgggatcctgaaacaacaagttaccacccagggcatgtggtcaatctccttgtaatttttgctatctcccagggtcccgtggatgaagagaatcttcagccttatagatttcaaagtatagtcttaggttgtataagcaattatgaagaaaacctcagcaactccagaaaaggaaagcagtcatatttttgttaaagcaaactgatgctttatagcaatcttaacaggttacagtggcttcatcttgatcatggattatgaaagcagtgcagtgagagagccagttgaacaaccatcagtgtaatgaacatggtgaatatggtgaccaagaagacaagagtttgttttttttctttttctttttttttgagacggagtttcgctcttgttgcccaggccggagtgcaatggtgcaatctcggctccctgcaacgtccacctcctggcttcaagggattctcctgcctcagcct

SEQ ID NO: 39013 - DNA, 1073 bp, Homo sapiens
ccttttttcaggcctaccatctctcctcagttcttatgaaccctgcttagattgcagaaacaggtgaggctgctgccaaagcagaagttttccttctggcatttaccccagtcttttggaatgaatggcctggaggccctctccattgtattagggaggaagagcacccgtcctccctccccaaaaggattctggaccatgaggttgattccctcacagagctgaggactctcattattcccaccccacagctggggtggtagacggtggatgtatgtgtttgctctggctgacataacatagtaccacagactgggtggcttaaatgatagaaatttattttctcacagttctggtgttggcagtgagaggtgaagccagctgggcttctgggttgggtggggacttggagaacctttctgtctagctaaaggattgtaaatgcaccaatcagcactctgtgtctagctaaaggtttgtaaatgcaccaatcagcgctatgtctaactgatcgggtaggggacctggagaacttttctgtctagctaaaggattataaatacaccagtcagcactctgtgtctagctaaaggtttgtaaacgcaccagtcagcactctgtcaaaatggaccaatcagcactctgtaaagcaggccaatcagcactctgtaaaaccgaccaatcagctctctgtaaaatggaccaattagcaggatgtaggttgggccaaataagggaataaaagcaggccaccgcccccccccccactcccgccccgccccaagcagcagcggtaccctgctggggtccctgtccatgctgtggaagctttgttctttcgcacttcgcaataaatcttgctgctgctcactctttgggtccacactgcctttatgagatgtaacactcacggcaaaggtcttcagcttcgctcctgaagtcagcgagaccacgaacccaccggcaggaactaacaactccagaggcactgcctttaagagctgtaacactcgccgcgaagatctgcagcttcactcctgaagaccaccaacccaccaggaggaggaatgaac

SEQ ID NO: 39014 - DNA, 1092 bp, Homo sapiens
aatggatgaatgaatgatatttgaaaatttcttattctgcactgaagtgaaatttaatttggattttgagtagcataaagtcaaaaatgcctttgaactctggagcacagcaggaggttgctttgattctgaaaatctggaaagattttttggagtgtctgagctcaacattaatataactttttaatgctgaatcaaaataagagatctgtgacagctattcttaagaattttggtctaggactcatttacactctttaaaattattaaagacccaaagagctttggtttctgtgggattatctcaatttatattcattacattataaattaaaatagaggaatttaaaaatatttatgacatgtccaaagaacaaaagtaagcccatgtgggttaatctaaataatgctttttaaattgtgttttccaaaataaaacagaaagtgagaagagtagcattgttttacatttttgcaaatctctttaatgtctgacttaatagaagacaagtggactcacatatctgcttctgcatcaatctgttgcaaaacttgcattgtatacttgtaggagaatgagagtgataaaggcaaataatgtgttagtatgattatgaaagtagttttgaaggtttggacttcttgaaaggatcttagggatttcccacaccacacttggagagccactgatgtaagtcaagtccattaggaatccatagcctctgagttttgcaatctccatttatcagcactaatgagctgaacagatggaaatgtttacttccttccattgatgtttagaaacaagttgactaaaatgattttccaatgtcattcactcacccttcagtgctaatgcccatcctcaaataaatgagaacattaaatagctagaaaaaaagtttgttgaagttatttgacaaaaataaagaaattttgattagagttaactgcattataaatgcttaaagacaatgtgtggcctttctcaaatttagagtccgctaactgggaatgccaattaagctttgacctgggattggctggcagcatcccaggaaaagtctggcagtgttgttgaagaatactata

SEQ ID NO: 39015 - DNA, 1034 bp, Homo sapiens
ctaaaatgagctcttaatagtgtaagactaatatatctccatctgctatatctggggtatttctaggtttgtagtttgccatttacttgtctatggttttaaaaatatatgcatttgagcaattttaagtttttatgtatttaaatctattaaatacttttgtggttttggtcattgatttttcttttaatgcataggatattgaggtaattctttatcaaaattttttaatgatagggaaagattttcagaggcagaggcttaaattttagcttcatttagtaatggatttccagaagaaacaagcagttggaataataaatattaagatgaaaaattatttttatgttaatttgggagtagatttagtttttacttgaattttaggaagattgtgcttcatattgtaccaaagtcttttctgataaactaatacaagtatttattacagtcatttttttcagagtaaattattttatttcttcagatgtgtttatctgaactgaatttgatttcctctgctattggacctatcttctccctccaaagcagtaaagtggtgcctgattttttcatgctttagaaatgtccaataacagaaataagggcctattttctctttggttccactttgaaagaatattcctatggaaaataactcttccccctcccctggcccccaccctctccagtttgcaaagaaaataaatcttaccagattaccagttgtatggagtctgtcacagagtccaggtcccctttaccacatttacttagtgtttttcttcaggctggattagtcgttcccttttttgtggacaccaacaccgtgtccctccccttccttacatcttcatcataatgagcaacaagccatgtggtcttaagtgctgtttatcttcaatacacagttactcactacaaaaactttacttttcccttcacgttattttcttcactggccctttcctttgactcctagcttgcttcagacctaagtcagctttcctctggcagaaaccctggttcccatt

SEQ ID NO: 39016 - DNA, 1073 bp, Homo sapiens
cagaagtagacttcagatacattcattttacctaacctgcatctagaaaatattaatagtgctttttatttcactaacacagcttgctctctagtaatcagcatactggtatgttcccaatcctgctgtgttctgcctttacatcaaaaagagaaaatcttgcttaaaacactcttcttaaagcacagagagttaaaattttataattatgtctttcttttcttctctgtggctcttagtccaaagtcatgtaagagggtctgttgtaggagaaaagagaaaatccagttctgcttccataggatgtgctgcgcgatcatcaatgtcattgttccttaacttgtatccatgggatccagctgatgatgttttcaatattggagccttttgtttcccagcatgatgggatgatggagcactttgtacatctcatcaggagtatctgattcatgtttctcctaactgtgccagcaagaattacttatcagaatttttttccctttactgtagtaaaaagttgctgttagcacagttgtgaaatttcttctacccgtgttgagtttgaggcctctgattctttttactcatcgaatgggtttctgttttatatgtttatggtaaccatggaaccttgtctagagcctcatgtgtaagattgcagactctgtttgtgaggtgttctcaacatcgttgattttgagacaatgtgtgaggggggaaacttcagaaatctacataagtaaacctcccactgaggtttgggtgatcagatgggctagacctccaaaacctctgctaaatctgggattccaggatgcacatcattaaagaaatgtaaggggtggcaggaggtacaagcacccttgattgtctttgaagaaagcctaattattcccatttcacaaagcccctgattacattgtagaattacaagaattaggttgaacatccagttctaatgttgtatatgttgaggtgcctgactaattcaaaatacatttcattggaggatattacaatttctagaaatgttactggatataagataaagagaaaatggaacagaaaggagt

SEQ ID NO: 39017 - DNA, 1023 bp, Homo sapiens
ttgttctctttctacagatgcgtaaactgaggcttagaaaggatatgaattaaccagagtgcatgacagagctgggagagtaactcacacatgtctgatgtggaagcgctagtccttcatcctacactaaactgcatctctcattggctaacaactcaatttgtttctacaatggtgttactgtcttctacactacttcttaattcttcctttcctcattaaatgcaatatatgtatactattgcacagaaagctaagaatactacagatcacactttgataaaacttccttaattgaatcaggagtctatcaaagtctgtagttgcctgagcttttgataccacatatgtgagaataaaaaataatgtgtttctttccccattccattaatacctattgatgaacttcctatagtaaatgctgagcaaactgatgtgagtatagattgaaactgagaggttgaatcacaggataagaatatcctgagtcaaattagccccttgaatttgttgcctgtaactttttaaattgagcagggatggtactcatttaaatgtctctgtttttaatggtgatactcagctaaaaacaaacattagacaattcacaattcacttgtaatgggcacatggagggagaaagtgcttgagaaatggtatctgaatttatagctcaacttgtatgcagagttgtttgttgtgtagaaaaatgcaacaattaaaaagtcattacattatacatttctaattggagcatctcaagatgttcattaaacagcataaaggatcatctgaggccattgaatacctgtagttgagtggcataactatctatacacacttttaagccgtatgctctgtatgttgttaaaatatcttcagagaaactgtgaatacctctatccattgactcatttctttttgactagcaagtctttcaattagtgaagacagaaaacagctcgtcaaattagttcatgtttttcttaatgtatctttaaatttatagaaaaaagtaaatat

SEQ ID NO: 39018 - DNA, 1076 bp, Homo sapiens
ttcccatcctgagatctaatattcaagcagattttttttctaggtttacaaaaatttttttctttcctcttttccatctttttaacttcttgtatattctttgatttgtaattgttttctgttttacacaaagtattatttactttcatttatgagatatttaacatcattgaatttgttcatttcttgagtttgggaaatgaaaaaggatggtgtaaaaaaatcaaccaaaaatcgttatgattctgtattctttattaatattctaaaatatcctatacattggagcagatgtgaacttcccaaccactcctttagtattccctctccctatttatttcctttgcattcttgtccttcttcgcctcttgtcttctctcagttatcatttgataaacacgaaatctattctttgtctcctcagctaagcaggtatgaagatcttggtcacagagaagccaaattaggaagtttgattactctgtacataatatgcctttctgactgagagaaattgctgacttttgtagacattagaaatacttcctattcagctccatttatttctctatgagagagatttttaatggaatggcttataattatttttaaagtgccatgaagaaatagagtgaaagttttttaaagctagaatagtgcagagagaaattcaattccttattttgaaattaattgatagactttccagcagtcatcagtatctctgaagagtactttagtttcattagcttcacccctctacaatatctatcagaaagataggaattttgcagatggcattgggccatgcttcatttctggtcaaatcacaccataatgatgccacttattcatccataaaagcttgtggaagtgcactgaacatctgcacataatgcaaccattcatgcaaagaaagccacagaccccgtttatcacaagggatctgggagctctctcttcctgctcagtcagcctcagaagtttcaactgccctgggagagaagtgccaacagcccattagcctaatgagccaatccatagaaacatgctctttctgccctcatgggtgcctg

SEQ ID NO: 39019 - DNA, 1034 bp, Homo sapiens
ttttaactggtgaatagcttcaatacttgtgggttccttcattaaacaaaaattttgcttctgccattttctaccactgaaatgtattataaagctgagcatgtattttcccattagaaaagtaagttggacaaatatatccaaatgttttgctaaataccaatgagagccttcatgaattccacccagagttaagttcaatgaggtagggatgttgtcttgtatacctgacacctaggaccagacatatggcaaatgctaaataaatatttattgaatgaatgaagccatgaatgaacttagattttccatatatacaaagggcatgtaatcccagcactttaggaggccgaggcgggcggatcatgaggtcaggagtttgagacctgcctggccaacatggtgaaaccccgtctctactaaaaatacaaaaattagctgggtgtggtcgtgggcacctgtaatcccagctgctcgagaggctgaggcaggagaattgcttgaacccgggagctggaagttgcagtgagcctagattgcaccactgcactccagcctgggttacagagcaagactctgtctcgaaaaaataaataaatgaaataaataaataaaaattaaaaaaagggcagtcatattcaaagttctgtttaagaaatggccaaatccattttaattggacatagattggatggattatatggtatcgtaaatcatcatagtattctttatttgaaagtgagaaaagaaaatgcatattttctgtttttcacaagagcaaattactattgaataaattgtcaatgaaataaaattacagcagaggggaagattcattaatgccatttcccatctttgtggaaataagtgctctccatggctgatggaacattacaaagagtatcatgcacatttaatttcttcatattttttgtatataaataattgtctatttaatatgattacttcttctgaaatacccacatttaagagaagaatattaaaactttacatttataaattttaaggtaaaa

SEQ ID NO: 39020 - DNA, 1032 bp, Homo sapiens
gttttgagagaacaaataagtataagaaaacagaaaacactgatttgctcttcaccttcaggtccctgtgcctccacattaatgcaagtggacagttttgcccagggtcacagagctaattagaggcaaggcagcaatttgaatcctacacatccaatcatcttttgactacaactctgtaaagtacattaacaccctctattcttttgtcttgtgttgccattttctagtgtgcttgtaattatgcactcagtaaaactgagtgcacaaaatgacaacctcagttccttagtataaattttattctcattttcttaaaagatttctagttcaaatttgtccaatcctgttttcagatattttctcttagatttatgttccacctatgcctacttaagaaaaaatttttctgatgtcgagtgtccaccttcctgacaaagaagtttcgttgttagcttacaaggaaatttgcatgccagggaagtaatgacttgggaatttattgactacgtattttacagttaacctctgaagatagaaactgtgtgcatatttgatgctaatattgttatttaggattcttttaaacgtaagatacacttctataggtgggagttgactaaaatattcttaactaaatgtattttgatagcacatagaggaactttagtatttagatctctaattccagaatctgtcatggtaaatattcctctgtggtccaagaaggtctttatatcccagacctaagtataaatctgggatttactgatggtttgacacaaatgttccatttaagagcctctaattagtttgaatcattacagaacagtaaagtctcttgtttttatatctgtctgctcagttagagatgaccattccttcaatattaatgcactgcaaggattaattaattgcttgttgaaagctcttgaatatattttcagagctgactaatacatccttgaggtaaggacaaatacaagagaaaataaaagtggtttatgatattccaagaatgaactcctattc

SEQ ID NO: 39021 - DNA, 2158 bp, Homo sapiens
tattggctctggggtggacaaatccatccaactatttgtggatcaaagtgaaattaattgacatcatgctttttttcccccacttacatagagaatttctagtcacactacatgctgtgtgcacaatagttaattaggcacttacaatacacctaatacagtgttgggtgttatacaaattcagaataagatagtttacagtcgtggcttattagaaaaaatacagaataatctaagtctgctattgctacatagtggtaaaaaaggacagcttttgcatcagacttgcattcgaatcagtgtttattagctaagttatctcaggcaagttagttgacctctgagtttcattttccttacttgcaaaatgggtataataatatttactttgaaggcacataatcaggataaaataagacatcgtatataaaacacccagcacatagtgaacacttagtacatataacctactactataaagatctcaaaatgtatattgtagtttgtaggctctcaagattcaggaaaggttgttctcttcatgggttggaggcatttgggagtaattcttcatgataattaaatggggctcttgatggcctgtgagaaatggtgggctctacatggttaagaaatccacaaaggatgctaggacttatgaaccacaggaacatgctaaaaacaaggattggtacagacagaaagtgtacactgggaataaattgtggtattcagattttgaaacccaagctcacatttgtcacttctctacaactctttaaaacccaattgtaatcagatatcttcttgggggttggtgtggtcatgacaggaggcagctttggatttctcaggagctgtggagaactctgggagcagaagttggaggttaactgaaagccaaaggagagaaatgccatcttctcaaggagattcagagacaccaaattttaaggaagcagaaatggagatgtaaataaatgtcatagagcaagtgttcagaggcacagacacaataaaaacagactaagaacaagccggaggacatcctcagtgcattaggcaatagccatcctctgaggctcacctatatgggctggcaggtaaattggactggcttagtgatatggtttggctgtgtccccacccaaatctcatcttgaattgtactcctataatttccacgtgttgtgggagggacccagctaaagataattgaatcacaggggcagttcccccatactgttctcatggtcgtgaataagtctcatgacatctcatggttttataaggggaaaccccttttgcttggctctcattctctcttccctgttgccacgtaagacatgcttttcgccttctgccagattgtgaggcctcccagccatgtggaactgtgagttcattaaacctctttttccttataaattacccagtctcaggtatgtctttatcagcagcatgaagatggactaatacacttaggagctggtcttggttgatcctccggagagattgttttttaacttttattttaggttcaggggtacatatgcaggtttgttatataggtaaacttgtgtcatgagggtttgtggtacagattattttgtcacccaggtaataagcctagtacccaatagttattttttctgctcctctccttccttgtaccctttatcctcaagtaggccccagtatctgttgttcccctttttgtgtccatgagttctcatcatttagctcccacagagaacatgcggtgtttgggtttctgttcctgcattactttgttaaggataatggcctccagctccatccatgttcctgcaaaagacatgatgtctttttaatctctccttacttcttttcacccattctgaaaacagctgttctctaaacagagttttctaaatacacttcttttctccatttttgaccacaaccatcaaagaccagactaaatgaaaagtctttgttttcccagcaggaaatactcatactacacttctaaatttttttatgacctcacccttaccccatgccacacttctttaccagactaaaagctccttaaggacaaggactatagtggtaaatccttgtatttggcacagtttctcagaaatagacagtgtctcttatagtgctatgaaca

SEQ ID NO: 39022 - DNA, 1042 bp, Homo sapiens
tacatctttggtaatgttacttccatgtaaaatacgtgcagtacacatactccaaccctcctataaaatttagttcagagcgcttcactgcctgtcaaccctgatggccagcctcatctaacacttctgtcattcaaataatacttattattaataaatgcctactattgtgccagacagtatcctagatattggagatatagtggtgggatgggggtggggagacatttagacaaaaatcaagtaaataagtaagtaaacatcaaaatgcaatgtttggtacaaaggaataaagcaggttttctaatcaagagggtgggttgaaggtgcattaaagagggagatagagaaaggcccctttgacagatcatattttaactcaatagtaaccgcccttcagagatcttgcaagcaaagggatcagcaatggaaaaacgccctgaggcagaaacaagcttggtgtatcagaaagacagaaggaaggtggagtgggtagagtggagtcagggattggaaaggcagcgggttagagaagttgtcatgcttgagtaattgggaccttatctactggatgaggacttcagatgttattcatggtcatttgctacagccaaacagaccatcttctttaaaaaaaaaaagcatcatctgtacttaaacttttatgctattgcacacatagctgtccccatatggacactctctgcctcatttcttcctgttgaactcttagcccattttaaaaaataaagctaaaatccaatatcatccataaagtctttcctgattgctcttacatgatatatatatttttccttttctatgtagccatccattcattcttggaaactcaattagtcactgagaatgcactatgttccaggcactgtgctagacactaggaatacaaagataaataagacactgtcctagcctttgtaaagcccattatttggtgaagaagatagccatatgtgagcagatcattatggttaagcatgatgaatgctctaatcaattaaaaatgaagcacgttgggtgg

SEQ ID NO: 39023 - DNA, 1033 bp, Homo sapiens
taaatacttaatttattaagaatttacctttaacctatttatgaggtgggaagttttatctagctaattgtttccaacattgttggtgtattaggccattctcacattgctatgaagagctacctgagactgcatagtttataaagaaaagaggtttaattgactcacggttctacaggccgtacaggaggcatggctggggaggcctcaggaaacttacaatcatggcagaaggcaaagaggaagcaagcacatcttcacatggtgacgagagagacggagagagaagagggaaatgctacatgatttcaaacaaccagatcccatgagaactctatcacaagaacagcaagggggaagttcacccctatgattcagtcacctcccaccaggcgtctctttgaacccgtgtggattacaatttgacatgagatttgggtggggacacagagccaaaccgttatcagttggttaaataattcatattctcaccatgaatttaaaatactgtctttacgatatactgaatgattccatacaattatatatctagcctttttagtaggcagcattgatttttttttcacccctgttaacactgtaattattgtaggcttagacgctttaccatatttattttatatagggccagtttttttctctttcttgaaacttccttgcctatttttgtgcaaccgtattttagttttacttgaggatgacttttcaagcctctttcgtcttctccatctatatcactgttcccaaattttatgttttttaaaatgaaaaattgaaattttaatgagttgacagattaatctttgaagaacttacatcttccagttttgagtagttgtaaagaaagcattgacttgtccttcattttaaacagacaacaatactagcaagatgaacactcaaaggcatccaggtgcaaagtgcagtgtgtgcaggggaaggagagagcccaggttagtcggggctgctggggagaggctctgcaaagagattgcacatgggcagaggctta

SEQ ID NO: 39024 - DNA, 1045 bp, Homo sapiens
aaacagaggtaattcaatgtgggtcacagggttgctctcacatcaggtatgcagggttgccatctgaccatggccacaaaagtagtttcttgggaaatagcccatttgaaagaattattgagtctagtaaataggcagctttccttttagggtatctctcagcctttttcctccttttacctcatccacagagtggatgttgaacattcattcactcttctttcatataaaaatatttaataagcaccacttgtaatgaatcttatattcaaaataaataggacgtcttaaaacagagtaaggtggcagtagaaggtgtgaggggtgagaaagcaaggctactgtgtttggttgtgcaagtttacattaaacaagggcattcagccataggggtgatggaactgacaccagactgatcaagtcttatcatgccatgcatcattgcataaagatgtgttagcccagaggaagcggagaaaaggagggtttttcctaattagcataaagacacttctacattcatcaagctctgcattgaaggactggattcacccacagaaggcactttttttggtaacttaagtaaggacaccctgtggactagcagcagctgtgggaattaaggagagatagatctactacacattgcacagttgggggtccaaatgtgttttaaatcttaaaccacatttaagaagctgttgcagaaacccagaaagaaatcatggtgcctagaacaaggtaatggccgtggagatagaattgatggatctgctgatgggttggatacaagaggtgtgggaaagagagaggaccctagaactctggcatgagcgtttgataaccatttttataatttactaatatgcggaagactcaggatgagggccagaatggtgagggagaacttgaagagttttgttttgaggagtctcactatagatactaactggggattttatattttatacatacttggagccccatagagcagccatgagaaggttcatccttacgtatgcccaaaacctaaaagaaacaaaag

SEQ ID NO: 39025 - DNA, 1062 bp, Homo sapiens
caaggtagcaagtattgccctcataccacgaatatgaattgtcactgtttggctaaagtagaaggttgggcatagtcagcatatatagctagtccaaaagcatgctttctccaaacacacacgagttttttaaaaattttttcctgcaatttcaagtcactccatgattaacttaagagaggaggatctattcaaacgtaagaatttttttattgattcatcaaagttgtaacatagaaagcataaaacaaaaaaaatctgttaacattcataaaatactattatgcagttgtagtcaaagcacagaaacaatttttattaaagagttttttgctcagcattatactttaagcatttttataactccacaatcttttggcaacgataggaagttgctgcctaccattcaatcaagttgatgcactataacttaatgagccattaagttataataacatttaggtcattttcaatttttatattatgaataataattgtgatgcaagtctggcttcccatcttttggattacttccttttagtaaattatcagataggagattactgagaatgtcaaagaatatgaatattattgcttctcagtttgcactgccatcagcaatacaggaggttataagttttgctcccactatttaaacataggtgctctcactttttctactttcatgagtataattgatgaaagtttgcatttgctaatatagtaactttaaattttgcgttctggcattcaaagataggtgaatttactccattatactaattatattatattatttgcacacattcatgtgcaaatacataagtatatattaatataagtaatatatatcaccctactgatgaatcattttgtctctatgcttagatcagtgatcttttttttcttaaacaggtttttctagaaataagtaataccacataatatttttaagtcttttgctgagaaaatcctgtaaactccccaagtgtcaggtgtatcatccattctttttactactattttgtaaggacctcaagaaatggatatacagatttagta

SEQ ID NO: 39026 - DNA, 1033 bp, Homo sapiens
cctgagttaaatctatgtataccccttatacactgagaactgagcagaagcaactggagccaggcttatctcaggagtttttggaacaggggcttgggtatgcttcacttttgtattcatcagtgttctccagagaaacagaaccaataagagaccatatatatataaaatgagaaattggctcacatgattttggaagctgaggagtcgcatgatctgccatctgcaagctggagaactaggaaagccagtgatgtaattcattttgagtccagaagcctgagaacaggaagaaaaggagctgttggtgtaagtctcttcatccaaaagcctgagaaccaggagctctgatgtctgagggcagaagatgaatgtccctgctccagaagagagaaagagtgaatttgcctttcttctgcctttttgttctgtctgggctctcagcagattggaacacttgcccacattggtgagggcaatcttctttgctcagtggactgattcaaatgctattcttttctgggaacaccatcacagatacctggaaataatattttactagccatctgggcacctcttagcttggtcaaattggcacataaaattgaccatcacagatttcaatttttttgtttatatgttgggagaaactcttcccagtacagtactcttgggattgtggaatgaatattttttaaaggctttttttaaagcataactgaccttctagtaaagttacaggaatttgtggaggccagatacgagtgcaggccagtagctcctatagacagacactctcacgctggttatgtaactgaggcatgtgactgctgctcgtagtgttctagaacctgggttttaacagttgccaatatggcattcaaaaggaaaggcttggaacgcagcaaatgtgaaatgttggaccagagacctagagtaaatccaggaaactctcagtggatgagctaggatgaaatctgtcccataagaaaggaaatagggaaatgtgcctgtctgagttttggtctgttga

SEQ ID NO: 39027 - DNA, 1372 bp, Homo sapiens
gatgcaggacaggtgagccccaaagtggggcttaacccacagagttcttggcttggcctaggaaagaattcaagggcaagccagaggtagaagaaaatggctttattgaagcagcaatgttacagctctggcagtgttacagctctctgactcttcctgtagagtggggctaccccataggcagagatcagaagcttagggcaattttgcagtcatattgatactcattttaaattacatgcagattaaggggtgacttatgcagaaatttctagggaagggctagtaactttggcaaagccattggaaagcaagggacgtatctctcaccctttccttcaactacattctgtaacagccatgtttgcaagattggaaaacatgtatttgatcctgtctgaactctttattcatttcttcatcttcagttttcttatagtaactgtcactttctactctatatgataattgtttatttgtatattttctctttcaagtttgtaaaaatctttgaaagtgggacttgtgtacttggaacttaataagccctgaatcaattcctaatgtttgaataaatgcagaaacaattcatctttgtttccttcacagtatcgtgtatgtgatagatgctaaaaatatatcaaacgtttgaaaataagtcaatgaatgaaaggatgaatttctaaaggccagctattgggcaaggcaacacaagtgacctctagtagttttatcactagtaagtgcatttattcacacaggacacaggtatggaacactaaacaccttttcagtattctgctatggtctggaaatgtaaagataactaaaaaagatcccctctccgaagaagctttaagtattatagacatagaatggatgcaggttcattcatgctacacttggatgtccaaagaaactgtactttctttatattctataatcgatctaatctttatagtgaaccttcttccaaacaccctccacctggctaagtagcagtaggtggagggaaaagactgactaaatgtaaaacttgccaatcccttctagtttaaaaactctctttggataactcagttgcttttggacaaatgctcagcctctcagacatcacaacccccacactcatatctgagatggtctgtggatttccaggaggtttgtgtgaccttgtggcctgatgtcggtcctgtgcctaatgtccctaggggcagctggctagtagttggatgtgcacctgctgtgctggacacggagctgctgtctggcgttctgctggcctctgctgctctctcctcccagcagttgtctctctcttcttgtggactgctcccacctgcgcttgattctcactgataaagtgaacctc

SEQ ID NO: 39028 - DNA, 1063 bp, Homo sapiens
tgccctaggttgcccagaatggagaagttccccagatgtggaacttttagtgctaaaaccaacagagtcccaggaaaacaagatagttggttccccctatttgagaggcagatgtattcaatgggatggatacattttcaggaactgcactgatagtctttcaacactctagaataatataactcaccatttatttcttgtcctagtagtaagtcatgatttcaaatagccttcctttttcctcccaccaccacgcatacacaaacatgtctccaaacatgatgtttctagtacttaaacaaaaatcggataaggaaagccagtttttgcaaagcaattatgactaggttgattggaatcaaggagcaatccaaaatgagaaatgcccaacccaaagagacaggtgcttcaggaaataatttattcacttttttaaactaccatttagtgaacacttactaagtgtcagatacaatgctaagcattttacatgtcatattttattttattctcacagtaacctaattttaatataaggaaactgaagttcaggaagactctgtagttttcccagtattacacaggtagtaagtgatagagatgtgatcagacccaactctaccaataaattgaaagctgttctcactgaaaacatttaccataggatgtattaagacttgttcagtcagctcaattcatgtagccttttattgagaatgtataatgctgcaggattcatgctggagaccacacagaatatacagctgagtgagccacagtccctgcccttcaaccatgatttgtaagagaacagttggctgcggggaaatgagatacacaagttaacaagtaacagacaaggagtggagtatggtgggtgccatagacagataccaatgctgtgaaattcagaggagggagagaactatcggtttgggtagacacttcataattttaaacatgtccatttacccaaaatttgtaaatcattatcacgtattgtggttttatacatacataaatgacagatgttctagcataactttcaccatgaacattgtgc

SEQ ID NO: 39029 - DNA, 1034 bp, Homo sapiens
ctaggattacaggcgtgtgccaccacgcccagcccaaaattgagtttaaaacaaaaagaatttttaatgaaaaaatattaatgtgatagtgaattacatatatttacactcttatgttacttacctcaggggagttgaaaatttcaacccataaatcctttcactctcattttctaacagttacacattttgcccatggtcaaagtgcaatcttgacggcttctgttatagcttccctccctgaatagcagagggtggaaatgtatactgattctgtttgttctatgccatgttcactaaactgctggaaaatgtcctgaaaccaatataacttgtgcatgtattagcatatattcatagacattagccaggtgtggtggcaggtgcctgtaatctcagctactctggaggctgaggcaggagaatcccttagaacttgggaggtggaggttgcagtgagccgagatcgtgccacttcatatttgtataaatctgataagtgaaaatctgatacctggacagaagatagtgggctttgtagagagggtgtgatctggaagagactgatctctttcttagagaagacttctaattgtgtcaacataggcaaactttttatatcagaacgtgtctagagcacagataaactttactaaatctcagttggaaattgcatgacttctataaaaatgtcaaaatagaataggcaagggaagctcaatttgccgatgccagattcttgttaagaaagttttaatgatgctccctctgtttgtttgtttggttggttcctaggggaaaataagctggtaggggaccttctggtcttaggaggagccacactctatggtatttctaacgtctgggaagaatacatcatccgaactctgagccgagtggaattcctgggaatgattggtctctttggagcatttttcagtggaattcaattgtgagtaaaaataacaagaaatatagatagtagagggactgtcaagacttattcttacaatttttgttcttgggatgtaaaa

SEQ ID NO: 39030 - DNA, 1217 bp, Homo sapiens
gaaatcatttgaaggtacagaactgactggtagtaatcagtacacagaagaacacagattataacactgtgattcttgtgtgtaaactactcttaagtaaaaaggctaaaggatgatccaataaaaaataagtacaacaactttcaagacatagaaagtacaataagatataaatagaaacaacaaaaagttaaaaagtggggagacaaagctaaggtttggagttttttattagtttatgcaaacagtgttaaattgctatcagctaaatttaatgtgttatagtatttgcaagcctcataactttgaataaaaaaattagtagatatgtaaataataaaaagcaagaaattaaatcataccactagggaaaatcaccttcactgaaaggaagacaggaaggaaggtggaaagaaagagaagaccacaaaacaaccagaaaacaaataacaaaatggcaggagtaagaccttacttaccaataacaacattacatgcaaatggactaaactctccaatcaaaagacatagattagttaaacagataaaaagataagcccaaagatctattgcctacaataaacacaatccacctataaagacacacataaactaaaaacaaaggaatggaaaaaagatattccaggcaatggaaaccaaaaaagagcaggactagctatacttatataagataaaatagatttcaagacaaaaactataagaagagacaaaaagatcactatataatgataaagggtcaattcagaaaggggatataacaattataaatacatacacattcttttcctcagcacacggattattctcaagaatagaccatatgttaggtaacaaagcaagtcttaaaacattttcaaaaattgaaatagtatcaagcatcttctctgaccacaatggaataaaacaagaaatcaataacaacaagaggaattttggaaactatacagacacatagaaattaaacactatggtgctgaatgaccaggggttcaatgaagaaactaagaaaactggaaaacttcttgtaacaaatgacaatgtaacacaacataccaaaacttatggaatgctgtgaaagtagtactaagagggaagtttatagctgtaagtgcctacatcaaaaaagaagaaaagctttaaataacctagcagtgcatcttaaggaactagaaaagcaagagccctcaaacccaaaa

SEQ ID NO: 39031 - DNA, 1031 bp, Homo sapiens
agaagaacctggcacattaattatttccacttctcaaaatagatttattgttaatttcccctttcagttttactattctttcaaagagataaagatttaattctgggcactgccctacagaagccatacaggacattttagttgaccaatctttaagtaaaaacagagtcctttttcatttcataaataccttgctgtttatgtattgcttatagcaaataagaggttcggaaatctgaaatgcaaagataaaattctttgcagcagttttcagaagtagttattgataaactgaatgctataacaatgagttttaattaggatgcaaagtaaacagaacacataattgtttatattctaattttcttcatttagtacacgaggaagggaagcataagctgtttttgaaataaggtgtgtgtgtgtgtgtgtgtgtgtgtatctctaagatgtttggccaaaatttcatttctagctcctaaagttacctcagtattcctctttaaaagatctttttcttaactgtcctctctgcccaccaacctacttagattctgtggttcataattccaagaagtgctttgccagtatctcaagccgttttctacttcttttttttttttttttttgtccaaccctctaactttagcaaacatcaactttttcagtacctgcaccctagcagcccaggtcttagcagaaaaagtacggtatggcagattgattccatcaggtttcaaatctgacttcaaatgatcctcaacactgtctggcaagccccttgtttctatttggttgacttactttcccacttaacaagacacttccagactttctccattctcttctactctctccaacccagtggttgccacaagagagtggggttgtggtgggaggagcagttatgcctcctacccctcggtgacatttggcaatacctgaagacagttttgactgtcactgtttggggtgggcaggagtgccactgaaatgtagtgggtaaaagccaaggatgctgctcaacatcc

SEQ ID NO: 39032 - DNA, 1057 bp, Homo sapiens
gacaacaacaataaaatgttgagtgccagtgcaacactacagggagtttataaataaagcaaaaataaacccacaaagacagttctattttgggtagcacagaaagataagaatagaggcaagatgaatatgtaagatgcacgtataccaagcagcaggcacacataacgtaatgattgctgtttcccaactctcagaagcctgcctgactgaaaactgatcactcattgctctcctgggctttttcctttcttagcagctctgcagtgttgtccctgtgagttctgtaccaaagtgaggtgatggtctcaagcaggctaagaaagttttgttattttatttcctccatccctttctttttttcttccttctcttctctgcctttacaaagaaaaatgttaaaaaaggaggggtggtggaggggaggatgtgaggttttgatgaagaattctgaatctgtttggaagagggtcatggaaatcctctgactgggataggtgtgggtacaataaggctgtgctgagcatactgagctagtttaattgagtttgttcagtattggtggaaacattcttttttcttttaatttgtttctgccttgttaatctatttctgatttctccaaactatacacatggaggtatgctatcttccttctgtcctcggggaaggaaaagggcgtgctgtttgcaagttatgcctgtgctcctgtgtgtcacgacccttttggagagtccgttcaggttagtggtgtttgcaaagttttcttgtctctgaaacctactcagtgtctctagagtctcctgctgaaagaggaaaacactgtaacacatcatagtgggctgcttattagaaaacacaactctcatagcaaatgacttttctatgaagtataataaatcatacacttggtaataagtagaaagtgttagccattggaacgatccttttcctcttgtcaagattagggcaattagatagtccatatggattttcaaattaaatatctgctctgattatgctgctttaaaatattttatttgaagtaatagattgt

SEQ ID NO: 39033 - DNA, 1032 bp, Homo sapiens
atgatatctaaaactgtaaaactgttagaaggaaacctaggagaaaatctacacaacaatggcctgggcaatgaattttagatgtgaccccaaaaatgccggcaacaaaattaaaaaatagacaaatgagattacatcaaaattggaagcttcactacacagcaaaagaaacaattaacagagtgaagcgataacctatggatttaggaaaatataattgtaagccatatatgtctgataagagattaaatccaaaataaataaggagctcaaacatctctagaaaaagaaaaccaataatccaattaagaaatgacctgacataagaagagacctgaacagacatttctcaaagaagaaatatgaatggctaacagatacatgaaaaaatggtcaatatcactaatcattagagagatgcaaattaaagccacaataagatattgcctcatacctgttagaatggctattatcaaaaagacaataagaaaacaaatgttggtgaggatgtagagaaaaggaaacactttacactgttagtggaaatgtaaattaatacagtaattatggaaaacagcatggagcttcctcaaaaaactaaaaaaagaaattctatatgatcctgcaatcccacttctagatatttaaccaaaagatttgaaatcagtatgtcagagatatctgcactctcatgttcattgaagcagtattcacaatagctaagttatagattcaacctaagtgtctgtcaacagatgaatggataaagaaaatgtgaggtatattaacaatgaaaggttattcagcctttaaaaatagagaaattctattacttgggacaacatggatggaattggggagcattatcctaaatgaaataagctgaacacataaagacagataccacatgttctcacttatatgtggaatctaaaacatttaaattcacagaagcagagagtggtatggtaggaatattatcagaggctggggaaagagaggggatggagagatagtatgagtacaaagcct

SEQ ID NO: 39034 - DNA, 1049 bp, Homo sapiens
catgtccctaatgcttttttatttttcctcatcagcaaatttaaactacaactttatcctgatcccactgctgctctttgcctcttctccccccagcccttccacatttaccagcctcctccctacctcctcccagcctttccctttgccctcccctttcttctagcccctcctcccagttgagtcagtggcttgaaacttttaaaagctctgtgctccaagttacaaaaaagcttttacgaggtatcagcacttttctttcattagggggaaggcgtgaggaaagtaccaaacagcagcggagttttaaactttaaatagacaggtctgagtgcctgaacttgccttttcattttacttcatcctccaaggagttcaatcacttggcgtgacttcactacttttaagcaaaagagtaagtttttaaaaaatgagaacacgttacctattagtttctttttctacaagtaaaacttttctaaagttttaaaatgtgttaaatgtaattttgaattatgatactgtaaatggattgatggatttgaaagtgtttctatagttttaaagttaaaatttattgtaccaaatatatattttgactgttaaaaaagtttctattaacattgcaacaggtgaaaaggttcaaacctttccgattagaataaaggattagtttactggatgtttggtttttcattttagagtatcattttattttgttttttttttgtaatcagtaatagtctaggtgctatcatttgttgggtggggggggggcggttaggcgcctgggttgggggatttgactgactacatcggaaaaatcaaagtgcaaatttgcttagcgtgcttcctatagtattctacacttcatagaataaagtgcttttttcatatggaaatcttgattgatgttctatagctttgcaaagccaacttcttttgtgacgaagtgctttgttaaaacatcgtggttacttgacttccacgtggttccttcctagaattttccccattaaacaaaaaggtataaaattcaagagtattaa

SEQ ID NO: 39035 - DNA, 1068 bp, Homo sapiens
actccttgacaaggttcaagcctactcaactgctggagggaaggtgtggctgtcagtacttttcattttccgaatcctgctgctggggacagcggttgagtcagcctggggagatgagcagtctgcctttcgttgtaacactcagcaacctggttgtgaaaatgtctgctatgacaagtctttcccaatctctcatgtgcgcttctgggtcctgcagatcatatttgtgtctgtacccacactcttgtacctggctcatgtgttctatgtgatgcgaaaggaagagaaactgaacaagaaagaggaagaactcaaggttgcccaaactgatggtgtcaatgtggacatgcacttgaagcagattgagataaagaagttcaagtacggtattgaagagcatggtaaggtgaaaatgcgaggggggttgctgcgaacctacatcatcagtatcctcttcaagtctatctttgaggtggccttcttgctgatccagtggtacatctatggattcagcttgagtgctgtttacacttgcaaaagagatccctgcccacatcaggtggactgtttcctctctcgccccacggagaaaaccatcttcatcatcttcatgctggtggtgtccttggtgtccctggccttgaatatcattgaactcttctatgttttcttcaagggcgttaaggatcgggttaagggaaagagcgacccttaccatgcgaccagtggtgcgctgagccctgccaaagactgtgggtctcaaaaatatgcttatttcaatggctgctcctcaccaaccgctcccctctcgcctatgtctcctcctgggtacaagctggttactggcgacagaaacaattcttcttgccgcaattacaacaagcaagcaagtgagcaaaactgggctaattacagtgcagaacaaaatcgaatggggcaggcgggaagcaccatctctaactcccatgcacagccttttgatttccccgatgataaccagaattctaaaaaactagctgctggacatgaattacagccactagccattgtggaccagcgaccttcaag

SEQ ID NO: 39036 - DNA, 1049 bp, Homo sapiens
gattttacaaagatacaattatgtctactatgtctactgcaaataattataaaatggtacttcctctcaaaatcttttttttttattttggtcttaattgcactagttttaaaacaatgttaattatgctgtctacataattgtatttcattttctcattgctggtttaatggaagttctaatatttcaccatagagtgtgatgtggcatttggtttgagatatgttcctaaacttttgaggttgacatcaaaaagcttagttgcaatttgttgcttaattgcaattttgtttcttgttcctgttgtcaagaatagaatgttggtctgaagacatcaaggagggactggactactcaagacagttgtgggatgtataaatatatcaccatgtgtcataggaacttaactaatttactttttctttttttttttccccttgcagaatggccaaagttttctggtcttggatgagcaacgatttgcaaaagaaattcttcccaaatatttcaagcacaataatatggcaagctttgtgaggcaactgaatatgtgtgagtatggacagcagtttattggagtaccattatcagctactgatgaagccattttttttcccattagggtggtaaaggaaaattattccatacaagcaccaccaaattttgacttgtttattttagtcatttgaattttgaatatttttcagatggtttccgtaaagtagtacatatcgactctggaattgtaaagcaagaaagagatggtcctgtagaatttcagcatccttacttcaaacaaggacaggatgacttgttggagaacattaaaaggaaggtgagctattgtgaacgtgagctaattagggtattgacctggagtgtgcttggccaagatttttatttcagctgttgaaagtacagaaatgcacaactgttccttgttgggatgaattaggataataaagttttacttgtttccctgtatttttttcctaagttagcttaaaaaaaaaaaaaagtttaagttcctgctagaatatgagctccct

SEQ ID NO: 39037 - DNA, 1031 bp, Homo sapiens
tcagcctccctagtagctgggattacaggcatgtgccagctaatttttgtatttttagtagagatggggtttcactgtgttggccaggctgttctcaaactcctgacctcaagtgatccgcccacatcggcctttcaaagtgctggaattacaggcacgagccaccgcacccagccctacttatctttatttagtaagcagataacaacattttttaatttgaatcagaaaaatacagtagttattcagtaaatattaaaatctcctttggtatacccttatatgtaaatctccagttccttttatattagtttggattaaagaagatgacttgtggagaataacaaaagatggaaaattaaagcatttaataggtattcagcattctccgtgctgcgaacatttaacaacataatgcagtttcaattaaaaaaggtgaacgaagaagaagctattcatatttggcaagttattagtttattattggatatgctttttcagaataacattttagtggtttacatatgctgttgtttgagatagatcttaagatagttttagaatctgacagactttagtttgatttcaacacttaccaaattatttgtatgatcttgagcagttcccctcaattctctgtacctcagtgtcctcatctataaaatagagatgatgacttatttcttggtggtttttagagaaattttaaataagtaatacacataaaatgtctagcatagtgcttagagtatagtaagtgctgggtatatatcactaccctttatttcctaaggtgattaggaaggcctgaattcacttggtaaccacagttgaaagattagcttatttttttttaagcaaaaaataatgagccagattgtcaaaagtagtaaattgccaactactatattgatgtaggcatatgtcttaagtttctgtgtatctattgtcatgagtagcagatactacacttaggaaggaatgattctggtgctgggtgcggtggctcatgcctgtaatcgcagcacttt

SEQ ID NO: 39038 - DNA, 1048 bp, Homo sapiens
tttcactagctgttaacattttctcttgaataagcaatttagtgtctaccctccttttcatagactctaatactatgaacctcttcagttaaaatgtctatatttttttccattgaaaaattgatattgattataaggcagaccatttagtagccttttttgtaaggaaatgctcactgttagaacctgtacaatagatatttttaattgataatactctatttaatcatgtaacttcacaaagcttataagcacactttctgcacagagtctaaatagtgctccaatcaattttggcttttattcatagcttctcagtgatatactactttttatagtttaccatatgatcctcaccttttatagcacctttaggaagttggcaatgtaatttcaagacatactctaagccagtagttcttatactcacatcagtatccagtctacactaaagggttttctaaacatactggatcccatgatccgaatttcagattcagcagttctgtagtaggattgagaatttaacatatccaaagttcctaagctagtgttcctggtattatgggccacactttaagaaacactactataagatatgaaagcttgtttgtgtgtcttcacaattttctctctaaatttaattaaatattaaagattagcttcccttgtcagtaggaagttttgacagataggtctcaacattaatctttatagaatcagacaataaacttttatctttttcttttttttctttggttgcaagcagagtttgtttgtttagaaatggagcatcacgatgttgcccaggctggtctccgactcctgggctgaagcaatcctcctacctaggcttcccaaagtgttgggattacaggcatgagccaccacgcctggcccatcacctttttctaactcgaaaatttcatgattattctgaaggaactgacggtttattttgcctctgttacctggtataagataaatgttgcctatcaaacaccagttttctcttttgcaccgtagtgtaatcttcaaagtacttgaa

SEQ ID NO: 39039 - DNA, 1059 bp, Homo sapiens
ttttttattaaaaagttatagtacccatattttttgtgagttctatcattagcataaagtaaaaattcaggaattcttatttattgcagaaaagggaagttgaaacgtatgaatatttgactttttttaagtaataaggattttttttttgacatataggaactgcacttgggcttagcaagtgttgacaagagattttgcggaacttgtttttaatgagtagtaaggacaatttgaagttattagagcaggtgttttatatcattgtattttatataacttaattgtcatgaataggtatacactccctttatcttttatttgtaccaaattgtttagtaagccttgttaaaggtaaatcaagtccagattccagattagtgaagccagaattttattttgattctttttctttatagtccaaaaatgagcacatctcaaataaatataagtgattagggtgaggggtggaatttatacgattattgtcatgtgtaagcctgaccagactgtctatatcttcaaagttacattgtggataacttagagcttaaaaaatttgtgaatttgtgaaataggaagttgattatacattcagtattcagataatttatattggaggttggcatactttctccataaaggggcagctagtaaatacttttggtttttcaggccatatgttctctgtcataactatgcagttctgcaattgtaatgtgaaagcagatacagacaatatgtaaaagaatgtgtggttgtgttgcaaaaaaacttcatttacagacaggcagcatgctgaatttggcatatggaccataagtttacctggatttatattacaagattttatataacatgctctgtgtttcagtaaatatattactgaatgttattctcatggaccatttaagttgaatggacccatatcatttgttcatgtagtgaatgtgctttgttgtttatttgcgactggacattgagtccttatttgtggatcatcatcttattcctgaaaccaagaccttgattatagttttcaaaaactataagcagtta

SEQ ID NO: 39040 - DNA, 1771 bp, Homo sapiens
aggtttgctattttccttatcagaaattcacagcacacattacttttttaagactttgacaaatactgccataaataaaattatttaatattgtttaatccaatgtttcttaaatgtgtatgatctcaaaccctgaaacaaaacaacatatcacatcccgtggatcatcatttaggaaaacactattaaaatgttaaagcaaactaaatatggtctgagaaggactccgtacttctatatttgagtccttgtggatgagctgcagcctgacttgataggtagacaagattgaaaacctaacttaggagtatgcgccagaaacaatagatgagttttggccaatcctagcagcagaagttcaaccactcttacactgcctcgtgttcaaactgtgttcaaataaggcaaatgctgagctgtaatcaatctagttgtttctgtacctcacttccaatttctgtacttcacttccctttttttggcctataaatctgccaccatgtggctgctctagagtctctgaatatgctgtgattctgggggctgcctgatttgtgaatcgtgccttgctcaattaaactcctttaaatttaattcagctgaagtttttctttcaacaaaaatattctttttttttttttcctggaatgtggtagctaggtggtctgtatttttactgagaataaaatgagacaaaatggaaaaactgaattaatctattacatgagatataaataagaggcctaagtatttatacattgaaattatttcccaaaggagaattagaatctcactgaaaatagaagagctagtcatctataaagtattaattttgaaggtttaggttaaaatattagaacaaactaatgtatcaaagtggcatcattctttaggtaaaagatatgtcagtggtaaaaacaacattaaattttctggaataattaggcttcaggatagcatcagtcgtgtgttactggaatacagaaatcaggatctaagggaagcacacgtggtaaacaaaaatcacgtttaataacaaaggagagtggttaacacatttccaattcaaaactagaagagtagaatctagtaaggatggctagtttaatagcagagccatcaaaggcagtgttaaagcggaaggatggtggcagaaatcattagcagtcgagtgcctgagtattgaatgttgcatctgttgaagtctttatcatgaattagcagtgactgtgctttggtagcatggttggattcactgtaacttttggattattgctgtatgtcttgccttttgtctttttgcatggaagtaattgtcaccaaaaattgtctctcttctatttttttgtcccaaatttacaacatatgtcttttcttaggagaaatttctggtgccagttgattgtttctttctagaaataacatattcatagacacatacacaaatgtggctaattcatcacaaaatatacccatgtaacctccacattacccccctgactctaaaataaaaataaaaacaaatgtagctgataaattgaatagccaaacttaaaaataaactttttttcttttaaatccatcactgtccctattaaacttgtgagccagcttctttctgcagaaattgaaaaagtcttgagtccagtttcatcatttctggttgtttcagatgataaaaagtcctccagtcattttattccccctaaaccagtcgcaattcaattattgttatctttctttcagaataataagtatggcatttaaaaat

SEQ ID NO: 39041 - DNA, 1008 bp, Homo sapiens
tctgtcggtctagattcttctgggcttctctaagcatggattctttccttctggatttgggggaggaccctctctgaaatggaggggttcttcagacctatggttgaatgagttagataatttctttatggccagtttttagacagaaagggagagggaagattagagtcatatttttaggtttcatggtgggctttgggaaaagagggattctgatttctgcgacctgccttggggaagagggattctagtttttatgacaagcctcaggggagaatgggactgccagacaggaaggcaggccaagatcaaagaaaaacttttgcttctgaggctgcttctgaagttttcactttgaggtattgcttactgagctccaacatgtctgagttaccaccatccctcagttgaaatactgcaattgcctcctaactcatctcttgaaccaacttttcctcttttccaatctattccgtttgctgtagccaaaacgaactttttaaaattcagttttgattgtcatactattacttaaaatccttcaatgacctcctgttactattaggatagaataaattcttaatatgtctaaatgttgtggcccctactaactgaccgacttcatcttgtgtctatctttcccttcttccctttgctgtggccacactgaccttccttcagttcctaaaatgtgctcgtctctcctgcatgaaatactcttttcctacctcaataccagttaactacatttcttcctttatatctcagttcatactatcaatgagccaggtcctgacacattcacataaaaccttgtaattttttttttatctaagacttaccacattttggaattatatatggatttgtgttaatagtttttataatgttttttctcatccattggagttctttaaaacaattataaaactgtttgggcaggcatataattggcactcaacagatatttttcaaatgaattaatacattcataagtgaataaaaatg

SEQ ID NO: 39042 - DNA, 1045 bp, Homo sapiens
tatcaagagtgctgaatttctgcatgttgaaagacttagtggttctgttttcttgagacatttaatctggtggtaactgtggtaacattgcagccctaagcagcatgtgtatattagataattgtgttgtgatgctactcactttgattgcaatgatgatgtccaaggtaagctattaaaaggcaggttacttccaaatcgcactgaaggaaaaggttaagaataatacatgatcacagaaatgcataccactgtctgtaaacccaacaaaattcactgttctcttttggatttatttagcctgatgtatttttaattcaatttttatggtgatgggcaaatcattcttggtaaatgtaaatcaaacatgattgatttaaaacttcatggaatttgtagaaaattatggacatttttggtgagaaagaacaatagtcaaaactcacatggatagagtgtgtttgttttttgccaaaaatgccccagactttttcccaaacctcaaaaacgtcttggaaaaattgtaaaagtttgataacagaaacatctttaggatatttttgtctgacatattttgcttctagtatgtgcctactgtgatttttttcatgtggaaaatgcaaaatttgtaacaaaatggttatatggaacatgcctattaaatgaattttactatcttccctaactttggtctgtgtatgtgtgtgtgttttactttaatatgaattatacaaaatactagttgttttacactctcttttcttattcttagggcttttgtgtatgtctgacttgtttttaaataacttcctcagcaatgcagaccttaatttttatatttttttaaagtagctaacatagcagtaggcacttaagcatttagtcaatgatattggtagaaatagtaaaatacatcctttaaatatatatctaagcatatattttaaaaggagcaaaaataaaaccaaagtgttagtaaattttgatttattagatattttagaaaaataatagaattctgaagttttaaaaatgtcagtaatta

SEQ ID NO: 39043 - DNA, 1024 bp, Homo sapiens
ttcttgatatagaggaagggaattcacattcctgggagaagtaatgacaaaaagaggagagaatgtcatctgcacaattacctggtaataactcactgacgttggctttatcctttccagatctcaatcagtagtggatcctacagtactaaaacgcatggataaaaatgaggaagaaaacatgcaaccattgctttctctggactaataacttctctacatccccttcatggattagaaatggaaagtattggttttcagcaacagggacaacactgtagaggaattaccagctggaaaccgacttattcatgttaatgtagcataatatataacaaggcatcaggctttccttggcctgaaccatgggggccctgggctggatttttaaaatgtcaataatttattctgtaagtgccaagttgtttgtaaatataatgtaatcttcatgtcaagtttgtaaatttcagtagtaactcagtttggaaaaaggttggctcaaaagtccatgccagtgttatgaactataacaaaaagcagaaaagacacagtcaaagctaattaaatgtagccctctttcctatgaagccatatttcagctctcatagtgattgtttcattgtttttctctgaaactctgtcagtattcaaacatactcttaacgggcacacacaactaagtgattccaggaaattttatgattaatgtatttcctgtctagtgattttcatttcagagaaatgtgtcttagtaactatcattggccttgcattttggaggcaaggaatggcagatgagctggtaaactgaacacttgaactcttctatgttgtttaattcttggaatcttgtgaaaagatgtgtttcctcaattaagacgtagaaatgtaaaaaagagtggattctttttaaattgctgtcttcacaatgtgccctttattcaagaccctattatatttcttcctaatgtactctaagtacatttcccctccaaaactctttgactaagagaatgagaactca

SEQ ID NO: 39044 - DNA, 1029 bp, Homo sapiens
cacacacacacacacacacacacacacacagaggaatcataaccaggaacttctgtttgaaataatattaagctattaacattttttaggtgatcccaaacccaagaaggttctgcaagaattttaatatttgatatcctaattcaccagaaggcccagttattgccaaagaagcataataaaacagcagagatttatctttttaaattatcctgctgtataattttgcttgatccaatttgatttccttcggtaacactttttggtggactctaatttgcatgcctggagaaaggggagtaaattacaagacttcttgaaggtccttttaacttgatggttttatgattaaatcttgcatcttaaattgcctttctctggaagaaccaggcatttccggcttcatttttgtgtagaggaaattcatatatcacctcatgtgtttttctgtaagaaagaaccagacaaaatagcagtaatagaggcaaaacaaacaaacaaaacgttataaacttagaactagatgtagatgaggcttatcttatttgcaattctgcaaggatgtacttgggtccactgaaagtgcaggtgagtggaaaggtgtgtgtttgtctgtgtgtgtgttaagtgggtgtaggatgtgtaggatgtgagcaaagggggaatgaaaatgataccgttcataggtgttaacttcgtcaggtgttctggctatatgtgagaagaggaaagtgggttaactcagaatacattctttatttcttagtatattgttcttctggatgtggtaggttttcaacaggtctcgttaatagataatctgcagtgctcagggtgaaaagcaggagtcttccatctgtatgcctcgggaatagtatcaatgcagaatgaaatacagacagagattggagaaagactactgtattcacttgaagccaatggaagtttaggtgggcccgattgcaattatcccccattggaaattagccaggacacacattagtgcatgctactttctgtctagcctaa

SEQ ID NO: 39045 - DNA, 1118 bp, Homo sapiens
ttttttttttttgagacggagttttgctctgtcgcccaggctggagtgcagtggcatgatcttggctcactgcaagctccgcctcccgggttcatgccattctcctgcctcagcctcccaagtagctgggactacaggtgcctgctaccacgtcctgctaatttttgtatttttagtagagacggggtttcaccgtgttagccaggatggtcttgatctcctgacctcgtgatccgcccgcctcggccttgcaaagtgctgggattacaggcgtgagccaccatgcctggcctatagttgttgagcctgtattgacacattgtaatccctgaatccgttttcattagggttccctattgatgttatatattctgtggatttggacaaatgcatagtggccagtatccatcattatagtatcatgcagagtactttcactgccatgacaaacctctgtgctccatccattcatctctgcgccccagccaacccttgcaaccactgatctttttactgtctctgtaggttttccttttccagatatcatatagttggaatcatacaatatgtagccattttggattggcttctttcacttaataatacgcatttaaagttccttcatgtcttttcatggcctgatagctcatttctttttagctgaataatatttcattgtctgattatcacagtttatttatccattcacccaatgaaggacatctcagttgctctcatggtttggtaattatgaataagacagctatgaacatccatgagcaggtttttatgtgggtataagtttttgacacctttgagtaaatgccaagaagcgcaatttttgtattctatggtaagaatacatttaattttgtaagaaaccgctaaactgtcttccaaagtggctgtaccgtttcgcatttctacaaacaatgaatgagagttcttactgcttcacatcctcaccagcatttggtattgttagtgttgcagattttggacattctgacaggcatgtagaagtatctcattcttgttttaatatgcatttccaggtgatatatgatgtggagcattttcttgtatgcttatttgacatctgtatattttctttgttg

SEQ ID NO: 39046 - DNA, 1050 bp, Homo sapiens
tgtatttttagtagagacggggtttcaccatgttggccaggctggtcttgaactcctgacctcaggtgagccacctgcctcagcctcccaacgtgctgggattacaggtatgagccaccacacctggctgttccaggagtttttttgtcaattcttctatattttctacatagacaatcatgtcaccagtgaaaaagactattttattcttccttcccaatctgtgtattttaattcattttctttatcttattgaattagctagtacttctagtatgatgttgaaaagtggtatcaaagagggagcatcataaccttgtttttatcttaatagaaaagctttgactttctcgccattaagtatactagctgtaggattttttgtagatatgatttagtaagttgaggttccccactatacctagtttactgagagattttatgatgaatgggcattggattttgtcagatgctttttttttgcgtgtactgatatgatcatttgatttttatttattagcttgttgatgtaatggactacatgagttggtatttgcatgttgaaccagccttacatacatgtgataaatcccacttggttgtggtgtataattctttttatacgttgttggatttgatttgctactgctctgttgaggatttctatatctatgttcatgagagatcttagtcttttgttttcttgtattgtctgtatctggtttgggtattagcacagttctagccttttagaaggaatgagaagtattctctgcttctatcctcattttagctggataaatgaaaaaataatgtgtttacttaaatttagtaaccatttcaccgacatctccttgtatccagtttcattcaatcagttgccattactattgaattatatcacaaaaatagaggagcatttgaaattccacccacccatgtttgttaatcagactgatcagtttattcatgtttaggttctcagcctaagtttttctgtgtgcgttcttgtttttggtacgtggctatcaaagtattctgtacatagtt

SEQ ID NO: 39047 - DNA, 1023 bp, Homo sapiens
agtaaactggcctaacatctataatcagtgttacaatcgtgagatgtcagagtatagtatatgtgttttcaaggcatagtaattaaatatggagacataaggctgaaaggagtgacttgctttataacactatatattacagtccctttgaaaagtaagcagaccactgcccttatcactgcagggacaaattcagttgtgatggtaatttacacctcataactttcttttatgacatccatccatcatcaacaggaagtctgtacacagtctaaggaagtttcccagatatgacattctgggtagggctcccagtctcctgaagagagtaatgcaaccaatggtcacgggaaccacttcaccttaacagctgctgagtcggccctacataaccctcaacgtccaggatgctatggatttttaaaacatttcaatcattttcatcagcaaaaggaaaaccaacaaagctaacagtagcaatagtcaagggatcctccatcatcattaagactgtggcttaagttttcttggatcagttattgtataaccttgtcagtcaagcaactataggatgacttacaggatgacaggtgtaggatggttttcaaaagtcgcattgagagctccattttatgcactactaaactgttggatactgttagtagataatgggaagattccatagtagatgaagtggaaaggttaattagcccattgtgattttaggagtatctgtctaccaacatcagtagacatctgatttttctttgttgtttccctagctccaaggtggtaaaataatgctaacaagacaatttattcaaattacttggagacattatacacaaaaataaatttgtggcacgtattagtctgcttgggctgccaaaacaaaataccacacactgggtggcttaaacagcagatatgtatttctcacaactgtggcagctgagaaatccaagatcaaagtgccagataattcagttcctggtgagggctctcttcctggcttgtagatgg

SEQ ID NO: 39048 - DNA, 1049 bp, Homo sapiens
ggtcttttatacataatttagaatgttctgtatatacttcatccgctctataaaaccttcacagaggtttcatctagctttaaatcctattctctgaatgccagtaacaatgttatttttcatgcagtgggttgcatcatattcacatttaacttaagttgctaattttagaatctaactctgaatgaggagtgaaatgcaacttgatccattgtgttcaatgttcaagaacagaagcatgatggctattaagtagggccacttgaggtggggggaggggggagggatagcattaggagatatacctaatgctaaatgacgagttaatgggtgcagcacaccagcatggcacatgtatgcatatgtaacaaacctgcccatgtaccctaaaacttaaagtataataataataaaataaattttaaaaaaaaggaaatggactatgggatcacaaatctcttagtggcaatataacgaaatgtaatattttagcaaaataaatacacattgtttggtctttggacttgcatcattcttttaggtcattctaaaagtttgtttatatacatgtatacacgtgtatatatacgtgtatatacgtgtatacacgtatatatgtgtatatatacaagtatataagtgtatatacatatatacgcatatacgtgtatatacgtatatatacgtatatgtgtatatatatacatatatatgtatatatgtgtgtgtctatatatacacatatatgtatatatatgtgtatatatatatatatacacatatatgtatatatatgtgtatatatatatatatagttttcaagatgatgctcttcagacttgttcaaagcaaccagaaataagcaatttattcctgtttctctgagattgcttttagaaatgatatataagtactagaattttttttatagtttgatactgataattgtgggctgttcttttttagataatttgaacgtaagtgctaaaattgtgtttggttttggttactttatatgttttaacttttattaattgcttattatttct

SEQ ID NO: 39049 - DNA, 1023 bp, Homo sapiens
gtttgttacccttttttctaaccacttgtttagaaggaggcttgggagagtccatttccaacttactttctctgagacaaactgactttcggatagcatgactggacctcatatagtaactacaagtacaagaaaaaatgtctaatatgcttcgattgcaaatatgtataattattttagtatacagaaatgcaagaaaatacagaaattgagcatccccttcaagagatgctaaggaatcctaaaatgggagaaggctataaaatgcttgttcataaattagtatttgagttttccaacataaaaccaataatctggccataaatagttgaatgcttaaattgtgctctaacatcattgcccataagctaataaaccttaactgtaaattagagcacattttatggatatgacaaatttatccagaagaatacctttttcctcagcctgcttaagcaagccttcaatgtctctttaattaaacttctaaaataaaagtattatcctcatctgatcctggaattcaggaccctgcattagtttcccccgaaatcattcccagctaatctcctgtagtttccaactgcttgctttcttcagataaacttatttcccagccactccacttgcttgctatgagtttctgtgcaagttctattatgtccctttattttatctatgacttggtctaaataaaagtgatgggcacacaaaagtgcttagtaacttctagccattgtttttatcatcattcccaactatgtgattaattcactctacttctgctcaaaatgtctcacatccctcttgccaccgttcaaaccctgccgtgtttcaaagtaatattaaaacatttttcttttacattgtttgtgtgcaagaaattaaagacactgtcactgtaccttagtactgcttatgagttgggaataaatgtgtggagttccccggtgatggcagaaagggcaggtcaagtgtcccaagaacctcaccaggcaggagtatttgataataatattcaag

SEQ ID NO: 39050 - DNA, 1026 bp, Homo sapiens
gcacactgcaacctctgcctcccgggttcaagctcttctcctgcctcagcctcccaagtagctgggattacaggcacccaccaccatgtccggctaatttttgtatttttagtacagaccaagtttccccatgttggccaggctggtctggaactcctgacctcaagtgatctgcctgtctcagcctctcaaactgctgtgattacaggcatgagccactgcgcccagcatgtatggcactttaaaactgccactcttggcatatggaatacatgcacacacttttgtattctatattcattcatatatgcaaaagataaaagtggaaagaggaacaatctgtttattgtatatcacacaggcaggctctctgtgagattaacattttagctgcctaatgaagttgcaggtgactggtctctctgtaagtcccagcattggctatcagcaaaaattagaaaggaaaacatatttcttgaatctagtgctcatagttttggttagaaatagtctactctgaaagaatttacaactgaggagatgagaagagaatgaggattcagcagcaacagcaataaagtttcccaggagaatgagtattaaaaaagttgaggcaggatgtccactgtctgagctggaaatagtcttgcaattaaggagggtgaaaagaagcttggcttgagagaaacggaagagggagttgaggtgattgacgttccccaaggaccctcttcatttgtgtttgtttcaaggctttttctggtgacatagataattactggattgaaggtctctattttgctaggctgtttatgaggagattactaaacaaaagataagagaaagtcaagagctgatgaaggaaagtaatctagcctgtcttgctctctgctttagatggaacacgtgagggtgaaaaacagatcattgattccagttgatgtttataatatagaaatagcagagttatcctcctttacagaaatttcttaaatccattagtaccttacttaggtggacttgttc

SEQ ID NO: 39051 - DNA, 1049 bp, Homo sapiens
cctggccaaagcatggggccacagggtgactggagcaccagagacaaagacaggattcattttgtaaaaagattacgacacagcaacttgagaaatctatagacaccttagtggttctgtataagtaaagaatcgcatactcaatttgcatgggggaaaaatcctctaaatttctagaatttactatttgctgataattgccgtgatttgatttttaattgtccatggagctcaggtctccatagagactatcaccaacaacaataaatcaggagcactgtctccattttccaggtcatatgtttttctaaaactaataaatgttacctccctaaaaatttttgcactcctacaagtcatttctaagaagtcattaatctatgttcaagtagttgttttgccacctttattcaatttttctaggagaaaaaaatatctgaaaggaaacttattgcagctaaagcattaacaaatgcatgctttctgtgttgaggacagaaaatcaatgtagattagagatgaagagacttgagatactagtaaattaacaatacttctaatgactttagagtagttgtgaaaataagtcttttcccataagcctggaagggagggagaaaacaaaaaaaaacatcattacaagtttaatggatttagcctgtagtcctaaaataaatgtaataatgcaacattgcaaatgcaatttattctcaaaagaatgtgttcccttggggaaatgtggaccatttattctacaagaagatactttgtgccctcattttggtgttagactatgactaaagatttataggatgtggtacatataaataattacatttgacagtctagattcacttttttaaatcatctaataatttttgaaaatgaattttgaagaaaagatatattgtgatatgtttaagtattagtttctttttctaaaataaaaaaatcagattatgtagtttttttaatcaaaaagtaaaattgggcttataataaaataaaacttcctttccatactcttctccagctgttcctcatctctt

SEQ ID NO: 39052 - DNA, 1040 bp, Homo sapiens
atctcatagcccaggtccgttaaaatgtcaatgtcaaccaaagaaaatgtaagaatagcaaaatcctgaaatcttgattatataccccatcctttctccttttcctttcaccatcatagcaatctctgctagttggcgaatcttctaaatcaagatttcaaggcagagtttatagggttttgttccacaggtacagttctctaaatttatgatgaaatataatgggaaaaagtggctttacctaaattgttttagttcagattgcataaaatttcgattacacatggttattactcagccctctttatgtgtatatgctcataggatgcacatatatttagacttttgctctattgacttcataattgaaagaaaagaaaaaatataatggctctattaattatttacatattacatttaattctaccagatgctgaaaagagcaaaagaaacactgatcgatgaaacttatatatgggccaagttgctgttgcagagtggagcttgcaacttgaggcagagtacagttgtgttgtagaaaacaaatacactaacattttgaaccaaactcaaaatgtgcctagaaaattctataacataggatcaggtagtttaagtaaagttcctgtgaaaggtggcatatgttttcttggatagtttagtttttatcttttaagtatattaaagctcaagataaagctttgtctaccttacaacattgctctaatctacttatatcaattctgccctttggggacacccacacactgtgtaactccagagacccatattcccagagaacaccatgtgaatggtgcccctggaattgctcgttgcagtagccctgctgctgatctgggtgctctgaataacttgattgaatcttttccatgattttagtaatttatcagagtgactgttgcttacaaagtattcccttaggtgatttctttctttcctttttctttttgatggagcagtgtgcagttatggtgttacaaagttataacattgtggcaataaattttagagcaaacgat

SEQ ID NO: 39053 - DNA, 1028 bp, Homo sapiens
ccccgctgcccgcgggcgccgggtgggggtcccggcggctggatgggcagcggcggcgcgggccgcgggcggcgatgggcgaggagcagagcacggtgagcggcggcggcgggccccaggagtcgcagaccctggccagtggcactgcgggccaccctgagcccccgaggcctcagggggacagcgcccgggcgcccccgctgcgcgccgcctccgcggagccgagcggcggtggctgcggaagcgactggggctgcgcggacaccagcgccccagagcccgcgaggagcctggggcccccgggctggagtaagagccgagcaccggcgcagcctgcgggactggcactcaccgggcctctcaatccccagaccttgccactgcagttggagctggaggaggaagaggaggaagctggggatcgaaaagagggaggggatgaacagcaggaggcgccccccggcgaagagctggagcccaggacccgcgtgggggccgccgacggactggtcctggacgtgctgggtcagcggcgcccgtccctcgccaagagacaagtcttctgctccgtgtactgcgtggagagcgacctgcccgaggcccccgcctcggagcagctctcgccgcccgcgtcgccacctggggctccgccagtgttgaaccctcccagcacccgctcttccttccccagcccccgactgtccctcccaacggattccctctcccccgacggcggcagcatcgagctggagttctacctggcgcccgagccgttctccatgcccagcctgttgggagctccaccctactctggcctgggcggtgtaggggatccctatgtgcccctcatggtgctgatgtgccgggtgtgcctggaagacaagcccatcaagcccctgccttgctgcaagaaggccgtgtgcgaggagtgcctcaaagtctacctgagcgcccaggtaacttcacccccttctcttccccatttatcattccaaatcactggcgaggaggtcctgctctcgatctga

SEQ ID NO: 39054 - DNA, 1034 bp, Homo sapiens
tacataaatctggaacattcatttcagaagtacatttcccagtgacctgtgtatgcgtgtgtgaatatggctaaagtacgtagtcccagggatgtctgcaatatcctgcacatcccttaaccctcctaagtattggccttctcagctgacttggcctttaccacattttcctaggaggaaatattatctgttgccttctttgtttcacagaatggtactatgttcatttcagaaatcttccaccaatatttttcttttatgatttggtttagacagaaaaatctgtcataaatatgaaatattaatatttagtactttagatgaagaaaggaagagacatgaggatgccaaaggggcttgctgaaggtgacagctgttgtggattccaccactctgcctaaaagtgctagagattggcagatgcatataacttggaatgtatacacctgtccaatgagtattaatagatacaagcaacacatttcttctacagattgtgaacaaaacagctgctagatgataaagtcctaaaatgactgtctactgtagtcaccctagagtcagtgacccagaggtgaaagcttatatatcctattattaaattatgagtcatccaaatcttcatgggtaaaagtgtaacataacataaatttttttttttctttgagagaatctccctcttgtcgcccaggctggagtgcaatggcttcatcttggctcactgcaacctttgcctcccgggttcaagcgattctcctgcttcagcctcctgagtagctgggattacaggtgcatgccatcaagccaagctaattttttgtatttttagtagagacggggtttcaccatgttggccaggctggtctcgaactcctgacctcagatggtccacccgcctcgcactcccaaagtgctgggggattacaggcatgagccaccgtgcctggccccataaattcatttcttttaaaccttaaagcaccctgcatatttttggaaaccattgtgttcagtgttgagtttgaatgcagttg

SEQ ID NO: 39055 - DNA, 1092 bp, Homo sapiens
gaggactaggtttagggagaatgagaaatttgatgtgccttttagacattcatgaagggatgttgagtaggcagttggcgtctggcattcagaagagagatctgagcagaagatataaatttgaacgtggatggcatatagatggtatttaaagctattagactggatgaagtcacctgtggagggagtgtcagtagctagagaagaaggattggagactgagtccgagcataccaatgttcacaaatatggagtctgggacatcagaaagaagaagcaaagagtctaaaagggagtgggctaattcggcaagaagagtactgagagtacttacccagaagccaaagacagtgttttaaaagggataatcacatgtgtctaatgcttctgatagttccagcaggatgaggtttgaaattgaccatcagatttcccaacaaggagtttattggtaactgtgagcagtgctgttttcattggcagccatgggatggttttcaggttagagtgggttcaaaagaacaggaacaattctgtttttgtactgcaggtagtagaatgttatatgagggaactcgaggttagagagattaaataacttgcccaaaatctcaaagcaagggaatggcaaaggtggaagtgaaattcagatgtttggctctaaaacctatggcttttgtacattctttaaattgattatttcatttataaggtaaacttatatttttctttttcttttaagttgatacatatattgtacaaaaagcacaagtcttccaatccaagaaggagaagacacttaattacatgttttgaggaagcgaaaggctgccactcaaacttaggtctagagattacagccaaactcagcctcatctacttgtaaggaaatcaagaggaatttggcttaggaaagctatgatttgatttgatttactgttaagtttttttttgtttgtttgtttgttttgagacggagtctcactctgtcaccaggctggagtgcagtggcatgatctcggctcacggaaacctccacatcccaggttcaagcgattctcctgcctcagccttccgagtagttgggactac

SEQ ID NO: 39056 - DNA, 1107 bp, Homo sapiens
taagcatccttcctatattctttgataaccctctttacttaaggttatcaaactatataggaatcttctatacaattattcttgtttcactgtatttaaattgtctgtttcctgctctgtgcttccattagactacaaagcttgatgcatgtaaagacattattaatctgttttttactaatttcctaacactttgtgtgttatatatactctataagtagagtggatgtttaagtttattccacaaataattaatacagtaggagctaatatcgtcaatatgtaaactatttgaatagataggcaaagtgatatttttaaatgaaaatttcagtatttcattttcttgtttaaaaacctgtaagacctcctcattgcttcacatagagatcccagctcataacactgtggataagatttggcctctgcatcctcttcagtcccttcttctatcactccagctctcctccttcaagccatagagtgttcttctcatggttaatttcgcttcactgactcagtcttccttatatcaccacctgagttagtcctgctgttaaggttcttagagtccttttcactctgccaccactgtatttacctctttttattaattatatggtatgtgataatttgatgtttattaccttggttctcccccattattctttgagctactttcataactagcacctggcacaaagcccagaagagaataggtgctcaataaatatttgttaaagcctgaatgaatgattgaaaataaattataatatgtttgctataaaaagtaaggtaactatttgaatcggaacttttgacatcttattccacaattcatttatttagattggtgcaaaagtaatggcagaaaccccaatgacttgcatcaatccagtgaactactgtggcctgagtctttatgctagcatcccatctatcactgaggtgtgtcttctttaattacaatacctgttctggttactgtctcctgtttaacagattcttccagaacctaggaacataaaaaaaaagaacgattttattttgatgatgacattgtgggtcaggaatttgggaaggcctcagccagtcagttcactttcg

SEQ ID NO: 39057 - DNA, 1078 bp, Homo sapiens
actccatcctggcaacagagcgagactctgtctcaaaaaaaaaaaaaaaaaaaaagatcttgaggcccacaaggaatttccttgtgggcaaattgtgagggaggtatgtagctatgtagcttttttatttttgtagctatcttatttaggaataaaagggaaagaaggtttgcctgatgtactttccaacttgacttttcccttggcttagtgatttttggggtcctgagatttattttcctttcacactcatattcatctttctgtcaagaatcaactcacttcaaagtaaattcaatgtttgcaagaagtttctctgtaaatgtgatgggatttaatttttgaatcatgacagtttagcatttttcctcaaaagtaccaactttactgaaaaatagaagatatttcatagggtaatacaagatactttttcaatatttatctcactttccagatacttggatattttctatagcaaaaatgtggtcattggtacctcacgtatgggaaaattctgtagtctaatccccacccccagcctccaaaaaaaaaaggattcctgcattgaattttgtttcagtaacacattttacataataacttataatcattgccgttttatagatcatttattaataatatatttacatatgagtctatgctagatcttgcctgaaaacaaagtattaataaacaattgctttatgtgcctaccctctaaaggcatttggtttctagatgatatgcaaacactggtttctcaagtcatctttggtatataattgatacatttataaagtaaaatatgtcaaaagttgatgactttatggtatgtgaaagtaatttactcacttcctggtgagaagaataggaatggggttgcattattcacctgtgttacctttgatgagtacattgaagagctgtgaagggaattcattcatctttccttggctagcaggtttgctgctggttcatgaaagggaaagaaaagggaagaagcacatataggtgtcacagtaaaaggatcacttcatagagtaatttgttttaaggaaaagctttctatatatttctt

SEQ ID NO: 39058 - DNA, 1032 bp, Homo sapiens
gaaaattgaaaatataatagtattagtaataataaagtatcttgaaatttgtaatatagatttactaatgtaaataatagaattatttcttttgagataatgttttgcttgcctggggttgaacattaatgtttcctgtcatcagtgttaattgtaaatattcatctgtcgtactgatctgtgttgaaatgttacatatttcatatttaaaacatcttttcacacatacaggttttgccgaatatagatattagtctactagcatgtatgcacattcataatttggacgttttttatacgattctttagattcatctcttgatatttgccttttagaatttcattacagtgcagaatacttccaattgaaaattaggtggaagctcctcagttgcacagtcaaatggattttttaaaaattccttattgaaatatgtttcacatatcgtatagttcacatatttaaagtgtataattattattttgtatattcacaggatatgagaccagtatcactacctaattttgaaactttttttattccccctaagagaaatcccatacccattattcatcattccctgccctcaccccaggcctcctatccccatcctaagaaaccatgaatctagtttctgtttctatagaattgcttttcctggacattttatataaacagaatcatgcaatatgtggtcttttgtaactgacaaatggattttgaaataaggaaatttcaaggtccaaaaaatgctgttggaatgttgaaatcataaattgagctcagaaaatgtgtctactgcaaattagtgtgaaaacggagatcttgcttcttgtttttttaaatgattatttgcttatttttagagacagagtctggctatgttgtccaggctggctttgaactgctaggctcaagtgatcctcctgcctcaacccgtggaatagctgggactataccttgcctggctcttattttaatttttgacaggatgagaaggtgatatagaagctcaacacttgaatcttgtg

SEQ ID NO: 39059 - DNA, 1046 bp, Homo sapiens
tgctgacctgcagcatcacactttgagtagcaaggctgtagaatgctctaaaatattaaggaataactccttttaacattttaagtaggacatgtattcatttttaccgcaaaggtatgttttgtaattagaataatgtttcctaataaaactaggtgaaaccttaaatactggttttgtacaaagctacatatattaaaacatgttttctattcccaaatgaaaacttgataaataatagtcaagcaggagaaaataagaaactaagaggctatagaacattgattttaagaatgtacttgacataggctggtttgtggtttatatttctaatgctgtgtagatgtaatggctgttctgctaacatctatagcaagatactggattcggttagcttgttctagtgtattatataataaaagtttagaatagtgagaagaggggaggtttttcttgttgaaattgacttgttccattttgtttcagaatgtggatttgatcttggaaagtatggtactatcttttgaatgataaaagtacattgaatttttctgttccaaattttgtaaagaataattctttagcagaacattctttgttgtaatgattttttttgtcaaattctaattgtaaagtaattggattactttaataaattactagttagtaaatgtaataaatttactttaaataaatttaataaatttatccttagttgcttatgcagatgaccactcatcttttacctaaaacgatttatgtctttgatgatgttacatttagatatcagaaaaagacattgccatgaagctgtctaaattttccaatgtaatagaatatttgttcattttatagactgagaaacaactgtcagtgctcttgcctatagtagtattattggcaaatttatagagcataatcaaataaaacattttgtaataattgagttcaaatagtaaaatatacttgatatatgaactttcttttggtctctactgctggccagttatgcctaaagttgacttactatcagaaacgcatgaggc

SEQ ID NO: 39060 - DNA, 1064 bp, Homo sapiens
gcctgggtgacagggtaagactctgtctcaaaaaaaaaaaaaaaaaaaaatgaaagtgggcagtcagggggacatgggaagtgatgagtttgtttttagactgttgagtttgaggtatttgactgaagacatcaagtagggaattaaacgtagatatcagaagcttagtatagagatctggactggtgttttaacatgtgggagcttgcactgtatatatatgtggagttgaaaccatgggagtggaagagtaactaaccctcagaaagattaaccaatgagaacaatccattataaatgcaacctcagagactcaggaagccttaaaggatagatgcagggaaaatccacaaaggaggatacaggggacagaaagaagtcaggaaaatcaggaatgtgatgtgctagaggtcaagaaagaaacagaactcaacagtgtcagatgttgcaaaggaggcagtaaagtaaggattcaaatggacatttagtaaccagaaggtgattgataattttgtagagaatgactgaaagtcatttcaaggaggaggtgagacagatagcagtgggttttttaatgtggacgtgaacacaagaacattaaataatctttcatttggcttggctgcaaatggacagatgataaggactggagaccaaggcacacaatcctaacgagttttttgttttcttttgcttttatagtgggagaaacttgagcatgcttatcagtttgagtgtctgaagttagcagagggaggtgagattcctgacaaggcaggtggaaataatcatcctagaaattttgcaaagtcctgctttctaccgaggagggagggaggaagggatatttccaaaggaaggaaggaaggaaggaagaaaagaaggaagggagggagggagggagggatatttccaaatgtactcccttatgagtggggaacagaaagttgaaggtgttctaaggaagggagggagtgaggaaagaagggagggatatttccaaatgtactcccttatgagtggggaacagaaagttgaaggtgttctagggagggaggaaggga

SEQ ID NO: 39061 - DNA, 1033 bp, Homo sapiens
aaaagtattgtatgaaataacgtgttgcatttttagcaattggaagaaatttttgaaatagtttagatgacctggctttctaatagaagtgatgtctaaagatatttggcctaaagttttctttgttttccttgtagaaggcaaattcatccacagtcacccattttgttttagagctatttcagatcactgcatcggttgctcagtatacttatttttcattccattaaagaacaactagaaaatgaggccttcccccctttctcttgcctttttagtttattcaaagctactgctcagtttcaaacaaaacaaagaccagtaggaacttagagtgctgttaagttattctacttaacagttattcataagtgcattttatatcctttggaaagctgtaaaaacaattccaagttagcctggttctacaactggatttggaatgagcaccactgcagcattatacgttggggaaattctgaataaactgatgtaacacaaaatacatacatttgttactgtaatctcttaacccaaccttaaatggactataatgtaaaggaagaaaaagaagccgaccatggggaatttactgaatgttctaacaactttccacagttgtaacaaatgtagataaactgttaagagaaagcataaatgctggttcccctttgaagtaatagctaaaaggtcagggctttaaaagggattaccttttaaatagctgaaaggaaaagaaccatggaatcagtggacattattacattgtagcagagagcctactttctggtgggatttgggttctgtgaagtttctgtctgtttaagtcatattttatgatgtgtttggagtataaatggtttcatttttctttctcttttaagcatgactttaaaactttaccttttttcttggaccctaaaattatgttttgccccatggaacatttctattattacaacagaaacctatgaggagatattactgagtgaattaatatttgttttatactgtaaggctttcttttcataaa

SEQ ID NO: 39062 - DNA, 1114 bp, Homo sapiens
ttttatcttaacaatgagttttctatttaatgtaaattcttaacctatggaaaatatgtgctaattttgaaatgtcttctttagttatcttagttatcacaaaaataaatctagtttgtagacttagtcattacaaaaccaagtctagttcgtaatagttttaatattaaatttaaagcaagtaggcaatctaaattttgttggaggtatcagaatatttgttcaatgtcatgcaaaaattcattttagactgttttataccacagattagatactaaagtctgagttaagaagaaaagtttctaagtcaaaaattaaaagtgagatgcatgctaaaaataacaaacacaggattatacgttataaaagcaaataaacagttaatgagcactgtcacacatacactaaattgtaatttattttattctaaggtcaacatattcattatttctagatgacaggaagttacttttatgtttttaaaagaaagatcaaatgtgcatagtcatttctggattctgatacgccatctctatacaaagtacctttgtccggtgctctttgtttgtggtgttatcacagtaataataacactaacatgtactgacatttattgcatgtcagtctcctctgtagttactataaatatattgtctcatccaaacttcagatgtgatactaagattctgattttcagtgtaccactcagatcatcactattaagtgatttgataaaactttaaggttttgcacaataattataacataacaggattggtagtatgtaagtttcatttgttgtctcaattctcaaaagaaagttgtaaacaagaggtaattaccaccatttcaagatgcagaaccagtttcagagagtttaagtaatgaccaaaaaagcaagcagaaaaaaagtgaattgtatttattcataatttattataaatttggaattagagggatttacttgtcatgatatttccctttagatattttattctcttcaatcctataatagaatgctttgggcaagaatgtattgattcaaagaaaatgaataatcttcccctgttcacataaggtcaacacaaaagctatttttttggtcttttatatc

SEQ ID NO: 39063 - DNA, 1036 bp, Homo sapiens
gcagtccaggaacttgcagttaaattacccgggtatttgatttctggcatttttaggtgggtaaaggggaataagtagatgggaaacaactttatattgacctgactccatatgtgccaaaacgagtttggcactgtgcataggttatcacattttacactggttggtagggaatattatctaacttgacacttgggagaggtaaagtaacttctttttaaacagctagtggagctagaattcaaacacagggctttgtgaagtcaaagctcatgttctttccaacctctctgtaaggcagaagcttacctgccaagtgtcagtcacccactggaaaggaatggacatttcacctcccagttcacctaacgattttgaatacataaagtcctgccagccaattgacaaacttttctttcttggtcccttcatttccccatgtatgaagtgcccgcctgtaatatgctgtgttccacttaattattacttcttcaaaatgatcacagtcaccaagaaactctccagttaggtaggtcggtagacagaagataggtagatagatagatagatagatagatagatagatagatagatagatagatagatagggatgggaggaagggggagagagaggtgttatcttttaagtgacatttttgtgattactatgattaatggccgttattagttcacaagcagcctcatgagttcttttgaaattcatattgttccattaaattgcagttttatattttagttatttaatccctaaaactgaaatactgcacataatttggagttaggaacttcaaaaactttttattcctaaaagctatacaacaaggttttattttaaagtaaagaaaaattttcatctctcaaccttttcatttctcctttcacagaactcttctctttttcctggatgattttatcccacctccataatcattgaccagtttttttaatgcagttataactacactacttcagacattcaaataaatacactgtattaggggaaggaaaggataat

SEQ ID NO: 39064 - DNA, 1024 bp, Homo sapiens
ttgtggttcttggaagaagatattttaagaaccagttatcctaagaattctgagcacgcctcttctgagaattgcttggactgtctttgaactctgcacctccttccaggccatcttgtgagacttggtgttaatagctgaagtcctatctgtaccaacaagcaaggccacttttcagaagataagagttcactgaatgcacctattataatctgtggccccagcagtataattcttttatctttcaaatgttataattgcaaaaaatctcaatgtccaaaagggaatgagtgaaactaaattaatgagaagaatattaagttactgaagtgtatatgcgtaggggcgtgaatgtgtgtgtatataaatatgtattaaaactaggcccagtaaccttgtacttacccagttccatgccgctacactatttttccacattttcatagacctattgaaagatgatggctcctttgtggacataatttagcaatgtattaaattaaagtcaatgtagacaacaggccatttcgatactgaacttttctatttcttgctctttctttttgtcacacaaacacagaaatttgtgcaacgtcaccccaaggagtattaagctttgtaaactgacaaaactggctgcttttaggaaattctcaagacacaaatattcagtctttttaaaattcttacattttggaaaacatgcttcactctatagatagatccttcacattgggattatttaatcccaaaaacaagtttgctgtagacaactgcttaagcctttaaaaaattcctattctgctaattttttaaccaacttgtaattatagataattctgctttaggtcaaggtcttacatcatttaatatcctaaccttgttatctcttgcctcctcctctctgtttttatttgttttcaaggtttttcataaaaacaaatactagttttgaaggattttttcttacatttaactgctcaaacataatatttttggggacaccttcttatggaggagtttg

SEQ ID NO: 39065 - DNA, 1080 bp, Homo sapiens
tcttgatttttgcctctgcagtcttcttcccatcttggccaagtgtgggataaattctgtctcgcccgtaactcctttcactgtaatgaaatgaattcaacactgaacgcactccagaatttagctctggtagtgagcataatttaccttggcttattttatttgtaaatggaaatgtatcaggagtgcctggaacacttttccctcttgataggagttggagaacactgcctagccctctgccaagaagtaagtcaagcaaatgaagataccagttggatcagagggcctaataatagtctaaaaccaagcttcagaaattgcttcgtgactgttgtaagatcaatattgtgtttgcgtattagttggacagaaagcatgtgtggacattcatccaacctgaccccaggtcattcattctccatccaaaaagggttataggtatggtttatggtctttgtttcagcaaaacgtcctacagcttggacttggggtggatttatatagtgtagcatttgtatataagattcaattatggattcatgctctgtgaacattgttagatttttaataatctaaagtaggtcacattgaatgtaactgatattaaccctattctagagaaaacatttgtcatttgcaagtgtttgacttttttattgatatgatttagatatgccacactcaatatatttagtatagattcagtacataacaggaaagaaaaagggagagacagacttgagtgttaaaggaccccagaaattgctgaaatgtccttttagattcttgtggctggcaagctatgctgtcattggttctctgcgaatctgtgatgtgttcacttcgccatgccccagcttgggaaatattcttagtaatccaatcaaatccttaaaaacagcatttttgtgaatgtattacttcttcaatatccccatatatttgtattgtttcaagccactagtatctaaatttttgatataaatatctaaattctttcattttatagaaaattagcatgctttatgtttctttataatgaaaagtctagataaagtatcataatttcattatcag

SEQ ID NO: 39066 - DNA, 1031 bp, Homo sapiens
aattgtttatattttcttttaaactctcatcccatatccttaagccttgtgactgccacagagagaaaataagatcaagcatgagcttacattagccacagaaacacctggggcagttccaaagttttaattactgcttcattaatgtaaaagcttaactatagttgtaatgtataaacaacttttggcatgtgccctgcaaatgcaaaaaagtctaaataattattgtcgtggctcctgtctcaacgcaagaccaatgatcgccaaattatttttaagacatggactacattaaaaagttattgaattatgttttctgttagcttatataaagcacatgacatttaataacttgcaaagaaatgcttattttatctgtaatatatactttggtgtttatcagattctgttcaaactgtgtagcaaatttccttgaaaatagaactttcttttttcctcacatccctgtatttgatatcagactattcttagactctccacctcactcatcaccatggtgtctacggacttataagtatgacatgctgtcacccttatttatacatgaggtatggaggtgagcgtgaataagaatcttgctcagagccaattagttgcagatccagcattggaattcctctcccatagtatcaaaagtgtagtcatattcctagatcattaggcaggaagaaaaagaaaataaaagaaaaactactcagagacatctggccggatctgtgcctttcatcagaataatcatgtcctgaatctcccactggggttgtcagaaaagatttttcccaagcttttctataccacggagagctacatttaatttataacctgaaagtatcccctaaaacagactcataatcatgcttgctgaaattttagcccagccttcttgcttgctgagaaaagagctggctgtcctttctctttgaataagcctccttgtatgaacagtctctagagatgtcccttttccagatgaaaatctgttttatgtgttatcatgttgaccttccaat

SEQ ID NO: 39067 - DNA, 1032 bp, Homo sapiens
ctacatacagtagtagttagtcagataaaggatatccaaaaaagagatagctagaaaatgggagaagcagagttctgcaacccctttcagtttgtaaattgttcacatgtatgaaaataactggtatttatcaatccactcagatttctgcactaacttttatcttatatatcatatgtatctcttttctttttctaaatgggaacatatatttgttattaggtggcagagatatagccttaagatatatttgtaaaatgcacactgaatagacatccaacctaaaaaaaatcactatttaaaaagcccatataatatatacatatttgttagcatgctaattgttcatgttttgtgtttattaaatagaagtgatatatatgacattttgaagtaaagcacatctgaaaaattctactcaaattaatggagcatgacaatctgtgcaatctgtacacctaactgaaaatcaaggtggttcaggacaacatcatctctgaggcctggaatcttagcagagagaatggggctgtaaacttgaccagagtggacaaatgtagacaaagaaagctcactagcagggatgctggcattctcccttatttgtgcttccagcctgttggttgaagtagaggcaggaaaccaaccctgcccagctggttctcaggccgtgctggctcgcccaccacagcacacaagtactcagtctctgtgcccaatctatagctgcctgttgagtgtgaagtggctaacttgtgaaaactccctgccaccttctttttttaccatattcagcacaccgcattgtattagataaagttatggtactttaaacaaatatctccgttcaccaaccaatttctgcacaccatagtctcagccttataatctgaaaacacaatattagaattggatagaaaaacaatcaagaaaacttgtggtaatatcttaaagcttccaacacattttagctatttattttattccattcatcaaaattctgatttcattagtttggtaagaatcttatgc

SEQ ID NO: 39068 - DNA, 1027 bp, Homo sapiens
cagccctagcctttttgggaacagagaatgatgttgaactgaagggggcgctagatttagaaacctgtgagaagcaagatataatgccagaagtggacaagcagtctggttcgccagaaagccgagtagaaaacacactgaacatacatgaagatttagataaagttaaactcattgaatattacctgactaagaacaaagaagggccacaggtatctgaaaatttgcagaaaacagaattaagtgatggaaaaagtattgaaccagggggaatagacattacccttagtagttctctttcccaggcgggtgatcccataactgagggcaataaagagccagataagacctgggtgaaaaagggagagcccctcccggtaaaactgaactcttctacagaagcaaatgtgattaaagaggctctagactcctctttggaatctactctggacaacagctgtcaaggtgcacaaatggataataaatctgaagttcagttgtggctgttaaagagaattcaggtacccattgaaggtaagctgtttttctttaatgcctttatattctgttgcataattgcctttctacaatttgcacatgtaatacccacattagtacatttatttgaaaacagtattttctcaatagagtgtatctttgctgatagcattaacaattggggagaaaatttacaagatatggtatctattttggaacttggactgtgacatagatctctagatacctacttcaaaagtcgtttacttttaatctttcaagttactttccttttttacctttattttctaaatctagaggagtttaaactgtttttgaagaaatctcaattctaaactgaattgcattatgttatattgtgttctcagtagcattcattaatatgtattcctgtgaattgtcccaattctctattatttgctattctattggtttttaaacttattttcagtatgtagcagctcatgggatgtagttcaacctgaaacaaccaaagctttttccttgt

SEQ ID NO: 39069 - DNA, 1141 bp, Homo sapiens
ttgagctcagcagttcaagacaagcctgggcaacatggtgaaatcacatctctacaaaaaaatacaaaaattagctggatggtggcacacacctgtagttcccagctactcaagaggctgaagtgggaagatcacttgagcccgagatgctgaggctgcagtgagctaaaatcacgcctccgcactccaaccttgacaaaagagcaagaccctgtctccaaaaataaaaataaaaagattatttataccttaatataaaaatgtataatacatttatttgttaaaaagtattctaaagtgctgtttctctaattggcttctatttaggatcagcaaactcatttatactcaatagacagttatgttttgtgtttgcacacgtatttaggataaactcattatgtataagttaaattgattctgttttagaaagcatgataagttattacataatgtcaagcataattcaaagtctcactatctcattataatatttgggatttttgtgctttcacaataaaaatgagtaacgtatacatgcgcacacaggtatctgtcagtttaaaaggtataatctatgttgcgtgtatatacctgatagtccaatttgagactaacagtagtatttcctgtagtatagttcatcacccagagttctccatggttgcctggaccaaagagtagaaccaagagctcaaggcccctttttaagaaatggtaccttttctttaagtcaacatttcccccaggatattcaatggaaagctagtcccatgaacaagcaatgggttagaaaatagatgtttcatagttaaatatgtttcatacttagttcttagctctgtgtagagcagagccttaagctcatagtttttattccttaaataggcttctttaaggatttcttagttttattttctattctctattatttttcctggaattggcataatagcacacagttaatttttactttatctctaatcacattttgattttatgagattactttcatatcaatatatatttaaagacatgttagttcaatctctctgttggctttaaattctttactatagtaaatgcaaattgggatgtatttcccttttcacattttttttttgagatggcattttgctct

SEQ ID NO: 39070 - DNA, 1524 bp, Homo sapiens
tcatagttttgttacagagaactaactacaattcattttatctgtatagccttttagcctttctttcaatgcatggattaatgtaataatactatatagatcatacatatatagtatatgtaaattgcttttccttaaaaatgtgtatttttctgccattaaatattctattcacatgcatttagtgagcatgaattattttataatgagaatcataaaaaataaaattgattccctattaaacttgttttacaatggaaagatgttcaaatcctaaggaccttcatgaagacagcaaaatgctcttaacagcaccttttcttagaaataagggatgaattaaaggaattacaaactgacctagttttctagcatgaaatctttaaccatagttaatgtggaattttctgatcaaaagtcaccttgcttctactgggatcacagctaacctggaatctttaatgcctcctggtgccaagaagaccataatcttgaacattttttagtactgtacttgctggaacaactgaggtcctactcagccataccaggtatatatcagaatacaaaccctgtgattcgtaagtaccacttaccaatgtgttatactgtaattttatgatgattctttaagttgaaagtcactagtaaagaaaaaacccaaacaagatctccaaaacatccctgaaagaattgtcttcttgtcttcctatttagtatgaattttggaaaacccctaaacaaatatgtaattattgattattttatgttttaaagtgacactgcttgctctcccttcctgattattttacctttttttcatcaactgaaaattccagaaattcattaccctccaaaaacaccctcttaggcaaccaccccccagtaacttcagtaaccagctttggcaaataccttgagttaatcattcactctacagtcagacgtaagctcatgaaaaaataatcttctttgtaagtgagctcttcacagtgctttctggtggcggagcaagcttggagacaagtagctttggagaatagctgagggtccatttccactgcagactaatccctgccaatgggtgctgcacacagtgtttgggagtaagtatgcagaaacagtaatgattgcaaacctaaatgcctgcaggggctgtggaatgggggtaaaggaagcatgaggccagggttaattatagagctccttctctaccagtaggggctgtggacctctgtagctaggtgggaatgggaacacaggcctggggtgttgctacatcttctcatctttttcaaaaaggaagccgaaatatcgattaaatatattaaatctccccagttgttaagtattgtccactgtttaattttaaagatagtgagcagagcaaagaaaacatatttacttctgaatccacgctatgggctgccagcctgaggcctctggcattgatattaatataaacttttacgtttttattcattttcaagtaatcctttttataaccacaactgctgttttgag

SEQ ID NO: 39071 - DNA, 1032 bp, Homo sapiens
aagtgttgtcaaaggaagcaatgccctctagacaaagaccagcaggaacacacctgtaattgagtaagtcaggttaacttgttgcagtgagggagaacacacacaatatagggaaccatgggttacctcagaggatgttagaaaggagtggctcatgcctgtaatcccagcactttgggaggctgaggtgggtggatcacgaggtcaggagatcgagaccatcctggctaacatggtgaaaccccgtctctactaaaaaatacaaaaattagccgggagtggtggcgcatgcctgtaatctcacctagtcaggaggctgagtcaggagaatcacttgaactcgggaggcagaggttgcagtgagccgagatcgcaccactccagtctagcctgggtgacagagtgagaccgtgtctcagaaaaaaaaagaaaggacttatgggattttggtttgtgttaggtgatttgagggaggattcaaggaagcagggccttgctctaaatgggatgctgtcaggaagtaggggtaattttaagattgggtattttattaaatcctatctagaaggaaggaagactggagagactaatgctataattgggaaggaagcacagtcattctcattacccaaattagggagacgtttggtcatttttgtggctggataatgtttgtgttgtttgtgttcagctctgattacaaagttgtcttgtttttgttgtgattcatcatggtcatagaatggccttatttagtgtggatgttctggaaaattatattaaataggaaaacatcgggcatagctgtgaatgctaagccggctcttagtaacactgaggcctggctgatagtaccaggctagttctcagatattagggactgcatgcctttttctctcaagtcagctagccagcaacctattaggaaccacttatgcccatacattttatccagtgtggctatgcacataatatatatttccttttccaaaagttatagtgaagcatagttcattctcaactctatttcaa

SEQ ID NO: 39072 - DNA, 1032 bp, Homo sapiens
catctccaaaatgcaaatggatcatacttccaaatacagtcacattctaaggagcttttttctatcaccatgaagtggaaaagtataatgatatcccacagcctaaaaactggaaagttggggtggagtgagatctggatttggaaacagttgcagaaataagttccagtgccataccagtgcctttcccaggtagccaaagtagtgcccacaaaccttgcctgcattttggatgtgatggagagtcagtcaaggccatagtgtgttgtgcctgaggggcccaattgttaagaaaccacagagaatacactgtaccgttcttgattgtacttttgcctgtgttacagttggtctttcttggaggaactagtgaaaactagttattaccccttgtccctgcactgttatctcttcccgtaagtcagctcagaatgggagtggaatctgtccaggtttttttcggtcactttcctgtcagtctcttgcatcatgaaaggaagacatcattcacatctgctcattgctcatttcagtttgacctgtgttctgttagaaattcctctaagattttaagatgcagcattgagcagattttctgtcactgaagcagattttactcaacatttattcattcattcattcatttattcatccactcagcaaatatctaattagagcctgttaggcgctaggcactgttaagcattggggagcttactgtgaagcacaacatttttatactgagacatgtccacgttgtaatgagccatatacatgggatcattttacaggaaatagaactttgctgtcatgatttgccttgggaaaaattagggaacaaatgggggtaccaaagacactgtctttcttagcagtgatctttgtgactttatcgtaatattattgtagcttaagagttgtgggaattaatttagctgtcattgttactattgttatttcctgattgctgacattttgcttaataaagatccaagctgaaaggtgggtagagtcaagataaaaaaattaaaa

SEQ ID NO: 39073 - DNA, 1034 bp, Homo sapiens
actttgttgaagatcagatggctgcaggtatgtggctttatttctgggttttctgttatgttctgttggtctgtgtgtctgtttttgtaccactatcatgctgttttggttatatagacttatagtatagtttgaagttgggtaacgtgatgcctctagcattgttctttttgcttaggattgtcttggctacttgggttttttggtttcatatgaattttaggatagttttctctagttgtgtgaaaaatgatgttggtagtgttgaatccatagattactttgggcagtatggcctttttaacaatattgattcttccagtccacgagcatagaatgttttttcatttgtttgtatcatctatgatttctttcagcagcattttatagttctcctcgtagagatctttcacctccttgactagctgtattcctacgtatttttgtgtgtgtgtggctattgtaaatgggattgtgttcttgatttagactgtcagtttgagtgttgtgtttggaaatgctactgatttttgtacattgaatttgtatcccgaaactttactaaagtagtttatcagttccaggatcctgttggtggagtcttcagggttttctaggtatggactcagattgttggtgaagagagatagtttgactccttttcctatttggatgccttttatttctttctcttgcctgattgctctggctaggacttctgaaatctggaaaggctttgtcatgaggttctgggattagtttgatcaatattttaaggtagcctacatgatagatcaattgggctagatttttaagaggtaagaaaccactttaatggaaaaccttgatgtgtagttcattaatatttaggctagtgaattaactaacaatttttaaactgtcgattctgaatacagctaagttccttagtcatttgaagttctatcagtacatttgagaacatatatgatttataactacagtaccctgtactgtacatttgagcttataacaattagatccaatttagattt

SEQ ID NO: 39074 - DNA, 1048 bp, Homo sapiens
tgaatatgaataaatgaacatgaggattaacgaactgttgaaaataggctgagatactagttttctttcttttttagagggggcatgatattaaagatagttttaagtaacaaattacttattacaaagttacaacatgtggaatcaatagttttatttgttcattaatttattcattcagcaaacatttgttgaacatttaatgtgtaccagatattgccaggatcaggaaataaagaactaaaaatggacattcagactgcaattgctagtacaggggtcaaacaaaatcagtgattagaatttagtgcgttaagttccctgatgccttcacagccagaagaggctgtgaagggataaacacttctgagagtgggtggtagtagaactgagtattcaagactgaatgttaggcaggtagacagtgactggttaggctgagaaacttacaagtattttcgttgagttctgcttccactattatttactttacaatggatatgaagttcagatttcatcttatttactgaaggtggagaaaggatgtggaagtaggggttatgggctctcaaaagtagatttagagagatttttttatcactgttttatgatatagttcactgagcacttacatagattaacagttacaagtttccataaatcagttagaatatgactagcttcagggaaggaattttcaacaactgcaatctttgattgttttactgtgggaacttgcagtgatataattgacaacattatttaacaataataggtaaagtaggccgggtgtggtggctcacgcctgtaatcctagcactttgggaggccgaggtgggtggatcacaaggtcaggagttcgagaccagcctggccaatatggtgaaaccccgtctcttctaaaaaaatacaaaaattagccgggtatggtggcgcatgcctgtagtcccagctactggggaggctgaggcaagagaattgcttgaactcgggaggcggaggtcgcagtgagccgagatcgtgccactgcactccagcctgggtgaca

SEQ ID NO: 39075 - DNA, 1033 bp, Homo sapiens
tctcttgaccttgtgatccgactgcctcatgctgggattacaggcatgagccactgcgcctggccaggagtttggatttttagatataatgggtagccactgactgtttttcattttaagccaggaagtgacaagatcatttgtgttttagaaagatcattctgaagtacgagagaaaagataccacttagagaatactggaccagaactagagaggctcaggagtgtgactgtgtaaagtaaggcaatgcagtgacaatggagtggttagactgtggtctccagaataacaaccttagtacttggtgatttttacttgttttttccgtcgtaaattcttcttagtgtattacacttgtgccagtttattcttccaaaaactctgttctgttttacaccctcatttttcttaagatgaaaatctttagtcgggcattcaaagtccatcactgcatggttctttcctttgtgctttcacttcccacctagtccttagtgctgccaaaactgactcattattccctgaattcctgctttcacctttgctctctgtgctccctttagtctggtttgggtctttcccattctttattgatttttacataggaagtattcatttagagttaatcacatgtttatttcttttagctttatatgttttacatgattatttttcagatccacagttccctttctgtagtttttcctcctctgccaaaattcttatttttttcttgaatccccttcaatgtagaaagcgtagttatgttaaagtatatgataaaagggatcctgtgggtctgtttctattgtttctttttgttctgtttcatatagtgggctatttttaaaatatatgccagatgttgtatttgaaaatttatttgaaaaaataatttgagggctgggatgatgtacatcctcttcaagaagataggaacgcataggagcatgaggaatctaggttgggtttaactcattttcaggtgttaagccctgtttgtgttctgattcccaggtactcacagagtgt

SEQ ID NO: 39076 - DNA, 1045 bp, Homo sapiens
agaattaagttgcatattgttatttcttttagtcaccattttggattcttagcattccctctgaagatattgcaagaaatttgatgaaacggacagtgtgtgccaagtaagagaaacttatgttctcctgcatgaatatactggtacttctcataaccactcaatcctgttttttgctatattgggcagtgtgaaggctcagtttagcttgcagttacatacaactgccactgggtggcggtgggggaccagaggagggttacctgccgaaaccaaggatgaaagaatctctggggaaatgtcgacacatttgttttagaataattttttaaaacttccgtattatgcgggagtatagtatgagatataaacactatgttcttacgcaggatagatgccacatataattataaccaaagtgctgaaaatccaaaaatacttttttcatagatggtttttaattggatgagcagattagtgaagtgtaaggtaacaaaaagtgaggactgccgtgagacatgttttactgtttcagttggtagagaaaataattatgagtaccaaatcttggtgtgaattaatgtaatgatgctgttcattgtttatcctcagtgtttctagactttatcattggcatccactttttttttcttttctttcatttcttttttctttatactgttggaaaattttctgtcatcagatttgaaaattaaactgtatttttaactagcatcttaaatatcaaacagcttgtgttatctttaagctgctttttcttcctgaacattttggcagattgctgaaaactttctgtagaaattatatttgctaatgcaatgcaaataagaatttacatatatctagttttattaacatggttagcgatgttttatatcatcatatgtaattgttgtattacggaattggacacaacccaatatttagttaacttcatcctattgagaactacctgcagcctttaatcttttacagtgaaggtcgttaacaggccttattatgaaataaaaatgactagaaaaca

SEQ ID NO: 39077 - DNA, 1069 bp, Homo sapiens
ttgagattatttgtgtttatgttggtattcattataataactgggatcagcccttataatactcttttccttttcctcacccagtataagttattgtattggtgagcatttattatactttattttcttttgtggaagtaatttgatatcttgtactggtgacctgtctttttccctaccttgactgtaaagaatttagtaacatttattaggaaaatgagttataatttattaggtgtatataaatgggctagcaagaaaaagatattctttatctgaaatctgttttaaaaagtactaagaattattccaatttgcttttagtagaagcagtatatttcttttaaggaaattgtcttatataatttacttgaatttttatttattaaagttatgtttggaaacttatgttgtaaccttcagtctactggggtagaattctgattgaggtagttcccttagagcttatccaagatactgttaggtataccctctgtttcctgtggttctgaactcttactttatcctaaaatattctcaagtttctcctgttttaaaagtacaaaacttttttttttggcaaatctgtagaggttctctagctaccactttgttttccttttccatttgccaaaatgcttcttgaaaaactagtataacttcttgtctcctcttcttcatctttcactctcttctggccattattttccagcttctgtgcctatcattctgttgaaaacgctaacaaaggccacagatttatagcatttgacagtgttgaccttcatacagctgctcttggtttccttgacagtggtcttggcaggtggtacttttacttttttgtttcttctcagtctacttgatgccctgcaattttctttgatttatgtttatatattgtttttttccaggcgtctacctatctttgagcacttctccgtcacactgcatgtttttcagagtcatgtcgttcttcttttgattttataagaataattatagagcaaacatgtaactgcctcctaagtgaacaaaaagaatgttattcagccttatggagtcagta

SEQ ID NO: 39078 - DNA, 1035 bp, Homo sapiens
ccggggccatctgatgtttcttctatgaccagaatgaggtcatgctttcttggtaggaataccacaaacatgatctttgcagcacatcatatggcacacaaagccactcctcctggtaatgttaactttgattgtctggtcgggctcttctctgtcagatttctcctctctgaatcatcattttcttctttgatttgtattttatggggaaataagattacactaatatcttgtttttcatcaaaccactactcagattaatgactccattgttgacagccacttctgaggtggttgccaagtgattcttttttccatcatttcttttgcatttgtaagttggtattctgtaagaaagagcttttctttctgccccatttacttcattaatttatttatagtggtatggagtcatggattcctatattattcattgggttgtaatttattagtagcagtattttgttgctcaaattgtcccagatttgaccagtgggagtttgtttgagctggctcttctgtccttttgaaatatcctcagtagttttttatgtaagtccttcctttttagcatatctgactgttcactgttttgcagtttattatttaattataatcaaaatcatatgtggttgagaatttattttggagttcttttattcctttataaaaagtaatattggaggttctttaaactgaatgtatttctaaagactttaaaaagtggccactggatatttcttcaatgacttctctattttagtaattttagatgagggaagatttccaaatacatataaccaaagtgatgttttagaaagggaaaagggagacatgttttagggatttttttttttttgtcttagatgttttatcaatggatagatttcttctagttacgtgtctaacacatgtgggaagacaatggtggcatttatttccctgagtttttggcccctggagagggttattttcagatcccctgatgttcattattagacctcaattgtgtcttctctctttaagcctaaagcg

SEQ ID NO: 39079 - DNA, 1342 bp, Homo sapiens
ttctaattcaagtagtgaaggaagataaatatgcactagagagtgagattttgcttaagattttgcttaaggtaaacaactgctttggtataagctaactaaagaaataatttttacattttgtattttccaaccaaacagaatcgggaccagtattcacatctgctaagtgatcattttctgccataccaaggtcataattccttccgtgagaaatattttagtggggtaacaaaaagaattgccaaggaagaaaaatccacccaggaatgaaaattaagattttgacaatgaagaaagaataagaatttgatttaaaaagacatctggatgtgaactttcatgtatgatccagaaaataggtacggttttaaaatattttatatagaaaagctacaaagtaaattgagcaatgcttttaaagttatctttgttttatagacttttttgttgtatgtattacagtctttataatcttatttaatgtatatttgtactttcaagtactgatggagatagactcaaaacagttatttttttacaattaatctacaaagggaattaatattgttgacttttaaaacatctgctggatatattatatgcaattaatagtagttaagaatttattcatttggtagatatgtttatttggtttttggttgtcatcgatttacattgccactaataaaccatattgagaatttctaaaattgtgtcatatctagttgtcttcatgggggatgtgatgagggaaataaatttttatttagaaattccagacaaggaaggaataacaatgctaatagtgatgataagaaaggctaagacctgacaacctagaaagattccaaactccttaaggcctgtctacatttgaagctcttttgtaccttggatttgctcctgcattcctaaccgttgactgttgctcaagttaactacccacaatttttggtttagaaagtaacggatagttaaaagcagtaacagcaacacaaatgcttgatggttccttaatggtattaagcctaatcagtgccctttgaaatagaagctatatttttcttgaaggagaaactttgctgagtccacattgtgtccatcatgaaaatatcttgcttgaaaaccactatacccattaattcaggatgctaatagctttcttgcctttggtggtcaaatgtacctcagcagggtggcagtaaatggatcctctctctctaaccagagcctgtatttattattattattattttagtgttactgctgacttttatggactcagagtattaatgtgcacagcttaggacctctaaaagtatagtgctgcccaagcaaa

SEQ ID NO: 39080 - DNA, 1047 bp, Homo sapiens
tgagaaactgacccagagaattctagataaattcttggagttggccccccaaccttggaaaagtgctctaccttttatgttaaaaccgggccagaacttaagagatatttcttggtactggtgaagatgctgtcaattaagatgaactcctaaaaaaagaaaaatgtcaatgtaagtcaagctagagtcagacaaaggacacaaacccagtggcttcagtctgaagaccatgtgtccatggttactgagtcaaagggtccccaatgccaaaacattgtcggattttgctttgttttggggaccaaaatcattggaatttcatttatttgagctccaagcagctgctatactaaatactaaaagtagatgtaaagccttgcatactggcatggagcctcccactccaaccccatgttcccttgtttctccctccacctttaacctgacctcagtggctttaaggagaaagatgattagggatggggcccaggactcagccaccacatgtacccatctgaatatgctgggggactttataggagaaaggggcacaaacttgtatggctgtgttgaatacaggtgcccagttcaccatcttacacagtcctgtgggggaagggtccactcggtttcaactgatagggtttgggcaaggttcataataggaaaggaaagttaacatgaccacaggtcaacttgtgggtatgacctgttgaaccaatttaatgcaccgttgttctttttgcatctgaatatatagcagaaaaatgacatgttatatgcttgaacttttctgccctataagtgctagagcccaaccagaaagagccccatttagataggtactagtgtctttaaggctacagaaacctaatgatacctttgagctatagaatatcctgtaactgattactttgctgattggagactctggtaaaaggagatacccttcatccagaggtgcccttggagttttggatgcctggactccttgacatggctggccagatacacggcttctgaaaaacaactaagtattagctacta

SEQ ID NO: 39081 - DNA, 1243 bp, Homo sapiens
ggtttgtcatggaggtagatatgaatagaagctggaatgctgatcagaagattgatgcagtcatccaggttagagaacagtggtagtagggattcaatggagaaatatttagaaggtgagtgagcaggcaggtcctggtagttgggaaccagatgaggagtcagggatgatatctgagattccagctagggcactgagtgggtacaaactggaatagatgataatgggaaaaggatgagtttaggtttggacatcctgaacaagaggagcctatggtacaagcatgaagaactgcatagcaggcttttgagtatccaagagcaaagccaggcaatgattacttatgcaagaagcagaagatccctgtatgggacaaaaaacaaaacaaaacaaacagaaaaccactgagtcaagacacattgtacagctccaagattccttctgtgccgttttcccccagcatgatatatatatttggcaaagagaattgacatgacccaatactcttgagactggatcaggccattccaagtttattacaagaaatttatactagaattacttaatgagataaaatttctccactgtgccacttgaagctgcgagaataacactggctttgggtgatgtgcttctgcccaaactggatgggtggacgtgctctatttgccgtataagttagtgagctacattgtagagttaggatgtaaagaaattgataagctgttgttagttgtctctaagaaaaacctgctaaagaaatacgcaggctgccgctgtttgggctccagacgcagaaaaagaaaaacccaaagggttttcctttcctctcatcctttaaaattaaaaatacttccccttcctctctcttattaagtaactacataatacctttcaggcagcaacataaaaattacagagtaggccagaatatggggaaatttttaattaaatctggggtttcatttgttttttaatttattaaaaaatgcttggccaaaaaaaaatcccaatttccctctgcccccctttttatatatccttatgcatttggcagagctcatgacaatgtctttccacctgtggaccggccaaaagccttttctgaagctcctactaatttggattaaactgactggttaaaagcttcacacagaaatgctgccaggaaagtcatgaggtctgatgacatttaagtctacagtcttatcttttggaccaaaataaatgaacaaagatctag

SEQ ID NO: 39082 - DNA, 1056 bp, Homo sapiens
atgttttgtagagacagggtttctccatgttgtccaggctggtcttgaactcttgggctgaactgatccccttgcctcggcctcccaaagtgctatgattacaggcatgagccactgtgcctggcctttacgaccttttaaaaacccattactaatgaggatgagaggaaggacagcatggaatcctctagcccttgcttgtggcccgcctggttttctctaacactccctgcctgcttctccttcactatttactgcatgcctggcatatgccagccagcaaccactatgaacatcagatgaataaaagatacatgtcttatgttgaacagttgtacacagttcttggttaaactcatttttgttaaattgttaagaactcatttattctgagtcccaaactctggcacttaaaaataaaaaataaaaaacaagactataccactttcaatacactgttctctggatgacgtactgggtgagattgggaagggcagagaggttttatggggtgcaacatctgatcataaaggaattgacgttttttccctttagtatatacgatttctttgtatgactaaacccgtttctttgtttatgtttcctcccataaagttctacagccatctttttcatgcttcctcagtgttctataaagttctatagtccatttttaaagctttttatttaaattttttgaataagcaataaatttacatggtttgaaattcaaaacagttcaaaagcgtatacccaatgaaaagtttccctctttcttcttctccttctcgtgggtctctgagacacccagctccctgccttgagacaaccactgtcacagatggcttagctcaatgtcaaacaatacaagagagtcccaatgtgaagccatcattgaagcacccatgtgaaacaatggcaaaagcaaagaaccaggagtaagatgtcccttcccagtcctcccaggacagctctgaattcatctttgtcttatttcgcactgttaacataagataataacctttccttagctatctctcttggaatgagaactat

SEQ ID NO: 39083 - DNA, 1062 bp, Homo sapiens
gcattgttacataggtatacacatgccatggtggtttgctgcacccatcagcccgacactacattaggtatttctcctaatgctatcccactcctagccccccacctcccgacaggccccagtgtgtgatgttcccctccctgtgtccatgtgttctcattgttcaactcccacttatgagtgagaacatgcggtgtttggttttctgttcctgtgttagtttgctgagaatgatgatttccagcttcatccatgtccctgcaaaggacatgaactcctccttttttatggctgcatagtattccatggtgtatatgcgccatattttctttatccagtctatcattgataggcatttgggttggttccaagcctttgctattgtgaacagtgctgcaataaacatacatgtgcatgtgtctttatagtagaatgatttataatcctttagttatatacccagtaatgggatggctgggtcaaatggtatttctagttctagatccttgaggaatcgccacactgtcttccacgatggttgaactaatttacactcctaccaacagtgtaagaactgaaggagatagggacaccaaaaacccatcaaaaaatcaatgaatccaggagctggttttttgaaaacattaacaaaataaatagaccgctagccagactaataagaagaaaagagagaagaatcaaatagacacaataaaaaatgataaagaggatatctcaactgatcccacagaaatacaaactaccatctgagaatactgtaagcatctctatgcaaataagctggaaaatcttgaagaaatggataaattcctggacatatacatccccagtggtatttcaaaaggatagggcccacggagatgactgagctggctggattttgttactgtacctctatacctcagagaggcctaggagcctgccttgggttttgagattattctcttgtattcccctggagactgaatcgaagaatgaattggctccttgcacctcttctctctctctacttatctttttttttttttttttttgtagaga

SEQ ID NO: 39084 - DNA, 1050 bp, Homo sapiens
acagatccccacgggagcagagtctcagtcctcctgtacttggctattcaaagtgttggctatggaccagcacatctgaagccccagagctttttaggaatgcaggatctcaggccccacatcagacctaccaaagcagaatctttattttaacaagatgcccgggtgatttctgtggatgttacaatctgggaaatatggttcccaactcaaaacaagataccacacatgctacagctattgtctgctggcagagaagaaagatagctaaagtcattaatatagttcttaaacttttgttatttaggtgaattatttgtttatttaaagtaaaatggcctgctttctctgaaatcatttgtcttgcctctcagtaaattgctgttttaaattcacaggcttccttactttctacttgcatgacagttctcagaatgaattaaggatcagtcaattttttttttttttttttttagctattaatacctgtaaacagttcaatctgacattagaaaatactgactgttgctgttatctgcccaggtgcctatttctccttcatttggtaatggcaccttcctcgtcagaagccagcaggctggtggagctgtctcatatagtcctctctcctccgatggcccctccaaagtgaggttaactggacaccctctgatgaagctcatttgctctagcatgctagctgaaaggaccatttcctgcctcaatcccagagcttctggatcaccatcctgcccaagacctggctcttcagcttttcctttatgctagcctatatccagtctttttcagttttgagacaggatctccttctctcacccaggctggagggcagtggcaccatcacagctcactgcaacctccacttccttggctcaatggatcccacctcagcctcttgaatagctgggactacaggtacacgctgccacgcttggctaatttttgtattttctattttttttgatagagatgaggttttactatgttaggcttgtctctaactcctggcctcaagagatccgtccacct

SEQ ID NO: 39085 - DNA, 1048 bp, Homo sapiens
gaacacatgaatgaataacttatcaatctatcatatggaaaatagcaatgttaatacaggctaatccacttaatgactgtcaaaagatattacttgacaggtttttagttttattattcatagagtggcataaaaattcacacatctttcccgtaaatgtgtttctttattttttattagtgaatgtaaaggactgaagctgatgtaaatttgctaaatgaataaataatactgccttataaaaaataaattgaatcaagcctcaagaacaactaacatatagctcctatcctattttcaaaatgcttttggaaaaggatggcaatggattctggtgaaacactggctgatttaatatcctgtatcatcagtactcttcagccattaaacaatatcataaattaatatttattggacatgtttcataatagataaataataaagggtatatatcatgtgatcacattttataatccgttatttataataatgttacatataagtgaaagtattccaatgtcatatagttatctctgagtagttttgctttattttattttattgacttgtttatttcattctagtgatatgtattttatgattatcaaatacattttgcttttataacatgaaaaaaggaaaaggctatttttggttcaaaataaggactcagtgggctttgtgcatcaattaatatgagaagatatgttaaagtttagatatccagactataccatgttgtaccatgcagagtagtatagaaaaactaaatttccctaagaatgtgggaaaagtcttactagcttttatttttaattaaccaaattcaatggaacttaaattaagaaaacgtttctgtaacagttctgtttgattttgtgaagagatcttacagttggagatttttttctaaaaggataaattaaactttgtgttacaacagacatttctgctttctagaccagagcttctcaaatgttaatgtgcagacgaatcccctggggatcttgtgaaattacagatgggtctgaggtgaagcctgagattc

SEQ ID NO: 39086 - DNA, 1021 bp, Homo sapiens
aggcttggggggtgccatccacccagccagccaggacattggtgtctggattttagccacagtgaaaaacaagggtgaattgcttaatggctgcaatgctgggcaactgaccaacttcattcatgacttaaaaaaaaaaaaaaaataagggccgggcacagtggctcacgcctgtaatcccagcacttctgtaggccaagccgaggcaggcggatcatgaggtcaggagtttgagaccagcctgaccaacatggtgaaaccctgtctctaataaaaatacaaaagttagccagttatggtggtgtgcgcctgtaatcacagctattcaggaggctgaggcaggagaattgctgccgagactgtgccattgcactccagcctgggcgacagagtgagactccttctcaaaaaaaaaaaaaaaaagttgttttgccagtaaaatgcataaaatatgcctattgctcaataaattgtcacaaagttaacctcatgtaatcaccacttagatcaagaaatagaatacagtattgccaaagtgctacttcagaatcacctctgtgccttctaagtgtaagcaatatcttgacttttagataatccttcattgcttacccatatagttttaccacttaagatggcatcttcaaacagagtttagctgcttattttgctcaacagttttgaagattcatttatattgttgcttctagctgaagtttattcatgttctttgttgtgtgggattttactgtgtgactatactgtagtttaagatttgtatccattctagtgatgatggacatttacatttttctagtttttggcattcatgaataatattgctgtaaacattcttttacatgtttcctggtgaacatatatgtgcatttggttgggttgatacctcagaatttacttgttagatcatacataaagtatctctattttctactttaatgaattatgccaaattattttccaaagtggttgtgccaatttacactcccatcaggagtggtta

SEQ ID NO: 39087 - DNA, 1190 bp, Homo sapiens
aagattatttcttcttacttagtgagtgacaatatgcccggtctaccaagttcaggtgcactctagaaatgatggctgtaacagaagtctggcattggtttttgtaggaactagcctttgggccagcagttgtccaggcttgaaagccatctgctctttataatttagggtaccagggtatacaccttgaagctgaggaaatccaatcattttggttccatgatgactgaaggaatgaagccccaaacaataccaagtcacagaagatgctcagtaaataactgacctccttccattccttggctttgccttaaccacctgtaaggctgtgcttgactaagcacacagctgaaccaggccataaatgttgggccacatgctacaacagcagtagaccaatggctttggagtttgtgatcagggaaaggaaattcttttggctctgccatgttgtccatgatgccaaggagacaaagctgtgaacaccaccagaacaaatgtctattgactgtgccctgcattatctttactgtttctgggcaaattctgaaaatatccccaaagcaataatcattttggtgtctctggtttctatctcgttttcttttcttttttttctttctttttctttatattattattttttaatgaagtcaacttctcaaacaaaacaacaaaactccaacactgaattatgcctggttttgctgtcagacccttgtccgagccatgcacttggaaacagtcatcaagctgcgaagctgcgtgttatcctaactcccctttgttaacagcttcgtgttggcccctctccagttgctgccgccagcagagtgtctctgttttcagaccatgtcatccgggacttgccagccttcagagacatcatcttctctggttattggagactttgaaggaacacttttccttttgtttttcaagacagtaactgtggatatgatgtgagaggttgacagtagtgatacctttggtttctgtagatgaaggtttttttttttttttttaggtttattgaaacaaatgagaatctgtcagcagaaatgtcctttaaaatcacccttacttttgaagagtcacatagaagagttaagatatggctactttccaactggtctcccggggagggtttggagcagttagagggtcctgtgaaagcagaatgacatgaa

SEQ ID NO: 39088 - DNA, 1081 bp, Homo sapiens
actagaaaatcaaacaaggcacgtggacacacaaaggagataagaggctccaagagatcacgttcctttcttgtgtaatttctttcatctaattctgtcaacatttactggaaacctctatctggaacacagattacctcaagtaatctgcctgcctcagcctcccaaagaactgggactgcaggcatgagccaccacgcccagacaatttataatcctagtgatcatgttagaacaacatctgttgtcaaccaatcattgagtatttgttgaggatattcttcgtgctacattaagtgaatgcaggcagcatatcaagtctctacctttttcacaacctagtttggtgagataatgttagtatagattaagcaattgttactagtaaaaatcagtatattattaatactaagttgtgtggcacagactagaactctcagaaaagaggctgcaatcataaatatggtgagagtcagagatccttctgggctttaaagaaatgcttaatcatagactgtgtacctatccccctgctgaacaagacacatccttagtttcaagacagactggggtttgggaatatgggtagctctgtgctaatgcatcaccccactgaggaaacagggtttgtattctacttactgtggcttcattgcataaattttatgctcattggagagaatatttactcacaatctagcccatccattcttataaaagagacctctgaaagctaagagtcactttcctgagggaaatgcaagactctgggagagagagggcactttgagaatgggaaaattgcctgtgaaatcaaatttaggcgaaaagatagcccagcagccatatgtaaatcattccctcatgtaggaacaatgctgtgcacttggtaattcaatagaaaacattagtcatttatcatccttaattatcagtcatctctaactgcatctggtttgcattttttattagaaaggtttttttttttttgagttggactcaggcattttttttcttccgttcctgatttcattttgttattctttttaaaattccatcactaattcccatgatgtgaaga

SEQ ID NO: 39089 - DNA, 1092 bp, Homo sapiens
tggttgccaccttgcagaatcttgtcccaaatcattatcatgtttactttttatagtttctttttcacattgaaaattagtcttagggcatatcctctatgctctaaaatgatttataatcaaattgtgatctactttatgtcaggtttctcagtgttctagttttgagccaggaaactttatcaaatgtataatggggactcatagagccttgaaacttaatcaaatttataaaagggactttattttattctatttttttgccattttggaattttatgtcctatttaaattgttctctagcttttaattcaaaggtcattgttttcaacagataaagaagcaggtacaaagattcaccctaatacaataagcgtcactgaaaaattatagttaaaaataagaagtggttaaagtagtggttaacaaggaaacaataagcaacatgaaacagcagcctacagatgagaaaaaaatatttgcaaaccacatatctcataaggggttaatatccaaaatttataaagaactcatacaactcaagagtgaagaaacaaatcacctgattataaaatgggcaaaagacttgaatagatatttttccaaagaagacataaaaatggctaatgggtatattaaaacctcttcttgtttttaaccatgattgtttgctggaagcttcagcttatttggagagtttcacttttctgacattctttcggtccctgacaaactggtgtcccatcatggtttctctctatgaggcaacctgaagtgccatcattgagtttaccaacagtagtctctaacccttctttctgcctggagtactgttcatttccctgaccccaatgtacctaagcctaagcattaatatcttttgctctggaagatctatgactctttgcactaggtttgatcccttcagttaggtaatctgctatttacttccatagtattccataccttccttttctgaattttcagcaaactttcattattggttaagtgtatttattataaatacattatattgtgcatatgtaaggtatacaacatgatgttatgggatacatatagatagtaaacaga

SEQ ID NO: 39090 - DNA, 1457 bp, Homo sapiens
gccatgtctgtgtgtcaaatgccagccagtcctccaagacgctcagacatctttcccttattgaattcttttcacccctgccctgggagcctaaacttttctttgcacccctatctcagtttgtaccttatcacttgctcttttacagttttcacagatctcatggcaactctttctcatatgtctgtctgatgaagagtgaagcctctttggtgcaggactgttttttgatccttgtatccccagtgctgagcatagagtatacgttcaatagacagttggatgaacttttgagtgaagtatgacttagacaaattgcaatttccctaacagaccatgctgtgaaagttgtgaaaagccttcaccctgatctgattagatttctactacatttgaaaacctgtcaccctcctaaatttttttaagggaagtatatgtacacacatacaagtaaacaatttaatattgaacatagacaaagccttctctggaagcaattagttgatttacagtgccattggtagcagttttatgtatgtgggagtgtatgaatgtaaatcttggcctcatggagtcatttctctctcttgaaaatttgagattctatgtaatactaaaatttaatacaccaagacatccttagaacatgtttgctctaatacataagactggttcattctgacattcatttgcggcatttccatgactgaaataaccactttgagagagaatctcaatccatacacgtgcggtatgggtgttagttaatatgggaaacagtatctgaatccagcctctttcttcaaagcttttctttgaaacagatgtcctctctcttaccaagaagagagacttggggcatcttgttaaattaaatttagcctaggccgggtgcgatagctcacacctgtaatcccagcactttgggaggcaaaggcttgcggataacttgaggtcaggcgttcgagaccacctggtcaacatggcgaaacccagtctctactaaaaatacaaaaattagcagggtgcggtggcaggcgcctgtaatcccagctacgtgggtggttggcagggggtgtggctgagggaggtggaggttgcagtgagccgagatcgcgccactgcactccagcctgggtgacagagcgagactccatctcaaaaaaaaaaaaaaaaatttagcttagagctgccttcttacatattttaagttcagcttaaacgttacttcataagtagtgaagtgtaacctaactggaagtataagcaggccgtaacctacgcgtaccaatcaccgacttttcgccactcacaggtggacaactgtttaaatggtgttcaaataaggcaaatgtcgagctgtagccaatccagctgtttctgtacttcacttctgttttctgtacatcactcctttttcggtccataaatcttccaccaagttgcagtgccagagt

SEQ ID NO: 39091 - DNA, 1061 bp, Homo sapiens
agtgaaaaggaaaaccccttagaaaaccatcagatctcatgagacatatgcactaccatgagaacagtatgggggaaaccgcccccatgattcaattatctcccaacagggccctcccacaacacgtgggaattatgggagctacaattcaagatgagatttgggtttgagtttgggacacagccaaaccgtatcatctggttttctaactttgttagatagacgaactagagaacacaatgaatacaacctgagctttttgttcttcttggtgattggtctgtttctttatttctttacttttgttatgatatttggaatccatggcaattgcaacttctgcatttggcttggtgatttctagaaatgtcaggaatttttaccaatccagtgtttctgtttccaaagattatttgctggctgatcaattggatatggaattatcaccaataagtaaatgtgatatacttttaatctgtgactcagaaagtgagttctgcttatcttgatggagacaaatgacacagttctagaaactgggcaagaattcttagcttatttcaatctactctggatcccttgttcaaagttcttaagtgctggaatttgtgggaaaaggaatgtaatattttaatctgcctcatgaactgtttattatttatgaaatatttctcacattacttacataatggagatggaaagagggagtctttttggagaaagtattaaattatttccttccaagtccaaacataatttaggcagtttataagttatcctcacatttggttagacataaatctgagttatctgggtaaaataaaaacaaataacaaattggtagcttaacttagcatattaactctatcacattgcttaatatgaacttcagacacctgagagacagaagtaaacactattggctcttcctgtggcactacaagatttctttcctcatttcatactctccggtttctacgtatttgaaattttaaggtaaattgactataacaataattaattccaatgtaagtatgtgagatgagaagtttggagacaag

SEQ ID NO: 39092 - DNA, 1031 bp, Homo sapiens
agactttctgcccaaaccttaggccacaataggcacacatttccacatttcctttagtctcagaggcaagactatttcctggttggcgggcatagagaatgccaaggatttcgtctaggcctggcctgagtttgaatgtagaaagaagcaagacaatggttcctttttgtagctcttaattactgatgtgtgagctgaatgttcaggaacattcttgggacaaacactgcaggtcatattaactatggtctattttctacctaattaatcaagtatattatgtggagatttttcaaagaactctcatatgtgttaactctaccaacacatactaccttattttaccttcacaatcattttgtaaggcagatggagatctgctttttgaaataatgaaagaagccggcttgagaatcagatctagattctagtgactaccttatagcctcactttcaactttcaagtatgatgcttctaaaatgttcattgttttcattctacattaagacgaactatgaaactcagagattatttcttcaaggtcacatttttcattaggtctggcgctgaccttgtaatagcatgcatctctagaatttaaggacaacatacttgagatggctggataccaggaatgtttggaaatggatactagtaataatcaacacacaatggataagaatggtctttctaagtgataatttaagcaaccaatcttccccaaggagacaggtaacctgaggagtacagatctgaaaaataatctcctcagctatattgcctactgatgattgatgaacagttgaattatttgtaggaatctgtcagggttttaaatgtagtctaagggagagggagccaccatagtccttgtgggagatcctgccctaggatggagttgattgcataggctagaattgctggataacctgctcacagggaatatttaacacccttgctttgtttctttctttgcagtataaccttctgataccaatttggctttcaatgtagatcacgttattcagtc

SEQ ID NO: 39093 - DNA, 1031 bp, Homo sapiens
tcttattcttttaaagaaacatctccatactctttttgtttattcttatggtaagtggttttacaaagtgctgggtaggataatttccctgaaaatttccctggattttaatgacctgaagaattattccaaatttcttccagaacactaactggaagagcatgtggtctagcctggagtttccccactgtttttctggatgggtcacacctctagcctcagaaggccaccctggagaaaaaatgctttcctcctccctgccttccctacctgctaagctaagtttgaggtacttactgtgcttggcgtccactcacttcccacctctgatctcctgatgtgtttgctgctgcgttcatttccttgggggcaggcgctgcacagctctcccacaggtcttgacacctcctcccagtcctgcccactcctaactcttccactctccttagaatttgtcttctctttgtttcagatgctgtttaaattttgaagaataattctatgtgaatcctgtatgttccttttagacatatttgccttttataaaagcatacttcagatgcatttttataatggaaaagaaggaatggtggttatttctggttccataaaggtctgagcttttaaaaagtacctcaaatcactccctatagaccacagtgactgtacaacctgtttgcatcctctccccagcagcaattctctgtctttcacctccaacattgttgcaattacctcctttctttattctcttgttagaaatctgtgaaatgagattggcgggggatgaggggctatgaaaagttggagaagagtgtagttagtagaagctgactaaggaatattaacatctctgtgacattcccttactctagtgatcactcaaggatcagttttcctatttgtcacatgggcctagataaacagatgggtacaccattttgttctttcatgtttcagtagtttaggaaatttccacaaaggggattttttttaaagtaggtaagaaattatgggtttaagctactaat

SEQ ID NO: 39094 - DNA, 1091 bp, Homo sapiens
caccaagcatgacttgaagaaggcaccaaggatggggctagaaagctagttaaacttttagcctcaaatctggctgggtctgagagactgaggaagagaatcagaagatttcagctggcggagaagcagggcacagtgtgtggactgagcttgatggcatgatcagctgatgctgctaaagacctgagactcttaatcagcaactgtgcaatcagcaatagcagttgtacccaccttatctgctatggaggcattattattggcttttttggggggcatttaatgaaaatttcttgctttcaaggttattcttcaactatacatcacttgggcagtgctgagaaacacataggatgatttggcctgggctccatatccttcccaggaatatcttaagactgagaaatatggtctcttttccatacctccaagttgcttttacatggatgaagagaatcagaatgctcagtgaaatatgtattcaaaaagaaatgtaccagaataaaattacattagaaaataattgcttctaaaaatcatcacccattcttaccctctgttattctgttctctttcaactgtctgtattttaatccctttcttcttccctgatgttttctattcatttaatttaagcaatgtttctggataccatagcaatagcaatgaggtgttgtataaacgtacaatggagcagaatggaaatgcttcctatggtaacagaaaccatagaaacatgtgcgtgtgtgtgtgtgcatgtgcgtgcacacacacgtgcatacaaagctgttttggggtcaaagctttgtagagttcatgcaactaggaaaatgaagtgtttcactgtgatcacattgctatttgtatctattgtcatcatgatttaacatttattgcatgcctatagtcccctggacagaccctggaactagatgtcaactctacttagtggatttatgtttgaaattagatagcaaagccacaaaatggaaaaagatgagaatacttccaaaacagaaatattgaataatgcattttcagaaaaattaggtaaggagaaaatgagtttgacccaggcagttaggaatgaa

SEQ ID NO: 39095 - DNA, 1017 bp, Homo sapiens
gcagcatcagtgtcacccagaagcttgttagaaatggagaacttaggcccacctcacacctattgaatctgaatctgcagtttcaaaagatcctcaataatctgagcagattctgattcagttggtctagggtcttcacttctgacaaactcgcaggcaatgtcaatgctgttggtccatggatcgcactttaagggacttccccagttctttacaaaatgtgggttgcaacccaatagtgggtcatgaaatcaatatagtgagttgtaactagcacattcaaaaatattttaaaataggatagagtacacaaacaattcagagtgcatttcatgtcatgatgaaggcattgttgcatgaaacttgaatcagctttttgtacatctgcacacagacacaaacacagatgtatgtagactgagttctgatgaaaacgtatttcttaatacgggtcgcagctgataacagtttgaaagttattgttctagacaagcttatctaggccagaaagaagtcctcagaagtgattccagtctagaacagagagctcagatcaaaggggttctgttaatattagaactatccagaatcccagtgaggacatccaggaaaaagtagaacagtggggctagaaagatcctctactaggggtgacagctgtgtgctgattggatgatgagatgcccatgattagtggcttgtaccagttggcattaggtttttgcatgacccaagattttggactgtgagctccttgaaggtgggacctgtatgttactcctagaggctaaaacagtgcctttcccgcagggggagtttccgcagtgtactgtgactttttatatctttcatactactcaatataccacatgtaacaaatgaggtcttttctgtctttccactgggaatcatgtattattcatctttgcttttttctagggcctactccaatatctagagatggcagatattcagtaagtttattcacttaacaaatattttatttgttattcagca

SEQ ID NO: 39096 - DNA, 1015 bp, Homo sapiens
catgctgttcttgtgatagtgaataagtctcatgagatctgatcgttttataaaggggcgttcccctgcacatgctgtcttgcctgccatgtaagactttgctccccattcatcttctgccatgattgtgaggcctccctagccatgtggaactgggagcccattaaacctctttcctttataaattacccagtctcgggtatgtctttattagcagcatgagaacagactaatacaggctcagaaaataatacctccaaatgagagcctccacagcagccttagaagaaaaagtttttctctgaccttctcttgccctcctatctctcagtcccatttttcctcaaggctaggcatagaaaccagaatccttccccaaggaaggtcatagaaagcagaacctcttttcccaaaagccagccataaatcctgaaaatattatatgtaagaactgaccataaagaaattatctgacccacattgtttgattctaggacataagactgccatttcagagagggctgtgccccacaccagaaggaaggaatgcatgttcagagaagccaagaagaatctagactggctggccctgctgggcttccccactcattctcttagctttagatcttaccctttttgtccaggcatatttctacatgactgctcatactttgttgaatctaagcataaaaatggacaatttcccctatatctttgggttttaattatgaaggctctcatgtatacacattagataaatttatatgccatttcttttgttaatcagtctgcttcatatcagtgattttcagcaaacctctaggggccagagccctggttctcacattgagctggaatattgaaggaatttctgcagtgaaatcgtatttggctgtacatatataatctgtgaacctcttaaataattaaagcataacttactaataaagcaggaaagtttagtgggctccagaaccgaaaccagttggatttaaaatcctgctgctatacttaa

SEQ ID NO: 39097 - DNA, 1047 bp, Homo sapiens
gataattttgtctgtttttattctgattcttatatctgatttgttattgtcttggatagacaaggatggtgcagaagtgctggatagataatgatagtattttgcattattccttactttaagaaattacttctaatattttatccattaagtatggtacttattacatatttccactagtgacatttattaaaagggttttcttctatttctaatttcagaagattaaaaatgaggtattaaattttagtcaatacctttacattacttattttttgtcttttgtcttttaatatggagaattggtaggttctctagtattgaaccatccttgtattcctgggataagccctatttggtcctgatgtgtaattaaaaaaaaatccctgtatctgatttgctaatatgtaattcaaggtgtatatatcttcatttataaaagttatttgtccatgatttcctttcttgtgctttctcttgttttggtattagtgctatatttgcttggtaaaatggatcagataatttcttatctttgtctttactttgaaaagtttatataacacaagaattatgtgttttttaaggatgtgataaaattcacaagcaaaatcttgagttgggtgccatttcaagtatagtcttttctgttagcttaatgtattcagtggttactgatgtgcgtgttttaaaaattctttgagctgattttgatgatttttctagaaatttgaccattttagctaagtgttcatataggtatgctaaaatttccaccttaaaatggaagattcattattgctttctcacttgccaggggcagagaaattgttctacttgacaagttaattttagctttccaccaacaaaacaacctacagagtatttgtactatatgctgctttagtttttgtggtctctcagtgaagttagttattttgcaatcaaataattatgggaaattttgcttttaaaaaaatcaagtgacaatgtattttcataatgacaccttcgattccagaattcaggaatcatagaattaaaaaa

SEQ ID NO: 39098 - DNA, 1032 bp, Homo sapiens
ttaattcctcttttgctcaatagctatattaacagtgctgagagcagggagactcctgttatgtccccagctccatttctcagaaaatatctgaccttggtagttcccataaatgttctgagtctcaattttctaaactgtagaatgagaagaagtatctgttcaaataaaaggtccgtcttagagaaattttgtgactattaaatgagaaaataatatgcaataaactttgaaaattatagagtgctaaagatatataagccatttcctttaaaagaaaatattagttcaggcactaatgttgtatacactgtattttatctcaaaatcagaataaatagacattcaggaaaaaaaagttcttaatattttaacacatatttccttgtcatgtttcaccacatgtatccttggtcatttttctaagtccctgtgcaaataggactccaaaaaataatttttttctgagtattaacatttgttcttttacaaatataattgtgggtcactgaaaggcccttagcttcctatgaaacaactaagagtagcttgaatcttctcctagaagccatatatacataagggtatggagaatattgggagttttattttgaatgaagataaatggaaaattttaggttgaaagaaaaatgagattacttattaagatcaaataaaattaatattgttagaagttgttttttgaaagctaatacttatctaaaagaaaggtcccttgacagagtaaatttgcttgagctgcagattttctttttcttttatttttggataatttcatcagatttggaaaagaattaagaattgtctctgttattgtcatttagactttttctgaacaatagaactaatttaccaacacggaagaaacatgccaaatcactgaccatagcccttgaaaggaagggtttggtttttaaaaaaattaaattagatctataagtttgagaaatttcagcatgttttttataattctttattattgtgaaattggaaaaactcatgacattgctt

SEQ ID NO: 39099 - DNA, 1048 bp, Homo sapiens
aaaatcaaacatgatcagcacagttattactttttaaagccttttgagaaaaacatgtgtgttgaagaacaggatagtggacacaaaaataacttcagtctctaagtgggtagagaattgttttaacttgataatgtgtttgaaaagaagataagacagtggtttgggaagtcactgccctctgccctgtgtggaatccaaggattattagcattacaagaagaaattgcagatgatcattactaaatgaagagattactgggagacacatgcctcaggtcaaagaagacaatggggattaagagattacaactaatacagagatgatattaactgttttcccaaggttgaatacaaaggaaataagaacaactatttctcaggctggagtagggagtggtgctggagctgaggttgcttttaaatattctttctaaatttggccccaaattctttaggttagttgtattactcaggaagaaagattgaagccatgttgatttggatactgtgtcaaaactcagtcttgattcactgtgcttgctgtccttcctcagtcactgctgttgcaattcaagtcctgaagacagggtaggaatccaacctgaggcagttatgggagagactgtaaattcccacactggttttcagagacccggagtctaaacccatttttgaccagaagaatgtgatggaatttcttacacgctcagatacttcatctgcaaaattgagggaataatgctagattattttcacaattccagataattgctaaacatgtaggtacctctcaaagatccacagcattagaagcactgaaaatctatgcggttgttcaataatattatatcttggaaatatcattccaggatgaaagttcatgaatgttttcccttcaagaaggctataacatttatgacataatttatacagacattatttatacagttttggaataatttatttcattttaaaagggctaataactttttatttaaggataataaaatgaatttacatacaaaacacttaaacatttccctaa

SEQ ID NO: 39100 - DNA, 1063 bp, Homo sapiens
tgaaaaaatagtttggaatgaaagaaattggaaaaaagatataactttatagacaaaacttcaatcattgtattttttgatcattgactcgtgaggttatattttcagaaatattttatttggtcatcttagatgatctacaaagattacctattgtgaatatgtattataattttttaaaaatatacctgagtatattttatgccattcaaatcagaatttgtaccagagagctaaatattctgtataagtgataaataccttgtccaagccatagtaattattgccattagccaagtgaacctagtatcaccttcattcattacacagtctatcatgttctcagaaaggacgcaaggacaatttagcaaggatgtgtagtttatcatgtttatagccaggaggccaggaaaatttatgcagggaaaatttggcaaagaaaatttagtgttagagttataaacacagtaattcctaacatgttagtccttaaatggattactgtaaagaaggtagtaagtttaggtcagagctataacatatagaaacaagaatgattcatatacttttaagacagtattcaaatcaatgagttactatctatttttcttcaacaactgcttacgcatgtggcaatatgagcctaagacaggtgctgatgccttagtcacttggccacacagttttgtggtttacgagtcatgggaattgcttgtcttactctgactgctaaagttctgtcctattgtcttttcatgtaatagcaacatgactctgatgacaaagcccaactaattacacaacttaatttaatagtttaaagcgcaaagggcattccctgagcagtaaaatcttttgtttggaaattttaaaacaaattatattttactttatgttttatatttacgtaataagtatttacaagaacacaattttctcaagatttaaactgctcattgttccataaataggacacacatttagaaagaggatttttttttaaaggaatattttagtgattacttctggctaaaaacatgaaactcttttagtgcttgatgtt

SEQ ID NO: 39101 - DNA, 1050 bp, Homo sapiens
aaaaatcaaatccataaaaaatgggcaaaagatttgaacaagaacttcaaaaagaaaataactgaatgataaaaattaaacacataaaaatggattcaacatcatagtactcaagaaaatgcaattgaaaaccacaagataacattccatacccactagaatggctaaaataaacaatgtctggcaattttcaaagttagtaaggttatggagcaactggaatcagatcagtgctattgtgaaatgagtttcaatttctgttcatgttaaattctattcaaagtgatttgatttatgtgataaaattgtttctggaaaatgttattcatccatgcaattacccaacaattatgtatttatagttcataatgggtgaaacaaagttgttcgtaccttcaaagagcatgtagacaagtttgcaaattaaagccttgttaagtcagccactatatagttactgttgtttatcacattttcttgaatcccaaacacatgtattgtcttacaaccaatttcaaaataaatctgacaactgattgatcttcttaccaaggactttttattaaatcaatggtacattttacagttgaggaaatgcattaaatacatatagctattatattcaaatcagccagctgttctgtctggaggaagtacattttaaacatgaaaagaaaagggtaaaagcaatgactatctcctaattgaaaaaaaaatcataggaggttatagactctcattttatttattttgtggattgggagaagggttggttctaatttctgtcacagactgaaagcagagcctttaagggatttggcgaaggggttaagagttggactgtggggtcagacagacccctgtactgatcttttatttaccaagtacttcaatgacttaaatgcaggataattgcttaccctctgtgggcctcagtttccttctgtataatgatgccagacttaatgggcagtggtgaggttaaatgagtttcatttaaaaggtgttcaagacagtgcttcacatattgtaggtattcactaaattgca

SEQ ID NO: 39102 - DNA, 1600 bp, Homo sapiens
atccagaggctgataatctctttcctaacatatttttaacttaatcatataataggaacattttcccatgttgttaaatatccttgatcattacacattttaaaagctacatactatttcactttatgggaggttattagtgcaatttctgatggccagttcaatccataaaagatttctgtatattcctcagattccttatcttttattttcactacgtattatacattatatatctgcattgtacaaagcagacttgttcttcttcctttccttccacataaatcagctttgttatatcattgacaagatcatctaagagataggaatgcaataaggacacaaatatggaggttttcttattttggctttgttcctttgagtgtcatatcccaccacttttgtgcagctaaagctatcacaatcctgatccccagctgccctcagctctcccaaggtgaaagctgataaaatccaagaggcagtgagggaccaaaggaaaacatgaacacaaaggacatataccatctaacaaaaagacctctcataactagtagaccctttcttatccaggtgagaagaaataataaaagctccttatcagtcaacttgatctggagtggaaagaatgaatgtagtctttgaaacagcttaataaagtagaatggactcggtgggaacattttagacatagcttacattctactcttaacctttcaggacacagtcactgccctctgtcaattactgccatctctttactgacaagcctgatgggttataagtccaagaatcttccagatgcatgacaaaaaaataaatctctaacactggtgtggtacttctggtggcagaaacttagggtcagaaatggaggaaaccattgtagggaaaaaacaagcataagaactactgtctatcaaacaaatttgtcattgtgtttattcttgtatagaatatatataagagtgttttccttttttaaaggtaattttaaatgggtcttcatgaaagctaagagagtttgatttcttctgtctctctatttccatatcttattttcagataaatcttctgatggattcccacctgaacctgatcctaattccagaaacacaaagcctggattctttgtgttcactacatttattctgtctttccatgagctaaggctgtaaatcccacagtgaagcatgcataaacaccaactagacgggattagaccacactatttagttaatctcagtttacaaaagctcttctttctttgtctgaaaggctgccacagaaatccagcaaacgtgagaatgtcttgcactatgggtagtgagagggtaaaaataactgcttgccttcatgagccctctctctctttgagaaactctatgtatattttcagggtgaaggatttctactgtaaatgcttcaaatcatcatcatgggggagaagagcacagcagtatttccttccaaaatgtaagcagcacaaccttccaagaaccttgatgtgtagttaaaacgaccatgaagggagcctcccctgatctctgtcctccaatttattgctctctctcatgtttgaaaggtttgttttggatcc

SEQ ID NO: 39103 - DNA, 1024 bp, Homo sapiens
tatggaacacaatctttcatttgtatatcctgcatgctgcctgttttatcctacatactccatatgggaccattgccttccaagaactggacagcatttccacagatgtccctcctgtggattgatccggatcctatcaattacacaatggacacattaaattatagaataagcctgctgtcctgtttttgtgcaaatgatatttcacagagccctctatccttctccactcatccacttcttcaggcatttgacattgatggtttatatcttggttctgctcttcttattcctttttttcttttctgctcttctcctatattttttccttacattctctctttatttttattttcctctaaattatttgtctactccttcattctcctcattttctctaatatttatttttcacctgactcaattacttctttttggcctctgatcattaaaatccaattcagagtacttttatattcttcattgaattgtgtggaatgtatctgtggaaactgctagcctgttcaatggtgcgttattctactgtattaaattataattatgactgcttcacgttcccctgcaccattaatttaataccatatatgtctagtcttacttatttttatgtttgtattctccagagtccaccacggagaagatgccctatacgtgtatgtaaaatgctgaattaaataacattgtttaaccattttgccagccacagaaataaactaacttaaactcatatgtagccctggtacataatgcagtgtctggtatatagtaggtgctcaataaaggtctgtttaataataataataaatgtctgatggataaagtaaagataagcattatatacaaagcctggcttaacatattgttgccaacataaacatattttctgtgtttcttaggttgatgtacccatattttggagcaaactggtttacttgtaaagattattaagaactcaatgggttagtcagaatttcatccagtttctaaggcttgcatgtgcctc

SEQ ID NO: 39104 - DNA, 1066 bp, Homo sapiens
atggagctggtagaagacaaatcaggcaacaagatgatattgattttagtgggagagaataagactactggaagaccaacagagatgggagatgggtaggtgcagagagaagagcaggcagagaagcattgagatactagtttcacaccacaaagatctgggttgtcttaattctctttggcctttatttcaaatatttgagtttcccagctcttagtagccaaaatgtccctttttgtaaagccagtttgagttggttgtctactgattataactgaaagaggcctattaaatatccaatgcacatttctttagaacagtaaaatagagggatgcctcactgaggctgctatatctcatggccacgctgtagttagggtgtataaagtcaattgcaaacaagaaccagaattaatgaagaacaactgaaacatgtctctttttgccagcaagtgcattatgcatgtgacaccaaaaggctaaaaacataaaatataataatcatagttattgtcacaactttgactgaacatgaacattctcaagacaaaatgcacaaagtgaactcaagcttaaaactaaagacattgattaaagaaatagaaaaataaatctgcctggctcaaaaagtaaatgaggtcagcccatttaaaactgaacattaggaaaagaaaagcagcttagactaattttaatagaaacaaaggattgtttgtgagtaatgatttacccgcaaagaagaaaaaatattaaacgtgcattgaatagcaatgaaaaatgcatcagaacatttatctagggatctcaatcctaacaggaaggtatcaggaggaagcagcccatacttgggggtagatttctaaatcacctggagtgggagactgttcaaactacatgtgctcctcttactctctttttggagcttctcatatacgtttctaaaggggtattttttcctacctcaaatcctattcttaggagacaatctcagcaagagaatagcagttattgatattaactgctgatgatgtttaatatctgtagtggacatgatgtcattgtttgc

SEQ ID NO: 39105 - DNA, 1021 bp, Homo sapiens
ttttgattgcctgtgcttgtggggtattaagaaatctttgcctagtccaatgtcctggagccttttcccattttaaaaattagtttcatagtttgaggtcttagatttaagtcgttaatccattttgattttatttctgtatatggtgaaagataggggtctagtttcattcttctgcatatggatatccagttttcccagcactacttattaaaaacactgtcctattcccagtgtatgctattggcatctttgttgaaaatgagttcactgtagatgtgtggacttgtaccaggttctctattctgttccattggtctatgtttctgtttttacgccagcaccatgctattttgattaatatggctctgtagtataatttgaagtcaggtattgtgattactccagttttgttctttttgctcaggaatgctttgtctattctggatctcttgtgagtccatataaattttagggcttttctttttctattttgtgaacaatgtcattggtatttttataggaattgcattgaatctgtagcttgctttgagttgtatggatattttaacaatattgtttcttctaatccaagaacatagaatatctttcctttttttggtgtttgcttcaatttcttttatgaatactcacttctttggttaagttaattcctaggtatttaattttatttgttgctattgtaaatgggattacattcttgatttatttttcagattgtttgctgttgacatatagaaaggctattgatgtttgtatgttggttttgaatccttcaacttaattgaattttaaaaatcaattctaatagttttgttacagagtctttagttttttccaaatgtgcagaccttatcatctgcaaacaatgatactttgacttcttcctttccaatttggatgccctttatatctctctcctctctgactgctctagctaggacttccagtactatattgagaaacagtagtgacagtgggcatccttgtcctattccag

SEQ ID NO: 39106 - DNA, 1030 bp, Homo sapiens
cattaattgatttgtgcatgttcaacgatctttgcatctctgcgataaatcccacttgatcatgatggagtgatctttctaatgtgttgatttctgtttcctagtattttgttgaggatttttgcattaacattcatcagtgatattgacctgtagctttcttttttgatgtgtttttctagttttggtatcaaggtaatactggcctcatagaatatgtttggaagtattccctctttctctacttttcagaatagtttatgtagaattggtattagtttttctttaaatatctggtaaaatttagcaatgaagccatcaggtcttgggcttttctgttctggaagactttttattacagtctcaatcttgttgcttgttattaatctcttcaggttttggatttctttatggttaatactggtaggctgtatgtgtctagcactttattcatttcttctagtttttccaatttattggcacgtagttgctcatagtagccttaataatcctttgaatttctgtggtatcagttgtattgtctcccttttcatctctgatttaatttatttgagtcttctctctttttttcttagtctggctaagggattgttgattttgtttatcttttcaaaaaaccagcttgttgtttctttgatctttcatattgttttctttgtttccatttcatttattttcactctgatctttattatttcttttcttctactgattttgtgtttggtttgctcttgcttttctggttctttaaggagcacatttaggttgtttatttgaaggctttctacttttctgatatatgtgcttataggtatgagctttctcttagtactgcttttgccgtatcctaggttttggtatgtttggtttccattgtcatttgtttcaagaaatttctcaattttcttcttaatttcttaattaaccaatagtttccagaattcctcttgttattattttctggttttattccattgtggccagagagatgcttgatataatttcattt

SEQ ID NO: 39107 - DNA, 1053 bp, Homo sapiens
gtgtacttaccataatattaacagtgaggtttgtacctttaggtaatttatatttcctcattaatgtctttttatttcagattgaaaaacttcctttagcaactcttgcaggacaggtatggtgttgataaaatctcctaccttttgtttgtctggaagagtctttatttcttcttcatgtttgaaggctattttcactgggcatattactctaggacaaacacctctaggttgtttatttgaagtttttctatgtttttgatgtaggcacttatctgtaaactttctgtaaacctagctgtaaagtttcctcttagtactgcttttgctgcgtcataggttctggtatgttttgtttccattgtcatttgtttcaggaaatttttcaattttcttcttaatttcttcattgacccatagtttccagaattcttcctgttattgatttctagttttattccattgtgttcagagaagatttttccttcagcacttgaaatatgtcatgcctctctctcctggactgtaaggtttccactgaaagtctgctgccagacatattggtgctccattatatgctatttatttcttttctcttgccaccttgaagatccttttttcatccttgacctttgtgagtttaattattggatgttttgaggtagtcttttttgggttacttatgcttgttgttttataaccttcttgtacctgaatattgatatctatctctaggtttgtgaagttctctgttcttatccctctcaataaactttatacacctgtctctctctcttccccttttcatagtcaataactcttagatttctccttttgagactattttctagattctgtaggcatactttttttggtcttcttttcttttgtctcctctgacagtgtattttcaaatagcctatcaagcttactaattctcacttctgcttaatcaatcctgctgttaagagactctgatgcattctacaatatgtcagttgtgtttttcaactcccgaattgctgcttgattctttttaattatttaaatctc

SEQ ID NO: 39108 - DNA, 1048 bp, Homo sapiens
gaaaataaaacccaaaactagcatttatgttagagagtaagcaataagctatttacttatttgcttttaaccataggacaagaggaaaaagaatggaaaatttgaatgtgtttttattaatcatgtactggctaatattttaaataaactcgtaattttgactgataattttagaatttattttgccaaatatcaggaaatacttttttcaaaataaaaaaattcaggcaagaagctgtatagaccttgccaatcccaatatcaattacttaagaataccgtttgttacttattcaatgaatattttgtaaatattaatatttaaccaaaataatcatattcatattatctgctcacaatcttttctgtgctcgcattaaagaaaatttcttgcttttcaagtacagatgaattataataatttctatatggaaatgattatcatatggtgtttgttgcctattatagaaatgtaaatattatagtaatagaataatgctttttgggacaaaactctgaaactacagatagaaaaagaataaagtacaataaaacattaatattgaaggaattgtttgtgggcatgtgtgtatttgctgccagcatacttttaaaaattctgtattcctcattttaaaatatacatttttaatggactaggttgtaaggcagttgatatggtttggctgtgtccccacccaaatctcatcttgaattcctaggtgttgtgggagggacccagtaggaggtaatagaatcatgggggcaggtctcctgtgctgttctcatgacagtgaataagtctcatgaaatctaatggttctataaaggggagtttccctgcacaaactctttctttgcctgccaccatctatgtaagttcctccttgttcttccttgccttctgccatgattgtgaggcctcccagccatgtggaaatgcaagtctgttaaacgtctttcttttgtaaattgcccagtttgggtattctttattagcagcatgaaaatggactaatacaatagatattgatttttaattatttat

SEQ ID NO: 39109 - DNA, 1076 bp, Homo sapiens
ggtatgcgactttcaccattaactaagaaaccataggaatgacttttaaatatataaaatatattaaatatagtaaaatgttataaatgtttctgatttgagaaagcatgactttaaacattgataaaaatgactgtgctatattgtatatgtctacgttaaaactgtcttaacttctaatcatgagttaataccttaaggaataatacgtcctcattgtgagattcattgataagaattgtggctgtctattgttaaaaataatgaaggtaaatccatatttcaaatagtgttcttttaactaagatctttttctacatgactatgtgatctttctttcacatataatgtggctgataaaaaatgtataataggagctagcacattagctgtcttttatctggtgttttgcttgtgcttgagttagcattttttaatctgttgggttatttgcaagatttttaaaaatctacttgacattttttgagagcaaattcatttgaaaccagagaatctcttggttcttttaataggaccccccaaaacaaaatgtcagaatacagttgacccttgaacaatatgcatttaaactgcatggatccacttatacctgaatttttttaaatagatatattggaaaagtttttggagatttgtgataatttgaaaaaaacttgcagacaaaccatgtagcatttttagtattgaaaaaattaagaaaaagttatgtcgtaaatgcataaaatatatgtagatactagtctatacgttaattgactattattgttatttggctaaagcttccggtcaacagtaagccattggtagttaggttttgggggagtcaaaagttatttgcagattttcaaccgtgcagagggttggtgcctctaaccttacatccttcaagagtcaacagtacattggaaacaagcacatgagaaagtgtattgttgtagcccctgttatgttttgaaagtagctcctctcttaccttgggatactttgcccattacatgtggcagagggttctgatacagactgaacgagggggaatgtctacctatgcaacaaag

SEQ ID NO: 39110 - DNA, 1028 bp, Homo sapiens
caggaatgaatttccatccagatagttggatataaagagtataatgtttaaatttttatataatttagcttactacgtatttgtgttctctttatgttacaataggaaggaatatttatttccattaatttgggatttcctctccatatttccttagggaatgtatctaagatttctgagtggctgtgtagtaccacagcattgattggggaggggatacgtgtggtctctgtgtcatatttccatggagatatcatttgggatacccactttcctaattggtcttaggtaatccctctacatggtctgctgcagggatgtcctcagctccctgggcataattcctttggccatgagggctcttcctggcttctgcatcactcacaggaaatctttctgcttccatctaacatgctgacacattgacatctgtctgaggctatccatggtctcctaaacctttctaggtacttgacctcctagagatagagagagagagagagagagagagagagagactgattattgacttgtatgtcaataaacacctctcagaataagcatcaatagtttgtgtttcctagagcctttccgggaaaccagacactgtttgtttcagtgccctataaaactatgttagatccttgtatctcccttaagctctcctctgggaaacagggaaaaagactctctctctaggatccagggaggatttgctctccttaaaaattctttccgtctatctccatctcctctgctggaaaatctttatccaccccctagcagaagtcagattatcttaaatttaaaaagtgtcttggccaggcacggtggctcacatctataatcctagcactttgggaggctgaggtgggaggattgcttaagctcaggagtttgaaagcagcatgggcaacatggcgaaaccttgtctctacaaaaaatacaaaaaattagctgggcgtggtggcacatgcctgacatcctagctacttgggaggctgaggggggaggatcacctgagcctg

SEQ ID NO: 39111 - DNA, 1027 bp, Homo sapiens
aaaaaaagggccagaagaaaaaaagcataggtaaatatcacaaaaatatgattctaccacattttagtttccactttctacgtgagtttctgctatctgagcctttagaaaagaaagttaaggtcttttctatattttctaaaatgttcttagcattgaacaaaatagactcattcatctgagtgatgggtttctaagcatctcgtctctctcctctttctttttcatactacttccttcattaaaaaaaaaaatccccatcagtgtatgggagaaataaagtaacatacagctaaactaaaactcaaatcattagtatttttttataatataagcttaatatagatgaagatagattgctggcatggtttgctatattctgtgttatttttaaaactaaattatctgtgatttttctgagagttgtttgtaaacacacaggtcaataagtctcttctctctcttccccgcctttcacttttacctttcctagaagggcaaagatttcctactgtaagattgcatagaatctatggccagtatcaaaagttatgattgaaatgctcagacctaaagggcaactattacaagctttgcttccaagggaaatcagcttttgacagggtaatttaagccaaaacaaaggtcagactgtcagagatacacgtatccacttagggacggatggattctagacagatatattctagaatagaatccacaactctaatgtgttcatggctgaaatttttcagtttcgacactctgtctgactgagttttgttactaaattttttcaacatcctactccatacaggaactatcagtcaataacaggtgacacgcaaggtgcaatttatttgatatccttgactagtggttaaaaacgtgggttttggtatcagattgcctgggtttaagtcccaactctacagtttagagactgggcaaaacaatttggtcaagacgtttaactttttatgacttctcaaaaagttattttaaaaattatgtaaaatattcaatg

SEQ ID NO: 39112 - DNA, 2615 bp, Homo sapiens
attgatcatcctctgaaagacttgcttatgtaatttatccaacaaaaagaacaaaggaactcaagaaagaggtaaaaaatgagatcaatgaaacagagtacttaatatattgtgtattgtgattatgtagcagagtatctctgttttataggaaatataaactaaagtattcagaaatgatggaacaagaagtcagcaactttctctcaaattgttcaggaaaagatgctttgtattgtatcttcaccttttctgtaactgcatgattattttgaaataaagataatttaaaaaataaaatggagggaagaaattgtaaaagataacaagaaaaaaaaacaaagtcacctttcagtgagttccacacccttctatctgaaattccacccccgttctccattcctcagctcaccttcctaatatcaatcaacaatcgacttattattatatatttaatagtttatgtttcttgtcttttgcctctgactcaacaactggtataaacctttcatgaggaactctgttcactgctatatttcctgaacatggaacactgccaacacatactgacttcttgataaatatttgttgaatgaactgaaaaccttattattacaaacagtagcaataagtaaaatgtcactcttcacaaaatattattactaaaactgccactactcaatactgcttattattagagattaccacatttcactgcaatttttacatcgaaagaaatccagttaaacaccagttgtaagattattgtcccctgggatgttcttgaaattaagatgtcttttgtaatctatccaagggaaaagtattttaaatgccagttttcaattttaagagtattgagaaggtgatctgacacatcattctttttaatgaacaaggtataaatcaattttaagataagtaccaaaaaatttttaaaaagaaaaaataatgccagaatatcagttatgcagttggtctagaatgcaaattagaacagggagtatgagggctccaggaagaattttgtcaaggagaaaaataatttcctatcataaaacatatgattaagaagctacgtgaccttaatgacaaggtgaacccatagcattatgacaataaatgaagaaataaaaggattatgctgcccccacccctctattcattatttatgtgctctttccaacagcaagttaatgacaaggaaaccacctccactcagtgtccaatcacactacttgattctgcagggaactacatttaaataactataatattgtaaaagctggttttggatattttcttgttttttgtttgtgttaaactatagacaaagcagagttacttttagctataagaagacaagtgttataaaattgtgcataataaaatgtgagataatgcctaaaatggataagtcaagaaataaaggttatattttatttgaagacacagatgagcaaacaaaaacacttaataaataaaaatatgcctcttagagcctgggggtgtgaaagtgtggggatagggaggcgaaaaagcaatttaagtcagcaaaattcttcactcttcacaatagaggtagtagtgagatctagttttaactgataaataaatgaatgaagataaacatgatggatataaccaccaaaagaaacagaaatgtttgtaactgattatcagaaattaggagtatgattgagagcaaaggacagtttatttttaatctcgaatcctctcagtttggataggaaatgttaaattacatacgatgcacacagaaaaatgtcaggcacaatgagcactggctatgaacattggtttcccctacaagtggaagggagggatagtgagcaaaggactttgttacactcttcgttaaacaattttcaattacttttattttgcaatgagttattttgtttttgaataaaattatatacaatgatatgtatatgctattatagaataagaaggggaacaggcaacagacttcaatgctgcagtgaggctaaatcagataaagaaccaagatttcattggatttggtaatttggaggagacctaatgagtgtaattttcgtagagtgtagagacagaagtagaattgcaggggaactctctcctcaatgagaagtgaaaaggagtaggggcagcaggtatgaatataagctaatttaaagaagttttgatgaacaaggaaacagagagcatgtggaagctaaatagctgatatttaaagattatggttacctaaagatcacttagattgtaaaacagggtgtgtcatatcttataaatgaaaggatcatgatatacaaagagcattgaatggtcatctaaaggttttccaagaaaagataatatctgtatctttgttctccttttcattttggatgaggcaagcatcaaaaacattttcttggaggcttattttacaattttaaggctcttcctatctccctcccctcagcccaccctttcagaaatgccttttgtagacactcactacagaggcttctgaatctattaagacataattatgtttctatatggtaaatgtttgaggcatacttgactatatccttctacccatacatatttctaaaaatgca

SEQ ID NO: 39113 - DNA, 1775 bp, Homo sapiens
aaggaatgcttggttaaggaaatagccttcaggaactctcagataggtatggttaagtgctagcagtggtataggaaaatactgagtcaacattgtacatttctaaggagagctagtgagcagttatacaagaaagttatacttgttatcagttttcaacctccttccactgcagagtttataaagattaacaagaatttagcaactatttattgaacacttactgtgtaccaagcactgtgccatgtgctggagattacaaatagaataaaatgtggctcctacatcgtgagtctcatgaggggcttatttgctatattgtggattctgcagatcatagaatgtgtaaaatcggttggccccaacatagttaacaatttaaggacatcacttctttcttttctcataatgtgtgaaacttacaaggtgagagttttttttctccctcatcgctatgttttatttctccttttctttggtgtcatgctggcttttatcaaattattaagaaccactgtttgaacttgcaattatgacactgttaaatgccattagctcatcttgtttttaactacctaaaccaataaatctgacatagtctgtggatctaggaacttgtaaaatctctttatttctatggatttgaaattcaaaaaacataaaaaaaaacacctttctaaatgtctttgcatttgccttctagttccctagcaactgtgaggtagacagatggcaggatggcctcagtttggggccatgttcatatgatcataaatcaattattttttaaaaataaaaaatatttcttgagagctatacctagtgatagaaactaaaggatgcttttttcttctttgtatataaccttaatgcttttctgtaggtgttctgattacttcccaaatagccactaatatgtctatatttttgttctaaattctttgtctgatatactgactttagttaagagaaaataaaagtaataaggatagataattttctttcatcaataatatctataccttttttctgagaatcgctatagctagaattgaaagcaaatatcacaggctctctttagcacttcgaatggtaactgataacatgacttaatttgtatcttattctctgtctctgtctctctttttcctcttcatctcagagaccatctggcaggaaatattgttaaattgccacatcctcatgttatttatagtaaagctctaacctgtagtcatctggcttggtatttgataagtaaattccaattttgagacttccaggaaaaaaataaccaatttctctaataaaaattttacctcttacatatcaaatgctcttgctttcatatcattgccttttatggacttaagttaaatctatcttgaaacccagccatgaaatgtcagcaatgattttaaattctggacaatgtctgactttccctttcctgatgcaatgacccttgggctcctggactaattttactggtggaagaatttttggggaagggatgttaaaaaaatgaggaaggaaaataattaggtaatatttcaaaataatatactactacataaacccatgccttataatgttgggatagaaagtagaatataatattactctatataaaggaatcttggggcctctgtattagttatctaatgctgtgtgacaagtcagcccaaaacttagaggctaaaagaactgaacatttattatcttttatggttcctgtgagtcgaatttgggagtagcttggctgggcagttctg

SEQ ID NO: 39114 - DNA, 1045 bp, Homo sapiens
tcattgttaagtattaaatgatttaatgtacatgtgatataatgatataatgaaaggatgtaggtatgatgagcctggcacattgcaggactctgtaagtattaatttcattttcattttaatctttactactgcctgtaattttaggatttatgactctggtccaatatgggccacccacctgaaggccttctagtcaatctctcatagtctttgtacactgacaggtggaagctattagggccaaattatatgcttgaaaatgaataagtttatgcttattgtccctaattaatttcttcttccattaaattattataatgcttaggattaattaatttactctgctaaatttaccatagtgaaagaattctgtgattgctaccacaggaaagctctctagtgaggttagaagatggttaggcagttttgtttgcttaagaaaaatgagcaagaaaattttgcataatgccttttggagcagtcttattcttcataattgcctgagatatttcaaggtgctttgctataaatctgaagacttaaaaacattgttttacagtctggcccactaagaataatgacctctcctgttccttgtttttctgggtgattaagggtttcctgactggccccaggccatctgccatgactatttttttttcttcagatttagaaccataatgtcaaaaataatctcttactctgagagattttgctagccccagaagatagaaagtgtttgctgcgtgtgctccaacaccacatgaaaaattgtgcaaatgatggttcttgttgattttataaagcagtcccatcatttatgctccttaaactaaattaggtgtaaattatttcaaggaggctaaagttcttccctgtgttcctatgaggataatttcacaaatacacagcacgtcccttcaaccacagattttgggcagagagaaggaaacaagaagaaggagaagaagagagctatcgcctggggccagtgcacactctccacagggggtttccagcatgtgggtgatttctaaccaag

SEQ ID NO: 39115 - DNA, 1073 bp, Homo sapiens
tctattttatcatcatcattttcagcagcatcatagctctgtggtcattattcctatgcttcttatatattcaattatatattcatgttccaggctcatgaatcagtgcaattgattaaatagcaagaagttgctatctaactgcagtattggtttacaagatctgtgcagtgtcacagcttggggtgttggtgttacatattgcctcaataccagtagctttaaccactcctttatattgtccctacttactactctaaatattatgttctcaaatgagctcgttatcagggcagacattcaacacatgttcttgacaaaagtttgaaaccatttatgtttttcataactgcttagaacagataagggtaactagtaagaattacacggtaaccttcatgtaactagtaggtaagactgaattcacggagaccatcccataatatccctttttctgaggaagtaaaaagccccatgacttttcagaaaaattgtgaaagtggaaatggcagcttttgaagctccaatagaagaatcataaaacttcagagttagaagggcggaaactcatgttagaatctggaggcaatttgtgtaggcacttttagtctatcttgtgggaacattgtgtgtaaataagacctcccctagcaatttccattactgagaataatttcaacaaaatcagtgacaatggtctcttaatataggttttgtgtgtgtgtgtgttatggaaaatgaatgcagaatttgggaaaatttttatattgtcaacacatagagatttactaactaaagttggttgtcattcttttatgtattttgataaaatataactttaggtagagttcaagcagggagaggaaaatacttatattcctcacaaaactatataaatagaaagtaatgatgtgatcccaggtaattaatatcttttgatatctcaatttacctattgacagttaaataataaagtgtcaggactatagtttacattgttcatttaaacatttattcaatatttgcttgtcaaatatttgttaagttccctctttggaaaagatactggatta

SEQ ID NO: 39116 - DNA, 1035 bp, Homo sapiens
ctgttttgcttagtgtagccttgtagagaagcaagagcaaacaaattcaaaagctagcagaagacaagaaataactaagatcagagcagaactgaaggagacagagacatgaaacccttcaaaaaaagcaatgaacccaggagctggttttttgaaaagattaacgaagtagatagaccacaagacaggctaataaagaaaaaaagagagaagaatcaaatagacacagtaaaaatgataaaggggatatcaccactgatctcacagaaatacaaactaccatccgagaatactataaacacctctatgcaaataaactagaaaatctagaagaaatggataaattcctggacacatacactctcccaagaataaaccaggaagaagttgaatcactgaattgaccaataacaagttctgaaattgaggcagttatagcctaccaaccaaaaaaagcccaggaccagacggattcacagccgaattctaccagaggtacaaagacgagctggtaccattccttctgaactattccaaacaatagaaaaagagggactcctccctaactcattttatgaggccagcgtcatcctgattccaaaatctggcagacacaacaacaataaaaaagaaaatttcaggccaatatccctgatgaacatcgatgtgaaaatcctcaataaaatactggccaaatgaatccagcagcacatcaaaaagcttatccaccacgatcaagttggcttcatccctgggatgtaaggctggttcaacataggcaaattaataaacataatccatcatataaacagaaccaatgacaaaaaccacatgattatttcaatagatgcagaaaaggccttcgataaaattcaacaccctttcacgctaaaaactctcaataaactaggtattgatggaacatatctcaaaataataagagctatttataacaaacccacagccaatatcatactgaatgggcaaaagctggaagcattccctttgataaccggcacaagacaaggatgcctt

SEQ ID NO: 39117 - DNA, 1030 bp, Homo sapiens
tcatcagtactgtttttcatttgggtggacctcctcagctgtgatggtgttggaaaaaagcatctgtagttgtgcaatcatcaactgaaagctgctctgtttccacgtaactatatgtctttttgagaccaaatgggagatgcttaatgttaataaataagcagtttctgcataaataaagaccaggccctgaaatatatagacttgattattttttttctgtcccaagtcaaatggattcataaaacaagcgataaagctgtgaattatacacttagttacaaatgcattcagaataaatgtggtttctatttgtaaatacaaatactatagtgctatgggactcaaccttaatccattacagtagagaaaaatacaaatatatgacccttgtgcataaaacacattggtaccaaagtactatagcaatggataacacatttgtttttgtttttaacgccaaaaatgtggttcaaagtcctggaagacgtggtcaactcacctcttttttggccttctgcttaaccctgcaacctttaatattcaatgtgaccaaataggtacatcacatggtgattttcatacaagctgcatatatttgcatgcttttaagaatgcggcctcaaggccgggcatggtggctcacgcctgtaatcccagcactttgggagactgagggaggcagatcacctgaggtcaggagttcgagatcagcctggccaacatggcaaaaccctgtctctactaaaaatacaaaaattagccaggtgtggtggtgagcacctgtagtcccagctacttgggagactgaggcaggagaattgcttgaactcgggcgacggaggttgcagtgggccaggatggtgccactgcactgcagcctgggcgacggagcaaggcaccctctcaaaaaacaacaacaacagaaaaaaacacaaaaaatggcctttaaaaaagtagtggtgctatctttttttaaaaagaaaatgttttatacttctatgaatgcagaaactgaggacttttacaa

SEQ ID NO: 39118 - DNA, 1035 bp, Homo sapiens
tatctgcagtgagttttgacagacaaaatttatcagacaaggaagttctcttctattcctagtttgctagtagttttcttaagttataaatgtgtaacaaattttatcaaaactgttctaattctattgaaatattggtttttatcttttaatgtgttattgtggtgaatcatactaatagcttttccaaagttaatcatccttgcattcctgggttaaatgtatttcttaatatattactgatttatctttttgctaagatttttatttataatttttatctagtttataagtaaaaccctataatatttcttccttcaattgtctttatgtagtttttatgtgaatgttatatttataaaaaatttcaagaacttctctttcatcttactcctcttaagatctctcctctttttcacatttctgcaattcttctatgatgcctatgttgtaaattaatttctttttcctgcttgtactttaggaatctgagattttatatcttctgttgaccctggaaaattctaaaccacttaaaaaagtattgcctctcctttgttctttctgttctttccatttggaactcagcttcagttcatgttggacattctaattctatccccaacttctcttaatttctttttagtagtttccatgcttttattctctgttccaagttctagataatttccctaagtctatttttaatttaataattctgcctttggattttatgtatttgattattttaagatatcaatttttcttgcataaggtacaataacagtattgcatcattcagtttcctggttttgaccattgtattatggttatgtaagttgtgaacattatgggaaatggggtaaaagatatgcataaactccctacattatttttgtaatttttctggaagtcaaaaattatcttaaaataaagaaatgctgattttttcaattctccttcagatattttgttctgttatctcatactcgtgagcataatgttgctatgtgtactttctcactttggctaatt

SEQ ID NO: 39119 - DNA, 1047 bp, Homo sapiens
acacatatgttgtaaaatgatcagtttgggatgtatagcatgagcatcacctcatgaatttatcctttttttgtgatgaggacattcaaaagcttctcttttagctatttcatagtataaaatatttcactgttagccatcatcaccctactatacaatagaacaccagaagtgattcttcctatttaattataactttataccttttgaccaatctcttcccgtccgcctttctcctctctctcccttctccctggtctctggtaaacactgttctactctctgtttctgtgatatcaactactcttcttttttttttaagattccacatatgatattatgtggtatttgtttttccttctgtgtctggcttatttcatttaatgttatgtcctccaggaccatccatgttgtcacaaatgataggatttcattctttttatggctgaataatattccattgtgaatatatatcatatattttttatccttttattcattattggacacttagctggattccacaccttagctattgtaaaaactgctgtaataaacatgggaatgcagatatttctttgacttattgatttcatttcctttggctatatacccagtagtgggattgctggttcataaggtagttatatttttagcttttaagggagcttccataccatttacatagtgcttttactaacgtacaatcccacaaacagtatgtaagtgttcccttttcacagatcatcatcaccaacaaccttgttcttttctctttttgataatggccattctaactggattgaggtagtatctcatgtagttttgatttgcatttctctcatgattagtgatggtgagcattttttcatttacctgttggctatttgaatatcttcttttcagaaagacctattaaggtgttttgcccatttaaaaaattgggttatttggtgggttttgttttgtgttgctgttagttgtttaagttcctgatatattttgatattacctcttgttggatctacagtttggaaatattttctc

SEQ ID NO: 39120 - DNA, 1016 bp, Homo sapiens
tgtcattttgtttttatcagtgttttgaacattgtgacatatttggcaggctttcttggaattaagattctaaattaggtatttttgacctaaaattgactttgggatctttccagttgggcccttcaagggcctcaaaggatgtatctcttattttgtagagatattaaatgagtaggcttatttggtaaattacatgagaaatacttcaaatgacaggtgctactggattttctttcatttatgtttatgaatatgttattaatatgaatgtttcaaaattcaaatagttccaaaattatattttagaaatctagtatgtcatcagccataattccagttattatgttgcatgccaaaaaaatgaccacattttcttatcaatttctggttatggtaaacttccatcagatttttaaccataattattctaagcttttgtaatctatagttaatgttttgaattttttctaaagagacctgcaactggattcatggaaaagactctaacaactactgttaaatacaggtttcaaaaaactttaagataaatggactaaataagaagtttccagaagtctcataaagaaactggggggcagccaagatggccaaataggaacagctccggtctacagctcccagcatgagccatgcagaagacgagtgatttctgcatttccatcttaggtaccgggttcatctcactagggagtgccagagagtgggcgcaggacagtgggtgcagtgcaccgtgcgtgagctgaaggagggcgaggcattgcctcactcgggaagcgcaaggggtcagggagttccctttcctagtcaaacaaaggggtgacagacagcacctggaaaattgggtcactcccaccctaatactgcgcttttccaacgggcttaaaaaacggcacaccaggggattatatcccgcacctggctcggagggtcctacacccacggagtctcgctgattgctagcacagcagtctgggatcaaactgcaaggcagc

SEQ ID NO: 39121 - DNA, 1031 bp, Homo sapiens
cacagtataatgtaaataattggaattgggatgctttacctcagagttcttgtgagaatcaatgaagatagtgcatcaaaaatgtaccaaaagaatatccacctttcatagattgttcatattgtttaaattcccaaacctccgttttctccacatatcactagaacattattaaacacctatataacaatctattaaagatttctgcattatataaagcattaaaacaccacattactagttatttaacatttagtgaactgtgggagagtgtgcagtacacaagatagtgaatgttaagtattgtgtataaattgttcttcttactgcaaagatcacttgccaccatgtaaataacaaaataaatcatggtaaagacactatctaattggatctaagttggtagtgccctcaggtacctggcagaagcaaaggatggggaagatatgtgcaataatataaataagagtactacatatgattcttgagtggagattgagatacgactttagctcacttcacattttcttctgcttggattacatgtactttaacttttttccaaggaatgttcttgtagattagggcttttgttggtttggatggtgattttgagtaaaatacttaacaaagtgttattttatatgacatatcagagcttgtttatacatatatgtaatccgataatgttgatatatatattatctgaagatgagtacatatgttttgcttatatgtagagcttgtttctgtaaaaatgtacaagaaggtgtcagctatggttgactgggggatgagatggggaatatacttatttttgatagtttactacccttttgtaaactttgttgttttatattcttattttaaaataattatagactcaaaaggtgcaaaaatagtacacggtttccgtgtatcctttacccagctttccacaatgctgatatcttacataactatatttttttaatagactttaaaatttttcagtctgcttatattacctattttaaataattttttaaaaa

SEQ ID NO: 39122 - DNA, 1068 bp, Homo sapiens
ggacagagaagtactagtctagatacagatttatttgatggtcttgtggaagcctagaaatgtgcatgtcttggcattttctagggcctttaaattatcttgcaattataaacattccaacaaatttctacactattaaagtcaatgtaaatatttttctgtgggaaaaacaaggcttaagatattgaagaatatacacgtgttttttacatttaggatttttattaataaactgtaggtttatttacttaaaatagtagataagtttttttttaaaaaaagagatattctgactaataccgtcagtctttttacaactaaaaatctcctttttttatttgtgccacagactattattttgaaaataatctacttaacaggttgttcagcataagatgactagttttagtctcaaatgattataattccagtccaactataagaaatttaatgttgcagtggatttgtcctagtttatagttgtgaaatgtctgatttataatagactttttgagtctaatatagactcaagaatattgtttaactctttaattggtattgtttaactcctaatttagataactaaattgtctaaaaatttcaaattcgaaaccattaatctggacacttttggtttacaatagaagaaattaacatctagaggtaactaataaaggcaggtttttagaatctaggcatgtttcatattcattgagataagactgtttttagagaaatctaagactataagacaaaagattccctaatcacctggaaggtgatttccaatttggaaaattgggttttataaattcagtcttgcatattatgcacccaggactatttaactttttgttaaggaatgatgttttatttttcatagatataatatgaatcttatttttttccctcttacaggtaattctaaagaagagcagaggttagaagtcaaagaacatattcttgaaagttatgatgcattcttttgggtggtaacagatcataaagacattttttacacatcagttaatatgggattattaaatattggctataagtgatgtgtgt

SEQ ID NO: 39123 - DNA, 1105 bp, Homo sapiens
agttgagggtaaacactgatgaattacgattttgatttaaaccgtaatctagaggacttccattagtttgggatgttaagatatgttatgagaatcccaaatatagcagcttaggtaaaatggggaagtgggtgatttaggttttctgtggtggcttaactatttcatcaggctactgggctctttctgtttctcagtctttctgtgaaggcctttcttcgtctttgtgcctatccctctagttgaaagataactattgcatatccaggtatcacctttatgttccgcactgggggaataaaatgagaaacaggaaaaggcagtgcctgcatcaggaaggaaaaagctttttatcttattgacttgtatgtgtcatagaccaccattagctgcattggagtctggagagagtgaggtttgttttattttggttttggctgagcacagtaaaggttctgtaattaagggaaggagaagcagacaccgggtaggcacttctgagaaaaagttgttctgtagaacccattgattcttcaaaaatattaaactataaaattaaaaactttaatgtattggattggagtacttttagttgtttggatactgtattaggacttttttttttttcagtaggcttttggggaacaggtggtgtttggttacatgaataaattctttagtggtgatgtgagagattttagtgcacccatcacccgagcagtgtacaccatacccaatgtgtagttttttttttttgagttggagtctcactctgttgcccaggctggagtgcagtggcgcaatctcagctcactgcaagctccgcctcccgggttcacgccattctccttcctcagcctcccgagtagctgagactacaggcgcctgccaccatgcctggctaattttttgtgttttttggtagagacgggatttcactgtgttagccaggatggtctcaatctcctgatctcgtgatccacgtgactcgcctcccaaagtcccaatgtgtagtcttttatccctcaccctcctcccaccctttccctcaagtgcctagtccattgtattattcttatgtctttgtgtcctcatagcttagctc

SEQ ID NO: 39124 - DNA, 1034 bp, Homo sapiens
ttttatatttcacataattgagatcatgtgatacttgtctttctatggagtttttccctacattctaggagttttacagtttaagtttttaatccattttgaattgatttttgtatatggtgtgagataagggtctaatttcattctgcatgtggatatccatttgtccaaaaaccatttattgaagaaactgtccttttcccattatatgtatacttgaaagctttgtcaaatatcaattgaccataaatgcatagatttgtttataggctctctattttgttccactagtctatgtgtctgtttttacaccaatataatgctatattgattactatagttttgtagtatatctaaaagtcaggtggtgtgatgcctctgtttttgttctttttgatcaaggctgctttggatactttgggatcttttgtggttctatacaaattttaagtttgttttcttctatttctgtgaaaaatgtcattggtattctgatagggattgcactgaatctgtgatagctctgagtagtattaccacttaaaaaatattaattcttccaatccatgaacacaggatatctttccattccaggacttgttttaaaagtgttgtaactagtgccgtgtctttggtaaaaccttgctcaataattgctatgccatgtcccaagcattgttcttataaaatgaaggaattattttatttcatattatatttttacagacaaaacaataagaacttagtcccctaaatgctgaatattaattatatagtgcacattgttataagtttctgtaacacatttaatttgtttggttttattttgtgagtgacaatgactgcttaaactctactatggattgatcaaagatagtgaaacgtgatgtttacaattctccctcaatcaacatcagacttttggtaaaatacataaaactgaattatttctttcataaaattagattcaacttatacagtttgaatttagaaatcctttacaggggacatgactgattatatgtaaacattaa

SEQ ID NO: 39125 - DNA, 1072 bp, Homo sapiens
gagaagtaacaataattaatatcagaactccattgtataaaataacaatccattttgtgcctttctatttaagtttaaagttacagattttttaaagaaatgcacttaaaggcacaaagacaatacataatacctcacaggcatatttacatatggaatataaatagaaaaacattactggtccaagttaatgctggggaggaattttcttccttgggctttatgtttttaagtctaaggacctccagaggtcaactgcttgcttttctctccccacccactcatttctcctaaagggaacaggagttcattatctgattgatttgagaagaaagagttttcctttgtctgcttagcctctccctttgttttctttgcaggtctcagaaagaatgcccatgtgctgtccttcacatggtaagtttggtggagcatgttctgttgtcagaagttcaaatcaggggagagctagcaagccaactggcaaggtgcaaggcaggtcactttttcatctgctgtctaacttctttgtcttccacttggttctcaactcagctggggaagaggaggtttcttcctgggccccttcagaacctggtagttaaaaaaaaagttacctgctattcagcaacatgagcctgatagtttagtatctgcagagggttagaattttttccacattccatcacattaacaccagaaggacatgagatcaccttctttattaaaactaacaaagaaatggacaaaaccagcattcacctctacgtaaaggaaataagagataacatgatcagggcaaagtcttcaattctgtttgtaatgtttacttgattaagctcaatgttgcataagttaatgttgattatgttattcctaatatattttcacttgtctgacatatggtttaacaggttttttaaaaagatgaggtgtaactgaacttttaatatggaatgctgttacagaaggggaaaattggagaaggactttaaattttttaaagctcaacatttctgctcccaagattttctgaaaggaagatttctgaatctatattatagcaaaccgc

SEQ ID NO: 39126 - DNA, 1030 bp, Homo sapiens
gaacaacctgttcctgaaagactcctggttaaattatgaaattaaggcagaaatcaaaaagttctttgaaactaataagaacaaagagaaaacataccagaatctctgggacacagctaaagcagtgttaagaggaaaatttatagcactaaatgcccatatcacaaagctagaaagatctcaaattgacaacctaaaatcacaactaaaagaactagagaaccaagagtaaataaaccccaaagttagcagaagacaagaaataaccaagatcagagcagaagtgaaggagatagacacaaaaataccctcaaaaatcaactaatccaggagtttgttttttgaaaaaattaataaaatagacagactactagctagactaataaagaataaaaaatagaagaatcaaatagacacaatcagaaatgataagggggataataccgctgatccaatagaaatacaaaaatccataaaagaatactataaacacctctatgcatataaactagaaaatctagaagaaatggataaattcctggacatatccaccctcccaagactgaaccaggaagaaattgaatccctgaataaaccaaaaatgagttctaaaactgaggcagtaatgaatagcctaccaaccaaaaaaagtccaaccagattgaattatagcttatttctaccagaggtacaaagagaaactggtgccttttctactgaaccttttccaagcaactggaaaggagagactcctccctaacttattttatgaggccagcatcatcctgatacaaaaaccttgcagagatacaacaacaaaaaagaaaacttcaggccagtatccctgatgaacatcgacacaaaaatcctctataaaatactggcaaatcaaatccagcaccacatcaaaaagcttcctccacaatcgagttggctttatcctcaggatgcaaggttggttgaacatacacaaatcaataaatgtaattcattacataaatagaactaaagacagaaaccgcatgattat

SEQ ID NO: 39127 - DNA, 1722 bp, Homo sapiens
ccaaaacgatattttgagtcaaaagaagaaaaggatattaaatcttttgttttcacaatatcgatctttttaaagaatattattttatatgttaaccatatactaccaggaaacatctaacagcactgacagttgggaattcgaatgcgtatttttctcccgtgttagtaatagaaggtactgagccttttccattctcttggttgccttgtgcctgaggaatctgaatttgtgaaacaacatctttgtggatatagaaactaatttatgtaacacttggctacaaccacctgtgcttacttacggactatctttagttttcatggcgtgttaccttttgggttaattcaaatccaaaatgttgttaacggactgctaattaaagcatttagaacttagaattacagaattatagagtaggatgagataacaaaagactgggggttatgacttgaccaaggtcacacagataatttgccaaagagctttcttatttatgaaatggttgctggctaagaaacatctgtgtgtgatatgattaaaagacaatattcgttcacttttacatctcatgttttgaaataaaatgcaaagctcacttttttgttgttttgagaaaaattaaagggtttaatgggctagtataaagattgtgaaggcagtaagtagactgccacatagtaacgtcttaaagggaaataattctttaaagtatcagaccccatttagttgaaatgagttttgtctgaagtttccaagtatgacctatgctttttcttagctaatttttagcaggagatgatgagggctaaaaattgagacattagggcatttagttacatctctcaatttgtgactggtttataaaaaatactaagatgtgtctgctaactcacacctgatttatctactccttttatgtatatataattttttttgagttgtgtaccaaaagttggaacatttcaagtattttttctttctgtcactgagtgatttcatgtagaacatttactgttttgtgtattttgaataaatggcaaaaatcttattaaacattagctgttaataattagaaaaatacagtaagtcttcaaatatttataattgatatttgtctttgtttttatatgtatttatattgatgttatatgctcatctttttctttgattaaagataatcgcttgcttgaatctattacctgaaaaaaactcttgactttgatcttgtgactgacttgaaaagtgggagtatgagtattttgagttgttacaaattataaatggtacaatattacttcatttttagttgtatttatttttcacttatttgaatgggtcaagatttaaattcattgataatccctaaacccctttgtgtatttttaagttttacctgtcactgtttttttcctccagaattgttaggggcaaagtatctaatttggttttagactttttcttttttttatgttaccttcttcatacatcatcatattaagtttggtgtaaaatttacaggtcattcattccagtaggaattatgtatgtttgagttatttatgtttggcaaattaattctggcctgtagttgaaatcatactgttctgttttacatccccctattggttaaaataaaagcatcccttctcctccaactttaaaaaaactttggtttcaaataatgtgggagttttctgagggcttcttcacatgattgtt

SEQ ID NO: 39128 - DNA, 1034 bp, Homo sapiens
ttatacagctatgattcatactgcatctttacatttgtttaaatttcttgtaccacctcaagtggcaccatatgtgtctgtgtttactaagttttgatacactttaacttcttataatttctctatattttataatactaaatgataaaatagactatatatgttttatgcattcataatatacctaattttttcttttcctttttttgatgtttcaagactacatgattcatctgcaagttttttcaaattgtcacaaatctccaaaaaaatttccaacatatttattgaaaaaactgtatgtatataagtcaacttgttcatttccaacctgtgttgttgaaaggtcagctgtatgaggttatcgtcaaagatctttaaagaaagaaatgacatcatcaatattttgaaaattagagaaagccatttctaaaggaatcctagaaatgacttcaggccagaattagaaaaaaaaaaattgaagaaataggctaaataaatatgtctttggctgtgttcttttgaaaatggcattaatgtatagaaagatactcgaatgtgagttatggtcactgatacattcttttgtttactgctgaacataactggactagaggagtgtaatgagggcaaggatgttctttctgttgaaggagaaagtttatattgatggaaagtcattattcatagatactttgctgttatttcagtactattaagtaaatagttctctgctcctgggtttgtgtgtgtgtgtgttttctttataaggggctttttcaaataattttgctattgataagttacttgaatttaatcattagtcttcaaataaggaaagcagaatgagagaatgcatctccttgaattaaccagatttttttttagtacctttgttctagtggatatgtagcaaagcttttactttaatatttgtggctatagctttatttcagctatgtgaaatagttttataggaaagatcacagcttatttgggtgttcaaatatgggttctttagaggatttttttgt

SEQ ID NO: 39129 - DNA, 1995 bp, Homo sapiens
aaactctgatttgcaggtaaggaaatttagactaatggtttaactgagtgcctaagagcacataattaataaaggactctaaaactcagatttttagatttcttgtctagcattcatttcactgtataatagctgccatgattcaaggtatccttttcccctcactggatgcagcttttcattatatagttcttcagtgtgtttctccagggctgatctgttaagtgcactgatggaatttttatacattcccaaggtatgtacaagtagatgcttacaaaaaattttcatcggttggagagtttttcctctactttcatcttcatatccccattgtctagtatgtggcttgcatataatgcacatcataggtggttagtgttttcataattgttaaattaagatattgcaagaattaaaacatgactttaatattatatgtattttttcttaggatggctggctgtggtgaaattgatcattcaataaacatgcttcctacaaacaggaaagcgaacgagtcctgttctaatactgcaccttctttaaccgtccctgaatgtgccatttgtctgcaaacatgtgttcatccagtcagtctgccctgtaagcacgttttctgctatctatgtgtaaaaggagcttcatggcttggaaagcggtgtgctctttgtcgacaagaaattcccgaggatttccttgacaagccaaccttgttgtcaccagaagaactcaaggcagcaagtagaggaaatggtgaatatgcatggtattatgaaggaagaaatgggtggtggcagtacgatgagcgcactagtagagagctggaagatgctttttccaaaggtaaaaagaacactgaaatgttaattgctggctttctgtatgtcgctgatcttgaaaacatggttcaatataggagaaatgaacatggacgtcgcaggaagattaagcgagatataatagatataccaaagaagggagtagctggacttaggctagactgtgatgctaataccgtaaacctagcaagagagagctctgctgacggagcggacagtgtatcagcacagagtggagcttctgttcagcccctagtgtcttctgtaaggcccctaacatcagtagatggtcagttaacaagccctgcaacaccatcccctgatgcaagcacttctctggaagactcttttgctcatttacaactcagtggagacaacacagctgaaaggagtcataggggagaaggagaagaagatcatgaatcaccatcttcaggcagggtaccagcaccagacacctccattgaagaaactgaatcagatgccagtagtgatagtgaggatgtatctgcagttgttgcacagcactccttgacccaacagagacttttggtttctaatgcaaaccagacagtacccgatcgatcagatcgatcgggaactgatcgatcagtagcagggggtggaacagtgagtgtcagtgtcagatctagaaggcctgatggacagtgcacagtaactgaagtttaaataaaaatgtcttcagctccatgctcaaggttgaaagggttacctgtaaatttctgcccacataacattatactcatccctagtagtgcattttgggagttggggtgggaaggggtatgggaaggatagactcataattaaaatgtctaacatgtctctgttgagaaatttatttaatgtaaggaacttgggtgttaatagttgagagctgtttagtaataacccagttttcttgaggtctgtttactttatactttttaaaaacttctgtagttcttttggccagtgtgtttgtattatctgtgcattaatggtcctcatctgactcctgcattgtgtcttatttttctgcatggattggcataagaccattactaaaatttggcacctgtgagatgtttgatattatgaacaggaaacataatttaatgtatgaatagatgtgaatttgggatttcaaaat

SEQ ID NO: 39130 - DNA, 1028 bp, Homo sapiens
ttttaaacactgctctttggttataagctaagaattattattggaattgacagcaataatttttaagccaaaagtgtatattttagctaaatgttccagattacgcagtaaatacccaagtgagtaattggcaagaaatgaggtaaatgagttcagatattcaaatgattaaaagtaagtctgcatattaatagtagccttcaaagtaattctgatgttcatatttaatatcatttaacatttatacatattagtcactggagctttacttggagtacatccacacgaaaaaccaattatttattaaattttcctttcttagcaatagcctctaaatttgcaggcccaccccaaactgttcctaaaagatctctttcgttctgtaatgcttcctccaaatatagctctctgcctgaacaaacagattttttcaaagctctaattacttccggtggcccttggatgaattgctttagccattcttgtgcctcttctagagatttagtttcatctgaagactgcaagacctcttcaaccattcctatgtttagagcattttttgaatccagtttaagggccccactcaacactttgagagcttgtctacttccgattatttcaactagccgggtggtgccaccccagcttggtattatgcccatctctttgtggacgaatctgatcttactctctggagtcattaacctgtaaaagaaaaaagaaaagcttaattgtaactctctctgtatgctctaatcataaagtactatccattcatgatctgatgtgaattctccatagatctttataggtaggtatattaaaaacaatgtttgaaaaatatggctgtttcatctagaatttaatttactaatagtatttaaaacttccctttgaaaacagtatcattttttgttgtgcttgtttaccctttgcaaacaagaaccttctaaaagcccaaagttgatctttcttaagtgagtggtgacctaatgagaggatgtggatcaagtgaaagtatgggagta

SEQ ID NO: 39131 - DNA, 1100 bp, Homo sapiens
aatgcacttttcaactactttctctacagcttttcatgtaaattagtcttttggttctgaaacttctctaaaggaaattgtatattttttgaaatttattccttattccttcttggcagctaatgggcttttgtcaagtttaaacacgaagtttatcataataacaaaaattctactaatataactactgtttccaaccatgtcccattatcccgtctcctccttcccaccctgaaaaaaatgagttcctgtttttactgggagagggggagattgattgggaaaaaaaagtaatatgttccgtttaaattttggtatatggcattttctaacttaggaaggcacaatgttcttggcccatcatgacatggggtagcattatctataagttttgtgcttccaatcactttttggtttttaagaatttcttcatactcttagagcctgccttcgattttgttcctttattctttctatttgtcaggtggcacaagattaccttccttttttagccttctgtcttgtcaccaaccattcctacttggtggccatgtacttggaaaaaggccgcatgatctttctggctccactcaatgtctaagacaccctgcttcctttgcttgcatcccacaaactatttccctcatcctatttactgcaacaaatctctccttggttgattagattgtgtttatctccctttaaaaccttgtgtatcctgaatggcctgtcattgtctgtctttcaaatcctttctctttctcttcctctattctctaaataatgatgggactaagttatacccaaagacactttacaaaatatttcctcagtactttgcagaaaacaccaaacaaaaatgccattttaaaagaggcgtattttttctacacctctttagaatgtaagcttcttttctccacctttttagaatgtaagcttctcaagagcagggacaatgttttctgtatgttctattgtgccttgtacagtgtaaatgctcaataaatattgatgacgggaggcattgagtcttgatgatatgggtgagaaactgaaatccaccccccaaaaaaattctagtatataaggaaatcaaa

SEQ ID NO: 39132 - DNA, 1061 bp, Homo sapiens
aaaaaaatctccaatcaataataagacctccaatttaaagacactgaaaacaaaacagtcaactaaatctaaagcaagcagaaggaaggaaataaacaagattaggatgtgatatgggtttgggtccatgtccccacccaaatctcatcttaaattgtaatccccacatgtcaagagagggacctggtgggaggtgattggatcatggaggtggtttctcccatgctgttcttgtgatagttagggagttctcacaagatctgatggttttaaaagtgggagttttttctgcactcaccaggtctctcctgccaccttgtgaagaaggcatctgcttccccttcacctttctccatgatcgtaagcttcctaaggcctccaaagccatgcagaactgtgagtcaattaaacttctttttgtttataaattactcagtctcaggtaaatatctttatagcagtgtgaaaattgactactacagagaattggtactaggagtgcggtaatgctataaagataacctgaaaatgttgaagtgactttagaactgggtaacaggtagaggttggaatagtttggagggctcagaagaagacagaaagacatgggaaagtttggaacttcttagagacttattaaatggttttgaccaaagtgctgacagtgatatagacaatgaagtccaggctgatgtggttttgttactggaaaggggtcctgatccagaccccaagagagggttcttggatctcatgcaagaaagaattcagggttattccacagtgcaaagtaaaagcacatttattaagaaagtaaagcagtgaaaggacagctactccacagacagagtaggatgttcctgaaagtaagaagaggaatgcatccaccctaggtacaatgcttgtatatttataggataaaaatagtgcttggggagatgtgctctgctacaagggtttgtgataaaggattaattttcttaattactatattttgcaagaatcaatattgttatctttatagcaaaattgggaatgtccttattctccagatatcagga

SEQ ID NO: 39133 - DNA, 1047 bp, Homo sapiens
attttgtgttttcatttttattcatttcaaagtgtttttgaatttgcctcatggtttttttgaccaattgattattttgaagtgtgtggtttaatgtctactatttatgcatccctcaaatttcttgttatttattttctcattctgttattgatttctttattccaatgtgaccagataataaactttgtatgatttcaattattttaagtgtgttgaggcttttattgttgcctaccatatagtctatcttggagaatgtttcattttcatttgagaataatgtgtctcatctaggtatagagtgttctatgggtatctattaggtataatgggtttataatgttgttcaagtcttctgtttccttgttgatcatcctcatagttgtttctccattgtttgaaagtggaccatgaagtctctgaatattgttgttgaatatgtatttctttatgtctgtttctcccttcaattttgttaacttttcttcatgtatattgagactgtttttaggtgaatatgtggttataaatgttatatcttcctaaggatatctttttattattaaagatgtccctctttctttcttgtagcatttttttaaagttctatatgtctaatattaatacagacatttcagcaaccttatggttgctatttgcatgatatattgtttccatccttttactttcaatctatttgtatctataaatctaaggtgtgtcaactctagacagcatatagttggttcttgctttttcatccagtttgataatatctaccattttattgaggatttttttttttttttttttttttaagatggagtcttgctttgtcgcccaggttggagtgcagtggtgcaatctcagctcactgcaacctctgccttcgggttcaagcaattctcctgcctcagcctcctgagtagccggaactacaggcacatgccaccacacctggctaatttttgtatttttagtagagatggggtttcaccatgttggccaggatggtctctgtctcctggctttgtgatccaccca

SEQ ID NO: 39134 - DNA, 1119 bp, Homo sapiens
actggtcatgtcaactacataatagctacccaagctttgtcaaattatttcaattgcctaagttttggaagccttatctgtaaaattgaggacattagaatctatgtgataaggtggttttgaggattgaaaaaaataatagagaacacttaacaaattgtattttttctggctttgtgacttactatgtacagtgccatttttaattgctttactcctttatttcccttgtgtgtttttatccattttcctctcaatggctttttttaaaaaaaactgtcacgtggatgatgaaatttgtaaatttttttcagttagcttttaacaatagagtgaagtttccatccctaagaaatctgtattgctttaaggttttctaagcaatgagttttagaaattaacctattacttgtattaaggtaatcaggtaattaagccatttagtgggtattatcatctgagttatttgataatgactttcagacccatctaattatctgggtaattgccatgtatccaattcatgtgctgtagacagtttgatacctcccttaaaaaataatttaaatgtcattttcttttactttatgaccctttttatctgagattcagaggtgacccaattgattatatcactgaagatttctaattcacttgcttcctacttaaaatccaagttgcttaagaaatctgattaagaaattgatttttcacaaaattaggatattagaaagaactttgaatgaatcatgaaattttctctcacttcattctttgcctattttatcctacctaggcttctatgtttcagtgggtagaggcatctagatttcctaggctaaagttaattcagttaatatagtcagcaaatctatagaagtcaatttcttatcatgggaacaggtttttgtatgcctcaatttttgctgttttgaaataacttttcctgtaaaatccccatgattgctatccagtcaagttacacccttcttcttcacattttttagcagttgccagaatctttttggtgaagttcaagccccttaagtttaccacaagagttttttggtggtctggcctctgctttcctctctggccatgtctcatttcactcccact

SEQ ID NO: 39135 - DNA, 1033 bp, Homo sapiens
gataggtattgtctcttgtcactattttgggtttataaacacaacagagatcagaaggaagaaagggacgtagaagaagacaatgaggaagaagatcctaagtgtagtcggaagaaaaaaccaaaattatctctgaaagctgacaccaaggaggatggagaagagagagatgatgaaatggtgagtgcctctgcctgacaccaggagcacagggatgcatctttagtgggtagcatcacagtcacaagcactgctctggagcccactgagttcaaatgtgggttccaggactatctgtgttagtgtcagtaagttacatggcctctgtgtgccttgctgtcctgatctcaaaatgggaatcataaacaatagtatccttctctcagggtgaaaaagtgggatgtcctgaaatttagtgctagggtgaaagggaacatttaaaaaccttcagtcttgtagatgaatcttaaattcctcttgacaacacaatgccaatctcatttctttaaattgcagacagatctcataaaactatctgagtgggctgggcgtggtggctcatgcctgtaatcccagcactttgggaggccgaggccggcagatcacgaggtcgggagatcgagaccatcctggctaacccggtgaaaccccttccttactaaaaatacaaaaaattaggtaggcgtggtggcaggctcctgtagtcccagctactcgggaggctgaggcaggagaatggcgtgaacctgggaggtggagcttgcaatgagctgagattgcaccactgcactccagcctgggcgacagagcgagactgtgtctcaaaaaaaaaaaacaaaaaaaactatctgagtggttaaaaaatggcacacaaatatcaggtatatttggggaaaagccattcaaaatgtgtgaattaaaacataaatatcatattcctaaaggcatctattaatggttttataggaaaagggaactttgagatctggaagtgtttccgttgagatcggtattgtacaactgttacttggga

SEQ ID NO: 39136 - DNA, 1049 bp, Homo sapiens
tttacataaacaaaggcacccgttgatccagaaacaccaataactatatatgtaaatattaaatagccatacataaagactaaaaccatgaattcacattgatactttcaattccaaaccaataccacagggcttttcctaaccttccccttcccaagcttctaactctcttcaacagtgagattcctggctcccattatatctcagtgtatttacttatgagcactaacatctgtgtagccaagctcccagctgtgaatggtcagccacaggaaagcctccaacacttatacactgctagtgggaatgtaaattagttcagccactgtggaaagccgtttggagatttctcaaagaacttaaaacagagctaccatttgacccaacaatcccattactgggtatatacccaaaggaatataaagaaagacgcatgcacacatatattcattgcagcactattcacaatagcaataacatggaatccacctagatgcccatcaatagcagactggataaagaaaatgtacatgtacaccatggaatactacatagccataaaaaagaatgaaatcatgtcctttgcagcaacataggtgtagctggaggccattgttctaagcaaattaatgcaggactagaaaaccagatactgcatgttctttcttataagtgggagctaaccactgagtacacatggacacaaagaagggaacaatagaccccggagtccacttgagattagagggtgggtggaaggtgaggatcgaaaaactacctatcgggtattatgcccgctacctgggtgatgaaataacctgtacaccaaacccccacgacatgcaatctacttatataacaaacctgcacgacgtatcccctgctgaacctaaaagttggaacaaaaagaaagccccccttttcacaaccccagattatgtcctacaaattaatcatcttaatcctttttctttctgttactcagactggataatttctattaatctatctgcagattcacagctcctttcttttcattttccaatatg

SEQ ID NO: 39137 - DNA, 1038 bp, Homo sapiens
aaattatgattgtttttttcttgtaaatttgtttgagttccttgtagattctgcatattagccctttgtcagatgagtaggttgtgaaaattttctcctattttgtaggttgcctgttcactctgatggtagtttcttttgctgtgcagaagctctttagtttaattagatcccatttgtcaattttggcttttgttgccattgcttttggtgttttagacatgaagtccttgcccatgcctatgtcctgaatggtaatgcctaggttttcttctagggcttttatggttttaggtctaatgtttaagtctttaatccatcttgaattaatttttgtataaggtgtaaggaagggatccagtttcagctttctacatatggctagccagttttcccagcaccatttattaaatagggaatcgtttccccattgcttgtttttctcaggtttgtcaaagatcagatagttgtagatatgcagcgttatcaacaaacaaccctatcaaaaagtgggtgaaggacatgaacaggcacttctcaaaagaagacatttatgcagccaaaaaacacatgaaaaaatggtcaccatcactggccatcagagaaatgcaaatcaaaaccacaatgagatacatctcacaccagttagaatggcagtcattaaaaagtcaggaaacaacaggtgctggagaggatgtggagaaataggaacacttttacactgttggtgggactgtaaactagttcaaccattgtggaagtcagtgtggccattcctcagggatctagaactagaaataccatttgacccagccatcccattactgggtatatacccaaaggactataaatcatgctgctataaagacacgtgcacacatatgtttattgcggcactattcacaatagcaaagacttggaaccaacccaaatgtccaacaatgatagactggattaagaaaatgtggcacatatacaccatggaatactatgcagccataaaaaatgataagttcatgtcctttgtagggacatgga

SEQ ID NO: 39138 - DNA, 1056 bp, Homo sapiens
tgtacttcacatttcttctcaagaatcacatttcttgggattctttgagtttctcgatttgaggatatgtagtttttgtggaatttcaaacacttttggccattatttctgcattcgttttctgcactctccctgtctttccttatcttccttccctaattaaattggtgccatggtttagtattcctattcaactcttgttgtaatatgcacctcactttcctactgcatctaccatggttcatatcctcattgtttctctttttatctgttgtaaaacctccctctattgtttttagagatgtggtctcactatgttgctcagactggacttgaactcatgggctcaagcaatcctcctgcctcagcctcatgagcagctgggactacaggtgcatgccactgcacccagctctctgcctctatatttgtccctcttcagtccacagcatggtacataggtccctttatccccacctgttttctagctttctttccccctaagccatcctcacctcacccatgactctctgaactctttatcctgacaatatggaatacttccagtactccaatgcatcgtgctttctcatgctcctgtgcacatgcatatgcctttcttatgtctggaaacctccctgcctctccatcatccctgtcgccatgcctggaaactcttattcattgagctgaaatacctctcctttaaaacttacctttttatcccatcccaactccactagaccttgagtgtattctgttacagcacttaatctattgttttgcaatcatcattgcaattaactaggtcatcctcctagactgacttgtgtgtggtcagagactgtatcttattcatttttacatacttagtagtggtacgtaataggtgcttactaaagtgttgattaaataaacaaataattggcatttagcaggtattgggcatattatttttaaaataagttgaactcagatttaatcataacctacattttagcatgcgatgtttcaggcaccattttaggcacttctcatacattatctttaatcctt

SEQ ID NO: 39139 - DNA, 1017 bp, Homo sapiens
aaactcaaaaatctctcatagtttttggtgtgtcaggagtccacgaaaggcttgactggacctgtgtgaatcagggtctttcatgcagctgcagttagatggtgacttagagttggaacagcaagggctggggcatttaggggctggccaggcatctttctgtctcttcttgcagtcttagggcctccccatgtggtctctgtgcacggaatggttgggattcctcatagcatggtggcctccgtgtaagggtaactgcttacatggaggctgaaggctttaagagcaagtattccagtgatgggtctacataagtttaaaataattggatagtattttatgttgtttggatttaccaaattatatttgctccatgatttataaacagaaatttaggttatttgcaagtttttgcaattccaaacactgctacaataaatatctctgtgtgcatatctttgtgtgcttatgtgattatttctagcagataatagaaatggaattgcaagagtggtaaatatgcacactttgaatttaggtagattcattgaaatgaccttttagaaaggaacttacacttctgtgaaggcagtgtgaaagaatctatttctccttatgtgcttgtcagagcttgtgattatcagtctttttaatgtttgttcattttgttgggtaggaaagggactcattgatttgtagttctttgattttttttaatgaaaatgaatgttttatatttttattagctattttctttaaatagttggtttattacttttggtatttttaaaaattggattttttttctacttgatttttataccctattatctattgtcatgtaccaaaaatgtcttatccttgttcccccatcccaatgtggtggatttttgtttttttggctttacaggaatttccaatttttatgaactcaaatgtatcaacttttccattatcatttttggattttgtgtcatacttgtaaagcaaaattgtaaaaatatttgctcatctttt

SEQ ID NO: 39140 - DNA, 1067 bp, Homo sapiens
acacgcttgtgtacagtttggggactataggagcagcgtgcctatggaaaatagaaaataggttctttttgtttttgttcttgttttttgcttcagaaataattatagaaatctgtgtttagaagcagtcctaagaagttacatgcaaagaagtaccagtcttggaatgagagtgaatcatacacatacactcccagttaatatcctaggtggtttggggcaaataactgggctttcacattcggtctaaaaatgtgataagacattcttctttgctcacataatgatattgtaatatataaataagaagaaacattaaccaaaatttgggtgacggaaaagattttgaaaaaagtgaagtgataggtacagctgaaattctgtcttacctatcagatcttcaactaatatgagtgctacacccatgtttaacgaatttaaccttggaagtgaaagaagttctgctctgcatattaaattttttgttaaagttacagcatgttttgggattttttttttctcctaggcatggaacaaggcagttgtaagaaatacatatatctgaataaatatttgggggatgttaaaaatattaaagttatctatggacctgcagctcgattgagaccctctgatgtcccagataaatactattcatgtaagtatatctctgtgataactttgaatatggtcatattaagaataccttcctttaggccgggcacagtggctcatgcctgtaatcgcagcactttgggaggccaaagtgggtggatcacctgaggtcaggagttcgagaccagcctggccaacatggtgaaaccctaaaaatacatatacgatactatactatatctatactaaaaatacaaaaattagcctggcttggtggcagctgcctgtaatcccagctgctctggaggctgaggtacaagaatcgcttgaacccaggaggcggaggttacagtgagctaagatcatgccactgtactccagcctgggcaactgagtgagacttggtctaaaaaaaaaaaaaaaaaaaaaagaataccttcctttaaatcatt

SEQ ID NO: 39141 - DNA, 1060 bp, Homo sapiens
gtcttcttaattgtttatgcttctaccctttgtaatcagtttttttaatagttaaaagtaaatcttcaatataattaagtagaggaaaggattagatgagtgtatcacactatatattatcatataatgcacactaactacatttattttcatcctgtgacccaagagaagattattaagcatgaaactttaccctatggaagacctagagttctccagaaggaaaacaccatctgtcttctttcccagcaccagtttatgagtggatacagccaagacatcttaatgcccctttggacatcctataccgtggacagaaatgcaagtatttgtcacctctttatgtgtggccatttcaaattaatgattaagcagaacattaaatgcatagtttctcactgttcaccttggctttatactcagttcccgcattagaggaacactgaagagggagtcagaaaaattcagttccagttcaagctctgccactgagcagctgcatgactttgagaactcagaccaaatttcttctgtgaaatgagggtcgtgcagtaaagattctcttttgggctgtgcgcagtggctcatgcctgtaatctcagcactttgggaggccgaggcgggcagatcacgaggtcaggagatcgagaccatcctggctaacacggtgaaactccatctctactaaaaatataaaaaaattagccgggcgtggtggcgggcgcctgtagtcccagctactcaggaggctgaggcaggagaatggtgtgaacccgggaggtggtggagcttgcagtgagccaagatggcgccactgtactctagcctgggtgacagagtgagactccatctcaaaaaaaaaaaagaaagaaagaaagaaaagaattctcttttcctccccgaccccagttttaatattttatgattccaatttataattgcatgaaatcagccttaggatcagtcacagttacccatttctaaatacatggctgtgtgaggacaagtatttccctcagctgtccaaatctaagggggccctcactgtttggcaaagcca

SEQ ID NO: 39142 - DNA, 1028 bp, Homo sapiens
gactattgtaacaatgtcctatctggcaaagtggaggcctacttcttcctgttttagtctttcttccacatcatcacgagaaagagttatctttctaaaatcaatctttttgaaaaccaaagctgatcatgactttataaataaagttataaataaaatcttaaactccttggcatggcttccagaatatcacccaatctatacctgctgcctcagttcctaatctacttcctattgtactagggatgtagaagcaaatcaaacagaggcccaatcttcctggagtttagaaattagtaagacaaacaatcttgaagtaaataatttttataacttactaaacaaataattcattataatttatttacctaacgtaataaacaaaaaaaaattacaattttgataaatttcgtcggctttcactagttcttatcctgggtcaatgtgaacataaacgtgtcctgagaatagagttaaacttggtacctgtaatactctcactcatatgtctaacatgttgagattctaagtgattctgagctgacaactcagtaaaccaaagtaacacctgcttctcaccctgcacctctcaccgttccctggcagaaagagtcctttctttttttttttttttgagacagagtctcactctgactcccgggctgaagtgcagtggcacactctaagcttactgcaacctctgcctctcgggtttaagagattctcctgcctcagcctcccaatagctgggattatacgtgtgtgccaccatgcctggctatgttttttgtatttttagtagagatgggatttcaccatgttggccagggtagttttgaactcctgacctcaagtgatctgcctaccttggccttccaaagtgctaggattacaggcatgagccactgtgctgggccgagtcctttcatacctccatgccatgcatggggatgccttagggccccagcagcctttcccttgtctcctggtagattcctatcacatctgcaataaagctctcctcagtc

SEQ ID NO: 39143 - DNA, 1359 bp, Homo sapiens
cacaggggacctgaaaaacccttaaataccggcatgcgtgcggatgaggcctctttccctgccgccgccgagtcgcgcggaggcggaggcttggggtaagttgagcgaggcggcaggggggtgtattggttataatttgtggctcgttgcgttcttgctgggattcgtgacgagtatctggttctttaacaagtcaatgcttttgttttttagtgcgttcaagattcaacttcacccgtaacccaccgccatggccgaggaagggtgagcccaggggccggggttggagttggggtcggggtgcggctgaggcgtggggctagagctggcggaacaggactgggtcaaacgggtcgccgtaagcgcgtctgttgtacacttagcttttgctgagtgcaaggccttatgtggtgtgaggattttaactgatggttctgatgtgtcgcgtttaagcattgctgctggaggtgtaatggacgttaatactgctttacaagaggttctgaagactgccctcatccacgatggcctagcacgtggaattcgcgaagctgccaaagccttagacaagtacgtgtatcagtctcaatactgtgggttcttgcaaccggaacaaaactgccacccaagggaagaaggcatggagttcatggtgttagcgcaaaagttctgaatggcatccgtcctaccggaaacctaggaaaaggtatcagaactcagatctataaagcccacttaaaatgtgtgggttgctgtttggaatggggataagcactcaaaactacagtgtttgaatgatgactttaattgtcggataccccttcactccttttatgagtgaaacataagagtctgacaaacctgtaggttgtggagctagtcagtcttatacttatctggcagatagatgagatggagagccacattacatctggtagtttgcaaaacaagcattaatttaatggaatttcaaactcaggtttcagaagcatttggtcctagatgaatttagtagtataatagctgtgatttatttgaatttgggatatttgttaatgtatttgaatggatcgagttaatgtgttttttagggtggtggcattgacaaatcaacctactcttgagctgaatttaaatgcagttttaaggttttacaggacaagttcgttttggtgtaatctagccagttcaatccgatggaaacggcattattgtttaatgtatttagtaggtcctagtatgagtcttctgtatttctatttcggcattattgcatggcatttcataactgttccattaatgccacagtcttttttttttcttttttcttttttttttttgagacaaagagtcttgctc

SEQ ID NO: 39144 - DNA, 1074 bp, Homo sapiens
tcttcagactcaagcaattttgtacgcatttatgtgttcagtggattggctgcttatgtttcgcaagtgttagtgcaaagataaccctcctaaaatgcaagaatgatggatttggatctgagttttagctccattttcattgtaatttgaatttcaggcgccaagcccatctttgtgtgcttgcatccaactgtgatgagcctatgtatgtcaagttggtggaggccctttgtgctgaacaccaaatcaacctaattaaggtaaggctgctaaggattgtgttgggactaatgttcagtgatgcttgtatatgggggtaaattctgtgaagtctcaagctgttcattttgtgcaggtgtaaacattacgtgcacctgatactgtcggccattttaaagatgattgtaggtagaagcattttatacctgcagaattgaatcctaattttgacgttggtatacaacaaagattagtagcaggcttgtaggtgatcttagtgctgtacatgatgacaactggctccctctactgaactgccatgaggaaactgccatgtcacccttctgattacagccaccttttgggtttcatttaattttggtagtgttaatgtctattaatgtgattttttttttttttaacctttctcccaataggttgatgacaacaagaaactaggagaatgggtaggcctttgtaaaattgacagagaggggaaaccccgtaaagtggttggttgcagttgtgtagtagttaaggtaagtcaccgtttattctagggatgaaggttatgctgggtaatcatataaaaccttgtattgaaataagttgaggatcttataaaaggaaaaaactgattcaacaggtttaaagcattttctgcatttcaggaaaaaaataaaagctgtaatttacaagccagccaatgaatctgcttacctgattgtgtttgtgcagacatactttaaaaactggcaatagtaaagccatgttacgagccttaaggacattgaagtcgttaaggtccctgagaatggctataacaaatcttagtgatgggaaacatttttataa

SEQ ID NO: 39145 - DNA, 1032 bp, Homo sapiens
atgtttgcttctctgcagccttcctgagacattctcccactcccacagcttcccctgattcccaagtctattttgttttctttgatcaactctaagctgtaccagacaatttcccaaggaagacccacttgctcttcaaattttgcgtgccttgaagtgaactttaccatcactaacatgtttttgttagaggaaaagaaagctgactgtgtggtatgcaccatactgcattcattatcacttgttactgcgtaccactttcccaagccaaaggccttggcatcctcaactcctacctgcgctgtataggtcttactactgtcagtctcatccagatgattttcaagacatgagtcactccactccagttactcatccagacttctgagttacagttattgaaaagtgatcatgtccatctcttcataactttggtttgttctgtttgaagtacctctacttttctccatctagatatctcctactcattcttcaaaactcagtgcaaatgtaatgtcggcttcagagtgtgatttgcctgtgtagcttatatggaattcactggggagcccactgaagcaaaagtgccaggacagaagcagatgtcttcattgttttatgggggaaaattgttttatgacattggttgctgtgtgtgctcagaatcttgttgaggacatccctcatgaacccaaaaggagagctgtttgagcctagcacttgatgttttcttgcacccatggacaatgagacttgtgactgcctgttttctttggctgtaagagcctccaaatgaaagactcaattttctttctgttctttattctttttttttttttttttttgcctcattgtgattttattagcgtattctatgtatttctgataaaccactttaaatgctttaaaaaatgaatgagaggccaagcgcgatggctcaccccttaatcccagcactttgggaggccaaggcgggcggctcacgagatcagggagtttgagaccagcctggccaacagggtgaaaccctgt

SEQ ID NO: 39146 - DNA, 1078 bp, Homo sapiens
agagtggcaaaaaaatagtcccattttatggtacaccatttggtagtatcttgtttctttgcccctcttcacagacatgtctgaatccacttgtattttatttacaaagacacatagtccttcttgaacatcctcccgcttctttacaacatatacaaagtttaaatgttatttaatgtatgtaaacagtggcagaatatagcattattctttcctctttgtgtttctcaaggcacatatgatcatattgaaacgcacgtggagcgggtctttaggtcttcctgtaaaagtcaatatgacggatttggaagggtcctggatagccatggcaggatgtctttttaggtaccttctagtttgcagggtttacacaggaaaaacccttcctgagggatgggactagggctaacaggcaggtcaacggaaaatcagccacttaatcagtggcagccccaccaaagccggctgaaaacttagcagttctcccatggagagtatgcaccgctggagcccaaagatggtggaggactgacaaggccagggctgccttcatatttgcaaaattatgacaagtggaggaggaaatcatttcttctctcactgcaagctgcctgccacctactgcgatacctctaacagcaacaattccacccacaaccacgccagcggcactagcagcaacatacacccctgcactctcactgggtatgtaacactgcttcccctcttccttttcagctgcctggctcttaccatagttgtctctagaaataacatttgaatagcaggccgggcgcagtggttcctgcctgtaatcccagcactttgggaggccaaggcgggcagatcacctgaggtcaggagttccagaccagcttgtctctactagaaatacaaatattagctgggtgtggttgtgggtacctgcaatcccagctattcaggaggctgaggcaggagaattgcttgagcctgggaggcggaggttgcagtgagccaggacttcaacactgcactgcagcctgggcgacagagcaagaaccatccaaaaaaaaaaaatgaagagcagtaccaaaag

SEQ ID NO: 39147 - DNA, 1030 bp, Homo sapiens
tactttctgatgaccccctagatggtccaggcgcgaggatgctgacccagagtccttcggagggtcacaggcgcctgggctttcccggtgccgggtgcgtgtgtactttaaaggctcgcgttctaatctccaggcactgatcgggcttttcaactgcggcgatcccactttaatagtttttatgtggcgtggactgaatgtctcctgcagtttgccagggtcggtgaaattagaggcgccttgtcagagcagtcgcgttcattggctcgagtagcgggtgccatggaaggcttataacttctccaaaggaagggacctggctgggtagagcaggtttttctctccttccaagcctgctgggtctggggaggcagtggaacttgaaatggctcggatttttagcgtggtgaagcgaggtttggaagtagacgtgtgtgtgcttgttttattctgcgccgcacagcaacccgaactttcgtttggtagcacttgaaagagttttctccctttgtttgcgagattctgaacagctcggagcgattagggaatttgcggaccgagtccggtggcagagctggggcgaaagcagagagcgcaatttaatttttgtcatctcttccctgcttgggaggatagtgtttcccttcaccaccacccctctttctccttcctatgaagacaacggatttgcgcctggggtgagagtgtgtgcgggagagtggtgtggagactgtcctctctcaccgcgtctcctgcgcctctccccgccatcccgagcgggcctagagagtcattcatgaatcttaacctgagggcaggggaggaaggtgcaggtccctctgccctttctgccaaggtgcagaatagcgcccgggcgtgtgttttggttccagagcagttccacgtggagcaacttcgtgtgtgtgtgtgtgtgtgtgtgtgtgtgttgtgtacttgatctgtgaggaggtaacaggactctggtgttcaaacccagtgggccgttggccattagtttgctttcctggct

SEQ ID NO: 39148 - DNA, 1024 bp, Homo sapiens
aaatcatacgtaaaagagatatattgtaagaagtaagtttttcattaaatatatttttaaatgatttttgaatttcctttcaaagaccatgaaacagacctttggagatttatgccgtttctgcttaatgatgatgtcacattttgatgtcttctttgattttctacttggaaaactagtggtggaaagactaaggcattgaaatcatgatgcatgttttagacagtctaaacaattttatatacgtcctttattattttatttcagatatgctggatattgttgaatatcagaagtataaaaggagaaagtatattattagcatgcttgttagtcattttaaggaggaaagaaaccatagttctcaagcgcttttagtattttactagattcattgcaggaccaagaatgcaccagcttgatggcaatccttttaagattctgatttcccaagggaaaggctctttgcaacctttcctcctagcttgttagtggtgtctctgtgacagtagttctttagcgtgtggaactagaggcagtgggagggcttccctcacacccccacgccttcacactactggaagctgtcgtttgagctgttttgcatacggacaactcatgatgttacaagtaacaagacgtgtgcttactgagagtgtgttctgcagtctgatgctgttccttttttttttttttgatgctgttctttattagcttatgtgatcatgacttgatcttacagtcaaatgtttctccatcaggcaactgaggagaagatacttatatctaataatgtggttctagaaaaggtatatgtgatgagtttaattttaagagggatgtatattctggtgccatttgaagttgatttgatttgctttctagtggatattttatttaaaagaaatgatagccatgcctttaatttggatagacatgaccatagtctaatttcaatatatattatattatgatttatttcacatggcatcataggaaaaatgtaacaaaaaattataaagtg

SEQ ID NO: 39149 - DNA, 1060 bp, Homo sapiens
ccccccgagtagagtaactgggactacaggtgcacactaccacaacaggataatttttgtatttttagtggagatggggttttgcaacattggctaggctggttttgaactcctggcctcatgtgatccacctgccttgacctcccaaagtgctgggattacaggcatgagccaccgcacctgaccctattagtaaatattttaacaggcagtcataagatagcagaatgtatggaaattaaatgatagttcagcaaattcaattaagtaagcatttcaagacttcttgctatcctctagaaactttgctatactagggattaaaagatgaatataataattccttttctccccctaaattttagtttagcataagattatatgatactgtgtaagttctattcttagttcttttaaaacgagacttggatagctagtactaattcattcagtgaatatttgtggagcactgctatatttgaagcatggttttcattgttggaaatacttggtggacaaaatggacgcatattactgttcttgtggaacttatattcttgtggagggggagacaaacagtaaacaaatatagtatgtcagatagtaataagtgcaaggagaaaaaccaaataaagcagggaggaggataggaagtgcttgcgggcagggtaggtaggtgaagggacagctgtggttttttgtttttttttttgtttgtttgttttttgagatggagtctcactctgtcccccaagctggagtgcagtggcgcgagctcggctcactgcaagctccacctcccgggttcacgccattctcctgcctcagcctcccgagtagctgggactacaggcacccgccaccacgcccggctaattttttgtatttttagtagagacggggtttcaccatgttagcggggatggtctcaatctcctgaccttgtgatctgcctgcctcggcctcccaagctgcggtttttggagagtagttagggaggcctcactgagaagatgttgtgcaaagactcaagagaggcgaggaagtgagccatgtggat

SEQ ID NO: 39150 - DNA, 1032 bp, Homo sapiens
ctcctacttcattttgcagaaatttagctgtctttgttatgccctcaccatccaatgtatgcccagataactgtgcctttttcatccaaagatccactaaaagatgacagtgtttttattttttatgagacacatcacctgcagaatgatttttttttctattacagttgacacatagagatgcattttaattcacatgtagacaaacatttgatgaattcctttttttatatatatacttgggaaataggtaaattttctgctatcaataatctctcagaaacacttgatgactgaatactatagttaaaaatcatgaatgagaataagaaaggcaacatagtattttaggagggacattatcccactcattgaattaccatataacctgtcatagcaccttaactgctctgaacctctttcctcgtctataaccttcatcctggcctgcactggagtcagagttaaactgtgccttgtaaaacataaagttctttataaatataacagttagagcctgggcgcatgcctgtaatcccagcattttgggaggctgaggccaggggatttcttgagcccaggggttcgacaccagcctgggcaacatggtgaaaccccatctctacaaaaacatacaaaaattagacaggcatggtggcatgcacctgtagtaccagctacttgggaggctgaggttggaggatcacctgagccctggaagtggaggctttggaagtggaggctgtggtgagttgtgatcaagccactgcactccatcctcggagacaggaatgttttatatatataaatatagatattattttacatatatatattacatatatatataaaattcctgtgctccctagggtgattttatatatatatatatatatatatatatatatatatatataattctattctatatataacattctactgtagatatatattttaaaaaactgttagatattatgatattatgagttgcgacagtgatgatgatcatcatctcaactaggcaggtct

SEQ ID NO: 39151 - DNA, 1094 bp, Homo sapiens
tagatgtcaacgttgcatttgttagatatttcttaactttctctcttatttgagtatctaacatattgtatttcttttgctctagtgtaatatagctaaattgctagactctgaattaatatcaataaacatttatatcacacaagatagtgttatactaaatatatttaaatgttttaaatggtttcaaagttaatattttgagtaatatgctatggatggaaagcttattcatgaccagtataagttatacaaaattaatgtttcaaaggatgtctgaatttcaaaaggactcttcaaatgatcagctccataattatatttttcatctaattttatgttcaagtgctcccctagagtggtgataagtgaaatcatcgattaatgctaggactctaagctgacctagaaaaactacatttgaagctgtattcaaagaatttcatttagccttactaggacaactgtcattcttatgtaacattttaaagttttgcattgagattgggcttgaaataaatgcctgcatttgctcagagactgttaaggagggagatagagtaggaagttgtctccagaaataaaatgataatgaaacctattgtttatcgagtacctactaattataaaccacagtgattatatatgacataatttttcatagatactaaatatatgtatgtatatttgcaatttttatccttgcaaaaatgacaagtataattggggtatttacattctctttttaaagacaggacaataaaatctagtaaggttaggattttgcccaaactcatatagaaattagcaaacatgagatccaaatccaggtctgtcagaccgcagggtctttgtttactctgctatatcatatttattattcattgatggatgtattaaacaaagattaattcagcccttcccattgccaggaactgttatagatgctgaaaatactgcagtgaaaaaagacaccaagttcttgctttcaaataatttatattctagtgaaggaaatagaatatacaaatatgtctagtggcattaagtgctacagagaaaagagcaaagcagtgtaacaggatcgaaagtga

SEQ ID NO: 39152 - DNA, 1026 bp, Homo sapiens
aataagtgtgtggatttatataaagtgctcacagcagttcctggctcagaggatatacttttaaattatttgctaaaaatatgaggtcggaccgtgtgaaactgccactatttgactgtctttaacctacagaaataatttcatgcggttcatcctgataaatgtgaacaccttcattgaccgaatgccttttaggggcagcaccctttgctttaaggtccattttgtttgtatccacagctctgctgtggataaagataagtaaaagagtctctgccttgaagaagctgagagattaataatagagctataaataaagtttcctagcactgtagtgctttctgcctgtggtgggggaatgaagcaggactcttcttaggttaccacaagcgacttgggggaaggagacaaaatctggcagtctgctgaacagggcggaattttagattgaagaccctagaattaaggtgggaactccaatgggatgtcctcagggagtcacttaggaaaatgatgaaccacgtgtgtgcaataatgtgtgcaatttgacacacagttttaatgcagacaaaaatctttaataatcatgaagctatttccataatatgaagaaatttaatatatgttaaaattctatgtatttctttgttgttttccttttttagaattttctgtgtgtctttcttatgtgccggaaacccaacctcagagcagtattttcaccattgagatggtgccattaaacacttaaaatcggctgggcctgtgatcccaggactttgggaggccgaggtgggtggatcacgaggtcaggagatcgagaccatcctagctaacacggtgaaaccccgtctctactaaaaatacacaaaaattagccaggtgtagtggcgggcgcctgtggtcccagctactcgggaggctgaggcaggagaatggcgtgaacccgggaggcggagcttgtagtgatccgagatcgcgccactgcactccagcctgggcaacagagtgagactctgtctcaaa

SEQ ID NO: 39153 - DNA, 1049 bp, Homo sapiens
agtgtacaatatatactcacatataaattggcatggtacaaatcacataagaactaataagaattatttatagacgtgaatggtgacgtgatgtcaaataattctgaagtggtgtgtttgggatcaattctaaaggagaaggaacatgatttgtcagaaaaggaactcagattgcataggaatgaacaagagttgtctaagaaagatgattgaattgggtcagagccaggaacttgaccatttaatgaaacaatgtacagtgaggcaggagagcaggagagaaaaaagaaaaggaatggaaggtctcaagagagttgaaaagggtatctataagaacttactaattgtagcagctgactaaaagtggaacgagcttcctagcaaagttgtgatatccactgatagagataataaagtcaagagcgtctccttataggatgttgtttacggaattcatacattgggtagaagacaaactagatgctttctaagatatgttccacctctgaaatgctgtgattctcctatttgtattgctaattagccaatgaatatagtgtgtgaaagatatgacagcacaattgattgctctgtaattataaattaccccctctgctaattacaatgaagttttttgaagattttttaaatgaagcagtacacttctttatgggaagatcatgtcacattttctaactgattttgtaaatcccatttaaaaaatctcctctactattagaaatgacaaatatcaaaactacaattttatactgagatttatatatatatatatatatacacacacacacacacacacacacatacttttttgggggggataagaagcattaaaataaattaagtagaataattaaaagctgtatgtttagctggtaatttttggagtggcacagattttgttatacactgtggtattcaaaaaagcccagatttgtcccaagtaaataaagaaatgtcttttaaatgttttcacctctaaaagtctggtttggtggttttaatattttcttatgttgctatatcaggat

SEQ ID NO: 39154 - DNA, 1049 bp, Homo sapiens
gttcaaatgatagtaagttcatagcttattatacttgaaaacaagcatatattacaataaaatatcactgtgggtagtaatttctttactttggaataaatttcacatgtaaaaaccatgtctgtaagttgtgctgagaatgtttattctcccacaatgaagataactttcctgaacaatgtatcatgatagttattgcattatcctctatgtctacttgacccataagtttctcaattatctattattcaagattctatttttaacatcttgccagagaacagcattggcatgtgagtatgcctgtgcttccatgctgtgtatgtgtatgtgtgttataaaatgatggttcgttagttctgttaggtgacaaatgttgagatgagtgaagactgtccacttttccttccaaattttgcttctaggtaagaatgaaagaaatgtcaaaccaaattctggcttacatatagatattttttgaacatttcttggcaagcaaacacacataaaaagtaactctatatttgttctgtaggatcaaggacactttagctcttatgtccttttagatgttttgaccattacctggtatgaaaactccagttgagataaacgtgaaaattccaagaccggattctctcaccttatgtctagcatcaggcaattagaatcttctgtagttcatgactaggcataggaatacttaaaaagacttagccaaacacatcctcttgaaagtgaaagctgcaggcttatctaatttttacacttgatttacgtaagggtggagagtattgctaaaatattttagtgatctacttatcttgagtagttttaacttctattaaaatgagatgtgcgagttcatttctgccattcacagtgctactcaagaggctactgttttcgtcagtgaaaacccatttctgacattaaatattctaattttcaaaaagttgtttgttgatggaaattcagataaccagaagacttttagtactcatgtgagggaaggtgggctttatgatgagaatgctacctttctgttg

SEQ ID NO: 39155 - DNA, 1034 bp, Homo sapiens
aggccaggcgcggtggctcacgcctgtaatcccagcactttgggaggccgaggcgggcggatcacgaggtcaggagatcgagaccatcctggctaaaacagtgaaaccccgtctctactaaaaatacaaaaaattagccgggcttcgtggcgggcgcctgtagtcccagctacttgggaggctgaggcaggagaatggcgtgaacccgggaggcggagcttgcagtgagccgagatcccgccactgcactccagcctgggcgacagagcgagactccgtctcaaaaaaaaaaaaaaaaaaaaaaaagagcagaaaaaactaactagtctctttatttatgcataaactctaccagttttatttcctagcaaagaaaaggggggacctttgtattattctcacaaaatgtattttgcagaaatatctgaatgttgttgaagtagcaaaatgaactgtagagaggtgaattgttttgatctaattaaattatggtacctaatctaattgtaagataatttttgaactgaagaaattattcagaaaaattccccaaatatccttccattctcacactatacatttcagaatttcacataaatccaaacacttccatttccaggtcaggtcaaaaaatctaaactgtttggtttgtagcagttttcacagacacaggagcccattatccagaaacagctgtcttactaatacttatttctcttaggaggcactccacacaagcagggactcgctggtgttgtgtttgttctgtattaatggttaagggaaggtaaaggggtctttctgatagtttttcctgtggcacagattttgcgctgtggtaatgcttgttgtcattttgggaaaaatagtttttttatatataatacttatgtaatcattttgatacagttctataaaattatatataatatgaaatatatatttgagaaaaataattatctatattatctatatctgtttaggccctgtttatctaaagtattgctaagtcttgctacggtataatattttcc

SEQ ID NO: 39156 - DNA, 1050 bp, Homo sapiens
attaggcttttcccaactttcagccctcacctcatcccccttccacattaccttctatagcatctctacccagtttgtttttttacaacctttcaatggtcttcactgaccaaaggttaaattccaaattctttaccgtatataagggcttcataatatgcttcctctggcaaacttcttgacactgaaatacctactatttcccacatacagtctctgaagactcaattcagaacttactttcttcattgccttctccatcttcctttggctaagttaatttgttctatgaacactcacaatactttagatagacttcccctagagtagtcatggtatcctaaatattattcttctctcatttgaccaagaacaaatgaatgaaacctctaaaaataaccactctgctaaatggttattttaatatctaaaggaatttctaattcattctttcatcacatgcctgttaagcattggttataagtgtgggactctgtgggtactaaatagcaaaaccctgtagatgtgttctctgcctttactgttactactttgagaataaattaaaacaagcagaactttctagtaagttctttggggtaattatgctttggaaagccgtgggtgttaaagactaaaaaaagttaaatgataggaagcttgtctgtctctgactttcagttgcgagcatatgtctagtttgtggtggtctggagcttcctcagccagtcccaaggtccagtcatcatggtcttgaggaaagtgacattcacctggggataatttctgtgtattcattgggcagttcatatagttttttggtgataaatcataggcaagaaccagtaggaaagaaggttctttttttttcagatatgctttccttttaattcttgttttcctcatacaaatttaatggacataagacttgtgggatttggagttaattttatgtttacatttttaaaaaagtatttctccctccccaccctttccccttttctcctcctacgccttattcctcttcctcctcctccttgttcctcttcc

SEQ ID NO: 39157 - DNA, 1015 bp, Homo sapiens
tgttttgtgctaaatgtaagagataaaactggaaaaaagaaaagggggggaggacagtgcaagatatcagcccttgttgcctagtcaagaaacagaggaatcgtgaaagaaagcttattttccatgtttgcaattcctgggaatgaccaaactggttttgcaaaccatgtgaattgagtccatgtgtatgctaggggtgagggagttattgagactagtttatttgagatattctgggtgtcttttactttctaaatattcttactccttttcttatgggggaaagaattttatgcaatagactttcattaaattgaattttcacaaccaaattgaagctgttatcagttggttgaactcttgctaactgaatgactataaggacaggtttcaatttcttcttatttaaagagtctgatttttttcagctgctattttttttcctcatattttcatgttgcctttatccagttggctgtttacattgtcagtaataagagttagaacttctaagtgtgacatgtgttttttatttcaaggacttctactaaaattgtttcttttgcatgcatgctatggaaggcttgcttaaaaactttgagaagactctaagtagagcccagaatttcgctaagaatgtggaccttttctttggtaagttggccatcctgtagaaagcgaatggcagtttcctaaagaaaaccctaatatggcttctttgaaaaaaaattgccaacatgcagtgccaaatcgtatttagtaaaaccttgtccccaaataaaaccagggaaataggcacaaagaagagaaacaggatacatcagtgcatgttgcaggagggttggatttgttgaaagattaatcataaagtatgtggacaaaagtgaattaagtaagtataagatacaatgtcactacctatttattcatcttttagctaaatatatgccttcccatgtctgcggacttttcctctcttattttgaccagcgccagctcacctctgctggtgccc

SEQ ID NO: 39158 - DNA, 1100 bp, Homo sapiens
aaaggtcatgcatattttaaagctcctgaacattttgccagatagcattccatcaagcttataccattgaaaagtcaaagccagcatggcagaggagttcttgtctcatgcctgtcagcaccttgttttgtcattgtaaactataattgttgctgttctgttcccttcttcaaagtcatttaaatggatattttaaaaagtagagggttattaagcttctgaaacacttcaaatacaacttcaacctatgcatatctattaaaagtttaatgcagcaaatttactaatatttgcaaaaccagtttagacaaagataatatatagatatatagccagatcatgactttcatgatgtaagtgttggttaagtaaaaattatgagttttttagtttggcagatttttagtttatttttaaaagtacaatatgcaaacagaaaattatacatatcataaatatgcagttttgtgaattttcataaaactggatacacccatgtaatccgtacccagagaagacatcgaatgtgatcaattcccagaatcctccctcatgccctcttcacaatcataccccttcttcctgactttcaacactgtagatcaatattgcctgtgttctactttgtataaatggaatttcgtgtaatgtatgtattttttgtgtgtctggcttcttttgcttaactttgtatttgtaaaatttatgcattttgctatgtgagagcatgtgtttgttatagtctccattcgtttttgttttgtggccctaatgttgagtgagacctcattaagatgtcatgtcttgatacaccttacatggtctctgaatgatctttgcttgtttcctattcagcatagatctcatggctcaccttttcaaccactaatcttccaacagtcttaagttcctgtctccttttctcttcatcttctttacattgtggcctttggctgctggttgtttttgctgtcctcttcatcggacttcctttggtgggtttgaagtggctatttccatactcaccacagcccagcagctggatgtggtaaggacagggagaacaagcctgcacacctctcttacactcccttccatta

SEQ ID NO: 39159 - DNA, 1085 bp, Homo sapiens
ttctgttccttttgttgataaggatgaatagaatgatataatgccctgttctctccctctagtttctgggccactgttatattgtctaataatatccactcataggacatagggtggcctttctctctttttataagggtataattatccagtagaaagtcaatattcctttcatcaatttttaaaattacttaatttcttttgtttcgataggtataggccctgcacggccttacaaatgagtaagggatacagcccaggagcaatgtccagctgcactgtttttacttacataaactcatgaacagtgtgtcagccagctttacacactgtgaccgtgagggatgtattttcccaaacattactgatcctttattgaaatggaaaatttagtttgcatgtggaataatttccctttgcaagtcaattgtgatttattaaatttccttgtccttcacaagatgtcaatggtgttatctcttgatacacctcaggacacgtcttgtctgtttgtcgtcactaggccttcatgatatacagcctttatgatatgtcttcctgaactctgaactcttgtaggaaatggattctatcatataaaactcagtatcctccaaatatgcctcagatgaagtagatttcagataaatatttgtaagttaatgagataattttatcctgtatgaaaataattctgaaatggaagacagcatgtagatacatcgtaaatattgttcactctatgtggacatctctccatggcaaaagaagactcagacaaaccaaactattatactaccaccaaaaaagtctgtgcaattaaaaaacagtgcaacacaatgcaacaatgcatccagccatgatggtctgaataggtgcaatctcattaaggcagaacacccccatgactgcttcatcttgcatctgtggtgcctagcatggcagccagtacatggtgggcattaaagatagacatttatgaatgaatgaataagacgccccacatttaaaactcagaaaatatgttttatgctattagttttgcttgaggtcccatttagtatgtgttatgtgtgaaggtggga

SEQ ID NO: 39160 - DNA, 1027 bp, Homo sapiens
tgttgcatttgcatacaacttacaattttgaaagcatcgtctcaaacatacattattcttcactccatcttccttgttaggacaagagctgtttttctggtttcatacatgaaagcctaaataatgtctctcacctgggaaaaagtagagacaggactagagcccaagccttccaggcatccattctttctgcctgcccacttagacttaaagtaagactctgacagcaggctcttgaatttacctttgcttatattataacaacatccaaagcagggacaaccttgatgaccttgaccaactttaacacttgtgtaaatacaagaaaaatcaactttgctaaacttgtggtgtgcccataggtgacagtaagctaaaatgctaactccatggcataactgcatttgctacatgcagacagatagagttgatgtttgtcatggtatgagcccagggaatcagacaagtacttctctaaactcttcccactcaacttaatacaaggtaagcaggtcctgcagtagttcaaggacctgctgcacactgtatacagaatagggtactgtttaacagccttttatctgtcatacgtttcttttcacttactactgttactgtagcctgcctccacatcaagcttcgctgcagaaaggagatggatagacacctttaaagaattattcttcccccacttcttccctccatttggcttcctcttagactgtgcctcaagtgaagacaaggctagttacggcctcattatgcaagaggtcagagtgagatgtgaggtgtctacctttctctctaagcagatgcacccaaccaaagtgtgcagaaagaaccactgctgttcctactacacgctgattacagttgcacctggagccacattccagcatcagtgtcattcagatcgtcttagttctatccaagaattcttgtagaacctaagaaggagagctgatcagactaccagcacattaactcaaacatgccacggagtctaaataaatcaagtaatatcata

SEQ ID NO: 39161 - DNA, 1023 bp, Homo sapiens
ttctttatatttattcctattaatacatgtagctctagctcatttattataaccgctgtatagtatttcattgtaattatatggcatagactatgctctcttttagatagacatttaagttatttctaattcttaactcttagaaaccatgttatggaataatttttctggagttgaaacagaaaagaggaatttggggacttagtgcaaggtacttgcttcaccatttattgtgtaatacaagttttaataacagtaaattaaagtattagaatgtgtgcattcaataataacattttgtaaaaatatttcaaagatttcaataaaaattaataaacacaattggtagaatatccctctgcctgctattggctttgctgcctccctagtctttagttccctcaacccagaatacccttggaattgccccttctgacttggctggccctgtaagggcttcctgtcttcctgctgagtgtatgcagctttgagtgaagttctttctgtatctctggcaacagttttgttttctctctctacccaccttgcccactctctgactgcttcccatcccaaaggagagatgtgttttcagatggcacttctcatctctactcagcctttttttggagggtgagtggctagatatgggcgatggggaacacaaagggaaatgctaagacacaaggggttttcatgagtggtaaaatgactggagggtttgcaggaggatcagggaggagaaagagtaaggaaaggggaaggagagagggaacagggaaaaatctaggaggggtggactaagatattatagtttcaaatatcagtatttatgcaaaatacacaaaaatatatgctagtactttaaaatggcacctattaatggaaaattaaaaaccggtgttacagttagtagtagtgtaaacacattttcaactttactagataatgtaatatttctttccaaattggctgtaccaatttacattcccaacagcagtgagagaattacccattttacca

SEQ ID NO: 39162 - DNA, 1033 bp, Homo sapiens
caaacatgtgtgcacacacacacaccccccctcactcatttgggagatctaacactgcacatataaatattgaaacttccaggctgggcgcggtggctcacacctgtaatccaagcactttgggaggctgaggcagttggatcaggaggtcaggagttcgagaccagcctggccaacatggtgaaaccccgtctccactaaaaatacaaaaattagccaggcgtggtggcacgtgcctataatcccagctactcaggaagctgaggcaggagaattgcttgaactcggaaggcggaggttgcagtgagccaagatcgtgccgttgcactccagctctgggcgacagagcaagactccgtcttgaggaaaaaaaaaaaaaaagaaatttccacatgcatttccatcagagaactaattccatctccccttacctagccccttgctctcctgcctagcctgtgggaatctttgaagattctttgtattctaagaactgtcccaagaacaaagtagatgctcaagcaatgtttgctgaactagactacatttgattccatgtaaccaaatgactttatctacatttttttctattccttttattcattagcacccactaaatatactccactattctaggaatagggaaaaaaattcatgaacaaattagaaaacaatcctaccctgatggtgccttacagtcttaattacgtgaatagaagctattgttgttattcttacttttcaggtaaggagaattgaggcttttgtcacataggaagaaaaaattatgagcaagtcttgcccttaaaatcattctgatggtcaaatgcaaatttgctattttggtggactcttgagaatgtgggaaatagacccatgtccactttatgcaaagagaaaaagctggcatgagtgggagtgtttgaacatcaagaatgcttttgcatttcttgggttgtgaacaactgatggagtcaacttataaataagcaggatcatgactcattaccaggatctgtacagaataaataat

SEQ ID NO: 39163 - DNA, 1030 bp, Homo sapiens
gtatttgtatagttttagttttaatgtttttcaattttatacttaaatatacttttcatacttaaaattatgttgctagaatttagatactcttaattctatagcagggtctttttctctaaagggccagatagtaagtatttttggctttgtaggccacatgtctgtgtttcagctgctcagctctgccatcatagtgcaaaagcaacatagaaaatatgtaaatgaataagcatggctatggtccaataaaacttcatgggccctaaaatttaaatttcatataattttcatgtgtcatgaaatattgtaattttgacaactttttaaacatttaatatgtaaaaaaatgttcttagcttactggctgtggtctgttctcaaatagtgtttaacacaagcaacattataatagtgaatatgtgcaataaatagtaatttacctctgatctcaaccagaaacatttttctaagtggtaagcatcaggctttcctggttcttaatgtcagtgttaaaactcgtgagtccatgggagaagaacaaggagttgtgcgtcagggccactgtggatctggatcttagcactacacatactggctgtgtcaccttgaacaagttacttaagctctctgagcttcaattcctttctataaaaggatgataataatacttcttggcaagacttttgtcttagataatgtatataaattgcttaacaataaatatcagtatgtcttcctttctttaattagtaatgcaataataggcaacagctttttaaggaaaatgaaaatatgcattgtgttaacagactccatttggtcagataaatttagttgcatttagaaatgtgtaaactgggctaaagaaagcaaacttttggtaacaaaatgttagataaactttgattattaataatgtagtcctggtagcatattatatgaaacttttaatgaatttcaatgacttttttttttttgaaacggagtcttgctctgtcacccaggctggagtgcagtggcgcgatct

SEQ ID NO: 39164 - DNA, 1032 bp, Homo sapiens
gcccatcaggctaatttttgtactttacttagtagaggctgggtttcaccacgttggccaggctggtcctgaactcctcacctcaggtgatctgactacctaggcctcccaaagtgtcgggattacaggcgtgggccactacacccagcctaattttttttaattgatataagtagatagtatcacctttagattttatcctactacattggtgctctttaagtatgttgcaatattcttgaaagtaatttaatgtgtttcactaccttaatcctaattatataattacatctgcagatttatatggaacatagattttcctttgaaattgttagcacttgtaaaattattaaagtgtaaaatatagagatagcataaatgcaagcataccttagcaaataaagcagaggtcaggccttgtgggctgtctgctctctgttgtcgctatttagctctgctattgttgcacaaaagcagccatatacaatacctacacaaattaacgtgattgtatttaaataatttgacttatgaacactgaaatttgaatttcattaaaatgttcatgtcacaaaatattctccttttgatatttttcagccacttaaaaaggtaaaaaccattcttagcttaaaaccatacagaaacaggccatgggtcagatttggcccaactcctgatatagatctatatgtgtatacataagttatgttgtacatataagaatgcatgccaattatatgaaaatttacttccagatataggtaattccagattctaatttgctgaatggtgtcaggattcatgatgaactacacttcatatacaaaaatacttagatctattgggagggctagggcagtatctaaaagagtaaattttcactttctcacttaattgaaatgtatcaagttcctattatatgccaagttctatgccaggaaatgggaacccagtgacctaaagaacacaataccagccatccaggaaccaaaagtctagcagagggaggcagacatgaaaataatgaat

SEQ ID NO: 39165 - DNA, 1149 bp, Homo sapiens
tggcaaatttgaaaaacaaaaaaatgaatagtattattttctattaaatgatatcaagatgatctctaggaagggagacattttctgcttgtaaagagatttctgtttccttggactttttaattttctgatatttattttttgtcttcagcgtgtgtttgtctgggatttggatgaaaccatcattgtttttcactcactgctcaccgggtcttatgcacagaagtatggcaaggtaagaaatcaagaaatgttactccaagaaatcttgttaaattttttgtgtttgtttaaaatcaagggctatttaaaaattcttttaagtgtttttttattgcagtctgtgaaatcttctcttaattatctatttctagtgtcttatagttctttaatatgaactggcaaatttaacaaagctaattataaattgaattccttgctatttcttcaaaaggactgagttttctacatcaagaccaagcttcttagtctcacataattattttagaaaaaaaattgtaaatcgaaatggacttcaaaacattataaaatcatatattatccccaataaaagagctttaagaaattgtttaaattaatttgttgcaattttatagcaatagcgagtaatctttcgtctgacagatcttttggatttatgaatgagtgttttttctgtgacttgagtacacatatgaacagcaaccgaggtaacaccccctcccatacacaaagtcagcaatagatggtctcatgcctcacctgcctttctctcttgctattgtttttattttctcttttatttatttatttcattgttattattattattattattattattattattattattattttgagacaaagtctcactctgtcccccaggctagagtgcagtgacatgatcttggctcactgcaacctctgcttcccgtgctcaaatgatccacctgcctcagcctctcgagtagctgggatcacaggtgcccgccaccatgcctggctaatttttgtatttttagtagagacggggtttcaccatgttggccaggctggtctcgaactcctgacctcaagtgatctgcctgcccctcggcctccaaagtgctgggattacaggcgtgagccaccacacccagcagttat

SEQ ID NO: 39166 - DNA, 1032 bp, Homo sapiens
gtagaattcaatctgtagtttcatgttaaagatgattctgctgtaaaagaaacaagcaaaagctcatattaaaccacattgagccagaagtttcttagaattggtgggaaaaaatttaactacaaaataaaacatgcaccaccgtcacataaattgggaattctttgtgtaaccttgtgcccagatgtttggtcaagatttataccagggcatttagttgaccctttatcagctggtgcttggagcattatcagtgaaaatcagacagaggaactaaccgaggcaacagaaagaagtcctttctcaagtagagagcctcaatcattgaaggacggtggttagcaagcattatctttctggaatcccatcaaaaataaatataaacagttattaatgtcatttcaaagactttcaacaggtttattttatcttttaaaaaaatcatgttttatgtcagtgtatcattctcatgcatagtgtcaactatgattatcatagtttttaaaagttcaaataatctgtaggtaatatcaaaaccattttataccccttcatatattttacaggtgatatcaaaacctttgctatcaaaactgtgatcctggatgtgcttctatatataaaataaaccttggtgatatcttattagaatcaattttaggtaaacaagattcctaaaatttgctattaggtcacatcagattaatctcccaggattttgtttctttatgtgcttctctttttttctaaaaaggaagagtaattgaggaacataaactagaatccaatatactaaatatacatgtgcatactatacatacatatattcacatatatatcatagaatacaatatagtaaataaaatgttcatatatagtatataatcacatatatccatatacatcatgagggtggggctatgtgtctggtcaccttgtatccccagtgcctagcagtgaaacacataagagatgctcaacagatacataataactgtaagagaacaaaaaatgtagagccaaagaggataa

SEQ ID NO: 39167 - DNA, 1023 bp, Homo sapiens
gcttatccctactgatgtttttggagtgtgaaacacatttgtttaatcatctgtccgaagtaacgccttaccttattcaaatatatgttgatttcataaacccagaggttgtgagccagttcaagtgatgttcaagaggcattaacttaacactttatgaatctttaggttaatgaatgcagtggctggaagaataagcagtgcattgtttttcaggcaaggaaagctgttttgagcgtatagtgtccagatttggcactaacataacttatgttgtgattggagatggccgagatgaggagcatgccgctaaccaggtaacttcactctgaactttatctcatttatcttccaggaaaagaaagttgctttgaacgaataatgcaaaggtttggcagaaaagtagtgtatgttgtaattggggatggtgtagaagaagaacaggcagcaaaaaaggtaacctgtctcaaacaatgtcggtgtgatacttctaatgcaagcctttttgtttgcatttctgtagtttggcccaatggcagcttgacaaatgatttaaatttatagatgcaaagcaataagagcatgagagggtcaatacttacattcaaataaaccatttggagtttagcattttttgcctgaaatttgataggaaatgcagggaaatttagttatatttatttatgtgtttgaaagtatatacatatagtaaatatatatagtaacatatatatttgtgtgggcatgtatacacatgcttatatagatgcatatgtatatattaatacacatacaatgtgcacagatatagatgagccaggggatctgcaagaaagattgggggggagaataaccattgttaagcacatgaaatttagcaagatagagattaatgagctccatacaaaagtcatgtgagtagttcatgagacctgcatgccatatggtcctcgtgagtgcctggaagtaggcatgctccatgataaggaatgctgagggcagatttaatagctgaagaaaaac

SEQ ID NO: 39168 - DNA, 1034 bp, Homo sapiens
tggtcttatatttacaacactttaatgggttttttaaaaatctgtggaggttgctggtacacaccaaatgagtccaaactggaatgagcagctttagcaaagaactcttaccctggcaaagcagcaacacacatgctccgtctgacaaggtggtcaacaacattcctcaaaatgggagatcttctcagccctgaggtttgaatctgactttagcctacctaacccagaaaatctgaattggaatgcactcagactgtataaggacagtcctatttagacatgtaatttgtgtaaattattgatgaaaataatttactgtgactttattagcagctgactttcaaagtggatgcaatttttctttcttttgttggggaggggaatgggaggggaaatgggaatataatattgtctcttttttaagtttggcaaacagaatgttcatactgatgtgttgtgccttaaagacaagacagcatttgtgtgttacaatgtaactttggttaaaatctctgtagataatgaaaaaaaacaaaaaaaaaaacctttgtgatgattcttaacatgaccaaatttaaaagtcaagctctcagagcttaattaccgcatcagcaagaaactgagtattttttgcaataagaaaacaacaataataaaggaaagcttgtgtttcatttgggttcttaataattccaataattgtatgaggcaactatttgcgcatccaaccatgagtggaaggtttgggaaagactgtgggacctttacttagaaagtgaaatgtatgtagaagtctcaagtaccccttctacagttttactggagaaaactaagagccatattcatgacaacttgcacagttttgaggttgagacttttgatatgtgtaagttgcatagaggaggatattatcatgcaaatcatgagcaattatcacataaacttttttagaatgtgccatgaacatggcataaaattcacattgagtgcacagggcttaaaataaagctaagtatgtttattcccaatgccat

SEQ ID NO: 39169 - DNA, 1044 bp, Homo sapiens
tttcattttctttggatatgtattcagcagtgggattgctggatcatgtggtagttctatttttaattttttgaggaacttctatactgttttctataatggctatgtgagtttactatcctaccaacagtgtgtaaagtattccctttccttcacatcctcaccaatacataggtgttgttgttgttgttgttgttgtttgtttttttataatagccattctacctggagtgaggtggtatctcattgtggttttgatttgcattttccttatgatacgtgatgttgaacattttttcatatacctgttggccattggtatgtcttcttttgagaagtgtctgttaaggtgttttgcttattttttaatcagattatttcttttgctgagttggttgaatttcatatatatattctggatattaatctcttatcagatatataatttgcacatattttctcctgttctgtgggttggcttttcaccctgttaatagtttcctgggctgtgcaaaagctttttagttggatgtaatctctgtcatcttgatctaataatcgttaaaaggtaaagcagtaatacagcattttttggtgctaaaatactgtgataactactatacaagtctgtgctttatcttagaatagattatccaaatttgtttggtggcaagattccagacatcaagagtcatctgaaattgtatctcaatgtatttgttactgagttcaaacagtgaaagattttaaagttaaattgcagacaagacattcccccaagtatttgagtctacatctctaaaaaaagtctgtctacataaccactctattttctcttctaacaaaattaacagtaatttcataatttcatgtcactcagatctattcagatccactcaaatcactcaaatttctctcaaatatcttttatactgatttgttaaaaccgggatctaatcaaggaccatgttatacagacattttgtcattttaattaaaaataagggccttacatttatcagtgataaattttattttgttggt

SEQ ID NO: 39170 - DNA, 1046 bp, Homo sapiens
gagaatcatttgaacccaggaggcggaggttgcagcgagctgagatcgcaccactgcactccagactggcaacagagtgagactctgtctaaaaaaaaaaaaaaaaaaaaaatatatatatatatatatatatatatatatatatatatatacacacatatattttctggtatatgtatccatagtatgattttttttttgtaaattcatgatatcttacatttaaaattctcatgagaaactcataaatttcacagaggttttacataagcaaaatattaaatataattggtacctgtttgttatgtttgtcttgctatatcttttaatctttatttggagaaagggtggtttcagaaaactaggcattcatgtcagagagtagcattagcatgctgtgtgacattttaatggtactatgattataaattgtacagaggcattgcttgggagtcaggcccaaccttaggcaaaaaagaattaaagaaaatgtctttaatgtccttgagctttgttttttctttcttcaatccacagaggaaaataatttagtctctcaacaaataaactttagttttgactcatcccatgggtttttccatcttccttggggactttcaaaacgtattcccaagatcccacctgcatcttaaatatgggatgataggagacgagtctgtttgttcccttctttcagctctctgtttctacactttggagcatggatgtctgagaagccacaaagcctattgaacaatctctactaagtatataataaaacaatgcatatgtaaaactctgtatttactgagttactagatattaaacaaaacaataacaaactgaagacaattcacctggttaagcagtatgcattatttacttagatcaggaatagcctatgaaatgttactgaattggttcccatgaacaaagcatagcaaggtgggggtaaagtgagtcaggaaggacctgaccaagataggatgtgtggttaggactttcagagagtttacagtgggtggatttgttagtttcctgggtct

SEQ ID NO: 39171 - DNA, 1101 bp, Homo sapiens
tggctgtgagagaagaaggggagattagcaggctgtgcagggctggaagggcattggaaggcttctgctcttgctggagagccactggaggattggagcaaaagaataccttgattgcattttaaggggtcattctggccactgtgtagagaactgatgggaggggacaaaggcagaaatggggaccagtaagtgggtattgcagtaattcaggatggagatcatggtgactcagaccagggcagccgtgaaggtgttcaggctctggatatattttgaagtaagagccaacacaacttcctgatagactgaatgtggagtatgtgagaaagaggaaagactccaaagtttgtggccaaagtagtcggataacattgacatcaactgaggtgggtaaggcagtgagtagaataggtttgagaacatcacaggttcaatttagggcatgtgaggtattaggtatctgttagacatttggaaagacatgtagagtaagcagttgaataaacaagccttgaattctagagagatagctagagacataaatttcagaccctggcatatcaatgagataaaaactgtaaaactggctggacgcggtggctcacgcctgtaatcccagcactttaggaggccgaggtgggtggatcacgaggtcaggagatcgagaccatcctggctaacatggtgaaaccccgtctctactaaaaatacaaaaaaattagccaggcgtggtggcgggcacctgtagtcccagctactcgggaggctgaggcaggagaatggcgtgaacctgggaggcagagcttgcattgagccgagatggcactccaacctgggcgacagagcgagactccatctcaaacaaacaaacaaaaaagaaactaacattgactgagatcaactggctggtgagggtgatagagaagtggtcaggggactaagccccagggcacaccaactttaagagaggaagcagaggaatagagaccataggtaagagataaccaggggacgggtcgcagaaggatgtgaggcaagcatttcaggaaggactatccccagccaagagcactatctccagtcaaatgctggggataa

SEQ ID NO: 39172 - DNA, 1051 bp, Homo sapiens
atggaaaaagagacccagcactagaatcgcatgctttcccagcctccttcagctggatggctgcagacacttactatggcacactttaaagtgtaaatcagatcatgtcactgccctgcttaaaatccttcagtagcttccactgcaattagaatgaaaccaaactcttcactcagcctgcaaagccctgcacactagtctctacctacttcctaactcattgtcaaagattacagccttctttccatttctggaacaagtcaagtgtgtttctgacttagcctttgcactacctgttttttctgtctggatttactcccctatcttccaaggttggctctttattacccaggttttatcttaaatgttacctctcagaatagccttctcagatccgcccagttgaaagtagtcctttagtcacttactatctaatcagtatactggaaatctcatggtgattgtactcgctgataatgttattgtagaacctagatcagtgcctggcacatagtagatgctcgataaatatttgttgaataaatgaattggatggatggatgaatgaagaaatgaccacatcaaattaactgctaaaagtgaaaagtaagtttgcctcagaactgaaatatttacaaaacattaacttgtttgctttctccatttgtgcccacttaagctggggggaaaagtaaatcacagctgaaacagcaaatatggcaaacatcacatcccattttgagtttgtagcttgcaaggcagaagttcaaaataaaatcttttcaaattacattattgcagaaatcttttctgacctctcagctgagtcactgtttattttataagaaacttaacatccttggaagaatattcgttttttcagctttttagaaataggggtagaacccagctccaaatgtagaggaaaatgctaagcaatgtgtagtatcatgtttgaagttaacttgatactgtagtttcctttcttagaaatagacattgggatttctacatcaggacggttaccttggtgacaaaagttgattcattg

SEQ ID NO: 39173 - DNA, 1021 bp, Homo sapiens
taaatcagaggggatttgatgaaaatcaagtactggacctgtaagctctaacatatgttcttcaaaaactttccttgtgaaatggatacagtaaagctgttttctaccaatttttatgacttagggaactcattggaagattgatttttcaaacatttgccattttcctgaaataatcctttgtggtgatttacaaatattagtctacttagtactttttaaaagattcaaagttcttcttccactctgcaaaaatattggaatgagttggggtgtagtaaaaagtcaatgcaagttgcaaaactctcactgtgccttagccatttcagagacaagaacatttactcactgggctgtgtaccatgcgtttgtaagcaaatgcagtgcttagatcttctttgcttcacttgttttcatacatttcctataacacttgtgtattcttttacatagccgaatgccttacatagccaaacacgaaaatatttttgatagttattatataagatatgggagtaaccatcttattcaaatttttaaaacatactgagttcattttgattgttgagaaggacgctgctagtgagtcagtcagatatttattgaatgtccatcatttattggagattcagtgaggaagacaacagatggagttcctgcactcttagagcatatagtccagtaggaaagaggaatgctaagacaaaatctagaagcagctagtgatgaagactgtgaagttctttaaggagaggtaatatagcacagtggtcaggaacaaggattctggagctggactgcttcagatcaagttctactttcctgctgttaggagactttctttggtcatgccatttaaacctcttgtctcctcattcctcatttctaaaatcagggtgataatggtatccacatcatggagttttgaggaggattaagtggctaatgtgcataaagggcttagttagaacagtgactggcagagtaaaagctctgtgagcattacctctttttttttgag

SEQ ID NO: 39174 - DNA, 1063 bp, Homo sapiens
tagtagagatagggtttcatcatgttggccaggctggtctcagactcctgaccacaggtgatctgcccaccttggcctcccgaagggtagggattacaggcgtgagccaccacgcctggctaaaactccatctctactaaaaatacaaaaattagctgggcgtggtagcacacatctgtaatcccagctacttggggggctgaagcatgagaattgcttgaacccaggaggtggaagttgcaatgagctgagaccgtgcctccgcactccagcctgggcaatagagcaagactctgtctcaaaaaaatatcaaaataaataaataggccgggcgctgcggctcatgcctgtaatcccaacactttgggaggctgaggcgggtggatcacgaggtcaggcaatcgagatcatcctggccaacatggcgaaaccccgtctctactaaaaatacaaaaattagctgggcgtggtggtgtgcacctgtagtcctggctactcgggaggctgaggcaggagaatcacctgaacctgggaggcggagattacagtgagccgatatcgtgccactgcactccagcctggcgacagagtgagactctgtctcgaaataaataaataaatacataaaaataaataaataaaattttttagcttttttttttgaggagaaaaatacacttatagctggcccgttaaaatatagtatacttgacaatgaaaagtaaaaaattctccattttggcttggtagactttgcccgcctttagcagtaaaattgttactctattgttggtttctagtacaatacactggtacagagtgatcactttatttcctaacacgagaattttcagggcctttcctgcctcgaacacacaccagctgtgtgtttagtcaatactgtgtttatctcagcgtgagattcaaattttcctcctaatagcattatcacggtgcaacgtcactttttgtattccttcatttgaatagttcctatacattattatggtttaaaaaataagtctgaaggtggcaatatcctaacactgaaagcagtgtattt

SEQ ID NO: 39175 - DNA, 1029 bp, Homo sapiens
aataaatgcatggaaatattatgagtactatgaatgaaacaagaaacatgagaatcttttttgatgtcttctgtttcattaatcaccaggttgtattaattcttctgcctaaataaatctccaatccatcaacttttcttcatcatcacagtcagtaccttaagtccaagctgctattacctctttttggaccactgatcttcccatacccactcaagccctcaagtccattcttctcactgtggccagagacacctttgaaggcaaagctgatcatagaccgatgttaacagtaggggaacctggctgttgaggtgtatgggacccctcttcactatcttcacaagttatctgtaaatttagaacttttctaaatgaaaaatgtttattaaaatgttttaaaataaggcaaactgaccacacaaatttaagttgctgcttaaaatccttcagtggctttttttttctttttttaaagagaaaatcccaaattcttcaaatgacctacaagacctgtttgacctggccctgcttacgtcctggaacattcttccctttccctgcgccagcctcatgggccctctggtcacacactgtcaggctccttgcagacaagcaataagctgctcttctgctgtctccctggctaactcctcaaccttcagatctgcagctcagatgtcacttcctcaggacgtcctcttaagtcatcctgcattgtcttttggggcacttgtcaattgtcattacgtttgtgttttggtgatttttaaaaacatgtcagttgatcccactgaactatgagccgcacaggagggctgaggccatgtctgtcttgcatatggtgcttagcacctacctggcacatggaaggactcatcagttgttgaatgaataactaaatgatgtgaaagtaagtgttgtgacatttttgctccttgctctaaagactactgtgcccaagcactgcaaatggagaggagtatatagtgaaatttgcttaaaatgataaaaacacaacaaaaatta

SEQ ID NO: 39176 - DNA, 1063 bp, Homo sapiens
cccttgctatctttgcttctcttttcccttttcttaaacttcaaggtctccttacatgcatctttgcagggttgaataaatctatgaattagtgggctactcaggtatccctacaccgaagaagccatcgatagctcaggttatgtcttagattagaatcatcctccccatgtcctttttgcttcataagcaaaagcccactcaggatgttccctaatagtgacagatttggtgaaaaatatgaccaagtacagttgccactgatagtcactgattccatcatagctatccactggtttttcaaccaagtaatatcataagacttggaggctaccgatcaagaacaattagaatattctgcagttgttgagtagaatattgtgtaaatgtctgttaggtccatttggcttaaagtccaacttaagtccaatgtctctttgttgattttctgtcctgacaacgtgtctaatgctgtgagtgggatgttgaagtcccctactattattgtattggtgtctatctctttctttaggtccagtaatatttgttttatgaatctgggtgctccagtgttgggtacatatatattaaaattgttatagtctcttgttgaattgatccctttatcattatataatgaccttctttgtctttattgtttttgatttaaagtctgttttatctgacataagtatagtgattcctgcttacttttgatttccgtttgcatggaatatcttttcccacctctgtactttcagtctacacatgtctctacaagtaaagtgagtttcttataagcagcgtatagttggtagttggatttttttttttttttttttagacggagtcttgctgtgtcacccaggctgaagtgcagtggtgcaatctcagctcactgcaacctccacctcctgagttcaagtgattctcctgcctcagcctcccaaatagctgggactacaggcacagcgccaccacacccggccaatttttgtgtttttagtagagacggagtttcaccatattggccaggctggtctcgaatgcctgacctcgtgat

SEQ ID NO: 39177 - DNA, 1054 bp, Homo sapiens
agttcaggctgggctcggctgtcctgttcttttgctgatcccagctgtgcttgctcatacatcttcggtcagttggtggcttggctggggctggctgacttacaattgctgcatcaggtccaggtgggaagattggtacctctttctataaggtctttcattttctagcatggcaggttatctacatggtggcagtggcagggaaaattgaggaactcagaggccccaagtgttttgggggtttggtttgtttgcttgctgatgtcccattggtcatttcaagctaatggtcactccacacctcatatttaaaaggtggggaaatagattctgtttcttgatggggatatctacaggggtaattaagaattttagaacaagaaatgtttagctgtttaccatattacagccttagtgaggttgatgtgattttcatggaattgaacaaaagaaattatttggtctaatatgtcaatatttatttgtgatgtttagaaactgaaattaaggattacaacctggggaaaatgttgactctagaaatagatttgtgagtcctctagttagagatgacagttataagacttggccaggggagaaggtttagaagggagaagaaaatataaataatgaacagattatttgttcaagtgaattagctaaattaattataactaatatttatatattttttctgtgactatcactgttacagtatttcctagaattcagtgctaagggcatatctgatgaatatcaataacttatttctagtggcaatcaataaaggccagaaaagaacccgtgacatgaccataaaccaatgaggaatttgaaagattttccaccttgagtatttaggagctctagcaaaatctgttgactaaaaaatctctcagaatagctgtttgccagaaatttggcaagttgagccagagagtgatttggttgataacctgctaatagtggtagatgttttatgaaataaaataacaatgcattttcttagggtcaaaaataaagattgaggttgtagcccagctacttgttgtga

SEQ ID NO: 39178 - DNA, 1024 bp, Homo sapiens
tgtgctcatttagtactgccctgaggtagaggaagaaaaacattaaaaatagttggtcttgaatacaatgaacaggtttaaaaatggaagctctagttctatgaatcttactagtttaccaatatattattacaggaagtgtaagaaactttcctttagaagatgtcaagatagctgagaaagcatttctttctgggtacctaaagataaccatgtcatcaaatacatggtaatttttatatttaatgggatacctttttgtcatattcagtctttacactcccaacttcagccaaatgggcttcttaaattaatactttttttagctgagtaagcatgcttaccttttccctgaataaaatgcttactgcaataagtcatatccagtagtatatgtatagtattagcaactaaacactaaaaacagtgctggcattaaaactaaaaaaagaatacattagatatttggaaagttcttgtctgtttacagcactgcgttatataaaatccagttcctcatgcatgcactttctttcatgagtctaaagtgaatgatgtaattttttaacagagattgcatagtggtatgtttctcagtattcaagagagtttatattaagtgtgtagttcagctctcaaaatagctcctctttcatctgtaatgcttttaaggcttaaaactcccccataaatttaaaatggcagagcttatagatcttgaagatcaacagttataaagatttctggggaaaatgtaagatttaaagaaaactgttaaattatgaagtacaaatgatacacaatggagagtttggcttcatcaaagtgaatcactgcactcatttagatgtatcttcaaagttttaaaaccatttcatcgcatgcaaaagtagaagcatttcagggttaaaacacctttcagggggtaggtagggtctctgtcacccagactggagtggcacaatatcacggctccttgtagcctctaccttcccaggctgaggtgatcctcccatgcctggag

SEQ ID NO: 39179 - DNA, 1047 bp, Homo sapiens
attttttaattattttttgtaaagacagggtctcgctatgttgcccatgccagccttgaactcctgggctcaagcaatcctcccaccttgccctcccaaagcgttgggattacaggcatgagccaccaggcctggctgaaggtgtgcacttataaaaactcttcaccgtattccaacatgttcccagacctactgttgacccagaactaagctcactggctgttgctcataagcacttcctgtaagggatacaatgagagtgttggttgtcctgtggttagctcctgtgatggagcaagccactccatggtgtgccctattatcagttcctgagcctaaatccatggatctacatgaaggaaatcaataatcatttgcttgcttgataaattgtaaattcccaaagataagtgattgcttcatgagcataagtgaagtgtctctggagatgtgcacattcctgcaggagcacgttccacctctgcttctgttggggctcctagaaaaggaagctcgtacgctattaaagacatctgtgcaattgcaaacctttccacacatccaagagtaagaatgtaaagtgcagtctctctaatccttctgcaaggtatctgtcaaaaggtgtcatcagtgaaggaaacctcagcacatttgggaatcctccatctctacttctccccacttgccgcccccttacccaatacacaagccttggtttagttcagggctctgtgacgtgaagaggcagcagaggcacttaggagcctgttagtgagcagggtgttatgtggtcaccttctcatgcgatctctctgtagaaggacttcatgaagcaggtgcagaccagcggcgtgctgatggtcttctctcaggcctggattgaggagctctaccatcaggtgctcgacaggaacatgcttggagaggctggctattggggcagcccagaagataacagccttcccctcatcacaatgctgaccggtcagtggttcgttgcaaggccttggggcacgtggtagggtgggacggctcacgctttaaagc

SEQ ID NO: 39180 - DNA, 1069 bp, Homo sapiens
taccataattgctttttgctgcttatccaagttggctgtgaaaatgttttagaatctggaaagtaatatacaggtgtcaggtggaatataatattcatcactgttttcttactaggaaggagggaggagaaatggtcaataggacccagaaaccaaatggtatcaaaattggaagttacaaaatagcaagaaaaatatatttgtttcaataatttataaatgtttaatccgctaattcccatcttaaaacttgcgtgtctcattttcctctttcaagaaggactcatgattccatttctattagagaccctctccctgaagcagctcatggtgcccccacagcactgtttgccctgcggtgtcactaggcttggagggcagatagcagggtgacccaagagccatggaaggctcacctggcacattgctcgttgtggcctcataaaacagatatttgatctttaccattcttcattcccgtgaccttcaaatcctcccctaaattctgctactgtgctccccgccttcctaaatccttctgctggcaaggtctgtgcccagctgagtgggaaagaaaaagaacctgtaagacccatcatattggggaacattctttcttccaaatagatacttgagttcccatcacatccaggcctttgggtgtgtatgaggccagtccccgccctggaggggggcttacaggatctactcttagctgtttttgtatcttttccagcattatactcataaattatagacaaacaaaaccttattcattaatttactggggttttttgacatcatttatgaaattgaagctaattctgaagattccattcccagttactcagtttctgggaacaacgccttgccatctttcagcttcttgccaagcattttatgagtgcctaccatagcggagctagaccatgagggcacaaagatatttttaaatatattctttgtgcctttgaattaaaatctcacagttagagcagacttgtacacagttagaatagatagaataataccatacatttgtctacagtgtttacacagcatttccatt

SEQ ID NO: 39181 - DNA, 1037 bp, Homo sapiens
ataaagatgacagctccagtgacaagctacgtggagcctggttcaggtccttttagtgagtctaccattaccatttccctgtatattccctctgaacagcaatttgatccacccaggcctttagagtcagatgtcttcattgaagatagagccgaaatgactgtgtttgtacggtaagtggtagataatttatagccttgctgactgctagttttacttgcgtgcactcacagtttagctccaatgcaatttcaaaaggctttttcacccttccataaaatcaggtctaatgcattttgtgatgttttcctactggctttgttgtatatgttactgaggtctgtcacaagataataatcacttcatttaatgagtctattgcatgcccttcatataagacacggtgcaaattatatgctcccaaaacaaaagactgcaatatagttagacctgaacaaaaataccttaaaacagaagtcttagtttgttcaggctgttgtaacaaaataccgtaggctgggtagtttatgaaaaacagaaatttctctctcacatttctggagacaaggaagttcaagtttaaggtgctggcagtttcagtgactggtgagggcccgtttcctggttcatagatggaaccttctcagaaatgccctcatgtggtggaagaggcaaggcagctttattggacatgttttacaaggctctaccctcatgacctaatcactttccaaaggcctcatctcctaatactatcacattagtgattaggttttcaaaatatgaattttgaggcccagcactttgggaggctgaggcaggtggatcacttgagcctgggagttagagaccagcctgggcaacatggcaaggccccatctctaccaaatgtatatatatatattagccaggcctggtggcacatgcctgtggtcccagctacttgggaggctgaggtaggaggatcacttgggcccaggaggtcgaggctgcagtgagccgtaattgcaccaatgcactccagcctgggtgactga

SEQ ID NO: 39182 - DNA, 1094 bp, Homo sapiens
aaaaaaaaaagtcctagtcatttctaccaactcgaaagccctctaataagcagtctctgctctggagctttttggtgggctgctagagactttgttagatcctaccgttcctctgctcaatcctgcttttcccttttcctttcagagatgtcacttcaccagttttgtactcctaactccatctcagcctaaaattggcacaattggtaccagtggcccacgaacgtaggtggtaagacagcatttgcaggctgagtgactcactgtctggctggctcggaggcccccatccctggtggataggtggcacagacagtccctggcacaagaaggctgtccagtgatgaagacttcagatgaaatggcatgctggtgcaggggaacgcaatgactggtgggtgatttgggtgtctcaaatatgggaagggtggataaaagagacaaggacagtgggcttccatggttattgctgagttggattgacgtcctgcaagtggataatgaaaagctgaggtcaattaacaaacaaaactaagtgtgagccgcagagtctctgtggtagcttgccaacaatcctcatctcatgctgtagccaagcagagcaagctgaaggccaagcacaggatttgatggtaaaagtagctaacagccaacaaatactcaaccaagccaggtctgttagatcaaggttggaatcaaacttgggatcccaaaacatgggatgggagcatttagtggatctccccaaccatctgcctccctagaaaactccctgaatattcacatccttcagaagaggcccacccttccccatgaagagctggaactaccctcccttcctgcctcttccctaacacaagggaagacagtgtccaaggtctttccccatgaagcaaaaggtgtccctcaggactggtccctccccttctcctggctaccaggcctataacgagacttaagtcacaacataactgattgcggctgaggggtctgatgagggagaaatgggatctatgccagaggagccacctaacctggcagcatgtactgcaggggccaggggcgtactcttgggactggatcctgagggtgct

SEQ ID NO: 39183 - DNA, 1743 bp, Homo sapiens
ggaaagcgccggctgctccttccctccctccggattggagagggaggaggaagcgagggaagtgccgccgacaccgggcgagagggaggggaggcgaaagaaaggaaagggggaggagaaaagggccggcccgggaaccacctgcggctcccgcggctgccgcgcccagcgcccgcagccagtggcggccccggcgcctcagcgcaccctgtcggggcgggtgcgggcgcacagtcccgggacgcccacgtcgccgccccaactccccttggcagcccccgggcggtggggcagagccctcgcccgccccccgggccggggtgcagcgcagtgcgggcgccgggagggcggaggcgccaggacggccgcggccagctccgctcgctctgctcacctgcgcccctgcccacggcgctccgcagtcaggagcgccccgccccgcggggaacgccccgggcccctcggggtccccctgctctctcctacttcccttctggaaggtggccaacacttctgggccgcccgggtggacctcaaatagaacgtctttaaatgtccggtggccaagggttctgtagccgactaggagtcagcgtccgactcggaacaactcaagacctcttttcagggggcgtccagtgagtttttttcagcaaggtgactccccctgtggctgcctgctactacagctggaaaggtccaagctgaaatgtgactaatctgagtttcttccaccaagcatgttagttaggggtggaggactagaacctagaaccctgaattcgagcctggaagatatgtaagccacatgctattgagatcgtggtcatgggacacccgctaacacaaaccttctggtaggaagtttttgagaagactgggtccaatatccccaagctaaaatcccactggcccatcgctgtgtttgctcagaaaaggaatctgggttctttggtttctgctttccagttgaccctggttgctcctctgttttacggcattttgggagtcggtctcccagagcagcgctgattgtaatgagaagcgcgttccctctctgggggacaggagcagtgggagaaaaatgggcctgggaaagagctcctccaaataaaacttattagacagatacgggttatggtgttggtggtggtggtggtggtgttttggtctttatcctgttgtacagcgcctcattttttacaatgtgggccagtaactatttcgtatcacctactctgaccaccttcagggttgttatgaggctcaaaggaacggctgctgtgaaaaaacatgctttgcaatttatgaagcactggataaacatcaggaacggtataaaagcatgctgcttactcaagaaatactagttgagtgcctgtgtgttgggcactggctagagataaggtaatgtgcaaagctggctctgtccctgccatcatgagactctcgtgtagtggaccatgcataacatttttaaattatatacaatatggccgggcgccgtggctcacgcctgtaatcccagcactttgggaggccgaggagggcggatcgcctgaggtcaggagcttgagaccagcctggccaacatggtgaaaccccgtctctactaaaaatacaacaattggccgggcgtggtggtgggggcctgtaatcccagctactctggaggctgaggcaggagaatcgcttgaacccgggaggcagaggttgcagtgagccgagatcatgccgttgcac

SEQ ID NO: 39184 - DNA, 1054 bp, Homo sapiens
agcctctgaagcttctattgttctcatggtaggtcacctagatccgtcctctgactctcatcttttcccatatgatttctacctctttatatttttactgtacatttacatacataaacacaaacatacatacatacacacaaacacgtatcttgagatatttctgtttcttccacttgaccttccaggttactaatgttgaaaaacatgactaaaatagaggaaatatgacatattttactgtgaagaaaggacgattttgagagagccataactagcttcaacattagtagtccttaacataatgtcgtatagtccatttatgaagatgttataaagctggctagaggaaactagcataatttacattaattcatatttatttaggatatgtacttcaactttagctgaggtatattttacctgtatagtacctttaggaaaaacagaaaggttttttttttaaaaaattctactatcaagggattgcagagtctgtacttaaactgaatgaaaagataatacgttatgtgtataaattagttgctctgggcagataatgtcacttcagaggactcttggtcaatatgtaatgtaagacctattctttagcaattaagttgtcttgacaactgtgtgtacaattaaaaatattacatagtgttgctcatgcttcatgccatttttcatgcttcataaatatttttatttatatttcttaaaggaagaatacataattggttgaaaaaatgattcacatttgaagtcgttattgaactttttttttttttttttttttgagatagagtctctgtcacccaggctggagtgcagtggtatgatcacagctcactgcagcctcggcctccttgagctcaagccatcctcccacctcagcctcccaagtagctggtactgcaggcacacaccaccacacccagctaattttttttttttttttttttgagatggagtctcgctctttcgcccaggctggagtgcagtggcgcgatctctgctcactgcaagcttcgcctcccagattcacgccatt

SEQ ID NO: 39185 - DNA, 1023 bp, Homo sapiens
ggtaatcacaggttgttgacaagtttgtaaaattatatattttaacagaatgagtatcttttaatataactaataaaggattggaggtggagcctgccatggaccctcaattgtggtttttcaatgaagcagagggcacatggcacatgctgcttttctgcccaggatgacagtgttgcaggatccaagactgctgtatggaaagcctatcttaattgtgggcagcagcagcccagtgctttctgagccatgtgaggttactaattgaggttaacatcagagaactagatgccagtgggagggattgggaccatttgagcaagtaagattttctctagaggcaggggcttgtccctatggtttatttttcgtacctaggtagaaagtgtatatctctgtgccaagttgtactaattatcttggtttgtcattttatttttgtcaacatcttaccagtttttaaaacaataaactctggtgaggggaaatgctattttgtacagagtgactgtgtgttttaattttgtatatttcagaaagcttccagttttcagtggttagcgaaatagcaacttgctttatttaatcaacaggatgttttagcttaattgtacttgagagctttttataaactagcaaaaagtcagtagcatttctaatactttaaaatgttacaatttttcagacaaattacttttgctaaattgtacagatgaggataatacttgaaaagtctaagagtgagaaacaagaaagatactaagaggaagcttaaagaaaagtgaggaaaaaggaagatgaagtgttcaatgtagtcatataattgcttagatagcatttaatgagaaagttagcattgttctcatatatacacgtaatatagtgtatttcatagatttaaatagtcaaggaggaaaaactttctctactctcttaggcttagtgattgagggtctgcaaattaaattgacaagagacagattgcaagataaaagacatttaatcatagaagaatgtgagcca

SEQ ID NO: 39186 - DNA, 1030 bp, Homo sapiens
ggaccagagttcataactagcatgtgattatctttagggtaaagtcctagcagtaggatcactggtttgatacatattgccaaactgctcctacagacgaggtttgccagtttacaccatcagtggtggtgcagttccttcgcactctgtaatgtaaatttcgattaccattttcatctttgccaatcagatagatgaaaaatcacatctcattgtcataatatttgcattttttggatcatcagtgaatatctttttatatttatattgatcatttgtatttttttcttgtttgtgatttttgtccattttactaatagggtatttgtgttcttactgattttcacaaagtgtttgcgtattcagggtactttttgacatacgctttccctaatttattgtttgcctttcagccttatttatggttgtctttgctggttagaaattttacagttttgtatgattacattaacatccacatagaaataaaggtaaaggtaagggagtgtgaggaaagttgtgaaattacttgtaggcaaagcagtttgggcatggcataaagttagcaactttgagttcatttgtataccagtgcacagtaatgctattacatttatgaggttgtgtttactttttaatttggaaggctctgtttctcagaattggttgcaacccgccaggtgtggtggcttacgcctgtaatctcagcactttgggaggctgaggcaggcagatcacttgaggtcaagagtttgagaccaacttggccaacatggtgaaaccccatgtcactactaaaaatgctaacattagctgggcatggtggcgcatgcctcttatcccagctactcgtgaggctgaggcaggagaatcgcttcaacctgggaggcagaggttgcagtgagctgagatcatgcctctaaactccagcctgggcattagagggagactctgtctccaaaaaaaaaaaattggttgcaactcctgctgccctcccttacctcctctccgagtctctggccactcactg

SEQ ID NO: 39187 - DNA, 1032 bp, Homo sapiens
catattctgggtccgtattcttttgggtcttgacgtgtcttctattagacaaggaaaatatgaatcttctactttatagtcattattgatgtgatttcttactgagatcagagcgtcagagccagaatggaaataacaggtaaaatagaaacctagagttttttatttagtttgaatttgaggctgggtagacttgtgggttttaatttcaaagtaagaaaagggtgggtctaggagaacagactaaatatattaagagaatgttaaaaacccaagttgtaaactgtattgaagcattggatgtgtgtgtgtgtgtgtgtgtgtgtgtagcttccatgtttattttgacagagtggtttgcctgagtaaaagcttttcgtttaaatcctactgtaagcaaagaaaaacatgtttaactgaatgtaattgccttgtgctcaatttgctactcactttggagcaggttcacacactaaaataacataaggggaggttaaattacatcaaaggttaagacagataagcttaagtgatctcattgtagctcctatactaattaaaacaagttgacaaaatatttttgtaagtactagccttcctttatgtgtagtgcttagtgtctttatttttagtagaaaaaaggtcttaaaaatatttgaggaaatttatattaaaaccttttgagttttcatttaaataatacttgccggttaatcaggaaatgattctttaaatttctttttatttttaatttttgtgggtacatagtagtatataggaaatgattcctaaacaccctgtgaatttgaggcacagtgtggagcatcagtgggctgcagttagcttctttgtccactcctgtgtcttacctaatttccatgttacagccacaggaatgggccaaggctgaagcagagactttaccctagctggtgatcagatggaaaagcaaggctggggcctaattacaggagctccttgaacatgacccaagaacttggagcattagtctgagtttctgaggtttctgaa

SEQ ID NO: 39188 - DNA, 1019 bp, Homo sapiens
tatgtagagaggtgggccttgaagcagtaggagtggggaggaagtttactagatgccaggtgctttctcagcatttcatgtgtatagtttttttcatttcattcttctgaaccatttaaggtacattctgttgttttctgcattttatacagaggaaactgacacaaagagaagttaagtaagttgtccaagagcatgcagctcataaatggtcctgcctggattccaactcaggcagtctggttgcagagtctgaactgtgaattgctgtcagtggctgaatgggatttggacaaatgaagattaaggggaaaccacggtgatcaaatattaatacatagaggtagacaaattggtttagggccattttgccaaggccctggaatcccacacctgaaggggataattgtaacatatgacagaactaatatttgtataggctttatgggtccacattgccaccaccctctgctgattgatttggtggaatgttgtgtctgtggttcagtgtgcagggataaggttgggaaggttgttgagtagaggagtcacatggtttgttccctctcatatgtctttaagctgtcgtgaggttttggcctgtattccctgagctcatgaacatggtgttaaggctcagcctctgctgtcttctgtaccctgcccatgctctttccctgccctacagttaccctctggaaagagtttcctggagtctccctgtttctgccttttcacctcactgtctacctctgacctgccctccatcattcccgctggagctgttctccgtgaggagacagtgcctggctcactgctcattttggctgggacttttcaggtttattgcatccagtgaattcttaactcggggtgattttaccccctaggggatacctggcagtgcctggagacattgagtggggctggcctctacgggatggacagtgaggttgctgctagctgctagacatcttacaggatggctcccacaacagagatccagcccaaatgtctgt

SEQ ID NO: 39189 - DNA, 1079 bp, Homo sapiens
acaagacagattgctctattttggtgtagttttcaccagtgttgtttttttgttctagtcaggtgctaggtaacatttgaatatttcagcttcgcccagtgacgcggtgattttttactctgatgtcacagtaccaagtacagttgtcctagcggataattttgtgtgttctgtaatttgaagaaaggattgccggtgtatggttttgcataatggggaaggaaattagtggagttgttgcatatttgtcacttactgtaaacctgtttaatgggcccatctagctgtgtatcctcttagatccttataaacataacagtgaggaaaagcagtggtcagaaaagggccaaggtatttttagattagttgaattaattttgaagtttatgaaagatgagagtgtgttgatagcagcaaaaggtaaacaggattattgaaagctcagacattagcccggtggtggtggtggaaggaggggcgatggggaagcttattattcctgtggatggcatataaggatttggtacatttcagccataaattgaatgacacgaggttggttagtataagaaatctgtcagttcatgtacaactactgaacttccataaagatgagacacatcacatataacatgtttacactttaaatgtgtgctaaaaagcttgttgtgaaaatgatatatccccacctgtctccttcccaccaaccctgctgtgtcagtacccagacaaacattttcaaatcttagctgatgcttcaagtttttgacatcgtgattgtaaatactgctgtcttcattctccagctttacatattatctgtttattgactggctttgaaggtggatgactgtgcatccccctcctccttcctctcaggataagataccacaattattagttaaatccttaatgtttactaatgtgaatatatatatttaatattgagccaagaagtatagggttttatcttattatatagtaccatatagtctaggactccttttgtttttattagggttaattgattattttgatttgcatagtttttttttttttttttaactttggctagttct

SEQ ID NO: 39190 - DNA, 1053 bp, Homo sapiens
taacccacctaaaattttatagtgaaacctgctttatattgttgttctgaagcttacaattgacctatacattgcattcagcaagctcctgaatttagaactgccgtcagtgtagtgtatgctgtgttccatgttgcctttttagatggctttctaccccctgaacaataaataggatgaggttttactgtaattgggtaaagtttactcttggacattatttcgatgctaaagtaaggattctgtggatgttacttaaagagaaaagcataagagcatgaagcatatctgggaatatcttttgcctttaagacgattcattcttgtctagagggaaaatctggctgatttgggaataaaatataatcgaatattcaacaccatgaagataaatcttattttggaaatctactgaccttaataccccaagcttgccctgaatactttgattggaattggaatatatcaaaaaaggttagtatttttgttgtagttaggatactaaaaggatattagttacccaagagatccaatttgtttttctgatgaatagtgttcagtaaaatgaagcagtcttaagagtgactaataatttcaaagtgatttttcgtctattcttaatattttttaattatttatttttaagagttttataccttgagcagatacaatgatctgctttagtgagaggacaatttctgattgattgttttctcttcaggccatctcacctcttcattctcttgttacatttgaagcagttgatataatgggtttatactttaaaagatagacatggtgccatgaagttggggagttgggtgaattatcccattctagttacagaggagctttccttaaatgccctttaacttctaggttttgttcaagaagttcattttctgagtaaaaggtattttcatatatgttgggggaaaattaactcatctaaaaagaatcttattaggtatttgaactctaaaactaacagataagacagatatgtaccttattagagcaccagaactaatttgctaagtcttttgtttagtc

SEQ ID NO: 39191 - DNA, 1050 bp, Homo sapiens
tttgattttcattacatcatttaataggaagtcaggagtggctttttcttaaaattgttgttacgacaggagttccaaaagtatttatttaacgaagggatgagtgaagtaagtattctttattagcaggcattcattcatgcttccttccttcccccccccccctttttttgggtcaaatagtgtgcctaaattatttaatttggaaagtagttagatatgttttgtacaaaaactgtataataatctttgacacagaaatcccttcacaaaggataatactaaccatatagaaaagatctgcaatatatttaggaatagaataacattcagttctattttttggaataaaatttgcttttgtgtatcaatatgtattctattgagtgccacattttttaacctatcaaagcctcactcctcacagttgcttttatatctttttgcgtgtgtttttatcatgcgtatttcatagttttatgttcttatggataagcaaggatgtgttagaatgttaatgttcaaattctaaggaactttggattacatataccttcagaattagtaaatgtttgttttctaaatgtctcacattaaattaaattcaagttggaaagtatttaatccttttgcaaatatgcctcattactcatcatcaaataatatttattcataaagataaacacatttccttgatgaaataaatcaaatatattttcttatagatgattttagctaaatgtttatttgttctgtttttgtaggtattttccatgttagacattaatttttcatcgtattgctgctgctagaatgaattgcttgtctcagagttctttatgaaagagatccttttttcatccctgtggcaaaaagatgttttagtgtacttaaactgagttttcttaagtgaattcaaggaattttcctttttattaatagtagaaaatgtatcttatggtaaattttttgtacttaagaattctttgcaatgtaagatatttagaaatataaaagccaggccaatttttgtcctaaatcttttaatgc

SEQ ID NO: 39192 - DNA, 1007 bp, Homo sapiens
aatattattaaaatgacaatactacccaaagcaatctacagattctgtgcaatccctatcaaaatgccaaagacattcttcacagaatgacattttaccaaaaaaaagaaccctaagatttatgtagaatgatagaagaccctgaatagtaaaagcaaaactgagcaagaggagcaaagctaaaggcatcacactatgtgacttcaaaatttactacaaagctatgataaccaaaacaacatggtactggcataaaaaacagacacatggaccagtggaacagaatagagaatcctgatatacatttatgcatttacaaccaacttatttttgacaaagatgccgagaacatacaatggggaaaggacaattttttcaataaatagtgctgggaaaactggataactatatgcaaaagaatgaaagtaaacccccatctctcatcctacacaaaaatcaagtcaaaatggattaaagacttacatctgaaacctcaaatctaagacctatgaaacttatagaagaaaacattagagaaatgctccaggacattggtctatgcaaagatttttttgtgtgtaagacctcgaaagcataggcaaataaagcaaaaatggccaaatgggattagatccagctaaaatgcttcagcatggcgaaggaaaaaatcaacaaagtgaaaagacaacccatggaatgggagaaaatatttgcaatccatctatctgacaagggattaataaccagaatatataaggaactcagacaactcaatagcaaaaaacaaataatgcaattcaaaaatgggcaaaagatctaacatttcgtatatgaagaaatgctcagcatcactaatcatcagagaaatacaaatcaaaatcacattgcattatcattttaccctagttaaaatggctcataccaaaagacaggcatagagaacagtgcagaggtttctcaaataactaaaaatagaagtaccatatgattcagcagttccaaaggaa

SEQ ID NO: 39193 - DNA, 1050 bp, Homo sapiens
cctgtttctatccttatagggcagtttttttctgtttatgatttgtctgttctctttgaattttgtgtgaatactgtttctttgatcattgttttattttctaatgagtttatttctttaatctttgttgtcttttatttatttacgtagcccatattgagtgatgagataactacataaatcgcatttaaaaagtggtagctgtttcttctactgttgaataaatatacagtacttctcttttcaagttttcatgtagttatttatggaaagtacagactttgctagtttcattcatcctcattttattagcatgttgcaatatgaattaggaattgaaaattcagtttttagactatgcagtttaatttacttgatatgaaagttaattttaattacagcatttttggaattaaagtattttttctagttacatttttttgaactttgaaataagatcttggtggctgttgaaaaaactaaattttctgtaaacagcaaattatatgaataagccaattagaggctgaggaatgtgaatgatatctaaaagtaaactgtttcttcattttctggttttgtcactgaactgagcaaatttatttaagtccgttctattttattctttgttttctcctggtgtatgtattaggcttattatgttttcctttagaataaagctaaaatgtcaattaagaaaatcataattcttgaagtcttatgtatttattacttggaatttaatcaagatttattaatttcatatttataatatatattatcataaagaatacattttaaacatcgtggaaatagattatctgctaaaattgcttattcacgcatcaagaaattaaacttgtattgagatgtgaaaacttttttttccaagcctccaagtgttttaagagtttcagttatttacttgcaaaatccctggcacttatttaatggcttcaaaacagaacagatctttcagtgaattttgtgtgtgtgtttgttagaattttattgtaaagccattttccttattactgtcattattagagg

SEQ ID NO: 39194 - DNA, 1037 bp, Homo sapiens
cagctgtaagttctcaccaactggagtggcgaagcttgtctttaaacaatgacttaatccagggatactttttcatgggccattttaaaaattgttaagctatcatagtcacatctatgttcacagctatcattatattcattatgtttgcctcatcctgaaatatggcttgtatgcgaatggtaagcagtagatcattttagagagagcttttcagagttaattatgagaagagtagagcacctattccttgaaattagcacagatatttaggaaagaaaacttgagctattctttaatttcacctagccttgaatagcaaatatttcacatattccttcttattttttaacaccacaaataaattactactataatacttattaatattcatagtttcataaataaaatgtcactgcctctccactagacattccataactagtttaaaaacaatactaccactttgtctttggcgtgaagacagtaactgatctcaataatataacgtcttatcttattcatttctcctctgaatatgaagaagaaacaatttttttgtgaatccagagctttcacatataagcaaaagaaattctcctctacctgacaaaataatgttacttacttttacctcagtgttaaattaatagttttgatttctgcttttgactatagctgtgattgtagtggaacagaaaattatattactttaaattgtagaaccaaaagtttttaacagggctttggggatacatttctttgcttcccatagaggtatttcctttttaaagaccttcaaagtcaaccattctataaccttcttaagtaatatgctgaccaatcacagagtcgattttaagtatttattttgtgaaactttttaccataaaaagtatttgcaaatgcctcatggagatagaaaatcatttgttgctattctgaagaaattatatcacattcatgaatagtaacacttttatagtgttagtaaatataaatagttaatttctaatagttagaaatggtaatttcaa

SEQ ID NO: 39195 - DNA, 1049 bp, Homo sapiens
tcacgcccgccctccttgccgcccagccggtccaggcctctggcgaacatggcgcttgtcccctgccaggtgctgcggatggcaatcctgctgtcttactgctctatcctgtgtaactacaaggccatcgaaatgccctcacaccagacctacggagggagctggaaattcctgacgttcattgatctggtaaggccgtcccctccccctgctcgccccgcaccccgtgcctgtgtgtgcgtgtgtgtgtgtgtgtgtgtgtgtgtgtgtggatgcgcgagcacctgcgcacgtgcgcgcctccagcatccacccgtgtcctcgcctcttccccagtgattgcgtgtgaaggcctggctgcccccgcagcggcaccttctgaaccactcaccgttacctggtagctgggtacccttacctggcaactgggggacaaatggaggtggggcgcagccaggtggtgggctctttggagggggacaccgaactgcttctaagaggtgacacgggaagaatcttcaacaaaagcatcggacctgatcctgaatggcctgagacccattcgccctcaaggtgcttttcagagcacccaccgtgggatgaacttgttgcaactgaaggaaactgggtattgtctagtgatttggaacttcacctgaaagaaccaaatccttctcataagggagagaaagcacctaataaagttgtcttctttgcatctgtttttttcccccattgtcaataatttactttcaacctttaccccgtacatattaggagacagagatgttcaaagtgcatttccaaggtgactgtacacacttctctgtcttcccatgtacaaatttacagtagtttgcataagcagctcctctgttggcacaatatgataatcttgacaggtgcaggttattattagtatatcattttgaaagtttttctatttctggcactaaaaggccctcttcaacctccctggagaacagaacatgggcataaggcccaataatgaactcatggatggacctaggaatttcagggtaaaggtg

SEQ ID NO: 39196 - DNA, 1059 bp, Homo sapiens
tgttggaggaagatgtgactggaagaaagtcagagagagatacgacaatgctgggtttgaagatggaggatggagccaggagacaaggggtgtgagaggtgtctagaagctggagaggacaaaaaaatggttttcctcctagagtttccaggaacacatacctgctgacagcttaatggtagtgtattttggacttctgacctccagaattgtaaaataataaatttgtgtcatttaagccattcaattgatagtaattggttaccacagtaatagaaaactagtatacttggctttaaagcctctgacttagaaaaaaaacttaactctttttgtacttatatgaaataaatgcagtgactcagctagccctttatgtatagtagataactggttaattttagctttaacaaaaatgcaagttttttcctacttcatccatgaaattatgtggaggagacatacatatgtgtaacagtgggcaatatgaggatttgtaaagactggactgtcaagcgtgtctgtgtgaagagaccaccaaacaggctttgtgtgagcaataaagcttttaattcacctgggtgcaggcggactgagtctgagaaaggagtcagcgaagggagatggggaaggggttgctttatagaagttgggtagctaatggaaaattacagtaaaaggtggttatttattgttagcagagaagggggtgacaaggtacatggtggggagatcataagacttattgtccagaagaagaatgtcacaaggtcggttgatcagttaaggtagggcagggacaagtcacaacggtggaatgttgtaatgttggttaatcagttaaggcaggaattggctgttttacttcttttgtggtttttcggttgccccagacttcttggctcctgcaggccatctggatgtatatgtgtaggtcacaggggttacaatggctgagcttcggcttagaggcctgacatggacaactttggaaaaactaggtctttactatgaagtatttcagagactatcattaagtaacatgtcaggccaggagaa

SEQ ID NO: 39197 - DNA, 1050 bp, Homo sapiens
cttggggttttaggtactcatgctaaaggaaaaaaaaagagggaatcataatctctagcagagattatgatagaggacttttcctctatcctcagactggaaagaaggggcttctcctggagtttttgctgtcagtgtttgcttcccagttctagaatgcagtctgcactcaggtcaaataaggggaagaaaggagagtaaaaatccacaaactgtacccttatgggtccttatttatttttgctttagttcccaatgcacctgtcattgtgtaattttcaaagtcctcaggcagttgatttttgtactctgttcagagttcttagttgtaatcaatgggattgataggctgtagtcagcttactccatttgggctggcaccagaagcctacatatgttttcaatatctacttttttacacttaaaatattttataaacatttttccgtgccattatacattctcccataacataatttttaagactgcatattcattcgagtgtttatattgattgtcttagtgaatatatgaataaataaatctttacacacatctgtgattattttcttaggatagattccttttttttttttttttttttttgcagttgcaagatttaatagagtgaaaacagagctcctatacaatgggaggggacccaaagggggttgccactccgtgctcaaatgcctgtgtttatatcccgatcattatccctgccccatgctctctggcgatatatgatttgactatttctttacctcctctttttagcctaatttgtattttagtgagccctctttatacctgattggctgagtgtgagctgagttacaagccctgtgtttaaaggtaggtgtggtcacctttcccagctaggcctaggaattcttagtcagcctaggaaatccagctagtcctgtctctcagtcccacctctcaacaggaaaacccaagtgctgttggggaggttggctgacaaccgctcttaactgcttcatgctgaattggggcatagtaggggtcgtgcagttgagatttccttgg

SEQ ID NO: 39198 - DNA, 1042 bp, Homo sapiens
tggctttctgagtttccttaattagtgtgtataatggcctggctattttgccatacctgttaatccatatttggcagaagcctgttatgccaaggaacattcttaattgcttcagggttttgggatgaggataagccgatataggctggatacgttcctcactgagggccctggtgcctttggataattttagccgtaagtgtttaacctgctgtaagcagagctgagcctttggtttggaaaccttgtagccacaagtggcgaggaagtttaaaagcgcttgggtggcttgatggcacaaggtttctgaacgggcagctagaagtaaatcatccatgtaccaaaggacatgagtgtccaagtatgagaactggctcaagtcttgggctaatgcctggccaaacagataggggctatccctgaacccttggggtaaaacagtccaggtgagttgagacattgggttcaaaggatcttcaaaggcaaataagaattgagagtcaggatgtacagggatgcagaaaaaagcatccctaaggtccaggactgtaaaccactctgcttcctctagtatttgggaaagtggagtataagggttaggtacagctgggtatagagggacaatggcctcattgataatcctgagatcttgcactaacctccattgtccattgggtttctgtactcctaaaattggagtattgcaggggctactgcatggttttactaggccttgggcttttaggtccttaacaatcttttggagtccttgctgggcctcgggtctaagtgggtactgcctttggtagggaaaggaggcagaatcctttagtttaacttgaatgggatgagcattctttgctcgtccatattttccttctgttgcccagacttcaggattaattccttcctcaagtaggggacaacaaacgtgtgttccttctcctatgttcaggtgtctaatggcccctgcttttgctagaatgtcctctctaacaaaggagtggggctttcaggcataattagaaaggcatgtgaaaag

SEQ ID NO: 39199 - DNA, 1050 bp, Homo sapiens
gctgtgagagtcctagatggcatcttcttctaatagaaggttgttttgtctacattgaaaatctgttgtttattgcagtcatcttcagcaatgatcttagttggatcttctgtataacttgctgcaacttctacttcagcacttgctgcttcaccttgcagtttatgttatgaagacagcttttttccttaaacctcatgaatcgacctctgctagcttccaacttttcttcttcagcttcctcatccctctcagccctcatagaattgaagagagttaggaccttgctctggattaggttttggcttaagggaatgttgtgtctggtttgatcttctctccagatcactcaaactttctccgtgtcagcaataaggctgttttcttttttatcatttcagtgttcactggagtagtacttttaatttctttcaataacttttcctttgcattcacaacttgggtaactgtttagcacaagaggcctagtttttggcctgtctaggtttctgacatgtctggtttcctcaccaggcttaatcatttctagcttttgctttaaagtgagagatgtgcaactcttcttttcccttgatcacttagaggccattgtagggatattaataggcccaatttcaatattatttaatcttgggaaatagggaggcctgaagagaaggagaaaaatgggggaatagccggttggtggagcagtcaaaacacacacaacatgtatggattgcacttgccatcttctatgggtgaggtttgaggtgccccaaaacaattataatagtaagatcaaggattgctgatcatagatcaccataacagatataataataatgaaaaatttgaaatattgcaaggattaccaaaatgggacagagagacaggaagtaagcatatgctgttggaaaaatggcactgatacccttgcttgatgcagggttgccacaaaacctttaatttgttaaaaacaaaacaaaactacccatctgtgagttgagtgcggtaaaatgaggtgtgcctctatgtgattgatgtccc

SEQ ID NO: 39200 - DNA, 1041 bp, Homo sapiens
attttcttacaaaaaacttcattcagtgtcctggcacagatcctccagttgaacaggggccttctttccaaagccccaggtaaggactttctcaacctgtattctaacatgatgggatgttgtcttctttgctttcctatcttatcattgcaaactctcaaacattttctacattatcatcatttatatttatactagcacacatgtttgaaagcgatatgatccccattgaaaactcttttcctttaaaagtcaatcccatttctagaggtcttgacaatgctttcttctttccatgccattgaagttgcattaatgttggtcaaccctggatggctcgggtctcatactcagaggttctgatggattcagtctgggataagactgagacactatctatttttttttaatgctcccttacatagctcccttacacgtttgaagatctttgaatttgttggtctcacaagcatccctggggttcaaaaaatgtgggtattggaagaacacaaagtgagggaagctgtcctggtgatatctagatgtgagctgaatggagcttatggcaaagagacaaacctgagttaatctgcataatcacgcacacttaactctaatgggttagttatagggtggtatctctgcctcagtttctattgcaataaaatactggcatcatctcaagattctcagaaaatttaattaatattaatatttaatataagattaaaagcatactacaagtttcaattagcattaatcctttaaaatatggagttaaatgatctgtaactaattaaagactgcagttaacaggggacatgagttttttctgggttatatgaaacaaaatataaatcttttatataactcaatttcctacagaaaaaaaacttacttgtcagtgggattttaaagttttattttattttcttggatctcattacttttccatgaatcctataagcagaattacaatgaggtgagtcatagacttaacacttttttggagtttcttctgccaaagcagcttgaaatata

SEQ ID NO: 39201 - DNA, 2066 bp, Homo sapiens
aatatccaaataactgcacaagtagatgacctatgatccatccatttttataaaaagttgttgtatgaacattcaagtccaaacaaatttacaaggaataatgatgacacacagagggtggatctggagagtggagtacataaatctttaagtaactgctaggggccagccacttccatatgctgtcacatttgttccctaagtagccctgagggggaggaatcatcaccaccattccacaggtgaggagctgagactcaaaggagttgaggaatctgtccatgatggtgcaaccaagagcctgagttcaaatcaagtgtgtccagctccaggcactttctgcccatctaaactgcctgctctgcaaaaccactctgaagagattttctattattttactcaatatgagtgtatccatgcaataatctctttctaaaatttagtgatagaagccatattgcctcacctgatactgatatgttcctttctgttaataagagctgtttccacttctcctctgacacggttagtgcctttaagccgtagccagcctatctgtggcttccaatacagttttctgtctttcattcctaccatatattttgtctgattcttcattttgtcttgactttcaccaccctgagccttttattgcaagctaccttgaccttttgagaagtagtgagaatatatagaaaagaaatagacttctgtggtgtaaattccacaaagctctctttttatatcctccacatgacctagaacagggccttgcacttagaagtgaacaataactattggttgttaaatgatcatagcaatagcaattctgaaggacagttctgcttattttaaggacaaccaagaagttgatggctctggctttatatgtgaacttcatcataaaatgtacttactgctttcctattccttaatagagatttgtctcttgtattttcttctgtttaccactcataaatggaatgtgaaggacaatgatcacagctcacttgcgtcacattcctccctcttgctgtgctaagcccttttagatagtatttattgaatcctcacaacctgattattatcccatttcatggaagggcatactgaaggttagagaatttcaggggtttaggaggaaagtgaggaaataagctttctcctgatgattcagcaagaaataggaaaaaaataggggaagaaaaaggatatatatttcagtatagatgagagatacaaattgctttaagtataatcagtaaaatgtaggagaggctggagaaagtcacaaatgatttatgagggcatgattcttcctgcttatcccctgtatattagtccactctcacactgctataaaaatactactggagactagataatttataaaggaaagagatttaattgacttacagttctgtatggctgggtaggtctcaggaaacttacaatcatggcagaaaaggaagcaggcgtgtcttacatggcggcaggtgagaaagagcaagcatgtgaaggaagaactgtcaaacactcacaaaaccattagatctcatgagaactcactcactatcacgagaatagcatggggcaaactgcccccatgatcccatcaccacccacgagttccctccctcgacacgtaggggttatggggattacaattccagatgagatttgggtggggacacagagccaaaccaaatcgccctattatgttgatgagcacggaaaagtcctctgcaaactgctgtttttaaatatgagacattctcttgtcaggtgatcataacttgggttgacttatacatttctcgaatccatctatttatttggataatttcaagttgagtagtttatgtgtggataaaaacctaaaggtcttctctatggtttctctggcctggcttgtgtttttgggagtcccccaagatgctgtaaccccagtacccctggagaacctgaacgtgtgcttgatgtctccacgtcacggcaggtggcccccagcatgctgcctgtcatcactgtccccgatgctgtcccgcagcagcaccccaaggctc

SEQ ID NO: 39202 - DNA, 1520 bp, Homo sapiens
ggagaatatcttagggaggaggagtgcagggtagctgaggagagcacttccagaaggaggcagggctggcaacgtcctgggcacacggaggtctgaccagacaaggacagtggctggcacaggtgctcccgagtgccaaagtgaccacaagaaaagccgccagaagaaaagaggagccttgcctggaaaacaaaaagcaattaaacatcttgtcatgtggcatgtttttaggggaaagatgatggatggcttcatcttttacttgatcccgaagcaagggcagattgagaagcagagtctgagggacagatgattttcccctctggccttggctccttctgaccttctattttctcccagtgaaagaggtgctgtttctggcctgtggccttatttagcaggctcagaactttttcccagcttcatgataatggcctttggtgctctttctactgcttaatgtactgtcatccagaataatccttttctatattgatctgaatggtaatctgtaaataaaaaggagaaatcataggagaacttgcagaaaaatgggaaaaagtagttacttgttttgcacatttctggaggggaggagagagaatctttaaaataatctcccatttgtgccttctcatttgtcagcacatcaaaagcaacaaaagcaacacacacacacacacacacacacacacacacacacacacacacaccccaatttgataagttggaaaactggctgcacgacttagagtatatgtctttctttaaaattttctgaaatctgatgtggatatttaagagctttcagaaatttccataggcatgccattagagataagccatttgattctgaggggattcaaaaagggaaatgtactttatctaaagagatgaaattggactcaacttggagaaatggttctctgaccagatgtcatttaaaggcattggactttgggctccaggcgttgactgtttctcaagataaatatgcatctaggaaccaagaagggcattttcaaggattgctgtgagttggtattataatgtgctaagcacacccctgacgtctttggaggtctgagcatacaaatcagacataaatgcttctcagttccttctcataatttctctgatcttactggcaataaaaaaaagaaaaaaaaactcttcaggagcataaaatgttattgaatttgcagcagtcgtcatggttacctgcatagtttcattgctttattaatgtgtaattcctcttatttctggaaatatcattatagtgaaacataatagtctgcagcctcttagcaagtttctctgtgtatctcagagatcctgacaatggctgtgatgaatgtgtgtgtggtttccgggtcacttgcatgctgatgatccagcaactgggacatcattgtttaggaaaagacaacttgaagctaatgactcttgagaatcccttgaaagttcaaatgtttctcgacacaaaagtgctttttttttttttcctgtaggacagt

SEQ ID NO: 39203 - DNA, 1035 bp, Homo sapiens
aatctgcagtttaggtgctgaaggaccctgagaaggttctgcattccctcgtgcccctggaatgggagatcactgaaaccccagaagtgttttgagaaatcccagcatatggggaacctggatttgatttctagagcttcacttcccgggagaggaagcaagcagcatcacagaggagtggaaggccgcaatcactagcggaggtgtcccagcaacatggaaaatattttaagattcatgtcccaagaggctgccctgagagagtcagaagggccttgataacctgatgagggaacatcattagtaaatttgatgtgcattctctgtgctggaggctgtggaaacagaaacaatgtctgcagcaaaagcagtgtgggtagaagtctccatcaaagatgagaaggtaatgaaccagatacctcccctatgatgccatgatacatatgggccttcttagaattactatcccaggaaaagataaggaaagttagaactctaatttgatcatgtttaaattctgaatatgactgcaaaataactgaacaagatttaatctcttggaaatggctgtagtttcagcagctgaattactgaaggtcacatagctagacagtcctgtggccaggattctagtccaggcagtctgacttcacagtccattctctaaacctccacactgttttgtactgttctatactctactatctccatgtttcccacagccagatggaatagtggctcgagaccttaagttaaattacattcaagaaagataaagggtgattacaaaattcaccttttgactttccacattaatttcaagatgcatgtaaatttcagtaaaatgttttagactggaagaagttgaagatatattcacctctctccatctctactaccagtgcctaatctatgtcttacctagactgtgccctctaaactggggagattaggcttctctatgtacttaggagcaagaaaactaggaccaatggatggaagctttaaaaacagaattctgtatagaatcagaga

SEQ ID NO: 39204 - DNA, 1008 bp, Homo sapiens
tatgatacaagatggcgattcttaaaaatgggcgtcacagcacaaaggaagcccttggcaaaaaggtaaaaatgaaggacgcttcattcattctcaacattttgaaaattgtgtcttttattatcttcctgaacctctgctactttctgacccctgattccatagttttctctttaaccaattttcagctttagttttccctcaggtaacgcagagcaattcaacatttttataatcctttcagaaattgttgctttaatcctcttctctcaaacctcactcctagaccctggctgaaacatcttttggttctgaggaaacctctgtgaactgaaaatatactgaaaactggtcctgtattcgttgttcaaaattaattaaatagaagagttactttccaaaatagcagaactcattagagcatcagaactcagatacacacttatatgaaagggaacacatactggttgacatagagctgaagagtagcaaatgccatatctgtaaagatcagaataagtgttctaatgtaataaagcagatgggaaacattaaatcagaagtcaagagatggaccctagccccaggttgctgctaattagctaatgaccttcaggctcagtttgaggctcaggttccttatctataaaactgcagtcaggccaggtgtggtggtgcatgcctgtggtcccagctacttgggaggctgaggtgggaggatcacttgagcctaagaggtcgaggctgccgtgatctatgattgtgccactgcactcttgcccgggtgacagattgagctcctatctctaaaaacaaaacaaaacaaaacaaaacaaaactggagtcaattggtgattttcaagccttggagttgtttttagcaacgcaactcagttttcaaatgaaaaatataacaaaagaacagatgcctgtagaactcctctgattggaataagggccagtggcctagaatcccaccctcttaactctctcttccactactcaggg

SEQ ID NO: 39205 - DNA, 1051 bp, Homo sapiens
ttttagaacaggagtaaaagtttatttaaaagctttagagcaggaatgaaaggaagtaaagaacacttggaagagggtcaagtgggcaacttgggagatcaagtgtgcagtttgaccctttgacctggtgtgttatgtgttggcgtgcttccggggtcttgtgttcctttctccctgattctttccttggagtgggctgcccacatgcacagtggcctgccagcacttggcaggggccgcatgcgcagtgtgtttaccggagttgcgcgcatgctcacttgaggcatccccccttaccagttgaatgctcctggaaagtcatataacaattaaactccaccatttttcctcttagtgtgcatgactgagcccactcacccaactcctgagatcttatcaggaagctgttgatcatgagctttaggtgtctttctctattgggagactgcctttccctggtgccagctgcaaccaattattattttagagaggcagttttaacaacaaccgactgaccatcacctgatggttgcctgacattcttgtttgttggggggtggcagggggatgctctcctgccctttcacgtctgactagctacctgctgtaacaataagtatctcacattctgaagagagctacctttcttggggcttacaagagacagccgaaggactctgctcacttactatcaccaaggccatccatgcttcactatgcccgtcttccccaccctcttcccaagatggggaagagggacagggtctttgcagtcttgagttttggatctaggggagctgttgggggaaggaagggcctctccacactgaccaaagccaagtgtgaggctctaagagaatccctggtaaataatagctatgaggcaggaatttaggaagctgactcgttagccttccttatatctcctatttaagcaaggaaaagagtcttggaaggatatggcagggcagagggagggggagctgtaaagccgcctgtgatcccatcattgtacatgtcaaagtttcttgtagatctggtttgacataga

SEQ ID NO: 39206 - DNA, 1049 bp, Homo sapiens
ttctcaattgacatttcagcaatttgatactaaaacaaaccccccctcttcctgatacactctgttcctctgatttaggtgttgtaaccatttattttccctccattctgaagatgatccctctcagcctcatttgctggctctttcaactccccccaaacctcagtgttggaattcttcagagctcacttccaggtcctcttgttttactacccactctccctaggtaaacccatccacatgtgtttgcaatgcctccatttcggaactccatcccatacctctctcctgaacctactccatatctactcacttagcaactgcaaaccaacctcatgccatgccagatgtctgcatcccaccccaaacctgcatccccttgtcatcatcccaaaactagttgtttatgctggaaatctatgagacatcctcaacccatctctcttgggcccactccaggcagttgttcaccagtttctgagttctgtacctccagtgtacttgtagaatctttatgctttgctccatctccactgccaacactatggtccaagcctcagttatctctcctctcaaccactgctagaactgtctatccaaaggatcccagagtaatcttttataaacaaatgtcatcatgctactcccttgctccaagactgtggatgacttctcattgctcctcaagataagaaccaaaattcctttacatgttttagggggccctgcattaccggacccctgctgacctctggcctcatcatattcctccttcccttttgcttgctagctccagacacagtgatcttctctgattgtcaaaagcaataagcttcatccaccttcaaagctttcactttctttgtgccacaaacaaatcccacctctcccccagtcatgtctcgcaccagtgttagtttcaaatcctgctcctctttcaggcctcaacttaactctttttctcggggaagccctctctgattctccagacttggttcagcttctctgtgctacactactataatctgttgatttctgccaggggattt

SEQ ID NO: 39207 - DNA, 1044 bp, Homo sapiens
cctgtgcttatctaataatgagtttggacaagaataatgctgcctcggattgcaatgttcaaggcagtcattaaagttaataatcagtgctcttgtatagaagctttatgcctaacattgatcagccctttattgtgtggcatttgctagtattcaagtagcaaggagctcaccacaaaggccatcaggtaggtttccatggtagcagtctttcttttgttattcaccttggtaacacagactgggtgcaagccccaagccttggcagcttacacgtggtgttgggccattctcacgctgctatgaagatatattcaagatggagtcatttataaaggaaagagatttaattgactcacagttctgcagcactgcggaggcctcaggaaacttacaatcatggtggaaggggaagcaaatacgtccttcttcacatggcggcagcaagaagtacagagcaaaggtgtggagaaggccctttataaagtgtcagatctcatgagaactcactatcaaaagaacagcatgggggaaactgcccccatgattcaattatctttacatggtccctcccttgacaagtggggattattataattcaaggtgagatttgggtgggaacacagagccaaaccatatcagacagtatccaaatactcaccatgtcactgcttaatgaaaataaatagaatattgatagtgctagtagagtcaagaacctggtctctgggtgtgacaacaaggcaaggcatgatgtctaccaaggttttcttttaagcagctgtccgctaagctggactagtgtccttttgatcttattccaggttaataaccctccgttgtcttatattattgccctggagacaaatagaactcaatggtgactagaatagtttcattaatgctgaatcttatgaaagacaagtttgtgattgcacagtaataaaagtacaatataaaaactatggaagaaaagagaattctacttttttttttcagagaaactaacacttttatttttttattttttatttttttctttct

SEQ ID NO: 39208 - DNA, 1050 bp, Homo sapiens
cattccaccaccactactctgacagcacaaaacatataccaggagctggggttatgtggtgggggagtccttcctattgtaagccctaacattatgaccctctggggttaaattttataattttcatattgtggagtcccatattttgttctgctttccactagtccaggcttctgaggtcttctctgtgttcattgcttattaattttattcagcaaagattaattgagctcctgcaatgagacacacacactatgttaggtgctggggaacaaaatagggaagggccctaccctcagaaagcttgcaatttatgaaagaatactaacaaaacctgcaaagtggtattttaagttattttgtttcatttttgctattgaaacaaagaaactgagaatttggtatgattcaaaaaatgtttaggtacaagaaaaagaaaaaagcaagaagcacttgccagatttaactataattcctaaaaatgatgaacattttcatcttcaggaacatgaaacatcatcgactattctctacagacaacaggcaaaggttcttactggtccagtacatacaagtccttcaggaagaaaaacatgattctaccaggattgggttgaatagagagagaattgcagtttaagattcatgagtatggaaataaacagctcttatggctaataaactctctatgaactttaaaaagaaaacaagaaaaaaaaaagcatggctttttaaaatccaaagtccttgccttaggaagagacaggactaaagtaaaaataaatgaagtctgtttgaaactcatgagttgcacacctcatgttgccagaagctggtttaaaaagcagtctagctgggatttccatgcaaactcagcaagtcatgaatcaacttgaagccttgtctcccagaggccataggagctgggtgtgtcccagagatgctgtgtcctgattctgtggaaagggtggggaagagaggtcactgaggatgtttctggagaaagttgtgcatggctttccttcttagctaggagggaatagggggtgt

SEQ ID NO: 39209 - DNA, 1088 bp, Homo sapiens
cacaaaatattctgggcccacagccctgcattctgactaggccagacatcttatttctttatcccactcaggtttaatatttaatcttgggttttttgaaatcaaacttcaaaactccctctcccttctctttccccttggtccctggagaaggagaatgacttacgctttcatagcaaatgacatcagaggtggtgagttccttctctgcctcttggtccaatacaaagggaccaacatcaagtgctagcattgtctttccagtggggatgatgaaattgttagctctttagggagctccatgagggcccacccttgcactgtcctgtcctcttctcccttaacgccatggcaacaagcagtccacccaaaagtctctgcttctgataaacccagaccatcttccatggcatttactcatccctccctgcccagccaagggaagatcacaggctgccatagggcatgctcacagtttcagcaacaatagcatcaactgttctgccagctaagtggcatcccccaggtcccaaccctgacagttcttcctgggggtatagggaaattggagaacacagatttcatcagaacagggtggaacacattgaaacttccttgctccctgcctcccagtctctccaccaagggaagaggagggaaaaggcactgttcatgctttatggactctgcttccttcagtgctcccatatccttgccctctctgtgtcctttattttataaaacccaaaagagtggggcttaagaaactggttctgctgaatgccttatgctagcaaatcccacagtggaggactggcattaagaacccatttttctgcccttgaaaggtgagatatttggcaacttttatcctgaactatggactctagcaggctgttccaggaaagcacaaatgtcccttatgaccactttatcactttttaaaaatattaatttcatactatagtagtcattaatttttgaatttttgtattgcaaaatggttttccaagacagattcccaatttataacattttgcctctaagaactaaattttccatttaaactaattcaacttgagactgta

SEQ ID NO: 39210 - DNA, 1064 bp, Homo sapiens
catggtaactctatgaataggtaagatgacatataaaaatgttatactaatgaatgctctaaaaaaatggtgctttgcttgtctttttgttccagataacaacaacaaacctattaaatttgagtgcctcattttttaacaaattaaactctgttaaaccaacaacttcttcactagcagaagctccttcttggtttcagtattaaaacttggagtcttccagaaactttgccactatattgaagtactttagttgtaattacctttctataagttgaattccaattattgtttttttttaactctttagaatacaaaactcacaatatgttttaattttaatgcattctctaatgttattccattactgcaggccattttggtctgcatatttcaatattttgttccttataatacccgggcattgttggtatagattctcatttgatgaattagctccttatagttctacaaatgcttaaatgtattcattccagtccttattacagaattaggaacatgtattagtgcaattgttagtgattttaatcataactattactaaatcatggacttatgtatgccataaggtatcttacggttttttatatctttgttatcccaacacaaatatctttggtctcatattagaatttatactctttaaggatttctattttgcagttttttatgtcaaactcggaaaataatgggtactaaattaatgttgactgactgtaaactcattcattaaaatttgagacacatcctttgaagtagctttaaaattttttttttaattggggacacagtaattgataggcaatatgtatgtgcaatatccaatttaattcttaaatacatagggccagaagttacttaccagattctctgagacccttctttattgtagagaaaagattaatttgacattgacattaagcatttggaatgcttacagccataaagtatattctctgaagtaatttaaatatcaacataaaatctttaaaaaaattttaagttatacaaaaataaatttcagctcaagaccaatcctatat

SEQ ID NO: 39211 - DNA, 1078 bp, Homo sapiens
gtctaagaggtcaaaagtgtaattttgtctttccctgattactattgaacctaggaaatattttatattattagccatttgcattttctttctctgtggtcttcccagtacatatcctttgccctttgttcctgttgcattattttcttaactcttggtgtgttgagttgataaataatcctttgtggtatatacattggaagtatttttctgctatttggttttctttcattttgttcttaggacgttttgttactcaggaacaaatccagttttgatgtgtgaaggtgtgtgtttccatacacatacggaggatttacaaatatgctgtagatgtctgtatttgctttgaaatgcccttcaataaaaaccatcccagcttctgtgattcttatcttccctttttagtgtgggaggcttcctgctttgctttgtctgcacatttacgtcgagcctgccgagcttaattttaacctggggaaaaatacagaagagaagctattttcagtcaggtcatattactgagaacacctgtgaaattcaggatattttcttgggggtaagttaaaatgtaggacgccaccttgcctgaagcacatttctattgtggttgctgtacaaattgggaggtgttacttggagccaaaaaccttatcactttcacaccagcactgcttctaagttgcatgcctccaaccctcaatccttggtattaattctgaaacaactagtataaccatctgttgaaaagttctgtgggaaaaaaaggggtctttgtggcctgtgttattcacttccctgatgatcaacacagaaatattttacattttggttatcagtctattttttcctgcttttcctcttgctccagtttgccttcctaaatgtctggccataggcaaataaaatatacccccaccctagatgattatggtgtcaaaattcccttaatcacacagtagccccagccagctgtttgagtaatatttttcctacctcatcgtgtgaattgtcttattgttttggtgaaatgttgacgctaccacctactctcatcctcccacctccatttgcagat

SEQ ID NO: 39212 - DNA, 1220 bp, Homo sapiens
ctcacgagaactcactcactattgcaaagacagcaccaagccatgaggaatctgctcccatgacgcaaacacctcccaccaggccccacctccagcactggggattacaatttaacataagatttgggtggggacaaatatccaaactatatcacttgactgcctctccagtgtgactctgagtttcaagggtaataatcctgtcttaaaatttatgtatatacaattcatgccacagactctcattgtgaaagaaaaaagcacattaaagaacatatctaaggcattggaaatagatcatccacagttattcctaaaaggtaatgagtagttgaattaacaaaatatggtatttatgtacatgagtattatccagccataaagaggaacatatgctgcaacatggcttgaaaacattctgctcaatgaaataagccagacacagatggataaatattgtatgattccacgtagaggatttacctagaataggcaaattcctagagatagaaaatagagtataagcttctaggggctggaggaaaggggagaaaaggagttattgtttaacaggtttggagtttctgtttgggttgatgaaaagttctggaaacagtggtgaatgtacgtaatgccactaaattgcacacataaaaatggttgatgtagtaaattttattttaagtattttttaccacaattctttttttaaaaaaagcaacaagaagggaagaaacaactgaaaaaattagcagtaaagtgttccaatgacccaaatgcagagagtagttcaaaagtatgtaaaccagttacgtgtgagacagggcactataggctttttatcaagagaagaaacccgggggctcaagcctgtactcccagcactttgagaggccgaggtgggtggatcacgaggtcagcagatcgagaccatccttgcgaacatggtgaaaccgcatctctacgaaaaattaagccaggcatggtggcacacacctgtagttccaggtactcaggaggctgaggcaggagaattatttgaacccgggaggtggagattgcagtgagccaagatcgcgccactgcactccagcctgggcgacacaaactccgtctcaaaaaaaaaaaaaaaaaaaagaagaaaccctgtgttctttctcttgacatagtgtttagggaatcagtaagattccatcaacataagcatcatattctcttat

SEQ ID NO: 39213 - DNA, 1025 bp, Homo sapiens
ttatttatttttctagatttgtctaaatctggtccaagacactctatcccccgttcgtttgccaacacctgtgagaattccacagtcaacttgcttactaggcccctccctttccctctcatggattaaatcagccatagtccaaatgcaaagagggaaggagcttcatttactgttgttccttcacaaaggaaccattgcagtcaagtgcagggctccatgagagctggagaggggtccccagacctccatcctcacggtccaggatggggaagtcatagccagatttagcagttcccctttgtcagtgcaatgcctcatcctccatgtttccccttctaggatgatctagtttgattcaactcttcttggcccttaactttcctcagggaggcaggggaggccagaagtcaagagaatagatacgtggcattaggctttccccataagaaaggttgagcatggtagccatggaaggatgtgtaggttgttcactgctcaagagcattgactgtggggaagaatggggccgaaatgcagcccataccctgcttgccaagctgggtacaaaatcactcctgccaacaagaaaaggaggaaaaggaccttttaaaaaaatttgctgttgacttggatgctgagggctacgtggagggcctggacaatgaggagaggatgaggaggaggaggaggaggaaggagaagaggaggacatgagtgcagaagaggaggatgaagacgattataacaatggagaggtagatgatgaagaagatgaagaagaccttggtgaagaagaaaggagtcagaagtgaaagcagctcaaagatgagggagaagacgatgaccaagtggaataacgtattttcaaaaatgcctattgtgatttgtgtttttacccatatcccctctaccctcataatcctgcccccaaaacttttttttttgttgttgagacaggatcttgttctggcacccaggctggagtgcagtggcgtgatcacagctcactgcaacctccgtct

SEQ ID NO: 39214 - DNA, 1050 bp, Homo sapiens
gacgaggaatgatgttgcttattaaaaagttcaattagaggatgggcactaaaatatatatgaactaagttaagtatgtcaaatgacacactaaaggctaattaggtaaagggagaagtgtacatgacaggtttctgattttctagctttttaacagtaaaggtaactttatttccagcattcgaccaaaatgcagggatttgggccacatttacttggctccgggggagtttttcaatcctgttgaagcacagcaggcaaggcctgggtcatgagaattctatggtgctgactgcatttggagcttaattatttaaatgtttccagactcaaatgactgatgagctaacatatttttaattcagactttcacagagcaagctataaggtgtgtcttgagaaactgatgctcacttgaagttccatgccatgtattttatttcaatagccacattttagatgacaaatttaaaattgtatccaaatttcaagggaacagagtcctacattagttccagtacccagccctctttcgtgaagaggactagaggtggttttgttgttgtttttaaagagagaaaaaagtgctgttagaataaaaataaagaatgttaccagaatgttctacttaatttagctttccaaagataaacacactggtgaatcattacatgctgatggtgctatttaaacattaatcctttaaccttttccttctcccttcctgtctactgagttgggtgggttataggtagcgtcacttagggaaaagtttgttcctttttagtttttctatggttcaaactatttctcgtataagcactatctactggagactcttaaaatagtactttaaagaataaaagaacacttgagaatgattcagttggcggagattctataaatttagataatttactaatcattatgcttattaagtaatttaactatctcaaatgaattacagatattttatagcactatccacatgttaattgaatcttgatcctcaggcctgcaaaactggccatgaaaaatacttttgttgtc

SEQ ID NO: 39215 - DNA, 2050 bp, Homo sapiens
cacagcatttatacctttacaggtgtcaagttcaaatccttatatttattgttattagtaatgattatatttgacttattaacctgtatcttctgttattttccatgtatcctctacatctaccagtctgttccacgtctgttctgtatccacaaaagcatttgtaccttcattcttgctgttcttcccacctagaacgccttctcctccttgccattcagtcgttaattcatccatacatcctggtgatgtttcctggtcacccactctgtgccacgcaatgtcctagttagtgtggatatgagagaatgaaacggagcttctgtcagcatgctccttccttctagtagagaaagcaaaattagtaatgaatagacaaaatgcttggggttgtgatcagtgctgctaagttaatcaactggtatttggataaggaatgaggttggggtggaggctacgccagactcggtagtcagagaaagcttcctaaggaggtggcatgcaggctgaggcctaaggaatgaaaaggaatcagccacgtgagagccagggtaaaaatgtgtcaagctgagtggccggcaaacacacacgcccccagacaggacgttgactgggatgtctgagcaacaaggccagtgtgtctggggcctgatgagaggtaggggcctcagaccaatcagggagggccttgaggcttggcctctgtcctaccagctttcaggagcctttgaagggttttacgagactgggaagaatggactggaaagaagtaagagtggaagctcctaagaatgaaatccacttagaaggctcttgatggaggtggtggcagtggggaaggggagaggaaacttacttcaatcccagccctgtgtcaaggcccagcacatatcccatcttacaacgtcttcccaactggtctccaagccctgaattttctcatgacgctgatggaattcaacacccagttttgtacttactggaagttcatctgagattactctccagttgagtcttcccttcccaaccagatttaaaagtcttgagggcagatgccacatcatagacatcttttatgtcttccaaagagttagagtggtcattctcaactctagctactcattagaatcccctggaaatcttttaaatacccatctctgtgccccaccctagacaaattcagtccgggactttggagtggggtcaggacattggtgtttgtttaaaagctccccactatattctaatgagccatgagggtgacaaccactgttagagtcctctctctttctctcttttctttcccctttctctccctccttcctccctccagtctagcaggccagtctagctgagattttgtgcttgggaattatctgcttccaggtgagatgtgaggctgtgagattaatgagacctccaaggaaatggctgaaagaaaagagcagaggtgaaatactgcttccaggcaatgtatcaggataggaacaacggaaactgaagccagactttctataatccacccttgtggagtctgtagactggatcaaagaaggtggttacggagagacttagtcacctacttcctaatcaggaaggttggtttcttttccaacatcttagaagcaaattaaatactaaaagtgaagattcaccacagtggcaaaaactatttctaaagagactacatgtgaaatttaactaaaaagagatgttaaacatctcttgtcaaattctgtataatagaagaggtacattattagacccccaaatagcactgctatgatttaatcatcactaactgtatctgtaccaagaggctgggtcagagccacgattagacatcgatgctatatttgctgtatccatgtgacttaccacaggcgccctgctttttagtgatagagaaataggtcctgttccaccttgtacttcctgctccaaacacacacacacacacacacacacacacacgcacactccagaatgagtttcagatcattttaaattgatagtgaccttaaatattaaagcctagggatgctttgat

SEQ ID NO: 39216 - DNA, 1044 bp, Homo sapiens
aaagaagccagccttcacctaaagaaggctcagtctagtgacattgtttatccatttgctttgaacttttcagattaccttccctaacactgatgtcaaatatgccggtgaagagtttgaataaaatgttttcaggaaatgtgagagtggaaaaaagcaatttttaaaaatagcatatttttagacatgatttagtatatgtattttaaactaaattaataaattaaatattgttataagaaaaaagccaaattaccttccctagaaaaagaaattattttcaaactcctaaaatgtattagtatatttaaattgtcccttgctcttaatatatggagagagaaaaaaatgtcatcataatacccaaatgaaggcccaggtgagcagatcacttgaagtcaggagttcaagaccagcctggccaacatggtgaaaccctgtctctactaaatatacaaaaattagccgggcatggtggtgcatgcctgtagtcccagctacgtgggaggctgaggcaggagaatcacttgagctcggaaggagaaggttgcagtgagccaagatcatgccactgcactccagcatgggcaacagagtgagactctgactcgaaataataataatagtaataataataataataccaaatgagagagaaataattctgaactcttgttgaaaatcagttcatgggagtacagcatacaaagttggttttatttttataaaaacattttgtgtgtgcatagagcaatgctcaatccctgaagaataacagaaagaataaaaggggaatttttatattttactctagacttttctatttttggttttgtttgtacagtcattgtgtcctgctttaaaagccaataaattatgttttaatcagttaactggatagcagcacatattatattgtcttaccatgtatgatgcacaatattctgggtacactcagagcacccccataataagttgctaatgacatgggtccctaccccagagtaacttggggtgagtgatatgaagaccctgcctccccac

SEQ ID NO: 39217 - DNA, 1047 bp, Homo sapiens
ttgctgggaacaacctgtaaaatgtgccatctgcaacatgtggcatcatagccttcgtgagtgagcagatgatgtgatccaagctgccctctgaaaagcaatcaacagtattacagctcttctgttttcatcttcttgtggttcacagttctattaaggtaatctctgtgacaagaagaagatgaaaatcttggatacatgaccaaaataactttaatagtgggatttgagtcattcttaatattataagtcattatatttcataattataattcataatattaagataaatgtttataaatattatttgaatgaagatcaaaaaattaaaagactttatttactatcatttaaaatattttcttgttttgtatgaatgcaaacattgaggaaacaaagtatgtctagaaagctatagtaaggcatattccttctggctacctttagaggaaatttaagaaataatgttaatataccaaatgtttgacttgatgacatgtttaaattaaatacaattgtagaatctctataactacctaccagttttatccaaattgtattattaatctgaaacctccatgccttaattatagctcaaaaacaaattaaaagtgttgtgataactgttattgactcagtaaacaactatcattaatccttcatagggtcgttgcaggattaaatgagttaacctttcaaagccccattcctgacacattatttataaaatgaataaaaatcatggtaatgaattcactcatccaacacgcttggcaaggcaaagtaaattcctttgtttaattgaaactgaacagagcaggtctacatcatacgtaattcacatgttatggtacaatgccatttatactggaaaattgaaactaataagtgaaaataagtagtgatggaactaagccagaaatacactggtatggatcagcctttggagcagggaaagaactgagatggttcacattggagagaactcttgaactccaagtctttctcacaaaaagtcattcctaggtcttcttaataaccagtgct

SEQ ID NO: 39218 - DNA, 1054 bp, Homo sapiens
ggaacagaccaaacaaagcatggctgatagaaagggaagcctgcgatgggtgggttgagtcaggtaagacagagaagcttgctaaggtggagtggaaggaaatcctatcattactgtggctgccctctgaggtaggaaggaatgaagagcccgggaggtttaaagtgctctgaagcactgatactgtaaatgtggcatgctagcataggggaaagtgtaattcagacaggcagactactctgtctgcattcctacaactgcttctcctccccaggatgtgcacgtgtgtgtgtctctgtgtgtgtgtgggcatgtgtctctgtgtgtgtctgtgtatgtctatgtgtatatctgtgtgtatacaagtgtgtgtctgtgtatgtgtccatgtgtgtgtctatgcatatgtgtctatgtatgtttgtgtgtgtgtgtgtgtctgtctgggtctatgtgtatgtctatgtctatgtatgtttgtgtgtgtctgtgtgtctatgtgtatgactgtttctatgtatgtctctgtgtgtctctgtgtgtgtctgtgtgtctatgtgcatgactgtgtgtgtctgcatacactcaaaatgcttctgtggaataaagtcaattagattttgcctttccacatggcttctgtatgacctgtgcttgaccaaccatcaaccaaagcccacggcttttcctctgaaagggatgccacatttttgtgtgtgtctgtttgtaaacagtgacattcaagcacaagggttagggatggagtggataaggagggtgtgaaacagcacaaatcagagaaaatttaagaggtacaagaagaaggttttttgccttggctttaaaatgctggtaaacactaactaattctatgaggccagcatcatcctgataccaaaacctggcagagatacaacaaaaaaagaaaacttcatgccaatatccttaatgaaacaccaatgcaaaaatcctcaacaaaatactggcaaaccaaatccagcagcacatcaaaaagcttattcaccatgattcagtaggcttcatcctcaggatg

SEQ ID NO: 39219 - DNA, 1068 bp, Homo sapiens
tataatttttgtcattacactatataatatgtccctctatactatttgttattttaccttcagttttaatttatctattattaatattgagattataaattttcttttggtaagaattttcttagtaaatatttttcatacttttattttcagcttttgctgtttggggtgtgtcttctaaaaatgacagataaagaaagagatgtactatgtttctgctgctcacaattttttagtctttgtcattagataagaaagcttattcctttcatatttattgagattactaatttggacttacattgccatcttaatttgtgtcatctttttaagcatgctcttcttcaattttctttcattttctcattatttggattagtgaagctttctttaatccccttcttttgtttagtgatttggaagcttatagttatatctttcttactatttgaaacagttactttttctaacaaagtttaaaattatttagtacatatatctttccccgatcaaaatcaggactttaacatacatgttaaaacttcactacttcctcatttgcagagccgatagtttattaaattcaccatcatgtcctcactttctgtgctcactgttgtttcatgcataccacccttacctctaggttcattttctttctttatttttattttattttattattattattttgagacactgtcttgctctgtcacccaggctggagtgcagtggtgcaatctcggttcactgcaacctctgcctccctggttcaagtgattcccctgactcggcctcccaagtagctggcattacaggcacctgccaccacacccggctattttcttgtatttttagtagagatggggtttcaccatgttggccaagctggtctgaactcctgacctcaagtgatctgccagcctcggcctcccaaagtgctgggattacaggcatgagccaccgcacccagcctgggttcattttctttcttgctgaggaatatcctgtagatgttttcagtgattaattacttttagtgaatgattgatttagtgaatgagtgtt

SEQ ID NO: 39220 - DNA, 1029 bp, Homo sapiens
gttagcattatcctgttcaaaccagcatctctcagaattgttaaaatctaagatatagtagccatttagttgcaactttaccatagagtaacattttacaaagtaaacattagttacatatacagagttttcactgagtttatattatctagtaaagctcccatttgctttttatatttttctaagtaagctgactcttacaaaatgtagccaagttttgaagacatacaaagtttttaaaaaccagaagatcttctagtaaaaactacccaaatagttaaaacaacttttgcatatcgtttttagtatactattaggaaaactgctaagttttcattcatttccttcccattaagaaataatttttctattgctacaattcccattagccaaggaaatgtcactaattcacagggtgtctatggtcaaatctagaaataagggtgtaaattaatgtaatcttcatctgcttgtatatggccactatcaaccactgttgcctcccaggtcactgctgttctgatcaaccatctcatctcttgggactctgcctaacccttccctcccatcataattcctccacccctaacatctggtgtctcaaaatgaatcctcacacagctggcagcatctggacaaggcagagacctccaggattagtattcatggcatttgtgttctgaggaaggttccttcttcttcctgctccaggctagatttggctgcctagaaaaatctggcagtaacctaagttataggatttggtagtggtgactgtagtaattgtaaaccatcttctctaaaggcaccaagttgtatgtctgccatttggactttgacctagaaaagaactttctcacaaatggtccagattgccaatgtttaggcttttgtccgctttaactttaacctaatagatatagtggcttccatccaggaggagtgcaagtgtcactttgggtaccccaggtgggtgagtctaagacttcccacatcagacaagccagtgaagtctgtgttacagggtag

SEQ ID NO: 39221 - DNA, 1068 bp, Homo sapiens
cctttttgtatgttgctgggttaggtttacaaaagtattttactgagaattggatccattatttctaagtacaggctaaaacgatatgccctcaaataggatggtttcggtaccctctggcatcatgccctaggaggattgagacttctagtatttcattgtgaagtgtagagcatggtagattggatacaatacatttttgatgaatatatgaatgagtcaacaaatagtctcaataagcagcctgactgctttaaaccaatgattatatgaatgagaggtatgtattttttatattctttttttagtccaagaattacattactctggctctattgtctgaagggtggtatctgaatctagtaattatttcttctagttttttccaaccccaccccattttcacggtgccacagatcagcacttggctgcttctcctcaatccttgggttgaaagggcagacaatgccactgtccccatttttaagagacaagagaacaagtaaataaagtgtgcaggatcacacctatgttgtgatagaacctgtattcatctgtgtctctgggtttccaagttttgttcagggccctgtatttgtcttgtccagaatatttatccatttccttgtaaaccaggcacaggaagaggtcctaaaggcaaaagctgatggagtttgttttctttattccataatatatacatggtaggaagtcaaacattacaagatggtttgggataaaaatgaatttactccctcccagaatcctccagtcccacttttcatctataacccagcatgaacagtttttttcattccacacagttttcattcatagatatatctttatcagcagtcaaacaagacatactatacttactgctctatactttgaatttttcgtgtaatataacttgaaaatacttccaacttgttctctttaattctataaatgaacactattatagtatgtggatatatgaaaacttcctttaaaagaatcctgttgtattttaatattgttcctgggttctttgcatatgtatatgctcttatgaacaatactgaa

SEQ ID NO: 39222 - DNA, 1047 bp, Homo sapiens
tatcttaaagaaaaagaaggaaggagggaaagaaggaagggagggaagaaggaaggaaagaaggaaggaaggaaggaaggaaggcctgcgacagggagtggggagggaaggaaggagggagggagggaggaaaggaaggaggaagaagtagaaggaggaaggaaaaaaggaaggaagggagggaaaggaaaggaaggaagaaaaaaggaaataaataaagaaagaaatggaatatgtgacattatgtttctgccattgtgtaagaaatcaataccagtatcttgtgattggagcaccaaattgatcgagtaatgttcaggaaagaaacccccaaactacttatcaagatcctaatcccagtgtggtcagtaactaatgtggccacctgactggttttataatcttctttgagggccctgaatgtgaagccctgtatttggagaaatgttttgttctcaaatgtcactacatatatagtcttccttttctgtgtttggttttgctggctctgtatgctttcattgtcttagatgtgtttgaaatccgcagggtgacatgtctcttttcaaagagctgctaaaataagaaagaaaatgaataagcgtgttaaagaaagatggtgtttaaacacctgtcaaagtaaagtcagaacaagaatgttcttgccagaaaacgcagagccccattgagacaggttggtaattcgaagatgattcattacgactaactgcatttgtattctagcccatatgcattgtaaaccacctagcaggcttccaatgatgtcttcctatcaattcgtaaatctcacaggaaacttttaactggtgcagtcagttttggtggactgcttatcttgtcaacgtgaagataatgcttcaacagcacacccacctcctctaggttcaaaattccttattttattgaaaaaggtccctcaagctggttaagcacacaaataagaattgggtgcatcagaatctagtgaccctaggtccttttgtaaaatgattaaaactctccttaaacctcagaaattatttaatt

SEQ ID NO: 39223 - DNA, 1025 bp, Homo sapiens
ctccttccccccaaaaagacacttaggtccccaatatctactctgtgcgatatattattttgggcattatgggaatgacatgataaacacgacatccctcagaaggcttagactagaatcatgtgattatgcaatcgcatacacatgaatttagtaatgaacaacttagtaagtgctataacagaaataatagttaatagctaatatgtattgaatgctttctagatcctaggtactggtctcagtattttacttggtttaacctatttagtctccaaaagaaccaggaaagtagttgctatctctccattttgcagatgaggacgctgaggcacagagaagttggttgaaagtgcttttggaacacaaagttctagcccatcaggatagtgagatctccatgcagagctactgtgtgaagagaacttaacattttagggtagatttcacccgagagggatagggaaacagtctaaattctaggaagaaggaacaatacatgaaggaatggagctgaagaaccgcagatgtttaggaaatggcaagaagtaaagtttgactttaacaccaggcttgcaaaaaagagatggaaggaaagtgatgggaaaaatggttcgctgggacgggttgtaaagcttggctgccgttccaagtccagctggttccacagactgtagaattctttagtaggggagtggctggagcagataaacaaaaaaatcgccagacccctgagtgtttttaggtggggatgttggctttgtatctctgctgtacattcttgggatgttttggaaggtttttgcaaatgtcctgttgggtggcattgaagcggttgtttctttaaatgacttagctctgccttagtgaagatcttgttaaaagcagaccattttctgacattctgttttctgcaactgctattgaagaggggcaaagccgagccaggctcttgtagaacactttcaacacaagacaagtggttttgtgtgtttctgtcacagttttacagtgaggccattcag

SEQ ID NO: 39224 - DNA, 1045 bp, Homo sapiens
ctctactttatgaatgaattttatgttttccctgtttttctattattttgaagctatttatttcctgtttgagacttttaagagttaaaaatgcacatttctaactttttaaacttaaaggtaggcttgcaatatcaaaattaatcccctgtccaatgtctctgaaggcaatagagaaataatatacccattgaaagcttaacactgggccatcagctttatgggatgggccaatgcatttattagacatcgtttatttagaaatattttaaagaaagtacaaaatggaaaattttatgattgaaactgttaatgggtttaaatgtgaagattaaaagcccatctttttttcctaattaaaatttgtaggtagaaaaagaatttgctctgtctgaaaaccaagtagcaatagtcaatttaaagaaatgatttttattctgccgaatctgtgaaactatttgcctcatagattataatttcttgggccaacatatacttctcagaaatctgactctctgatctttttatttaacttttccagtggaaactaaaagttttaaaacataaaagaacaaaacaattttttaacctaagcataatataataataggcttaatgtttgagaagtcataaaatactagattttactttccagcttttccatggtccctatctagaaccgtagaaattatctaatggttgaaggttcctgaggatgtcagtagtaaatggagtccttccccttttcagctgagggctggagaaaatagttttctgtgattttcccaaaagcaattatctggagaatttcagtctgagagactagaagctgctgttcttggtaacaacctcctttctgctgccagtgaagattcattgtttgccttgatcttcttgaccttgcgtctgctcttgacagtgcctgtccatcaagccctttattcagtgagccagatagactttaaaaatccctctagctaccctgagtctgaccccatcccaccatatcccatactctcccggctattgttatttttccttttag

SEQ ID NO: 39225 - DNA, 1049 bp, Homo sapiens
acatggttaggcaccgaatccttagcgtctttgttgtgaaaagtaaatgtagactggacttagattgaaggagtgtgcttaatgagtttgacttctaggctagggaaggttgttttctataaagtaacaggtctagatttggggaagaagaattctagttatgtatatcttaaacgataaagaccccaaaaccatagggattccttttaagcctggaacctgtcactaaataagactggcttctttagtatcagtctaatcagaataaatgaagtcttacatctcattgtctattctttcatttattcttcatctcttcaccctcccaattgacttcaataaagtcataactggaggtaagttataataacatctgtatacagtgtggattggcttcacaatgctaacaagatgttttctaatcgttctgtgaaagatagttgaacccttcatgaagagaaggagcataacaacattataacagaagaagccattaggataaatttataggtcatgaaagaaaagagtattctcataggagtttattttatcatcatatatttactaagatgacataaagaaaaaagtagttaatctttttgttttgaaactgttttgattgagggtgccctatccggaagtaggcaaatataccatagctatccttcgatgaagaccttcttggaacttaagcattaaggaagatcacatttgcgaaggtggagtcagaagacctgagaatgatatcctttccattcacattatttagaaccagacacggtggctcacacctgtaattctttggagccaccaaagcctctcactttgggaggctgagatgggtgaatcccttgagcccaggagttcaagaccagcctgggcaacatgacaaaaccctgtctcaacaaaaatacattaaagttagccaggcatggtggtacacacctgtagtcccagctactcaggaggctaaggcaggaggatcacttgagcccaggaggcagaagttatagtgagccgatattgcaccactgcattccagcctgggc

SEQ ID NO: 39226 - DNA, 1049 bp, Homo sapiens
atttgatagcatgatataaagaacaaattacagtcaaaaggaatcaaattttaaaagtacatttttatggaagttctcattttatgaaaaataaatatttatactaaaagaggttctttctgttctgttgtactctatatgaagaagcacaataaaattggagtacagggagaagtaagggtcattttgtttttgtgggggtattttttgtttttttgtttgtttgtttgtttgtttttttagtagagatgaggtcttgctatgttgcccaggctggtcttgaagtcctgagctcaagcgatcctcccagctcagtctaccaaagtgttgtgattaaaggcatgagccactgcacctggcttcttttttatatatgtatttgtatgtacaaaaataatatattctaattaagcattcaagcaatacaaaattctattaagtataaatgaaaaaccttcactcctttcccaacctcatttctgttctcacaggtatccactagtaaaagcttgatgtagatccttttagatgtttttccatgcatttataaatgtgtgtatgtgtgtatatatatatatatattaaatatgtgtatgtacatgtatgcatttatatgtaccctctctcacacataaacacagcatctaagaaatctttctataataatatatatctcattcagctggatgcagtggctcaggcctgtaatcccggcacttggggaggccgaggtgggcagatcttttgagctcaggagttcgagaccagcctggacaacatagcaaaccctgtctctactaaaaatacaaaaattagctgagcgtagtggctcacagctgtagtcccagctacttggtaggctgaggtgggaggatcacttgatcccaggaggcagaggtggcagtgagcccagatcacaccactgcactccagcctaggcaacagaaagaaatcctgtctcgaaaaaaaaattatgtatatatttgtgtatatatatatttcatttgaatgactgacatttcatagataatatgccaaaaagttattga

SEQ ID NO: 39227 - DNA, 1089 bp, Homo sapiens
aaattttataatgcgggtgaaagaaaaatatagattaaaattgctgggcactgaaaaggggtgggagttggaaatcagaaagaaagagaaatatttcattatgttaatgaagaaaagagaaaattgaagcataaatgtatttttgaagtagttattcggtagctgagaacttattaagggatttaggaatttaacctcctgatgtggattcctcaaagacttgatcggagaatactcttgtttcaccattatgttggtacagtatagtaccattattttatgttgtgccagtgaatccagttgccagaaataagtctgaatgttttcatgcatctttttcttaaatgcaagagcttctactgactcttaacaagcatgcttacccaaattttgttgcatgcttttaagtagcattagctatgcacacttgacatttttaaatatccctttcctagtgtaccagccttcacaggataagaggactgggaataaagtcagatgtaatgtgaccctagaaaactgtagcaagcttcagaaataaatcttttgatctttccctatcttgattagatccaaagtcaaagcaaccatacttcacctagagaagacagtattggcaatcatgacacctgtaataaaaacttgaatccaaagtcaaaacttaagcaagatacaaatgtgctgcctgcagttagtcctgcatgggaataaggactagttatttttttagtgctgcatttttttaaagttggattgctgctatttaaaaaaaaaaaaaggacacagatcaaaaaaacacccaaaggcttaacagaacatggaaagttcccactaagttgtgtgtgaggaaatcctcatcttgtattttaagaatctgcagatggcatccatagatacagtacagtatttactgtcaatgcaaaagaatcagtgaggttaaagtagtggaagttttccctatgagcctacagtctgtattgtttacattaagaaactctctattattgtgttgctattttccatggagtcacaggcacactatgacttctgctcccaaatacatatgaccatatgtaaataccaccttgc

SEQ ID NO: 39228 - DNA, 1050 bp, Homo sapiens
agagatcatacatgaagaaagcttttttttttttttttttttttgccttacaacttttctttagaaccacattattggtcataatccttgttactgtcatgaggattgttgcatgggttaaacacaaacacagactagcaatgcacttgaacaaacctggtggtctttggaaataaatcaccattagatttcacctggttatgctgcatcccataagttccaaatgaatcacctgcttatcctattaacgaagcatttaattcacacacaaatgcttgaatttcccctgtataaatgtagtcatgcgattcaacttttctaataagatttgtgaatgctgcatcatgatgaaaatgtggattaactgtgggttgcatgcctgttgttcatacttcagtgatggtcacacacaaaacaagatgagttttacttaggtgaaacattattaaactgtactaacaatacagaaacatattctctttgtcgctttttatcaccaaaactgaatggcaaatatgtcttgacattacttggatgaactgtggctagcaaaatggaattaacttagccactataattttttaaaacattaaagtttctaaattgtttttggggccgagtaacgcagagtcaataaaggtggttatattgtaagcttttagatggtgcttaagaattcttatctttttaaatagcagtattttttttttaagaataaattgtaaggagcaaataaggcagaatgccactctaccctcaggtcaattttatggtatatgaaaatgccagtaatatttgtgccacttgccaactcgggggaggaggggcttttcccttactggatacttttgttatagtttgactatgtcattatgttgtttagagagcctccacaatgagaagttgccactgcagggctaactcgccttcagaaataatcagaatgattcaagggtcaaaccactttcatcccttaaaatatagggactaatatttctttttcttttttttaaaaaaaacatttcttctgtggcttagaaatgtgccagt

SEQ ID NO: 39229 - DNA, 1034 bp, Homo sapiens
tggctcacttgcttctataacctattgaaggagagaaggggttccttagtggctcaacttgtttatctaagggagaaaattcttagtaaagtcttgcctggcttgtattgaccagtacaagactaacttttgttgttgttgttattgttgttgagacggagttttgctcctgttgcccaggctggagtgcagtggcacgatctcggctcaccgcaacctccgcctcccgggttcaagcgattctcctgcctcagcctccctagaagctgggattgcaggcatgtggcactgtgcccggctaattttgtatttttagtagagccggggtttctccgtgttggtcaggctggtcttgaactcccgacttcaggtgatctgcctgcctcggcctcccaaagtgctgggattacaggcgtgagccaccgcgcccggtcgtataagactaacttttaatccttaattcattttgagtaaaagcaatcactaattggctttttaacaggataaggctcttaaatggacacttcagtgacctttgcagggacagctgaattgtatttaaaaacagaagtgtggttggttttctgaagagctatgaaaaaatatggattagtcccatatactttttttactttaatttgtaacacaccaccaaattcgagtagattagaaataatgaataacccctagaaacagtgtaagacagtgtaaaaaggcagtatagaaatgattgatgcttgagcaggccctgattttgacatgaaagaaagatggtggtgctgttgtggaaagtagctgggcaaatgtcatgtagttgagaactactgcaaccaatgaaaacacagcactcctctaaaaacagagtaatttctctttaaactcttaatcgtgtatgtgattgactacttttcaagatttgaaaaatatctcacaaaggtaaattcatttaacacaaactgaccttgtgtttaaccccaaacttctaaggataaatatcacaaaggtacctttttaaaaacctaaaagactatgta

SEQ ID NO: 39230 - DNA, 1065 bp, Homo sapiens
aacacatggcggttgtcctcacgttatgaactgtttggtcaaggagaggaaacaagcataagaaccagtcagagaatgtaggctagcaagcacatgtttgagtagattgcagcgtgtgaagaaggcgggaagttcacacaaagggaagttctaggacagtgatcagaaagggcttcatgtcggagggtaggaaccgagctggccaccaagtggtgggtactgttgacaggagaaggaacattttcagtcaggctgccgagacagtgagcactgtggttccgtgtcaggcacatgcgcgccaagtaaagtgttttgcattattacatgactgaggaatgaacttgatttgcatggtcatatagaataactgagaaatttggatacacagagtaggccttgattttataggtccttgagaaccagggccttaaatacagagtgaaaaattgagacctgtcagaaactcaagaaggtcacatgaaaaactattaaaggagcttaatctcgccatgggtatgaaggttgtagtagatatagactagctatatgagcggttgcagtcatttatgttttggttaactataaatgaggtgatgccccaaagaatagagtgaaatcactgtatgtaagagatttcaaggggacataggacagagcaaaatgatttataaccacccgaggatttaagattgccaattcatacaagggctgtgccattactagagattaggacattatctctagtttaagaggaaaatgtttaattttggtttgaaatttcaggcaagtggagttaagaaactctgggatttgaatcccagaatctcacttactgatcattctcaggcaggtgggccatttaaactttcctagtttttgttcttttggtaaaacatggtgatacctcatgggatctgagggataaatggaataatttgctagagaaggcattgtgatgtattatagagagttacttttgggtttatgatggaatatacatgtttaacatatatacaacctggagcacaggtgagagaacacagaatgtagttgtaatagtttcct

SEQ ID NO: 39231 - DNA, 1071 bp, Homo sapiens
gacccctgatgggaggtgtctcctaggcaggaggcacaggggtcagggacccacttgaggaggcagtctgtcccttagcagagcttgagcactgtgccgggagatccgctgctctcttcagagccggcaggcaggaacgtttgagtctgctgaagctgtgcccacagccgccccttcccccaggtgctctgtcccaggaagatgggagttttatttataaggtcctgactggggctgaggcagcattttgtttcctttttttgtcttggagtgttcattctttattcttcactagactgaacttagttcttaatcgttcttttatcctcaatatattaatagactcttgctatcataggtccttatattgtgagttaagtgaatgaattgttgctatcttgggaattactgcttaatttttgttttccttctaggacctcgactggattttgatcctgacattgttgcagctcttgatgatgattttgactttgatgatccagataatctgcttgaggatgactttattcttcaggccaataaggcaacaggagaggaagagggaatggatatacagtatgtgtggtttgtttcaaagcagagatgatgacctaagtgttactgcttcagtgggatggtaaccatagaacgttacagttggaagagaccttcaagagcatttaatctgagacttctgtattttagagcagaaaatgtgagattcattgcttttcctaccaaaccagattgatcaaacaccctcactcttcctgcctagacaagaacccttcctgaaataccttccaattttacttgtgtaaagtggttttgttctgttactttttaagttgttttggtaggtaatttatgacctttactttaggaaatctgagaatgaagatgacagcgagtgggaagatgtggatgatgagaagggagatagcaatgatgactatgactctgcaggcctattgtcagatgaagactgtatgtctgtgcccggaaaaactcacagagctatagcagatcacttgttctggagtgaggaaacaaagagtcgcttcacggagt

SEQ ID NO: 39232 - DNA, 1087 bp, Homo sapiens
gttctccaagctgagtggaataatgcctttcatttacatgttaaatggaagcctatttttaggctaaatgtaagtcttaaagtactgagcagaaatatcttccacatcctattgttgcattaaatccctactgatattttaatggtaattgtgatagtacctgaataactattgtgtaagaataaagttaatgtaaaaaaatttttaagtgtgtagtcttactgagtacatttgcttttcatggtatcttttctctgtttatattcaagttttatgagcaatatgatgatgatgaaattggagctctggataatgcagaattggaaggttctattcaagtggacagcaatcgcttacaggaagttttgaatgactactataaagagaaggcagagaagtatagtgacttttccttccttgtttagctgttcttttttttaaaaaagaaaaaattccaaagaaaggtctatagtataactgaattgaggaaaaaattaacctagtcaaaatacatattgagaaaatgaaaaaggaaaaaagaaaaggggaaaaaaaaagatagggcggaaaaaagaaagtggtacattttccataaacttgggtcatgtatagctcattgttttgcctacattttggtgttaaatgttctgaagtagaacgtaatgggaatatacgaggagccactttctccgtatctttgactggagaagagtcatggtagaatgtgtattcgtttattaaatttttttttttttttgagacggagtcttgctctgttgcccaggctggaatgcagtggtgcgatctcagctcacctgcaacctccgcctcccaggttcaggtgattctcctgcctcagcctcctgagcagatgtgattacaggtgcacaccaccatgcccagctaatttttgtatttttagtagagatggggttccaccatgttggccaggctggtctcaaactcttgacctcatgtaatatgcctgcctcggtctcccaaagtgctgggattataggtctgagccactgtgcctggccaatttttaatttttttttaacttttatttattttgcttaaaagtttt

SEQ ID NO: 39233 - DNA, 1034 bp, Homo sapiens
ggtgtggtggtgtgggcctgtgctcccagctactcaggaggctgaggtgggaggatcgcttgaatccaggaggcagaggttgcagtgtgccaagatcgcaccactgtactccagcctgggtgacagagcaagaccttgtctcaaaggcggaaggggaggggaaaggctgcctagaacattgctgaagtgctgtctagtgttcctaagctcaaggctgtgatttgccctaaggagaaaatatgtgcattaggtaaacattcagtcatgagttacagcactattggcatgagttcaacattactgaatcaacactataaagaaggtgtctttaaacagaaacatgcataaaacaaggttttgtattgatccattaacaaaaatgttgtgaccagagactcacaggaacctaaccctatatttcccctaggagccacagttcagtatttgctaattcagtgctcacagtgactttatagaacttaactaccaaaaataatgagaattgactgtatgtctgtatctatacctacctatctgtgtttgctgtatactcatgccttcagacatgccttatattgactaatgcacagactgcatattttttcctttccagaaagtagaatcacctagagacagggaagggcatttatccaaggagtaggagacttgcggtgtggggcaggggttgggggcagggcgcgatctaggaatcttaacttctttcaaacagctttccccttggtcctccatattttgacagtctcttcctcctcattcgcctgcctcagttttagaggtacatgctgtccaggagttgctgtgacttttaagagtctgtagtgtgaatctggatggttctcagttctcccttactgttagtttgggaagtagagtttggtgttgctttaagtcctccaagtcagttacaatgtctattagctttccaaattttaggtttcttgttttctttcctccctgtcctatgtttctatgtccctttgtcactttactatagctttattggggtttaggga

SEQ ID NO: 39234 - DNA, 1034 bp, Homo sapiens
aagggtccacagttttcattatattctcaaaggagacctatgacttaatgaaaagttaagtcttgttagaggaagagtgacatattatagggttatgtcttcataatgtttctttttttctgaaattagattggcagtccaatacgctggcacgaactgagggtctcacacttttgctgtaactcaaattctggtccttactttacttctactgccttaaagccactcaaacaaaagacctgattgctagaattaggttgagaagacacaaagtttgaagggcaaaatttctgataatgtttgacccagttttgcatataatgtatttttatttgttgatgaatatttcccttttgttgctaaaagtggcaaataatcagacatagattactaattaacagtctgcctcagttttttttttttttaattaatgaaacttgggcttcatcaagctcaggtggaatggatatcacagtgctttattttttctgacatcaaaagaaatttctttgtcaaagtgtagacatgtttgttgtgactgccttttgtgtgggttcttttctcccagccctctcctactacaggagagagagataatggccctttgctcctcattccgcattcagaccagattccccagctgcaatctcctgccatcggattgcatcaccaactcaacctaattggtgagatgtcactccctccctccaccgctcactctcatttctcagtgagtttagctctgtcactctctctaaaagttactcttgttttagtgatttgggtgtaaacattgatgatccttctaatactctgtcctcttaatttctctaagttctctttctagtgatcttgtctcccagtgtggtgggtatattctggctagaccaggtcattgtttatggtggcagcccctctgtcatctgaatttaagcgtcccattttttcggtactagcatggctcactgcaacctccgcctcctgggctccagcaatcctcccaccctcgggtagctggggctataggcatgtgc

SEQ ID NO: 39235 - DNA, 1061 bp, Homo sapiens
ttctctgagcctgttttctgctgaggcagcccctgggtgttgcccactggcctaactccctccaggctcggcctttcgcctctcatcaaagctcttttttccctggattttaatggttggctgattaaagtagttcatagtaaggtgttaattataactctttccggtggttatgtgcatatattcacagagttgttacagaagtaaggggactgggctgctcatggtggctcatgcctgtaatcccagcgctttgggaggccgagtgggtggatctcctgaggtcaggagttcgagaccagcctggccaacatggcaaaaccccgtctctactaaaaataacaaaaattagctgggcatggtggcgggtacctggaatcctagcaactcgtgaggctgaggcgggagaatcacttgaacccgggaggtggaggttgcagtgagccgagatcacaccattgcactccagcctgggcaacaagggcgaaactccgtctcaaaacacaaaacaaaacaaaacaaagcaaaacgaaacaaaaaacaacggaagttagatggggctgaatttccaactgctaggctagaactaggacaacactgtgagggaaatcggagtgtaatacattccgcaaccccacctgtctactatcgcaaccccacctgtctgctatcctccctttgcaagcccagggccttgatggttcaaggatgagtctttctagaaaaaagggagagaagtttctttccttttttttttttaaacaaaagaaaaacaaacatgtttattaagatatgcgtagtgcatacacatgggagtacccagacatgagtaattcaaagggttggttagaactgggcttatctagcatcttaacaaaggaacgataactttttagagaggtgatgaaacaaaggaaaatgactttaagcttccaggtgttaccagaagtttcatcaaatcaagaatattcttaggagtgtcaggggtgtctaatagttgagctgttaagtaactcttaaacttgttaatgtctcttgggaatttcttcttttagagttgt

SEQ ID NO: 39236 - DNA, 1043 bp, Homo sapiens
cttgttcacgattgtgtccatagtgccttgtacggtgcctgttctgtagggatgatagatccttgtgaatgaatgaatgagtgaatgaatgaatgaaaaggcggagtcacttaaaagaacaaaagcatttgtaatagacttgctattcctgtttattctttgaaatttgaggtaattcttaactagccacttaggatctccattaagaaccctagtcaagacctttgggtattacctcaaagtaaaacaaagtgggagtattttggatctttggaagttaacttgaaaaaatctaaggattctttaaattgaatatatagggaagagagaactcctactcagaatacttaagttacaaacacaagaaaaattcatagattaaaaaaattgaacaaagagtatcattaagtcaaaccgtttttaatagtaattttgtaaagttatttatgacactattttttatgtatattctcagttctctaaaacctgataattttggtgatttactcttatctgtgctttgaacactttattcttataattaatatcattatttttaacttactgaaacctttcaacttacgtaatcagtaatgttctcatgctgatattaaccttttatttatttatttatttatttatttatttatttatttatttatttgagatggagtctcattctgtcactcaggctggagtgcagtggtgcgatcttggctcactgcaacctccacttcccggattccagccaattctcctgccttagtctcccaagtagctgggattacaggctcccaccaccacacgtggctaattttcgtatttgtatttttagtagagatggggttttgtcatgttggccaggcctgtctcgaactcctgacctcaggtgatccacccacctcggcctcccaaagtgctgggattacaggtatgagccactgagctcagcctgatattaaccttttaattcaatacagtcttcccataacagaccttctcccattgatgggctcatttttattgctctttgttctctactg

SEQ ID NO: 39237 - DNA, 1075 bp, Homo sapiens
ctctgtcatctgtcgccgaaagactcataatccgggcagcctcaagagtttgaggcgtgggtttgtgcccgagtttggggttctaggggaggggtgaagtggaacaggctttcagcagctgctgccgccacctgatacctggaaccttactgctattgaggaacatgtatttcctcttggcttcatttgctgtttggctatgactgaggaagacaggaggtattgcatagtatcatttactttcataaacataactttgacatctctaggcttcatgttggttcaggcaatgctctcgaaagccagggagctgctttgcaagatgcatgctatggctgaaggaacggctcaatagctgggagctggccctgaggtttaaatccactcacagcacgaatttggtgttttactttgtgtcctgaaacctcaataacctcatttttcaagtgagagttgaaatattgacacaacttaacttttaagaattttgaaggcatcagtgaaaataaattgaacgaactttgaagttcagagatctctaaaagtgaatacagaccaaattatatcctgatgatcaagtaggaacatccgtagttccagtactatagttcattgacaacctccagaaagttacggtagtctaacattccttatttaaaaccaactttgccatgtttaatttatttatacttttatagatagacagatttactactggacattctctggcagagaaaaatttcatggaaagtgaagtttaatgtgaaatggcacataagtggtcctgacttgcaaactcaggaatggcttgttgaccactgtcctggaataagagagcccagctttgttcttgtcttatttctggatcgccctttctcctttgtaccttctgacattgtttctgagttccctcctcccatctgccacccgctcctttgcaactctgtagagcattttaataacaggttgtttgtgcctgtcttgcctctgcagcactcactcccacctgtttcctcagcctctgacttctcctttcccctttttggcatgctctgacctgcctccgtagttgaac

SEQ ID NO: 39238 - DNA, 1050 bp, Homo sapiens
atgctcatgaaactggatttggatctgtttcatgttttcacttgcgttctctgacccctacttagagggcaccaggtgcttcctattctaaccgtttgcaaattcaagacttggttggagggccattcaggggactggtgtggggttagataggatctggacacagcgactccctcgctcctgctccagtattttgaccttaatttgaacagttcaatgaactggcaactgaagtcgttttttcccactgaactagacctttcattgttttgcagaggaagatgactcatagccaggttctaccattgtgctaaagtgaaattttagtctaggactaaaggaacacaggccaaactttctgtctgagctgcagagtattgaaacttagattgtgagctgggcaggaattcctgtggccctctgtgtggagttgctctcaaggaaaaggagcatttaaatacgtttttgactccaaatttaatttttagtaatatagttcaaatgtcctttaaaatatcttaagtaatcagactgttttctaaaaaaaaaaaaaatgtaatgcaaaatgaaaattctacaaagtagaaaactgtcatttccttcctctctccaaaaccattgttaatagtttcgtttcttctgctacccttgttttctatgaatgtaaaaatgtatgcctctatgggtgagcatggcttttcttttttgaaccaaaattgaaaccatcctgatttagtggcatcccacttaaaacattattaaaaactacctgtgtacatgtatcttcgcttacttgggcaattgctggggcaaatatgcttttactgttaaatcgtcatctacaacagatgacatgtagagagatgaaatgtagtctatagttgtttgaacttgcatttctttttttgtggaactgaacttctctgcatatgtttattggctctttggacaaattcgtcagtgatttggcttttcatgcattgctcattttcttttgttgcttggatccctgacttttatactcttaatgattccaagggaaattcctac

SEQ ID NO: 39239 - DNA, 1028 bp, Homo sapiens
gaccataaaccttatactgtcattctagagggtgtaggaccagtatgaagagggaggaagtcacgaattcctgagtttttattggataactttaatttttgtttttagcatgctgacattttgattatgctgaaattttacttgcacaaaatgtagcagaaagtgctacgggtactagctggaaagtagggctctgatttgatccgataaacctggatttggtcactgatggcaggactccggggtttagggtgagacaacctggtcccttgggaaaggtgcccgagcctccctctgttgtaggcagtgttgggctccataagtgtaccgggcagtcatcacattctgcattagctccgcctcattgtgctcaaggagctcgactaataggactattttaaactctccaggatagagataaccttatttggtgctttactaaaggtacagactctcatactttttccttctctttctttttccattccacagatgaacacaatgacgtacagaagaaaacctttaccaaatggataaatgctcgattttcaaaggtaactgagactttcaaaaacttcgatggttcagatgccgcattctgattgaaggagtttggttggaagtgcagtgaattttccccaggaaatgtcacctagccgaagtcttctgagtatgcagatacatttgttgttcctttattctgtcctaaaatatgtttaaacggaaattctcatgcacatagtttatgggacgctattgacttttacctggccttctccagatatctaaggcagcagttagctgctttcgattctgtgaatcctgggtacatcttggaaaagaatatatcattgggaaaatttttgagttctcttggttaagaggatgatgatttcattttgcctggttaaaaccaaatgttataattcaggcagtctttctaccctgtcagaaatatttatggatttttattcttgtggatgtggctaataatatttatctgccttgtgggttgttttttcttgtgt

SEQ ID NO: 39240 - DNA, 1090 bp, Homo sapiens
taattatccactgtttcgactctgtgctgattggttcatttcttaactcatatattcagtttcctggattcttcaagccttcctccaaaatgtcttttgtgtgtgttttcattttattgcagccttcatactcatttttattttatttttttagtattatactttaagttttagggtacatgtgcacaacatgaaggtttgttacatatgtatacatgtgccacgggtggtgtgctgcacccattaactcgtcctttagcattaggtatatctcctaatgctatttaaagacttcattttctcctatagtttacaagctgtggcctacctctgctactctgccctgcagttagagtggacttttcccccaagactcttgttcatgcaggttcccctctgttaaatgcttctgcacccaccattatatggcagcctgcacatttttcctcagtttaaatggagccttttcagagaagtcttttctgattaatctatcaaaatacaactctctgtctctctctctctttctgtcactctatcttggtttcttactatcacagtatttttgtaaactgtgttaagaattttaaattgtatcttaagagcattgggaaagccagtgaaaggttttcagcaggtacgtcttatgatggcattacatttttgaaagatcattctggctgctgtgtgagaaatggactgtggattgtgaaggtgagagtgttgggtgggggaaaacaggaaagtaaagacacttgttagcaggtattccagttcagaagatggatgtgtgtggttgtggaaatggaaaggtctggatggatttgagataagtcttttttttttttaatatatattttttattgatcattcttgggtgtttctcgcagagggggatttggcagggtcacaggacaatagtggagggaaggtcagcagataaacaagtgaacaaaggtctctggttttcctaggcagaggaccctgcggccttccgcagtgtttgtgtccctgggtccttgagattagggagtggtgatgactcttaacgagcatgctgccttctagcatctgtttaacaaagcacatc

SEQ ID NO: 39241 - DNA, 1045 bp, Homo sapiens
gtttgcaaaatgtgatcttccctttctctgctttcccttggcaagggaaactcctcagtgtaatgctgttgttctcctttaggaagccatccatgccccaattggattagaagccactcctgtgaattcctggaattagcacctagcaaattcttttgttattgcctgttactttccattgcttactagactagaagctccttgggagctgagatttgtatctggttcactttcatatcaagagcccagcccagtgcctgacatttagtaaggctcaatcattacatattgaacaaaagaagatgttaactttagtaatgtctgtacttgttctttgctgattatctaaccaactctggtttttattatctataagcatttataaaaatacaagtgattccttataaaggtgaaaattgttttaatatgtaaagttttaaaaatttttatttaaggccaggcatggtgggtcatgactgtaatcacagcactttgggaggccaaggcgggccgatcatgaggtcagcctggccaacatggtgaaactctgtctctactaaaaatacaaaaattagctgggtgtggtggtgggcacctataatcctagctactcgggaggctgaggcaggagaatcctttgaatctggaggcggaggttgcagtgagccgagatcgtgccattgcactcaagcctgggtgacagggcgagactccatctcgaaacaacaacaacaacaacaaattatttaattattttcttcaattgtttattaaccctataatattattactcttttcatacttttagttgtaaatatatgatctcattttgcatggttaccctatttctgggttgctgtttttgggggagtgataaaaagacatattcctgatgagcatttgagttgctctttctggagtcaagtaaaacagtagaaggaaacatgacaaatggtcacctctgaatcttcaaacaggtttgatgctataagtgcagagctgttgaactggattttgaaatggaaaactgccattcagaccacag

SEQ ID NO: 39242 - DNA, 1554 bp, Homo sapiens
attcattttttaatttatatgacactgtgctttggtcaccaagacctgagctgcctcctagtttttctagccagctttctttttttcttaggacaaagggtcttctttctgaagtcgggcctagacagatcaaggtagttgatcttatttcactggttcaggtgataaactagcagagtagaagcatggcatggatggaaacatatattatctagaaaaggcagtggctgaagttctactgatgtgcctgaatcgttattttaaaatgtctttcttctttgttcaaggaattgaaataaacatcattatttttaagtgcatcattataaatttttgttgttgtattaaaagggacttaagaaagtgatcattatgtgtgacattgcctcactattctgagtgttagaatgttcagaataaattcaagacacattttgtaatatatagactgtttgcttgtttttcatgtctgcatagaaggccttcctactgaagaaataaaaaatgttctggagaaggtttcatcagaatggaagaatgtatctcaacatttggaagatctagaaagaaagattcagctacaggaagatataaatgcttatttcaagcagcttgatgagcttgaaaaggtcatcaagacaaaggaggagtgggtaaaacacacttccatttctgaatcttcccggcagtccttgccaagcttgaaggattcctgtcaggtaaggagccaacggtctggaaagtggaggaattctatgtgcagttccagagttaaggagggcttctcgtatcatgaactttaagttaatgctgccctgattaacttcctgtgaggatgttcatcttcagtgagttgtgtgaccgtattttctcttccttagcgggaattgacaaatcttcttggccttcaccccaaaattgaaatggctcgtgcaagctgctcggccctgatgtctcagccttctgccccagattttgtccagcggggcttcgatagctttctgggccgctaccaagctgtacaagaggctgtagaggatcgtcaacaacatctagagaatggtaaacccaacaattttaaaatctcctgtctcagtttgccttaatgtaaacatgactcccaacatttagaacttgagtacacttgcttgctttgcaccaaccttctccattttcctttgtgcctgtattgttcaaagtcttaaagtcttctgtattcagattcttttccagattcacacctttttgtaaacatacaagcaagtttcacattctctaaaattgtgtcagtaggatataataataatttttttttttgtagctacaggatctcactctgtcacccaggctggagagcagtggtgcaatcatagctgcagtcttgacctcctgggtttcagtggtccttctgcctcagcctactgagtagctgggactacaggcatgcaccaccatgcctggctggttttttatttttagtagagccagggtctagctatgttgcccacgctggtctagaactcctgggctcaagtgatcttcccacctcagcct

SEQ ID NO: 39243 - DNA, 1086 bp, Homo sapiens
agtcattgagaagtggatggatggcgtgaaagacttcttaatgaaacagcaggctgcccaaggagacgacgcaggtctacagaggcagttagaccagtgctctgtgagttctgctgatctggggaacttgtcataaataacattttgttctttttctatgttatttgctgctattattaaaattgtgagaatatagcatagcattacatctagataaaatatctttcatcataaagcttttatgactttatagctaataaaagaatgacagattcttcaagtttttatttctggacgtggttatagaattttgagaggttatagaatagagaacaagaacaattttggttcattaggagtcattgtatattgcatttcttgtgccacatggtgaggatttaagaaaaacatatttaacaaatgaatttgagaagtgtctgttcatcaaattcatttaagtatgtttttcttaaatcctcaccatgtggcacaagaaaagcaatatacaatgactccatgttgtgcacgtgtaccctagaacttaaagtgttaaaaaaacaaaaaacaagaaatgaatttgctagtaatagtgcatgcagtttatatttggtgaaatcatcaggcttctctacattaattaaaaggctattcccttctgagagtcaagtatttccagtctaatttggcagatggctatatcaagcacccaggtgaaatgagtttcttaaggcacaatatttcttaagtagttagaagtactgactcttaagcagtctgcttgtgtaatatttgcagggagataagcagacaaactataattatggcatccacttatatagtaatgaactcaacatgcatcttttatgtgtttaggcatttgttaatgaaatagaaacaattgaatcatctctgaaaaacatgaaggaaatagagactaatcttcgaagtggtccagttgctggaataaaaacttgggtgcagacaagactaggtgactaccaaactcaactggagaaacttagcaaggaggtgagtttttcaactttactacctacggttttcaggagatgtagactgtagcttctc

SEQ ID NO: 39244 - DNA, 1037 bp, Homo sapiens
ggctggagtgcagtggcaggatcacggctcactgcagccccagcctccagggctcaagcgattctcccacctcagcctactgaccagctggaactacgagcacgcaccaccatactggctaattttttgtattttttacaaaatgaggtctttcattttgtagaaaatgaggtcatgtttcccaggctggtcttaaactcttggactcaaaagatttgcctgcctcggcctcccaaagtgctgggattatagacatgagccactgtgcccagcctcataccaatcttttgagggctatacctctgccagtatcacttaggaaattaatgatagagctaagatgaaaacccaggattgcctggcacttaaccactacagcatattgcctccttgcagaaatgcaagcttagaggattctaaggtgctaagacaaaggttatgtatgtcttgggggttatatatgaatcagtttggatctttagttaacattctgattcattctcatttatgttcattcccatctcagtctcagtctctccctgcctctctccgtctcaggtgacagaaggaaaacaggatctggaaagagcatcacagttggcccggaaaatgaagaaagaggctgcttctctctctgaatggctttctgctactgaaactgaattggtacagaagtccacttcagaaggtctgcttggtgacttggatacagaaatttcctgggctaaagtaagttgcagttcagatgaaacaccagcatgatgccagcgtaacatggcatttgttcgggcgacctggttggataccatgtccctccattttatattaaatctagccttttcttttttgcattgtttttccacttctctgtcctaagaaaaaatattttaaaaataatgattatattttattttctttataatttctacttttagattaaggggtacacatataggtttgttacatggatatattgtgtaatgctgaggtttggggtatgaatgatcccatcacccaggtagtgagcatagtaccca

SEQ ID NO: 39245 - DNA, 1608 bp, Homo sapiens
gaaaatgaaattgagcctttacatttagagtgatgatgaaggtaattggcattcatatgtaataaatggatttatatttaaataaatgaaataattgctttcccacagctgagtgtgttacactcactggtatttgttgaattacacattttgttttccatttggaacttaagaattctcactatgttaataagtttgggaattttgtaaactttgacattgtaaattatatagggagtcatggactactttgtatatgtggcagaaaagtttttaataatttaaggttgtatatacttttataatattctgaagcatcaagtaggtcttggtgtttttattttctagaatgttctgaaggatctggaaaagagaaaagctgatttaaataccatcacagagagtagtgctgccctgcaaaacttgattgagggcagtgagcctattttagaagagaggctctgcgtccttaacgctgggtggagccgagttcgtacctggactgaagattggtgcaataccttgatggtatgtctcaggaaaaagtaaatgatgaaatcttctcctctcttctagttattttttaaatgaatacaactttgattaaatttcaaatcctgtttactgtgtgtcacagtgatgttttgcttgtgaattaatttcattagactaggttttattttttctttggaaaggtaataactagaaagaatttacagtgtttctaaatattcatgatctgcatggaatgaggtactttcatattttagtaaatgcaccttatttgtttcattttaatgatttcatattgtatttgattttcgtactatcagaagctatttttatataaaatcttcatagtgtttgaataatggcatactggttaagagcacaggctctagcatctgacggcctatgtaaaaattttcattactagcttggtaacactggtaaagttacttaaacattctctaaacctcagttgtttaatttgtaaaatggacattattatatctatctcatacagttttgcaatgattgattatgagccttaaacatgtagtgctcttaaataactatatgcaaaacaaccaattttagattttgctatgattataattattaaatattgtatatgtgttagtctttggttatgccactgctctgtaaatttgcatctcatggaaatagttaccatttaatttttatatggttttatgttcctatgatactaattgtgaatatatggccaccccaccctcccctgctgaggaaggcattgtcatttataattttttttaattctgaaatacctgagataggacttttatcaaatttatagaattactaggtaatggatagagacataaaaaatacattatcatgtgtttgaatatttatttaaattcctcaggatgtgtagggcagtgaagagcatgggctttgctcttgatctctaacagatttatatccacagtccatgacttattatctgtttaactttagctaagttacttaatgttactaagcttaaatttccatatatacagaatgagaacaaaagtatatacctaacagagttgttaaatattgaatataatagtgaat

SEQ ID NO: 39246 - DNA, 1690 bp, Homo sapiens
atactcccctcccacaatctatttacacattcacgtgtattttttgcctttaaaaatatttcttctcggttatacatccaataaaatttgagcaggaagcaaaaacgtaagtgctgcttacttggagatataattagcagcattgaaattgccctgatgacctaaaatcaccctacactggatgctaattttctcagatatggttttgtttgcttagtttctttaaaattttcatgcctataaaataatttttcttttagtagagcacagtagaaaaaaagctgatgtaaatgatttgaaaaataatattgaatttaatttgtttttattgttacgtgattactttggggtgttttatatcatgaagtctttagattagaactgggttatttgtgttaatgttaaatcagaagagatttttgtaagtcctccttatttttttcttagtgccaatttctgtaaaatatttagcaattgagggcatggtaaaaagcagtttcctgtaaagtagattgggatatgaacattatagaaaaatgagaaaaatttaaaaatatttagtgctgtaaattgactccttcgtgactcaagcattttagaaaatgttgatttaagtgatataacttctatttgcttgaatgtatatgtaaatcattttagtttaagtggttttagtcaccccccaaactattctgatcatatttcttcagcaaaaatcttttaaacatctagctgtatatagatgtgtattcatttaaaaattatacatatatgccatggtgaaatcatgtattaaatattagtagtgtataattttgttcttactttctactgttgcctttttgtaccacagttgattctttttctctatgtggtatacacaacacgattttggtgactagtcatttacatacagagtgaaactatggctattcttagcctggccttctagggggcttgagctttcagtgtggtgctgatctcaaagtcttccccggaatactgtgtcttctgtggtattaaagcaactacttctgaatattctgtgaaaaatagaagagaccagaagattccacctgggaagtcacgattgaccagtgatgtctacaaaaggcttgctttgtggctgtgtgtgtgtgttttcatgtgtggacgtggacaacacagaactatgtagttgcttgtagtgctaatgagtaaatagataatgaacatgaaggcacattaatctctcagcaggtttttatgttcactgatgaagtaaggtcacatattatttttcatctacatgtacagctccctgtatttagaggtagttaaggttgagtatgtggttttttagaagacactgaatggagtggtgtattttcgaccggttgaattttgtattttttactctcaaacatttccccacctttttttcacaggagaaccctgctctccttggacaattaaatcctgaagtgatccagggcaatggagatttactttaacatgatctgattgttgagatgtgtgtattttaaggtcaactcttggattccctcagtttctctcaataaccaactcatacatagattgtttgaaccatggagctcagagtcatgaccctctagtctgcaagttagaattcccacttgatcatatgagttgtctcttcttggcttcatgagaaagtcttggttagatt

SEQ ID NO: 39247 - DNA, 1026 bp, Homo sapiens
tgtgtgtgtgtgtgcactacgcggcagatggggggttagggggctggggaggagcatggcacagtgggaggatgaatgggataggagggtggggtggggtagggttgggggtagagttgtctccaagaggaagatgttgggtacagttgtgctttgcacaagggcattacatctaaatggtgtcattcccattgtaaaggccaaagcattgtcaaagggagtaatagctgttacattcatttatcggtttactttctgtttcttcatgtgattcagataagaggcgtttttaataatattgataacccttatctttctgtctttgaattcattgctctattttgtaactctgttaatatgatctttttaaaaactatggtgaaatatacaaaatatggcattttaaccattttaagtgtacaaatcagtggcattagaaacatttacagtggtgcaactatcaccattagccatctctggaatttttttattatctcaaacggaaactctgttcccattaaacagtaattccccacttcctccttccctccaatccctggtaatggccactctactttctgtacctgagaatttgactactcttaccttatacaagtggaattatacaatatttgtctttttgtgactggcttatttcattagcataatgtcctgaaggttcatccaggttgtagcacatttctgcatttccttctgtgtttttttttttttttttttttgaggtggagtctcgctctgtcacccaggctagagtgcagtggcatgatctcagcttactgcaacgtccgtctcccgggttcaagcgattctcctgcctcagcctcctgagtagctgggattatgggtgtacaacaccactcccggctaattttttgtagttttagtagagacggggtttcaccatgtcggtcaggctggtctcgaactcctgacctcgtgatccacccgcctcggcctcccaaagtgctgggattacaggcgtgagtcaccttgcctggccaattt

SEQ ID NO: 39248 - DNA, 1026 bp, Homo sapiens
tcttgtgaaagaacatgattggatttctgctttgagctatctttaagtttgattacaaactgtaacagagtagccttgaggttttttttattggtaactattttgtgatgaggtggttgaaatcgtgcttctttcttgatttttgtttgtttgtttgtttgttttttgagacggagtcttcattgacacccagcctgaagtgcagtgatgtgatcttggctcactgcaacctctgctgcctgggctcaggaaatcctcctgcctcattctcccaagtagctgggaccacaggtgcatgccaccacacccggctagttttttgtatttttggtagagacagggtcttgccatgtggcccaggctgctcccaaactcctgagctcaagcaatctaactgcctcgtccctccaaagtgctgggattacaggcgtgagccactgcgcccagccaagtgcttcttgatttctatcatattgtgatgttcagaatctaatgtagttatgtggcccttacgttactctgccctgtactatcttctttattattttacattcatttatattatacttctaaattataaaataaaattatagtttaatataaactatatataaatctaatatagatttttacactatgaaataatgcacgtttcttgaaagagcaactatagtagtagatacatgttataacgtgcaacgtctcctgccctgggattcttcctaagtaccacacccagaataaccactgtttcttatacagctttccagaaaattttatgtatttttatacaagcacttgtattcacatacacgttgtttaaaaaaaaaaaaagaaatggtgtttttctgtacgtggcatatgtttcaacatcttgccttttcccctccaccctaatggacattgggtaatgatgtaactaatttctgcttttctgttagctttggcagccagggagctccaggctcatttacacttgctgggagccctgtgctcaattataattgcctacgatagcctccactt

SEQ ID NO: 39249 - DNA, 1061 bp, Homo sapiens
gtattggataatactcagtttggtatttgttttctcctgtctagttcttagtacccttagaattgagataattcattatttgtcactcaggtaggtttcgagtgaactgatatatttaattagatccttaaagcccataggatttatactggtcatttctgtcaattgtgaatctgctcatacttgttcttcatgaaactatggaataatttttcatgtattttcatgtgtcaatctgaaaagaaacttaggttctccagaacagaggagtttatttgaaaatagcagaggattataacccagaaaatgtgtgctgagccagatcacaggcgcatcaaggagactgggaccaaagggagacttttaaagacaaagagaagtcttcataaactgtttgttaaaccagaaagatcattggttacaagagcttgctgtaagagttggcgacaaatcattgttaaagacgtcattactagacagatgtccttgtgcaagctgcttatctggagctttgcggtctaggggaatttccttgctaaaagtcctgttacaggcaaatgtgcagtaaatgcgggaatgtctcctataaggcctttacaggcatttgtgagtgagggctcccccttcgtggccttccaactccatttgctagggtttgacataattgattccattttggtatcaacaactttcacacatggatagttcaaaatggaagctcctgtaaaataatactttcatatgtattttttcatggtgtctagtacctgtgccacatagtgaatgcctgaataaaggaccacatgtattacagttgttagattttcttagggaccctattgtttaaatgacttataataagcacttactgtgtgatggtaaacactatgctatttatgtcacctatacttcttacttaacattaacacaactctacacagtttggaatattgttgaaataatcactttatagctgagagtagagcatgtatgggttaaactcttgcccaaggtcagacagtgagttgacttgtgtcttcccatgttgtcactgatgcgtc

SEQ ID NO: 39250 - DNA, 1037 bp, Homo sapiens
taatgtaatgtaatgtaatgactgtaaacattccttcttctctcctggttagtggatctcttagagttgagtacaacaaatgaaattttcaaacagcacaagttgaaccaaaatgaccagctcctcagtgttccagatgtcatcaactgtctgacaacaacttatgatggacttgagcaaatgcataaggacctggtcaacgttccactctgtgttgatatgtgtctcaattggttgctcaatgtctatgacacgtaagtttatattttttctcattaaaatacgatcactgaatgaaatatgttaatagaaaatgtctgatttttaagtgaattttttaataagtgctttcaaattactttcccagtggaaatatttatgtttgttgttgaaactgaatgattttacaaatcattgagcttcttaacaaacaatagaacagaaaagaatgtacatctttcattttaaaatgttgcttcaatttacaaagactgtcaaatttatagtattctttgccaaaatgctaggggaaacaatatagctaagtcctactttcttcttgtttcataatgtctcacagtatttcttttttcaaaataaaaaatcttctgtttattgttatgaattacagtaatttattagctcataataatctgctctacaatctttgtaatccaactgaagagtgatttgaatggccatgaacgaggtagtcttttaatatttgctttatttgcatagtggttatgtgtgtgtgtatatatatataatatatatatatatggtgttttaaataatttatgctacaggacactttaatatctgtcatttaattaggtactcactgttcataaagcacactctcaactcccagcataactcatttgccattaatttggcccttttgaatacgacagtacatttgtgaaatagtcagttctagaaagacctgctgtgggctgacatttctgaaacattaggaattactcattgttctggtgggaggttaaagtatgcaaagatgaaataagaaaact

SEQ ID NO: 39251 - DNA, 1023 bp, Homo sapiens
ctcaaactcctggctcaagtgatcctcctgccttagtctctccagtagatgagattacaggcatgcaccacagcacccaactacatctattcctttgacaagtcatgaaggaagctttgttttggctcattctttctcaataagaaggggagttcttatgaagatcataaaattaattcatatgcatttattgtatcattttaaaaaggaaatttgcatttattgatttatattatatatgcatgatttatgtttatatgtatacataacccattcttgcaggaacgggttaactacatgcttcttaaaataatctaatatcatatgtaatgcagaatattaagatcagaatattaaggtcattggaattcaggagacaacgaatcagattcatgtccttctgaaatttttttaatctgcatggttcagtccacattaccaaagatatattttaagtaaaagaacatggtagacagatgaaagttaacctcttgcctctctttgcagatctctttaaggaagttgcagggccaacagaaatgtgtgaccagaggcagctgggcctgttacttcatgatgccatccagatcccccggcagctaggtgaagtagcagcttttggaggcagtaatattgagcctagtgttcgcagctgcttccaacaggtaagcatgaaggatcactggtgtgtaggatgtgttggcgaagggttttgaggatgttctgagacatggaatagggaactcgggctggagccaaatactggaagactttgggtaccatccaacaagtggtgtattttatttcctaaggctcatttgcttcaaaaaatagcaacccttgcaaagagacttgctgtttttctttgataaaatctacaatctttaacctgtgccattagattgctgtttgtcctgcccttttcctggcctcatctcctaccattcctctccttgctctccgctttccagctgcactgttttatttccttgattcctgcctcagcagtgcctttggacctgt

SEQ ID NO: 39252 - DNA, 1035 bp, Homo sapiens
tgcgcagaggctagggtaaaaaaggtgtgacatttctagaatgctcttgcctgctgtgagctctcagactggacccatcagggcttccttctagaaagaaggtctcatgctgagcaaaacttctgggaatagaatcaatatggagcatctcaaggcaacagaaatgaaaggagaaggcctagtccaaactgttcctacgtgctggtagagggtatgggggaacaggaccaggaagtctcaaactcaagtactgctatgaatggaatgtttatgtcccccaaaaattcatgggttgaaatctaatccctagtgtgatagtgttaggagatggggccttggaagtgattaggtcatgaggatggagctgtcataaatgaaattagtacattcataaaagtgaccccagagagctctctcttcccttccaccatgggaggacgcagtgagaagacggctgtgtatgacccaggaagcagactcactggaccacagatctaccaatcctttgatcttggacttgccagtctccagaactgtgagagataaatctctgctgttttatttaagccactcagtctatagtattctgttatagcagactgaatagattgagacacatgctgtaattgtaaataccacacaaaagcaaaagaagaggaatctctgtgaagttagaaaagctctcctcaacctcattttgttataaaagtttaggaaaattaattatacaaccaaaaaaatgagcaacaaaagtatcaagaccaaatctcatataaaggaattttaagaaaaagagataaggaacaaaattatatcactacaaataaagcatgccagtgtaactactttatgaatgggaggaaaatggaaaagtaaatctatattttaatgttttcactaatcatgtgggtggtagtattggtattagtgttctaagactattgtgtacgtaatatgataaaaagcaaatgaataattatgggattgtctaggtctatcatctcttgtgtccttgagaaccagatttttggtttt

SEQ ID NO: 39253 - DNA, 1557 bp, Homo sapiens
ctgaagagtcttagtttttcatcccaataagataatgttcaaaagtctttgctgtgcaggcatcaacctgcacttcactataggagatgaagagaaaagtaggcattatagatacctactttctttgtctaagtaggtatgtataatagaaataggagaatcaaggagttttggaataattttgtttcaaacactgttagcttttgcagacttttatttaattaaatagctaattttctttgtactgtaaatgttctacattcatttactctccttcctcctcaaaaagctagggttggaactagcttttaattaggatcagttgttttcaaaagtatttcatggagacttgggaattcttcctaggcagtatatgacatccccagcattaagagtgacactgaatgatctggctccagacacaagcccctgagtcaagcagaacaagtttttttgcatcgattcatagtttaaacttctaaaaaacttttttttgaagaaaatgtatcatgatctcaggaagttgccttcagtgttatttatgatgtgacatttttggtgggatctaggggtggtatctaggttgcatgtttgttcaatgtgtgtgtgaggttgaggtattttgggtacatctgggtttggatgtttacatttaaaattacatgaagaacagaaaagtctaattttattgcacctctgccatcaacatataatgtagtgtttcatttttaacttcatctttctaaccaagtttcttctctaggaaaaacaaaaatatgattgcatcccccttggtatattatagaatggtatctttacattattctataattttgagttatttttgagcattctggttttttccccagtatgactgtttaaagatgtgtttgctatccttgaacaaatatcctgtaatatctgtgaaaaggcccctgcagactcttgaatacacggcgacttctctagaatacactgtgacttctgttacttttgatttccccatggtggctctcagggcaaccacatatatgagcggaagataattgagaatctccccacacccccactgcttttgtcttaaattgctctaaagtgtttgttctgtgacttttgtctccctctcccctctttgcagtcctatcacactcatcagtatgtggccagagcactatgagtgagtattcatagcccacgtgcaggagaggtgttctgatcagtggtactagcatgggggtcttactaaactcttggtctaaaataatacttctgtgttccgggtaacaatcctagtggtctgtttgcatggcagattcattacttaagtaacctaacatttctaatagtaacacctatcaatatttgggcataaaattattgctttgtttttttcttttaaagcccctcacaatctcctcaactgtttcatgatgacacccattcaagaatagaacaatatgccacacggtaagaaactttgatcagagccctccactgcactgccacccagaatgtatctatgtctaattaatctaatatcattaatataccttgatt

SEQ ID NO: 39254 - DNA, 1033 bp, Homo sapiens
ggttctctttagctgggatctggccagaaggaggcttaaagttagaaattgctattattttagaataggttgggtgggttggggggcaagggtgtctatttgcagcagagatattttgaaaagaagaaaattgttttatataaaaaggaaagccatgaccacctttctacctcagatccatcttcatccattgcattggaaactgctttatgctgctgcagtctgcaaagtctagagcttttatcaggccatgtcatacccaagaaagcacctatttaaagaaaaaacaattccctgagctctcaactccaagttgtagatttggtgtcttccttgttcttactttaaaaagtcatgtgttaattttttttctgcctgtatttgtatgcaaaatgtcctctatctgctattaaagaaaagctacgtaaaacactacattgtaaccttctaagtaataataaataaaaagaaatatattgcagtaacaatgggaagtaagtatgtagttcttttgaaatatgtggtaaagaactaatcacagactatcatctaatctggttacatattgtatttttcatcctgaataaaagtaattttaacacaagatgactttgatattcttcagctggattcactgatagaatgtgagttttgaatgcacatttatgaaaacaagatatagagatagcctgtgtcctgatacatctacattttttcctgcagtttctctcatacacactaatacagtctcctgttgctctcattctctctctctccccatctcttacacatacatataattatatgattctcaatttattttccagatagaaggtttattgatagagaaaagtaatattggatgtaaaaatgtgtacataaaacctgttgagtgttttaataactagatgctgttgacattaagttcctttcaaatgtacttttagtttcatgctctcaaatactgtatgctttttatccgtacactggattttaaccactctagtaggtttaatcaatttctgaagccatt

SEQ ID NO: 39255 - DNA, 1033 bp, Homo sapiens
atgctgttctcagtatagtgaatatgtctcacaagatctaatggttttataaagggtagtttccctgcacatgctctcttgcctactgccacataagacgtgactttgtcctcctttgccttccacatgattgtgagtctagggctaggggagggagttccccaaccccttgtgattcccgggtgaggagacaccccaccctgcttcggcctgccctctatgggctacacccactatttaaccagtcccagtgaaatgagctgtgtacctcagttggaaatgcagaaatcacccaccttctgcactgatctcactgggagctgcagactggagctgttcctatttggccatcttgccagccacctcaagttaatttttttatactgtgaaaggtaggggcccagtttcattcttctgcataagggtagccagctatcccagcacaaatataaatttaataaagttaacatctttgataaaattgatggatttattgaaatacatgaaatactggacctgattcaaaacatagaattctaaacatctttttatatctacaaaataaattgattcccaattttacaaactcttcacataaaactctaagcccaattagtctctctggtaaattctatcaaacagattagaaataaataataccaacctacaaaaactctttttgaaaatatagaaggaagaaacactgcttttcaattctttttatgagggcagcataatctcagtactaaaacctgaaaaaaatttaataagaaaattatggaccaatatatttcataaactttgaaaaagtccttcataaattattagcaaattaaatcatgcagtacataacaatggcaatacaaaataatgaggtggactttatctcagaaattcagggttacatttggagatcaatcaatgtaattggctgcaacaaaagaaaagtagaaatattatgtaatcataatattttttgattgcagaaaagtcatttgataagattcagcatccgtttgtgataaaaacaaaa

SEQ ID NO: 39256 - DNA, 1031 bp, Homo sapiens
atggaccggggtcagccgcctttcctctgctccaggccgggcccgtcaaccccacggccgccagcgccagcgcctcggtcccggccgcggcctcaaactgcccggccgctgccttcgtccccgccgcagcgcggacggcgccggcctcccctgcgggcctcccgtcactcaccggccggcgcggccgaaccgcggcccaggccctagctgccctggacgccgtgcccagctgctccgctctgtcccggcgacgctccgtaccccacacagccgtccgaaccgcctcctccgcccctcttccccagccgggccgccgccttttctcttctcccggcctgctccagaggcagccaccctcctcgcgcgccccgccccgctgcgccccgcccacccggcccggcttctgccgacagctgggcggggacgcgcacgcagtcccggcggggacgcgcacgccgccctctgaccccgcagcgtcgtggctagagtagggtctggagagagctcccactgtggcgagtcctgtcgttggattcccgcggcgccccgtaaggctccgccccggcggtgctaccaaaccctgttcgattttagaatcgtacattcccagagggaatcctagacccctcattttacagttgaggaaacaggcccaagtagcatgacttgttcgcgccgctagtcgaaggagcagcagccccgatcccttgactctggggcactgctttccctttagctcatttttggaggaaatgggtgcgcccttgctcgacctttggtgattgccgccacaggccttcccgccggctaactcagcgtgcccaagtcccgtgacttagtgccaggacggtgctgtgacccgttatcccctgtcgggttttacctccccccgggagagctcagccctggatcccggcgggcggcggagcctctctggagcccggacgggacagcccaccagggtctgcttctgtgaggggccgaggcgtcattccgcgaaggtaattagctggggaggggacttgaagccg

SEQ ID NO: 39257 - DNA, 1020 bp, Homo sapiens
gctaaattagttctaatcttatcctaacaacagaaggggcttgtagctattatgttttctagagaaaactcagaggatgccatcataaggcaactttatttttcacaatggctgttatctttaaacttgcattaaagagtaattaataattttcttctaaccttaagtgacagaataagcttgacagcttagataatgaaaagtcctacattcacttcttatcacaagagtctgtgtttcgtaacatgtccagtccggtgtaatagtaagcaactttgtattttgagtaagatgaaagtttctgccttcccttggagagagcctggtaaaatcgagagtcctcagtctgacttggggaggcctttaggcagtttttttccttagacagtaacatctcttcaaccaacaactaacaactactgtttgaaatggaaggaagcagggagaaaagtcaagaaaacataaaaggtcttctttgacagacactggtcagttagtatcaatcctctgtaaagctactaggactcaaagctgacttttctcttggggcactttcatggattctgtggagaccttctccccaccccaaatacaggagatgcatccccttcaaatggttgtttatgtcctccatcatccctgagcatctggatactcttccaatttttctctgctaaattctccttagccctctaggtagcacttgtgggaagacttaagaaaatttctcagccttgtttttcgttttgtatgaccgatatctggtccacgggaatcacagtggctttgagtcatcatgtgtgggagtgcgatcctcttgtttcagctccttcacagacagctccagctttttacctatgagatgtctcagatatggtagctaaaaagattaaggaacgtatcttgagtaatcctgctgttctcttgaagatctctcactagtttaggagaaagaccaggaagataggggaggtaccacagtataataatctccagggaagtcctccctttgatattcag

SEQ ID NO: 39258 - DNA, 1078 bp, Homo sapiens
gaatgctggttaactcaaccaatagggtgacgagaatttccctaaaggagagggagccgacctcacaaagaagagggcgggtgcttctgacaggtttggaacttaaaaaaaccctttgtggcggttccgtggcttttccgcagaccagagcgcgcgaggagtcattcgctaggaacctgtccccctctccccgaattaggattagtcttcctgcacttccttccttccttacgtctttcctatttccacatccttcctaatcaagtacctgtgcttccgtccacctgtcctgttgaacgcactctccggggggtttccccggcacaatctcttgtctgtcttttccaacttgagccaggcatttgtctccaagcattcacgcgagatgggcagtgcggcctcggaaagatctgagcaaaaacttcatcctatccccctttccccgttctagagtgaagctcccagggcattactgagtggctcatcagcgtcagggcagattgaaggttctgaaaaatagtggcagcgcggcgtttcctgccacccgcgctcctccccggcgaggggctgggtgcggggtagtgtcatcggcccgggctgacaccggccctggaaccgttccccgctggcagcctcttccatcccagcagctaactgctaagaccagacacgttccaccaacagtaacagctgtaggaaagaacccgttttttcccgtctaggtttctctccttttcctagtacctaagtccatcatcctcctgccactgacatatcgttgtctagacgctctttttcaaaactcaaatccaatcaaacaaaaacaacgcccgtcaataaagcaagaaaaataatactgcagccagcggccaggagcgtgcaccccattaacggcgagaaagcatcaacccctgctgtaatgactgaattggaaagaaaggtttcctgctgcttgttagtcgtcaacatttttactatgccagctgcaagagaagcagctgcatactctggcaactcgactggggtgggagaaatttagccagcgtctgggattttcgcagaagataatttaagcccc

SEQ ID NO: 39259 - DNA, 1032 bp, Homo sapiens
gatgcctttaaagataaaagtgaatgtaagcattttattaaaatattgtgacttctttgatgttacagatgtttgtcaaaaataaccgggaaaaaactacctgaaaaatgaataatgtattttttaaaaattcatggctgggcacggttgctcacgcctgtaatcccagcgctttgggaggctgaggcaggcggatcacttgaggtcaggagtttgagaccagcctgaccaacatggtgaaaccccgtctctactaaaaatataaaaatttgccgagcgtggtggcaggtgcctgtaatcccagctacttgggaggctgtggcaggagaatcacttgaacttgggaggcggaggttgccgtgagctgagactgcgccactgcactccagcctgagcgatagagtgagactccatgtcaaaaacaaaaaacaaaacaaaaaaattcataaggctcccagaataaaattcagattcttggccactttctttagaatcagatatattacatgcctcttgttggaaagaacatatatggtaatttcattggaaactgaaattttatctactttttgaaaatattttatagttgcccactgaccactctttgcattatccagtagcagtaaatatagatataattttatttagtaaatgaggctaatttttacttgattccatttctccaactagtattcttttggaagtatatgtaaaaatatatatatgacaaataaatgaaatgataacatgctgagcatatttctttatatttattggagctatgattttaacgtgagcattcacccagaaaggtttttaaataaaaaatagctgataatttttgttttatattaatcttcatttgaaaaataaggtttgctttatacagcttgttatttgtaagatatatgacgagtcctagaactcacatggtagctattgttaaacagcaagttttaaacaattggaggtgttttaataatagtgtttggtcttgttttttattttcaaataagtgcagtctggaacttt

SEQ ID NO: 39260 - DNA, 1174 bp, Homo sapiens
catgttgaacaaggaaaaaattaatcacagtattgaaacaaagacacagaattatagtttctctgctaatcgcataacattatcaaaattcgtttctttgaaaacagcttaatgaaaagtgtacaggcattagaaatgagagtgatgtgatgggatgaaattaaggactagaacataggcatgaaatgatgcccaatcctgttgggaagatgggggatctgctactctggacctaattctgatctacaaagacaactggttggtgatatggaaatgatgagtcatcttggaaattgtaggtatagagtatcacatattcaagcacaattttaaaataaaagaaaaattctcttaatattcagaggaaagacagttatgatttgataaacttgaaactgttaaagaaaggatgttcaggcagtattggatcacctcctagaataaaattatccatagtaaggagtctctttgaatacctctacccttttccttgtcagaatttctcctacaattctgcatcttttgtttcaatattgtgattaattttgtccttgtttaacgtgtgcagttagttaatttaaaatctttgttacacttatatagatttttaggggctggtactcagcaaaacactcttttacaacttcctgacaggaatttcttctgtcaaggaataggggaaatatatttaaagagactgttctagttccaaaagggccttacaatgtgttaaaggtataaaaagattatataaaaagacattaaaagattatatggaaggaggaggtatataaccaaaggcgaatataagaagagtacttagctcagctgggtgcggtggggtggcttaagcctgtaatcccagcaatttgggaggccaaggtgggcagatcacctgaggtcaggagttcaagacgagcctggccaacatggcgaaaccctgtctctactaaaaatacaaaaattagccaggcgtggaagtgggcacctgtattcccagctactcgggagcctgaggcagggagaattgcttgaacccaggaagcagaggttgcagtgaggtgagatcacaccactgcgctccaaactgggcggcaaagtgagactccatctcaaaaaaaaaaaaaaaaaactacttagctctgccaatgaactgataaacagaatgagcttt

SEQ ID NO: 39261 - DNA, 1046 bp, Homo sapiens
gccaacaaattgagtaatctaaaaaaaaaaagtgtatgaagttctgggcacatacagcctaccaagattgacttaggaagaaatggaaaatttcaacagaccaataacaagcgagggaattgaatcagtaataaaagtagtgtcccagtaaagaaaagcccagacctggacatattcagtgctgagttttagtaaacatacaaagaagaatatcagtctacctcaaactgtttcaaaaaattgaagagaagggaattcttccagactcattatacgaaaccagcattattctcttaccaatactaattcctgaaactattctaaaaaattgaagagaatcctccctaactcattctatgaggccagcatcaccctgataccaaaacccagtaacacacaacaaaaaaagaaaactatcaacagtacctctctgatgaacatagatgcaaaattttttaacaaagtactagcaaactgaattaaacagtacattaaaaagatcatgtaccacaatcaagtgggattcatcctagggaatttcttgtgcactttcaccagttctgtccaacatagtactggaagtcttagccagagcaattaagcaagacaaagccatccagattggaaaggagagagtcaaattatccctgtttgcaaacagaatgacgttttatttatatagaaaatcctaaagactcaactgaaaaactgttaagactaataagtgaaattaataaagttgcaggatagaaaatgtatggtagtcagtaacatttctatatgctaatagtgaactaactgaaaaagaagtcaagaagacaatctcatttacaatagctactgaaaaaagatagctaggattaaatttaacaaaggagataaaagatctctacactgataactataaaacattgaggaaagaaattgaagagcacaaatggaagtgtatctttttcatggattggaagaattaatattgttaaaatgtccacactaaccaaaatgagccacagattccatgtatttcctatcaaaaaccaatgaca

SEQ ID NO: 39262 - DNA, 1053 bp, Homo sapiens
ttatagaccttgcacaaaatgggtaagaaataaaatttggtgagtgattctatcagtatgtggttgaaaaaagatgccttttatcatagcattagctatttcatttctttgaaaactctacatttatatccataaccttgacctcttttgagagctccagactcacatatctacttactcaaatttctctattatgttgaatctcataaaattttcatttttaggtaaaaatttgttgtagttctgaaatttcacatgattcaacctgacacttagatatcctggggccacacaaaatcagcacgtcaaaaattaatcccatcagtatttacctccaaaataagctattttaggctttctacgtctactcactctcagttgcaatgtttatacgtgcttttgccagattcgttttacacacagttccaatcttgtactatcctcttcaaaccatggttcagtattgttttttgatttaaaaacatctgctactccaaacagtaggaattcaggatttctttccaacctgatctctgtcttctcactagtgtctattccttaggaaaacagaactatgtattcaacagacatcacatttctatgtcttctcctatgtaattcccaatacctgaaacactagttgtttcactgccataaaactctatataactttcaaagtcaaccttcttatctttttcgggcttttcctatcctctgtttaccagatgtattatatctgatctgtaacttcacaccatagcttctttgtaacttttcatggtatttgccatattctgctttttggatcatagatgataatgtttacttacaaattatttgaatggaagcacattgtattatttatctttggagaaagaatcattaagtatggtttttaattgagtttactcattcagtattgcagtgtttctcaatcaagggtgatttttgcattccctgcccccagccccgcccttctcccacccagagaatatatggcgatctctgtggaaaccttttcagtgggtttgagggtgttgcgactggcatcta

SEQ ID NO: 39263 - DNA, 1050 bp, Homo sapiens
ttctgtgtgtcctggtcacttaaatcttaaatgtgcccatatatgtacttctaaaattatccctggaatgcctggttctgctcttgagaatttgtcgtgcacatttaatatgccagagggagggaggacacttccttgaccctaaccttctatacctaattcatagaagtagaagatagaccactcagacccttcagtctactcctgtgtcaaggctgactctgggaagaaatgaaatgcctcagttgttactctgtcgcttgagatggagagctgtagctgattagtgggtatttccctaagaataattcagaaattttgcatcagccagtgtagagttctgaatgcattgccttgcaaaccttgaccagccagaagtgaactgtagttcaattcgtataagcagtgccctcagtgattcacatttaccctgaagtctgaacaactttcgctgtttcctagcatgtatgtcatcaaaacacgaggtgccatggtcttccacattagaaataccaactgaataattcagaagggttcttacctctgagtttggtggcaggaaattcaacatcgagtagtcttcctgctgttctctcacacactgtcatttcaaggcagaagccttaagaattgcggaagtaaccaggctttgcatatgttttgctacagcaattactaggcaaagagttgtgcaatcaaaaatgtttttaacttaaagtcatagtagagttttttacaataaaagcagtcacacactaaaattgttcacattttttaaaaaaatgtgcctttcaagtacacttgaagttttctggtacaagtatagcaggtattgtttcagaaggtctcacactcttttaaacccctctttatctcttcctttctaaaatcctaatgacaagtttagttcagcatggatttaactattcatgaggtttgggaataggtagtcatacctgctgactagtttcacttgtagttctctaccatcatctcaaacttaaccccatggtctcctaaaactacctctttatccctccctccctccct

SEQ ID NO: 39264 - DNA, 1024 bp, Homo sapiens
tttttcttgttttaaatagaatatgtaacatgtaatacttgagcttgactatttgaaagactacattagaaaatttatcagtgttgataatgttattggaaggatagttctttgatgacattcttgctttatttttatcttattggtgagttttactttttgtcactccagtttctgtagttatatattttggggaaagcatgttatgttaacttcattcagcttttcaaaattttggtagtacagttatgcataattatttttaaacctcaggaagcattgttatatcctttggctttgtttgaacctttcagtgtgtttttttaaatcacaagatttgggtatacagaaggaaagttagtgtcacgttttttttcttctttcaaagggagactgccccattttagactgtaaagtttttttgcatttgaaaaactaacacattagtttatctccctacattagtatttagttttgttataagaattagcataaaatatgctattgaaaaacataaaatgtcaatgaaacattggaaaaaaactcatagatcttctgaggacctccctgtcaagactggtattttgtgcatgaagctgtggtgtcaaaagtattaggacttcttgagcattctgaactcaccgtatcatccgatctggtacctgctatgaagtatcctgaacctcatgaacttaccacctcttcttcctcaatatacaagcatttatagcttcaacttataggtagttatacagtggctgggaaaacataagaattagtacctccagggttgcactagtaaaagagccaccttgtgtggaaggtgagtaaatagcttggccctgaaagtttgcccctgagttttacctgttcttcgagagtaactgctgctggtgtcagtttgtgtgtgtgggtgtgtgtgggtgtgttgtgggtgggtggtacaggatggcagtcacaatttaatggttaacccaagcatgggaaatcaaccaccctaccttttttttttaactgcctgaca

SEQ ID NO: 39265 - DNA, 1050 bp, Homo sapiens
gtgttggatctctgcctgtggtgacaaaagtaatattgtcattttattctaattgttgaaactctcggtataaacaaaaatcaacttgcttttatgacagcttcatcagtcatagttctttttaccttttacctttacgttattttttactataaatttcagattctaaaaagtgaagttatagttctgtttttctttcaagaatgcttgtttagaaaaaagatgtggacacagtgggtagaaaaactaaagggaaattacaaaacatctgtttaatttgcttctcttggacatcatacatcttttgttggtattgaaatttgcattgcagacataattattgtgatcaggtataacttcgttattcctactaaacaaatgcagctctttactgtttatacaaccagacagtttgatgtccttattcaggtttataagaagagagcaatgacccaccttaacaacctgcctacactctctgagactagttttcctcagactgaagaaaccttctgtcagaggcaagggttgaagaatacacagtggaagaagaaaacagaaacaatgtgtctttcaataactcatccagattgcatgctttcagtttgaaggtcacaatagaagatgagtaacttcaagacatgaacagaagtttcttgataagtacagtgaaacgagctagctgggtaaatgagtttcgtaagtgattctgggactcctgagaattagaaatatgaacatcataaaattgttggacaaagtctacaaccccatcatcacaaagttataccagtgtacagagtacaagccaggaggaccgactgactagaggttctccagagatgggtctacttcttgtagtggtcttgccatcaaggaggttggctaaacagacctgaagcgagtatattccccagaagtcataaaaattgaaagatacacggccaggcgcagtggctcatgcctgtaatcctagcactttgggaggccgaggtgggtggatcacttgaggtcaagagttcgagaccagcctggccaacatggtaaacc

SEQ ID NO: 39266 - DNA, 1034 bp, Homo sapiens
gttctagaagtctctggacattcaaactaggtcctgagaactgtatattttaaatgcttgcattggaactgttttaaaccaatgatctcaagtctttgtcttaagttagaaaaagaagggcaaattaaacgccaagttaatagaaggaataaaatagcacaaagtagatatcaatgaaataatacataaataatagaggtaaagagttttcaaggatgaaggtgaacagttttcaagtatgaagacaataggcagacatttctaaccatgaaagaagccaaggaatacagcagtcatttttaagaactacctcatgatgaaagttccacaattaagtactacagcaaaataacccaagagatggaaagccatggtaggaagactgatgttgatctttaaatccatttaaacttaaaagctacactaaacctttgtgcaaattgtgattataatataccagttgtaaaacttataaatgtgaaaataatataactaatacaaatcaagaagaaggaatgtttgatcataaaaggaaaagagggctactttcctgatctttcgtagctgagagccaatatttactgtctaatagttacagaaatatttcaacctctgaatgttttacacagtgtattttcctgtccttggagcttttaagaaaagatacatcttgtaataaaaaaaagtttgaaatatagtagttcctttagcttcactttagttagatgtaaggaaaagcaaatgtttattgtatttaagcatatagtatcacaagtgtctgcaaatatttattagtggctatctctatacaaaggatgatatcagatggatgttcaattaatttaatgattatttctggttagcaggatgttgggtgattgtttttaatgtatacttttctgtattatttgaattctttataataagaatgaattatttttacaaaaacagtttaaaattttagtttaaatgttagtaatgacattatatctggttaacaattgctctctgaagttttcccagctttacactaa

SEQ ID NO: 39267 - DNA, 1033 bp, Homo sapiens
cctctgaatctgttaattaagaggatacatatttacattcattctgtgcattgaaaaaaaaatacaagctttaaaatattttcaggaggaagctaaaaaacatcctgagtttaagacaccttacacaagagttgatactgtgatttcatcagtatattgttgtagaacaggcaaaactgatctgtacttaaaaagcattagagccttggttattcccggaaatgggacagggattgattaggaagaagcatgcatgtcctttttggggtgagtggtaatgttctttatcttgctcgttctaacagtttgagttacagaggtgtatatattgtcaaaactcagtgaatatactttaaaatttctgcatgtgtatgtaagttttacatcaaaagaaaatatactgttaaccaaaaaagaaatgtttggggaacatcttgtttcgtgaaaatgtacaaagtctctcgctggttttgtctccacatcccatggtcttagataagtgttccagactgagatagggtataaatcccatgtactccagttgacaccttgtgcctacctttgtgagtagtacatactacattttggagttgtttcatctaatgtgagctcctgggaggccagaagtatatccctgccctctggcacattacagacatatgcccagtagatatttaataaatgaatattcacacctccacatgtaacaggtttttctgtactcatggaaggccttaactctgtatttttaaatattacttgatagctagaattaacacaagtaacaaaagttaatcttctaatgttgtcatttcaagttctgcattcaaggagattgcttaaaattttatccaaatataatagcaatatggctgaagtatctgtcaaagttggtgtccaggttgcggatatccacttgcaaactgttttgggagaaaataataaattgactatattaaaatttatatgacatttatagtaaaattactgtattcaacaatctttccagtcattttgtgtgtgattttaacct

SEQ ID NO: 39268 - DNA, 1169 bp, Homo sapiens
aaagcaaattaaacccaaagtaaacacaagaaaaaaaataataaacatccaagtggaaaacaaagaaacaatagaaaaacatcaatgaaatcaaaactaataaaattaatctcaagccatatgaagaaagaagttataaactattaatatcagtaataagagaagtctcattactatatattctatagatatgaaatggataaaaagtgaatattatgaacaagtttatgccaaaaatattcaaaaccttagatgaaatggacaaatttctttaaagacaaattaccaagcctcactgaaaaaaaaatagataaccgaaatagtcctgtgtctattaaagaaattgaaatagaggttaggaaccttggaccaagaaacttccaggcctagatggcttcagtgatgagctctatcaacatttcaggaagaaataacaccggttcacaaacttttccaaaaactgaattaggattgcttcccagcttattctatgaaggaagcattaacctgataacaaaattagaccaagttattataagaaaagaaaactacctataaaccaatatctctcataaatataaaagcaaaatttgttaaaaaaaaaaaatttttgcaaattgaattcagcaatatatcaaagggataatacattatgaccaagtgagacctaatcccaggaaagtaggattgacctaacgtttgaaaatcagtcaatgtgatccatcttattaaaaagcttaaaaaagagcagttgacaaaatctaacaaatattcctgatttttaaaaatctctacaaacaaggaacagaagaaaacttaaaggacatgtaagaaaaacccacatctcaaataatatttagtgatgaaatacttaattctttctccctgaaatcagcaattacagaagaatgttcactctcaccacttacattcagtgttgtagttaaggttctaaccagtgcactcaggcaaggaaaagaaaaggaaagcggctgtctttattcacaatgacatgatcatcagtataggaaatctaataaaatctaccataaaggatactagaattaatcagtgtgtttggcaaagatgtagattatgagataaatatacaaaaataattttatttctatatattagcaatgaacatttggaaattgatattttaaaaa

SEQ ID NO: 39269 - DNA, 1049 bp, Homo sapiens
ggtattaatgaaatagtaaaatacaattgaaaaattaacagagctgtcttagttcaggctgctatatcaaaataccataaactgggtggcttttaaacaacagaagcttatttcttacagctctggaggttggaagtttgagatcaaggtgccagcaggattgagttgtttgggggccctattcctggcttacagacagccttctggctgcattctcacctgggggaaagagagcaagctacctctctggcctctttttaagggctgtaatcccactgatgaggacaataccctttttacctcccaaaggcccccacttctgacattacattagggaaggattagatttcaacatatgacttgaggggagagggtgggggacataactgttgagtgtataacaaaagccaaagttgattctctaagagtctaataaaaatgataaacctcttttgaaacgaagcacgaaaaaagaaatgcacaagtagatgctattaggaatggaaaaaaaaggaataacactgaagttaaaaataagagaatgtaatctataactttatttttgacggaatttaattgttttaccaattataacaatgaaagtcgacaaaaagctaaaaattctaatagtactgtaactatcagacattgaagccatcattttaaacttttctacaagtaaacttctggtacaaattgggcttcactaatatttcttccaaatatttagggaaaaaataattcaactctcacacaaactcttccaaaagataggaaacaataggtacactcatcaactcattttgtgtggctaacacaaccttgataccaaaaaccaaaatagtattagaaaggaaaaatcaagacaaatatcatttatagatagaaaatctgaagtgaaatattaaggtagcaaataatatgtaataaagataatataccaagaccaagtttggtttgtaccaggaattcaaagttgatttatcattaaaaaaaaaaaaaaaaaaattcttatccgttcctgatagagactcctagaaactaaattg

SEQ ID NO: 39270 - DNA, 1068 bp, Homo sapiens
ctgcaataggacccatcctttttcaaatttgttcccatgcagtgggactgtcacgaatatgtttataaatgttatgccataatatatacatgaaagtatagactacttaaatgctagtttggaattttagagcagtttgcattaattcctcttacaaatttatattcactttcttatttaagctgtttttgaactagagtgaattagagagccaagacttatctttataaatttgtgcctgaaacacactaatcaatatatggtatgcttctcctaacaaaaactcatcttgacaaacagagcaatgaattcattctaggaagattatatagattcttacagattataaacatctattatataacattagtattggaaactttcactttttctgataaccaaaactcaatctgtgattattggttaattattaaacaagtccatttgcctagtatttaagtgcattaaaagtgggcatttatatagagctcatttcaaatgccaagcacgtctgtctgagtgtgaagaccagaattctgtccctaagtttaccagcaataccaatgaccttttccaagttaacctctatttgcctgagttttgttatttataaaaccgtgatctaaatactagccttccctacctcagccactgtagggaatgtaataacgtctgaaaatcattagaaaaacaattagcatacacaaagatttatgatcttaaaaatcttagtcgtttagaagctctgtgaatcagatatatttgaataaggaagaacaaatagcaagtcttatatcaggatcagcaaatcagtattattactgctataatcaggataaaaattgatacattatctttaataaaagaatgaagatcaaaatgtctttgaatttcataagcacctttcgtttcaactgaattttttctttgttgtgtgtttactccagggagccagctcaggatgcgtttattgccagctatcatcaggatacaagatcttactgaaattactctggttacctttcaaaacagaactgtaaccaaatcccagtacctggaaatttgttt

SEQ ID NO: 39271 - DNA, 1026 bp, Homo sapiens
gttaaggaagttaaagggaaagctttgttaagagtagataacaatacctaaggtagatgggaataaggggtttaatattatctactaccttgcacgtaccataggcaattcagatcacctgcttgaccatgttaattggttttttaaggaggatacaaagaaggcaggttgggaggacagagtgcttcaaattaaacacgtgttccagttacccactctgtgccactgatgtgtgctcaaagcaggaaaggagagaacacttttcccaggcagttgcctgtatgtaggagttccatgtatgtctggtgtggatagagagatctggtcatcagtataaaggcttggtcctggacacagcaggtcaaaggagatcaaagccagttagatgtttgttattagcatcccgggaagtaaggtgggcttagtctgagagaatgtgagtacctgggcacttgataagggcacagttcaagtcctggcaagaaaggaatgcagagagcaaagtgtgtcactagagcttacttattcttcaggaaaagtgctgtgtaatggggcggggagagcagggacaccgtgggctggaggtgagaagcgtaagcttgaagtgacacattttagttctgattcttaaaaagcaaaaggcagacctacatatcaaacatagaggctggaaaggatgttaaggggatgaaacgtcatcagaaatgtcagcacataggctttgaactctggtctcctgcctagatcagtgggtgctatggtagtgcatttgcataagtgcagtttacataagaaaatgccaagttgcactgcaatactatttactttccatgtaaataattacttcagtcaactttgctttaaaataaatcccatagcaataatgcttgataacaaagatatgctcctattcactttctatacatatttaattctcctcaaactgatggaagaataaaatagaaacagaagtgttttcattatctccctcattgatccttgagttggggaccaaaaaaaaaaaaa

SEQ ID NO: 39272 - DNA, 1056 bp, Homo sapiens
acagcacactgcagctgtgactacagatgagcagtagagggaggagccctggggaacagcaggatttcagaggcggccagaggaagaggaagctctaagggaggctgtaagtatgttttattttctagcagacttgtcaaagcaaaaggtaagctctagggtcaatagtgtggagagattgacaagggtaagcagagggtaggtggtaagcaaaaggaaggggtgttctggaagccactggaagcagtgatgtttcaaggaggagggacaggtcaggaagtcagataatggccaggtaggacaagaacagaatcacttcatgggaagtggtaaccatgccgtcgaggacctttgccacagcagatttggatgatgggaccagtgagagtgcagacagggatcacccacaactttgaaaccaagtttgatgagatgacagaactaaggttacagccggaggaggaagggagactttgttgtcaagggaagggttttgtggatttgtttgtgtttaggatgagagaatctggagtatatctgagtgtgaatggtaagtagccagagaaaaggagatgttgggggacaacccaggagaccagggtcctggaggaggtgcgagggaattgtgcccagagcgcataagtgaagggagcattcgcttctgcttctggcgggtgggtagcttctcctccaggtcaaggggagggaagaagaaggggtccggagactgggacctttagaggtgttacaccaaagagctctcatttctctttctgactgagtggaaccagtgagggaggagatggaaggattagaggtttaaggagaacattgtattaatatagaaatgttagatgttgtgatctagtgggatcctatacattccatcatgtaatgtttagacatggtcataaacattacatgatggaatgtataggattctaagtatgcacattaagaaggtacgctcaccattcacatattcgtgctgtaggttacaggttgtgctgacgttttgttgaatctcatcatgtctagcagtgcttatagggttgt

SEQ ID NO: 39273 - DNA, 1005 bp, Homo sapiens
ctcagacaaggctagtccctttcacctgtgagcctgtaaaatcaaaaactagttagttacttccaagaactaatttataaagaaaataggtgtttttaataaagaaaggttttttttataaagaggtaatttataaagaaaagaggtttaattggctcacagttctgcaggctatgcaagaagcatagcaccatctgcttctagagaggcctgagggagattttactcatggtggaaggcaaagcaggagcaggcatcttacatggcaggaacaggagcaagagagcgcgtacggggaggtgccatacacttttaaacaaccagatcttgtgagaactcactcactgtacaaggggggatgctgctacaccattcatgatgactccaaccccatgacccaatcatctcccaccgggctccacctccaacactggggattacaatttgacatgagattcactggggacacagatccaaaccgtatcactcaggaaccggataaaccagcaagggttaagcatggatttaactcctgactgtattagtttgctatgcctgccctaataaaataccacagactgagtggcttcaacaacagaattttattttctcacagttctgaaggcttgaagtccaagatcaagttgtggacttctgaggccacgtgccccagcttgcaaatggccaccttcttactgtgtcctcacgtggtcacccctctgtctgtatcttgcctgtgtcctaatctcctcttcttataaggacaccagtcatattgtattgggacccatcctgtgaccttattttactgtaatcacctctttaaaggccctgtctccaaatacagtcacattctgagggtcaggacttcaacatattaactttagggggatgcagttcaccccataagactgacctgaggagttaatccaggctgtaccacctgacttagaaagttatgttgtcagtggttaagttaatcccagtcacatgtggtaggaattg

SEQ ID NO: 39274 - DNA, 1039 bp, Homo sapiens
atgttatatatatatatatatatatatatgtatatatgtattttaacattttaatttatatatatgtaatatttttaaacctgaaaaaccagtgtttgggtttgtattctatgtcacacagaggaagctcctatcagcagaagagaggttctaaaatccttgttatcggagtttaaattttctgaaaaatatcccacccgttgagcttctatgttcttgctctgggatgtttccatgggtctgtattagttccaggaaatttgggtcctttctattttatctctggaattgaggttcctgcagaaactacaagggattatctgtgttctttgctgtttaatgtctttgctgcagtgagacagattcctgaaggagtaaacaatgaaatgttttaaggctaactgtgggagattatgtggagaggaaatacagctattctgagagaagacatataaaatgttggcctgttgcttcttgaagtaatactgtaaagacctcttgcctgttgtacattaaccaatgcaagcatgttatagttgaagttgggattctggggttcacctttttctcagttaatgaatttttattttaatgtaattgaattttctttaagaatccaatttccacttcagaagataccattcccctgggaaagtggctcccaatccaaagaacatagacccttgaggaattaatacaagactcttggaacctatttgggcatcaaccattgtcagtgaacatctgcataaatagtgttttatataaacacatttgaaggtgttcttacatttttggtcacttttaaagcagtactttttctcaatcaaagggtagcaggaaaataagaaaagcctaacagtaaggtgactctgtgtgtgtgtttgtgcacatgcatacatatgcctgtgtggggcggggttgcggaggcgcagtctgtgtttttaaaaacaattaaagaggtctttatgctttaacaagctgagaactactatggtagttatgttctgtagggcatgcttcacaaagctaaatgaaa

SEQ ID NO: 39275 - DNA, 1041 bp, Homo sapiens
aaggcatttgagtcataacttagtttaagtacaatataacaaaaaggtagatttctgacagtaagtagtaattatattatttccaaatttgcttttaacttgagaacagtagctttaatttttatattcaagcatacattctacttcatttcatataggaccatgtttttataagataagatacataattctatgtagaatagtttggtgaaggaattcttattttaaggtgcttttatatagttattttgtatattggtacaatgttaaaggtgatgaattaaggaacatcaccaagagaggacaatttcttctaacttctctttttaaatttaatctggctgaggtttagtattaggactaatacaagtgtcttgctctgacatgcatcaagcaagagctagctattttacttcatagctagtttcttgcactctgtggagactgccagggccgcagctcacagcctgttctgagctgcagtgctttatcccaccttgctctccaggcttctgacttcaggcctgtgggggccgggaggtgggcagcggcagtggcctgaggagccctgtagaactacggctgaaaaagaaagtagattgaggtggggggaggaaattaacaggaatctagagtttttctaattcttatcgtcttatcgttcttgtgtttggatgctggtagtttttttttttttagacagagtctcgctctgtcacccaggctggagtgtagtggcacaatcttggctcacagtgactttcgcctcccaggttcaaggaattctcctgcctcggcctcttggtagctgggattacaggcacgcatcaccacacccagctaatttttttgtatttttagtagagatggggttttaccatgttggccaggctgttcttgaactcctggcctcaaatgatccactcgccgtggcctccagtagcgctgggattacaggcgtgagccatcacacccggcctggatgctggtagttttattttctgcttagaaaacgcaaccatgttgatgggaccaaaaact

SEQ ID NO: 39276 - DNA, 1031 bp, Homo sapiens
ttatgatttatcagttgaacatacataacaatgaaagcaaagctaagtaaatgtaaggtaattctataggacttttgtaggcagtttcttctgaatcttttcaattcatgtccatctatggccctgttgtcctcacaggttctctggcccagggaggcattgctaaagtagcacttcagagagcccctctgtcatatctggatttcatccaaacctttctatgcatttatatgctggaactttcttgatctccccagaagctgtctgcagaaagttttcagacagtaactcattcttttctcaaatggccattaaatggtttcttggctcaaatgtgggttgcagctctgcatttgtgccaccacgaatggcagccatatttgtgtgtttgcacattgtggcaactgtatcaatagctgccagtcaaaattgactataattctccatctcctgttttcaactctggtttcatacgtgttaaatttgaaaatatgtgcattcaaatcaatgaaattacaaggaaattcggaccatccatttcattttaccaactgtcccttgactttgataatgatatattagtcattttgcgtgtaactgcctgagactcagaataagaatatcttttgatatattttgtagttgactctctgctaatattattctccagtgggtctctgacatgatttaccctgtggatacacaatacataccggttgtgtttggcttactgccattattctgtatttcatggagctccctggctcatggaaagtctttaaatcattatttagacatattttatagaatttagcaccttccctcatggaacaatatcaattttttattttattattttaatttttaataataatgcctgattatagcgttaccccttgcattaccaatacacacacccactactggaagcagagcaggagtttgttctcactgctggttcagggcaagaaatactatgttttcattagaattctaagtggcagctcaaaatttactatttggcctttaaa

SEQ ID NO: 39277 - DNA, 1069 bp, Homo sapiens
gagtttaagtaccttagaaaattaacttctgttatctgtgatgtccttagatttataaaacaaagacttgctatattagctgtaacatgcataaagcacactgcacatatttggtgactgaaatggaatctaattttattacactggtttttaattgcttttatcctccattccccaaggagtattaaattgccctttgaaatagccttacagattctaagaggaaaatacactttttagaattttaaaactggaataaaaataactttctattacacaatttgattctacctgttttgtcttatgtgattgataatcctcattttttaaaattaagaaaaccagtaggcagcttcataccaatgcccaggatttcctactgcctgcaaatcttctccttcatgcctaaattgaaggaatttgtacttcacagtgatgaaagtcttttttcagtggatctttgggtgaggcaagctaacatcgtctatacttttgtgaatcaataaccgtcttgctgaatgcataacttctagtagttcttatctttataaaacttccatgtccacattagaaatattccttttagaaaacgtttgtcattgcccctaccaatacaaagaagagtaatatttatacacatgtttaaaagagaagttaattcaataatttgataggtgtaattaattaaggcatagttttggagaaacattacaataattgcctcaaatttttgagcctgtctgtcctcctttcttctttccctcattcctttctttctttctttttttctctctttcctttttggaacctacaactaaatgaattgaatatatctcttttagcctacaaatcctattcatctgcttttatttttctatgctttaatatccttccaagtacatttgaagaataagtaaatatattttctaaaaatcttggcacatttcctggttttgaaggcatgaggagagagttggcaaaaaagtgatttttgaatgaaaataaatctatccttacacttaaaatccccagaggcatcattgatataaaccaaaatagccattttcat

SEQ ID NO: 39278 - DNA, 1060 bp, Homo sapiens
gtatagatgggttattggccgatgactgtctttgcttcagtgccttcgatactgtaaactttcttataaaatattctcaagcattaaacttagtatgatttttaaacattgatttaaaagtaattttcagttgcatatttattagacctattagtctgtggttatggccataattgctactctggccaaattttggtttgtgtgtatatatgaattataatggagactaatgttcattctctacaaatatatttttcagagaaaatgggattatcatttgctgtaagattgtcatgttaataattcaatttgaataatgagttattagcactccagtagttctctttccccaattattaatgagctgttaccaaaaactctataaaactatgagaatgataaacatcacttagatttactctagccacacttcataaacaatatttcttttacagttatttttttaaaatttacttaacaaacctgcccattcactaacatttgtacacatctgcttcattggttagatgggtgttgtggaagaagggtctatgtctggtttgattctatttggaaaaatgccatgtggaccagttgcaccagctgatggtgatgtttctttacatttattcagaaccttcccatttcagaggaaatgggttacttttgggggccatgtgctttaagtttcagataaatgtcatttgaggacttttctcttgtgccttaagtccttatggttctgggttatggtgggaatgtggggagcggacacccagctgaggaatcacctggattcattatagcatgggatgccatggtctagttagccagcgaatattttagaaggatatttatcatacagacggatcttcagaaaaatcaccattttctcaactgtaaggttgatgatttttaggattaattagtagggttattaatccaaacaattaaattctctcctaagagtacagctgtctgattaattaatctattaattaatcagtggcttctccagatgtctgttgagatactgtcccttgagcactgctgagatgtg

SEQ ID NO: 39279 - DNA, 1032 bp, Homo sapiens
aattgtacacgtcagtttaatattgttttagagagtaggaactttggtatgtcctgagcgcacactttgatcagaccttcccaacggaacacacgtccatgtacacgtcgtttgaagataaacataccgtagattataatgctcagtcctggtcatgaattgaaacacttgttagaaagacaaaaaataagaaacaaaattaaattattaagtgaaagcattatttttgtctcatgttactgttcttcatgtctcatatggtactaaaggatgaatcatggtatgttgccggtcgacccatagatttaaaacagcttacttcaccgtgaatgcaattatgcattttggggttttcatgaagaagcagctgccagaaggaatgggtgctagggagtgttcatatttcgtgaaagctatcttggtgcattgcctccttcacttgaattagcactcgattgtcctaaaagaaggggctgaagactcagcagagttggaagagacctccgatctcgttagtataacagcagctgcctgaatttgctcacatcaaattgcagcaacttgtttcattctggttttgctgtcttactttgtaagagacacaaatgcatttcacattttaaaaatatcctcacacagattgagaactacataacaacttgagaactggtcaaacctctcacttcttagatatctttcattcccatttgggttggacaggctaaagaatgaaagtgtgtcatttttgacataacattttcaattctaaaccaaacaactggactggaaggggtaacagtgctgagttaatgccattaattctgcattaaaaattatactaatgtatttttttccaaattacctatagggatagtatatagggataggtcatatttcagaagtgttcctttgcgatgtttgaagtgatccttgtggaaacaaacattgtcacaaaaattctcacccaataggccaggcgtggtggctcaggcctgtaatcccagcactttgggaggccaaggtgggtggatc

SEQ ID NO: 39280 - DNA, 1051 bp, Homo sapiens
ctgataggccgggcatggtggctcacacctgtaatcccaacatttgggaggcagaggcgggcagatcacctgagctcaggagttcgagaccagcctaatcaacatggtgaaaccctgtctctactcaaaatacaaaaaatgagctgggtgtggcggtgggcacctgtagtcccagctaccagggaggctgaggcaggagaatcagttgaacctgggaggcggaggttgcagtgagctgagattgtgccgttgcactccagcctgggcgacagagctagactctgtctccaaaaaaaaaaagataagctgataaaaaccagcaaatgattgatacatgcaacaacgtggaagaatctcagaactacagtgttgagtaaaagaagccagacacaaaagagaaactcatatgatcccatgtctatgaagatgaaactcagtctaaactaatctgtggtgtaggaagctggaaagtggttaccggagatttggggtggggaagggttggggatagtattgcctgggaagggacccaagagaactttctggaatgttgtcagtttgctatgaatagtgagtacatgagtacatacatactttaaaattcatcaagctgcatacttacttcactcaaggtttttgcattttaccatagagttggccctctgtattcgaagtttctgtgtccgtggattcaaccaaccatagactgaaaatatttgggaaaaaaatgtatctatactgaacatctacaacatctttcttgtcattattatgttataaacacatttatatctatgtttagattattaaaaaaatccaaacaatatcatatgacaactatttacataccatttgcattgtattaggtattataagtaatctagagatgatttgaagtatataggaggatgtatggaggttatatgcaaatatataccactttatataagggacttgagcatcttggaaccaatcccccacagatatcgaaggatgactgtatataaattatactgcaattttttaaaaagctaagcagaataaaagtata

SEQ ID NO: 39281 - DNA, 1035 bp, Homo sapiens
cacagactgatttcaaatacttttcagttcagaccacacaatagacttaaggaatttttttttttaaagacatcgtattgggtgaagaggggtgtcttacaatcactcatccagggcaataacgatctagccaagtgagaacaatgaagagggagaagtgacaagtctgcaggagtggcagcaggccccagcaggctgaggtctgggtgctggaagcccgtggagctcacatgggttcacacggcacagaatagcccaagtgttagatggccgccattctctaggaccagccagatcactccaggtagcagggttccctctgccaagccctccccatatgaacaaagaagagatcccaggccacaactgagggagtcctggttgggtgagcagagtgcctcatcatattcagctcagtgtgacataccaggctctccataaacctcacacttaatggaataagctcatttcagctccagatccctagtgaacttgtggacaagtatgactttatctctctgaacctcagctttcttaaataaaagtggagctgataatacctattcatcaccctcagggttaaggatggaatgaaataccttctataaacagacttctctaatgtgcttatttgatgggagggatgaagggctataaggctattgccattttgtgactccccagatgtgccaaggtatttacatctcagcagggctaggcagacctgcagtctaagtggtaagacataggcgagggattatacaccttttcattttgagaaaggaaaaagaaaccgttcacctcaggaacacattttagcttttctaaattgaccctcatacagtaaaatggtattcaccatgatggggacatgaggacttacaggttcattctcactcttgtgcacagcagctgtttcaggaaaacgaatggtaggctgtcatcagagtgcttttctgagtatgatttaagcatcttccttttcaaaagcaagttcggttttttttttttttcattttaaaccaatttaatacc

SEQ ID NO: 39282 - DNA, 1068 bp, Homo sapiens
ataattgagaagcacatgccactgaggtgtgcctaattctgcgaaaataactgttacttccccagatccaagaaatttagcaaactcatcacactgtaataacaattttattcattattaatcctggtgaggaatacttcagctgctttacatctatttcataccctccactttgacccctctctttgatactgcaaatcctcacgttgaagggcatgtgaaattattggtgaatcagaaaggtgatgtttcattccgtatattaatgcttcttttgtaaattaagaatttatttttgtttgtagttaactcaaatatgcttttttttatgggcttcagtgttccattaatttttaaaggaattaaatatttgcttagatgtgccttccacagttctttcaatcatgtgggtagattttttccccttaattgtctatgttaaaaaggggaaaaaaacaactaaaacacacagtaaagaaggtaattttttccagctgtgtagtagttctattccttcatttgactttgatgtagtcaaaaagtggccgcctggtctgacttaaactttacttcttttaccccgtggcaacatttagagggaagagaaatacaatctctaactggaaaatctcccaaattcattagacttaccacttatttaccaatcagaagttattttaagttgcggttttctgctccagtaaagtgtatagtctgaagtattttgttactcagaatttggtgtattttatggaagactttactaaaaggaaagagacagaaaagagggaaagagaaagagggaaggaaagaaggaaggaaggaaggaaggaaggaaggaaggaaggaaggaaggaaggaaagagagagagagagaaagaaagaaagaatgtcctaaggtaaagaagagtctttactaaaaaggatggaaggaagggaggcaggaaagaaagaaatgataagttcctaatacatgagcaagggtttgtctgggatctcaacttgcctggggttaactagtgttgtaggtccaaagtaactggatttaaatgtcatacataatgacaa

SEQ ID NO: 39283 - DNA, 1058 bp, Homo sapiens
gaacagtctcttaaattttaaggcaagggttttctctaaaagttctcattaatatctttgaagtgtaggagcatcatatgatctctgaagaaattgccagcccccaaattattagtcactctcaaatgaatacccatcgtttaggaaactgactttttggaaggagcaatgcttaacattaaccatagcattctattagttaggaggaccttgatcattaaaaccactctttgtgtttgtttgtttatttatttatttatttgagatggagtctctcactgttgcctgggctggagtgcagtggtgctgtctctgttcactgcaacctctgcctcccgggtttaagcgattctcctgcctcagcctcctgagtagctgagattacaggcgcctgccaccatgcccggctaattttttgtatttttcgtagaaacggggtttcactatgttggccaggctggtctcgaactcttgacctcatgatttgcccacctcggcctcccaaattgctgggattacaggcgtgagccaccacgcccggcgcgactaaaaccgttcttttaaataagatgcttgccacttaatttaagttcacggttgcccattctgtagcccttgaagttcttccttgactcatttcgtcctctccttatgtttcacatcttcacaaaaataggaagaacagcagcaaagccccgatgacccacatgctatttgatggggaagagactaggactagcagggcttcccatgcttactggtgagcatgtttctttggtgtaatgatctgaattaagcagaagatgaaaggagtatagtattttttggccttatacttctcaatgacacagctgaagtccatcccattttttatttatcagactttgggaacagacaacaaatgagattataagtatctcctttcagagatggatgctccaagcagaactctgcgactctgtagtgctcttggcaattaacagcttcattctaaatttgtaaactcactctggtttgttttaaaaatggaaatgaatgaggaagccaaatcttagaaa

SEQ ID NO: 39284 - DNA, 1056 bp, Homo sapiens
agtgagagtaagaaatgacagaagctggggccagatggtgaggggccagataaaaataaaattagcatataaatggactggctttgctcaatcaaaggaggattttctttcttaaagaaagacagtggctcttttcctgatttttatgacttgagctcataaatcaaatcttcagagctaccgacaatgtcagcctgctgatgtttaggagtggagggtgactgaggaatgcggtgtgctgcggatagtcatgtcatcagcaaggatgtctcagagtctgcaaacccggacctctctgtattggacaaggctagggaatgactttgagaagaactgaatattaaaggaattatcaacttgagtagtaagagagtttctaagaatgatggcagagccactctgaagttcctgaatgaggtggaggagggggagaaagtggtgtggtaaggaacttcagtggagaaacagcccagagaactgggaaagcaatgacttggaagcagcaatgagttggtgttggaaaaggagtggctgccattgggaaggtttagagggtaaactttgagcttgaggaaaattaagttacatttaatgtgagaaaatggaggaaaaatgtgatctgtatctaacagagagaatgggattgagttgagtatctaacacagataatgggattaaaaaaccccaagaggatgaagcctcagagtagcataaaggggctgggcagcagaagagctctgggccaagctcaccactatggaggaagcaggaagggtgcccagggatggcgggcgggggcttgggagcaaggccatgggacatcggcactgtaaagggatggggaggttagagggtgtatggtggttgcatcgtagttagtagggagccttgtgaattgtcaccttagaggcccaaccaaaaagtgagcaagccagccccttccatgctcaggcacttttgaataattgaaacactcctggcaatatcccaagtgtcatcttatattaccctgaaaatagctgctccatttagggttgcatttaacagagcttatgt

SEQ ID NO: 39285 - DNA, 1091 bp, Homo sapiens
cctggatgctggaaatcatgtgcctgatttctgacaactcccagtggaatcttgtttagcggaccttcccccaccagcaccccaattctttgaccataggctccttgacttggtatccttcagcacctagactgacgcctggctcaaagcagaggctcagtaaatcttccctgcatttgcatatgaatgaattgaatactggacacatatgggaaaatgaattactgctttaagaagacactgccttcttgcagaaatgatgctttctatctaaaaagaaccctgaggtttcccttgccccacctacttgtactgtagtattagagaggttttacaagttgtttaagaattcttgaatataatttaacattgaataaaatgagttttttcccctcccactaattataatcatacaagcagtgaactaaacagctgggggtgagagaaattctgatgatgttaaaaatgcaaatagttttcacaccagattaattcatttaactaagagtcctgatctttaaatattaaatgtttgagtgtgaaacgttttattcacagaggagatagtccacatgaatgaatctgaagcccattcctctatcaagggtgattttaaaataaacaggatgcatattgttagctagttattaaccagcgagttgtaaattcttcaaaacagttcagggtgtaatttacatgactcaagatgagcaagactcagggtactatgaagctgctgtttgaggttaggagaagcgagtcatgcaaggacctgaacgaatgtttgtgttatctgtgtttgactaatatttgaattaaatgttttatatttaatcaaagcaagattgaaattcattattactgctgatacgcagtactaattacaggaaataaccagcccttccaagttcagtgccaaatgctgatagtgtggtaatctatgctctgggaggaaatcgaaggcctcagatctgaaagagaatttagtccagttttttatgttttaaacccatgcttcctttcgattaaaaaagatcccttgcctttattttcttcaacctctctttagtttgtattattaaactcgtaag

SEQ ID NO: 39286 - DNA, 1068 bp, Homo sapiens
aactctgctatccttggtcttttagagaactcacaagctttcctgacatacaactttgacatttaaaaattgttctgctatgtttgaagaaaacaaaggatgcaaaggttctctaacagttgcatgagttcactgagacaacactcaaactacagctctgggaccctgaatgtatatacccttgatttatataccctgggttccacttggtttgccgagtcgagtgctgtaaaacatctacatcttgttctaagaagaatgaggacataacctgggttgttctggatacctcctcattatcttaggatgttgcattcttggtaaattctgcctgagaattgcaagcaagcggcagcagagctgggtcagccaacatcatctggaaagggaatgaccctgtatcatgaaatctcatgcataagctgtaggagcaggaaaaagttaaatggtagaagagatcatagtgtctatccaagagtgtttgggggaaactagggcccaagggtgatataatatttggtggcttgtacacagagtatggggtagaagctgaacagaactgtcacccaaattcagtgctatttctttatctttccaagcaaaagtagtatgtatgacaaagaaaagggtgagacaagggtaagctgtagtcagttttcccctcttctctcctcccttactcttcccttgcctcccctttcatctccttcctcttctgttctttcctctcctcttgtcccttcctcatccctcccttcctataaattatgaagaaatatgtattgagatgtgtttttagaacttcttctcaaaacaggtctgtatttttacttctgtgcatttgtggaattaactgactccacttaacagtaaaataaaacagccctaaaagaacataaagtttatattaaatggttatgaaaataatgggcaccttcgcccactgagattgtgttgagtgaagttcagtgacgatactaaataggccccctcccacctcactaggagccaattgacagatatggaagtcagacagaggtaggtattttggtctgcttttttattact

SEQ ID NO: 39287 - DNA, 1029 bp, Homo sapiens
tgacttccactgcacttagctaaaatccaaatttttcatctgaaggttttgcatgatccaccttgctaaatgtctctgtctcactcacctctatgtcctcatagcctatacagtacctaggctaaagtagatgctcaacaactgttggtgaattaaagaatgaatgagtgaatgaatatccctttcagagcttgaaatgtatgtgttgtttaatttctttccaaaatggacaactggtcttttctactggtgttcatgagactccagggggcatattcatttcccagattgtatcctctcctagttggacagttctgatttttcatggatccgtaaaatccagctaagctcttctctgacactaaggtgaagtggctattaggcagtgcagtgaggaatggacggactctgcccaagtctcaggttatctgcctttctaactggctcaatggttttccagatatttttgctcaggaatcactctgtcagaacaagggaaggaccccgcgtgtccattctccttcaccttccatctgtgctggtttgtacatgaaaaataaaattatctacaatgaattttaaaactgtcttccgcaagaccagcttggccaacatggcgaaaccctgtttctactaaaaaatacaaaaactacaggtggtgggcacctgtagtcccagctacttgggaggctgaggcaggaagaattacttgaacctgggaggtggaggttgcagtgatgcagtgagccgagattgcaccactgcactccagcctgggtgacagagcaaaactctgtctcaaaaacacaaaacaaaacaaaacaaaacaaaacaaaaaaactgccttctgatatgccaccaacaagatattcacattgtttcctttttgtagaatgttggaagatatgaaattaaaactgggattttctaagtagtatctggagtaaaagcaataaatgttcttgcttcaagatttccatttgtggtatcattcacaagagaaatttcccctttttgaaaagtattggc

SEQ ID NO: 39288 - DNA, 1051 bp, Homo sapiens
gagccgtgaggctgctcacggggctttgcatattgtcctgctggtgtttctggctcatgatggagatgggggaagggaacagcctatttgcagtgttgaaaaaaaatcaattttcatcttcaaaagatgaaactaccaagcaagatattgaattagaaataaagtgtttcttaaagacttctcatatcctataaatgtcatacccaaacctaagagtttggtgatttaaagtttactgctaatttcagacaaacatgcaggtagctctgcctcaaaaaaacaaaaaaaaactagctaatgtatgagtttattgcagattttgttgcatctacaactagtgtcagaaccttcaaaaccagtcatattttttgttgataggcataaacttgatccctatttattttccatcccgaggttttattcttctttgtctcatacgtaaatgatttccaagtttttatgacaaatttcatataactaggtttgatatactttcaaatgcagcttttgcaatatataatatccgtatcatctgaactttaataaggagtacgtttttaatcagttgggggagatctttagttcttgtctggccttgaaggcccaatgcagactagctgattgatggttgttatcccaacacacaaagtagacatggaccaagcaggcagcggaggaggagtgaattcatccacaaatcttgtggggggtggactagcctcagcagggcctggactgacctggctttttttttttttttttttgagaccgagtctagctctgtcacccaggttatagtacagtggctcaatctcagctcgctgcaacctctgcttcctgggttcaagcaattcttctgcctcagcctcccaagtagctgggattacaggtgcccaccaccatgcccagctaatttttgtatttttagtagaaacaggatttcaccgtgttggccaggctggtctcgaactcctgacctcaggtgatccacccgccttggcctcccaaagttctgggattacaggcatgagccactgtacccagccttacc

SEQ ID NO: 39289 - DNA, 1096 bp, Homo sapiens
tcatgccattgtactccagcctgggtgactctgtctcaaaaaaaaaaaaaaaaaagaaaagaaaaaaagaaaaggaaatgggtagggctacagcagagtgaaagagagggagagaaagatgatgatttcgggaaagagccttgggggcatgcctttggctttcactcttgttgaaattggaagacatcagaagattttgagcaaagatatgaaattccctgacttacattaatgggatcactttgactgatgtgttgagggactaaacacagactaaagagggacaaggataaaagtggggagaacagtatgggggtgcctacaataacctcaacaacaaacagaagaggcttggtccagtaagataagctgtaagtacttggattctggatatttttgaaggttgagccaaataagagaaatcaagataccccaaggtttttgtcctaaaactgcaaggacaaaggatgccatttccagaggagcaggtttggggaagattatcaggagttcagtttggggtagcttgcatttgggatgtctaactttggacttcagaagaacaatctaggagatgtgggcatgttgatgatatttaaagccatgagatgagattacctaggataagcatatatagacaatagacaaggtccgagaactgagccctaagacattccaatgttagatgggagagaaccaaaaagaggggacagagaaaggagaaagcagagacaaccaggagttttaaggaaggggagtgactacagtgttctgtgttttggcacataaatgagaactctgagttgaccattggtgctggcagtgtgtggaccactggtgactgataagagcagttttaatggaggtggtgttggaagcctggtcagagtagactcaagagaatatgagaggagcaaaaattgtctgtttagaggaatagtaaccatgacaataataggtaaatattgagcctgtactaagtagcaggcgtggctcttctaagcacttaagtaactcagtcttcaccaccaccttatgagggagatgttattattattcccattttatagatgaagaaactgagacacaagaaagg

SEQ ID NO: 39290 - DNA, 1031 bp, Homo sapiens
ttaaaacacttggcctgtccctgcagctggaaaagcgccattccctcggacagtgttaactatgagttgagtcaatttccagttcctcaaaattggaactaatcctgtcctgttttctctgtccaaaatggacaggatccgaaataaggaaaaattaggcctttccattttatcttaactcatattcacaactaaaacttttgttatttttccctataagataagtttttccttatgacataaaatgtttatgttgggataattggagaactctattaagcatcatgatagcttatttatgtaagagtggatttggtcataattccatcccttaagtggttttagtttttatgtgttgcatttctttgtaaaatcattatgaaggttctggaagaaatgattagtgaggaaggatcatattttaaggtctgtgtttcattcagattcctgtaaagtctgttgttttttctttagattgaaaactgactttacattgactcagggatctaagacaaagcagatagtgtgtttttgcctctttctgtgaagatgtctgctttatgtatccttgcattcactattaagatttagagacccagaccgggcgtggtggctcacgcctgtaatcccagcattctgggagaccgaggcgggcggatcacgaggtcagaagattgagaccatcctgactaacactgtgaaaccccgtctctactaaaaatacaaaaaataatccgggcgtgttgggtgtctgtagtcccagctactcgggaggctgaggcaggagaatggcgtgaacccgggaggtggagcttgcagtcagccgagatcgtgccactgcactccagcctgggcggcagagcgagactccatctaaaaaaaaaaaaaaaaaaaaaaaaaaaaaaagatttagaacacaaatcaaatatctggataattaaatccgtatttaaaaggcacacatagatactcagtaaatgttttttaaatggatgagaactgcaagtgaactaatggtattttaaggtaag

SEQ ID NO: 39291 - DNA, 1032 bp, Homo sapiens
ttattttcatcactgtacaaattgttgtcattcagacttttgataaattatttccttttctctttcttattccttatctgctgaatgcatatcacacccctcatgagccagaaactggtttattatatgatataaaatatatcaaggttattggcacatatgggagctttcctgtaggagacatagaattatgtgttttatagaacttctagaaaacacagcctctacctgcttagaatttacatttgaacatattgagagataggtattgtcttaagcaaaaccatcgcttgactctaagtgtcaacatgcataaatagcatatgaaatctgctttaaatcacagatgaggtcattgaaaatgtgcatctttttagatgaatgcaaatacaggacagaatttcctgaaaataatgtatttcacttagttggctccatattcccaatctgggttattatgttatcaatttatcctagtaactctctttttcaattaattatttaatgtgtgtttttgtgtctatatgtattcatctatttttgttccagtgccacatgtctcctgacttttcttcctcagagtaaaaatgcaaggatccgttgcttctctctcttcctctcctgtgacctcccttgcacacattgctttagaccaggcttctcacagtttgatgaggctcaggataatgggagaaggaaggcagctgttcaaacacagatgactgggcccggcacagtggctaacgcctgtaatcccagcactttgggaggccaaggcggtggatcactagaggccaggagtttgagactaccctggccaacctggtgaaaccccatctactaaacatacaaaatttagccaggtgtggtggcacatgcatgtagtcccagctacttgggaggctgaggcaagagaatagcttgaacccgggaggcaaatgttgcagtgagctgagatcgggccactgcactccagcctggtgacattgcaagactccatctcaaaatgaacaaacaaacaaacaaaacact

SEQ ID NO: 39292 - DNA, 1041 bp, Homo sapiens
tggaaagaatcaaaaaccatttgtaggcatgtctgatgagtgagatctacaatcagaaagctgaacgtcaagtttgaaaaaaacaaaaaccatgtttgcagtcaaagagttgctgtaataaagaagaccaccattagtcttagtcagcatatttgtgtcatataagattccttgagtatttgacatatactaaaactgatttgggctattaatacaatacgcagcatacacagaaatcaagatttgctacttcaacaaaaccagatagcaaaaaaagaaatcttggtgttcaaatcaaattataatttgatttggatcctggggatgttggagttttctagtaaatacattaagcattttgcatctagattatgttacaggaaattttaaaaacgtttaaaaagtggtttttaaggtactttttttggaagactaaagaaaatgacccatctgaatgttttcttttgttacctaaaatgcacagcataatttttgtagaaatttttcttgcaacatagttactttcagaacaaatcaaattagttttaattttaccatttaggagtcatttgattttgagcttagattccttatctgtaaatagagaaggcgagactgaattgacattaatgtccttatcaaccctgcgctcgcgcagttatttgttccttcctttagtgtaagtctgtagccaccatttgtgtcttaattaaatgatctaaatctttaatgttttcaccatttttatgaatgaatctcagagactgatctgatagtcgtgtcgtgtagcaacataaacatcttccacaacctttaaaaagtttgttggcattaaaattgtggctttcaacatcctttcattcccagaggcttattttagcatgtcaagtggatgtgttgaagatttatcacatagaactccacattaattttttactttaagtgatcacccatttttgttccgacataaagcaatattcactgcagctgttagcatatgacagttgactggctgaacttggaaatactgctgctgctcgt

SEQ ID NO: 39293 - DNA, 1047 bp, Homo sapiens
aaaggttatatttcaaaacttatatgctaactttagaactttatttctctccatagaataatttttacaaatgtgctggattctaaaagattatttatatcagatcaataatgggttaaaaagtaagcttttgtagaatgcctggtaataaaacaactttttttattttttatttttttgagacggagtctcactctgtagcccaggctggagtgcagtggcaagttctcggctcactgcaatctctgcctccaggttcaagtgattctcctgtctcagcctcccgtgtagctgggattacaggcactcaccaccatgcctagttaatttttgtattttttgtagagatggggtttcaccatattggtcaggctggtcttgaactcctgacctcagttgatccaccagcctcagccttccaaagtcctggaattacatatgtgagccaccacgcctggcctttttttacatttttaataggaaattccttttacagtatgaattttggatgccagaagtatatttgtccatcttaactgtagctacaatacaatattcagcttttatcccactaagaactcatgggttctatgataatgtacttttagtcccatttttgattatgtcaaatgaataacagtggcaaaagcaattattttatttattttttggagacacggtctcactctgtcacccaagctggagtacagtggcgcaacctcagctccctgcaacctctgtcttcaagtgattctcatgcctcagcctcctgagcagctgggattaaaggtgtgtgccaccacatccagctaatttttgtatttttagtagagacggggtgtcaccatgttggccaggctggtctcgaacccctgacctcaggtgatccacctgcctcagcctcccaaagtgctgggattacaggcatgagccaccgtgcctggcccaaaaccaattactgtactcttttatgttgtcatgtcttctttaatatgatttccttaattaattgctgctagtaaaaagtaaatttaaaaaacttacaaa

SEQ ID NO: 39294 - DNA, 1029 bp, Homo sapiens
catttgaaagtcatcatatacttgtagaaagggaagaatgtcctttctaaaattctacaactatttataagtagcagctcttttttgggaggacatcttgctaactttttttcatgaccttttatcaggtaaatgccttgaggataaatcagggcttctgaataatgcttgctcacctacaacaagatgaaaaatggtaggttccaagcttcaacctattatttgtggcaactccataagaaacacatgtctctgaacatgtcagcagtagcactcaaagatgctctgtgttacctaattgctcttgtacctttttctgactttgggataagcagtgggtatgcctgtgatggcacatccctactgactgctaaagcgtgaaatggttgcagttgtggttcctgctctctatcctttccctcacacgcatcccctttccggaagcggtagcactccaccctggttataaaaaggaatgaaggccctggtaatcataactcataaagcatgtcacattcttcctctgtctcttcttttctcctattttaattaaaattgaattcatgcctctcaaatgagtggattcacaggatgacagtatctttcaattctaagggccataatgggaagtcagtattatgcattgtcttatctccagtataacatggtggctgttttgacaggcttcagtcaaaatgtgaaggtcctcatcaccaaacattctagaaattggtcccacacccctcaactccactctctccctgggtcactggtgtctttctcttcatcctgtgttcatcaaaaaggaaagataagggatggagtgtctactgcaaacattgttggagtttttaaatacaacattttatttctaacttaaatgactccaagataaaatcaaatttgcctaatcccaaaccctccattgccgtgacagctacattaaaatattatatgcttgcccctagcacctactaagtgctcaataaacatttactgaaagaaaataaattggatttagacacttga

SEQ ID NO: 39295 - DNA, 1050 bp, Homo sapiens
attcatctggaaagtcaaaacttcattttgtgaggcgaatataagctcatatactcccttgtggtaaagttagatgaatattctcattgcttcagaatatattgtgcatacctagttaagagaccttgaagcaaacttgtcatttctgaatttcatcagtcaaagtatgtatttgccttggctttatacttacttaaaggacaggggctgatgtggaaaattttctcaggtgcagagaacagcagactattaacatatggttgacatggtttcatttgattgtcctaaattacaggagttgggctcattttgatgctatccatattgctgccaggttttctaatttattttaaaatcattcactctttcttaagcttttccaaagcaagaggtgtgggtgagggagtatttccttgagcatcagctgtactggaatattctagtatgtttgacttgatagtttaactacaaggcatgaccagccacactctgcagtcacattgacttcttagaattttgagatttgcaaggatatttgtctttcaccttggttaaatactttgcatacagaattaagtaatttcattaaagtgcattggaggagaaaaataatttatgacaggaagtctataagtataaggagtttagccagaagttgtgatgtaatgttaaacaaataaccttcaaaaattatcctgaaaaatctatttgtatgtccataaaaaggacctacaatttgtggggtgggctccaatcataaagagttttgttacagaaatctctcaatgaaatggctaattttttctttccaattgcccatggaaatggaattaagcctcgttaacttgaaatagaatggctgtcctccatgatggagcaggacagtgcctctagatagcacagatgcaaagtcctcaaagtgtatttctctcacctgcggtagtcacggagagttttaaaaaattactttataaatcttactttttgataatttctgaaattgaaataatttgagctgaagcctttattgcattgagtttccatgtaagt

SEQ ID NO: 39296 - DNA, 1041 bp, Homo sapiens
aaaaatttttccccagaattatatttttgagattttgatctttccagatttcaatatttgggattaagattatgtctttccacattatgatcggttgctctcaaatgcatattactagctgaggaagccagtccgagaaggctgcatattttatgccaattatatgacttacgagaaaaggcagaactatagacagtaaacagagtggtggttatcaaggacttaaggaggagatagaattgcataggtgaagcacagggaattactagagcagtgaaactattgtgtaaatactgtatatgacatgcatttgtgaaagcccatagaaccttatagtacaaagagtgcctcttactatagcaaattaaaaattcttaaggagattgggggaatctcagggtggaatgcagaatgagaaaggaatttattataaatttatgaaacaacgttactgaagggggtggggagacaagttgcaaacataaataactttggaaatgagtagagactgtatcgctaaatgcaaaagtaactgtacataagcataatattctggttgataaaaggttgccaattctgaaacaagtataataatgtactaaaattgaacagttaagcaaatgaatagtgagtggtggaagtcagatgttttctttgctggagtaagaggttacaaataagtaaagggagaaagctagaatgctccgtttggtaacagattagaaatgcagacattgtttgtgaactaatgtttagctaatatagacgcatatggatgtatatatagaaatatttatgcatatgtgtgcatatacagattcatatactatttccttgctttgtcagctgagagaatctagaagcaacaacacctcactagtaacaagcacacctagtgcccagatcttagtttctaatttcatcctctaataaaaggaatcaaggatccctgaagaaatggatgattctgtgactggggcaggaaatatacaagatgagcctgtagcattttgtaggactagaaagtaaggaagtactcaa

SEQ ID NO: 39297 - DNA, 1104 bp, Homo sapiens
attggagaacacaggctgggctgatggtgctgatggccacgagagtgccagagaagagggggagggggttatattgatgatggaattgactgatccagtgaaggtggagaagagagttgtttcaagacaaaaaaataccaacaatgaactttagatactgagaatgagtcactggaaggattgtgtagcagtaatgaacatccagaaaactcaaatataagctgcagggtggctgatgagttcacttttgacatcttaagttagagatgccatctgtttggggcatgcaacaaacatctcctttccagaacagaaatctgagctagagacagaaatccaaaaggtgtttaggttgatatggtggaaggaactggagaaaggataaaggacgtcacttttggggagagaggggagtagatcaacgagcagccctgcctaaagaggcagaggagggcaggagggaggtagccaagaaccaaggagagtctcagaagcctaggacagagtgactccaggaagcagcactgatgaatggactcagctatttcagagaggctgaggaggaccagttaggttagtcatgggacttgacaatcagagtatttttttgttaagagaagatgttttgttctgtgatggagtaggaaatattgtggtaaggaatgaatgttggaggaaaagtctgcagtgtttatatggaagaggctcggcaaattcacatgcccaccttggaaatttccattctcaggggtcagtttttgaaaaaaagagtgtgcttgtgtgtgggtgaatgggtgtgtctctccgtgtgtagtatgtgcatagaggaagggtttggggagcggaagggctcaggcactgtttcagccctgattaattgttgccatatggaaatgcgagcccagtcataccagcagttttgatttttcaaatgaagtaggcaatctagttttttttttaaaaagtgggatctgtatatttaaaaatcttgccccaaatttttaaaacccctgtccaagccaaataaagcctgtctgcaggtgagacacagcctgtgaggttgcagctcgcttctctggaacacataatgggtttaagagagac

SEQ ID NO: 39298 - DNA, 1071 bp, Homo sapiens
tacaggtatacaacttcctaagattctatatttttttaggcaaaaaatatgttcctctgcaaccataccacacagacttaacatctgttgtaaagtgtgttaaaatccggcaactcaatgtcagttggatctggctttatggtatgcttccttcattatggctctcactgggggaggagagctttctgataccatccaaacctccagagcaccattcaaagcagctggtattctatatattacataattatgaagcacaccgtgtagtttagaatacttaagaggcactaggggcccacttctcaaaatatttacagccttttattcttctaaaaacaataatttgcatgcctaaaatgatttgtgtacctttgccatgcaaatttcctttagcctctttttttctgttaaaccttgatctgaaaatatcagtgtttagtagtaaataggccagagggaaatgtaattggcaggaatggaggttttaaacatttcccccaaattttgggtattcaaggggaaatgggagaaatcatggagaaaggaaggtctgaggtaaggacccctgctaaggacaggtaccagatctaaggagaggctctaggacaggggccaggctttgcattgaaagggacaatgaggggctgagtgccatccaataggccaactgtctggggacagttactgatttagaagaatattaagaaaatggtttgggagttcctagatcccaaagtaaggcagtaaagcaagacctcatgccaagggttgttaaagagatcattcttggagctcagtgactctgatcacacagagggtctccccttaccagcctcgttcactgccctctttccaaatcttgtccactctttagaacttggctcaatcagccattcattcgacaaacatgaattgcacattctatgtgccaggcgatgtgctggacaatgggaataggaaaatacacgtgatagtataaccctttaaagactctgttgtcgaagagcagaaaggcataaaaccccatcagtgtgcccaggtatctgtggcatggtagtaaaagcaagtata

SEQ ID NO: 39299 - DNA, 1033 bp, Homo sapiens
tcttcattcccaaggcaagtcaggggaaaactggtggatgtttcagagtgtttgttttcaactaactacatgtgggagatccagaaaggatgtgatcacttaggacagccaattattgaatgtgcacactgaatttctcagctgaattttttttttaatttaatggaccaagtcatttaaggcctcatgcattatgtagctcagtgacattttggctgtcagagcaagactcttttgatttggtagaatatctggctgtgtcttcctttatttcaaagaactatgattttaatctctttttattaaaatctaaaagaaatgatcttacaccacatttttcaagaagttattttttttttgttttagaggaatctcaactgccaaatcagtaggctaatattaaaatattttaaattgtgtgatatggaagagaaaggaaggaagagaaaataattcagtcacgaaaaagggaagaaaaacctaatacataggatgaaagcaatcgttgctattaaatgcctgtgggacttattaaaaaattaggtatagagagtacgttcaattataagaatttttgccctgtcttaagagtgtgtgtatttatttatttaatgctacccaagttatcttttaagattattaggggcaggcatgagtgttcatatttaatttttctcatactgttatctaaactgatatttgtttccttttattgacagagctataaaaaataaaaacgatgtgaatttccctgtctttttatgtgtacttaactccaattgattttactgacaagagtgcatttaggagaattcccccaatattctaccaataaaactgtccctgcaatctgtctagtctcctgatggtccaccccattcattagcttcattctttctagactaccatcgcctgcgcatccccactctgcttaaatgtcccctccttcctcctctctacagaagtcacaccccgttccagacctagatcactaggctatctgatgattctaattacttttgtatttcatcta

SEQ ID NO: 39300 - DNA, 1049 bp, Homo sapiens
caggataggtgacatttgagagagaaccaaagagaaagtaggaatttcccagaggttgaagaatggagaagaaacaaagaggcttgacacaatcttggtgggactggaccaactgttcttgggcaggtaagaaaggaagtgaccagaggaaacgagaaggtttggtcaggaccacactgaaaagagccttcagagccatgctgacaagttgaattttattcagctggtcacagggacccactatatcttcacatttttaagaagcaaatatggcctgagctgatctctgtttaagaggaaaaacctgcgaagtggaggatgaattagagtgtgagaactttgaaattagcagaggtttgcatcattcaggtgagagatgatgacagattatgattgtcccaaactgacttgctctattgtaccttggatcaccaaataaacatcatcgcttcctgtactcgatttttaaatgttatcaacaatgctgtaaatatcatgttaattctgtgcccagaagataaaaatatttggtaaaaccacaattacttttgaaccaacctaataatattcttgatccacaaggatttcaacaactaattccttggtactaaagaagcagaaaagaattaaaacataacaaagatagcatttaataccaagtgtccttttaaaaaaatctagtatttactcaacagatttgaataaatgaactaatcagtagttgtacctactcacttattactcctatagtagacactatagagaatgtacagggagtgtactactgggttggaggaacaaaattagcctaactgaaataacagtgcacagttttgtactaatgctgtgatgcagatcacaagtataggtggcattcagaagaaaatataaaaagttttggaggcttcagggagaataaggatacattttattttactcctagtggatgctcaataagtatttagttactactgcattatacggtataaatgtttatttattgctgaatgactaagtgaaatcagtcttaaaatttgctctaaagatgg

SEQ ID NO: 39301 - DNA, 1026 bp, Homo sapiens
tcaatttctgtagtttattagcttggttcagtgtctttgagcattagtcaacatttaaaatgtaggtttttatgattctggaagaagcaattgcttccgagggagaaaacattctgtaaattacatgtaaatgtttttacttggatgagttcttttgcatctgtgcagaggatcattttaatttacacaagaatgaaggttttccgtgattgaatgtagtaggcacgcttgtgtatctaatttccacttcatttataccagagtctagcagacacaaggggcattttgttctaatgtaagtgctacttaaaaataaagtaaaattataataaaaagctaaggattagtgtgccatttctaattttatttcagagttgccccttggagtgggttggagcagatctgagtcatgtaatttggcattatgatgctctaaagatacagacgataaagacttcatccttggaacaaagcagatgagaaactcagagatgtgattgactaaaaacatcaaaccgtctcccctttccctcacagctatacatttcagagtttagtgtatttttcctacatagaaaactgttctgtaaatcctttctatttctttttccttaatctctgagattatgtagcctttacaaaattgggtgtttgaaaatccaaaggattataaaggcttcagctaattcagcttcttctctttgcaccattaaaatctttcagagaaataaccagcttctagtcactgtttattgacagtgaaaaggatgtgacattttgacattaatcagttgctgggctggagacaaaggtataggttttgatgttctaatatcactgcaaatgtaataataaaggccactgaaatgtggaaatgagtgtgaatatttgcctcttcctaactgagaaccacaagacttctttttatcttattaaatctgcgttattaaatgccctaaattaatgaaaggttattgctcaagaattcaaatttatataaaccagccagttctaagcttttagtct

SEQ ID NO: 39302 - DNA, 1721 bp, Homo sapiens
tgccttagtatagttttcttcatatatttcttatgcttctaatttgttgacctttttggacctgtagtctacaactacaaatcaaatttggaaaggttttggccactttttcttcaaatactttttgtttcctcatcctcttctcacctttgtatattccaattacgtgtgtgtatttggtcattcgaagttgtccttagctcatggatgttgtgttcattgttttcagttattttcactctttgtttctttttgaacagtttctgttgctgtgtcttcaagttcactattttttcttctgtcatgtctaatcttccattaaacccatccactgtatttttaaactcacatatttatttttaatcattagaagttttatttgggtctttttaatatcctcccatgcctctatttaatgtattcaatctttcatctagcttcctgaacacacaaaagacagttggaacaactgcctcaatttccttgttcactaattctataatctgtgttatttctgggtctgttttaactgattgattttgcagtttcctgcttctttatatgctgtataatttgttattagatgctagacaatttgaattttaccttattggttgctggatattttttattcctataaatattcttgagctttgttctgtcacaaaatttgcgtcaaaggattctttcccattacggaggtaagacaattcctagtatcctaaatatgctccccaacaatgacgggattatgagccacaggtaacctagctgttgagaacacacactactcctgggctctgtgtggactccaggcatttgtttagtctgatctttggggtgaacattctttcatggacctcagatagtttcctcagacatatgcgttgatcaggactccactgcgttcctacaggaaactctctgcagatctctggagttttctgtctgtgcagctccttcctctctgatatgctccctttggcattggtgtccctaaactccaaactctgtcatcctaactcaggagggctgccaggctctgcctaggaacccactctctgcaccatggcttaaaaactctctcgagacagtaggctggggctatcatcatgtgcttacttttaataatatgaaaaattttaaatgttttgaaccaggaagaaacacaacactataagcaaatataaagacaaacgtgagattgaggaaaaatattgttgacatgtgtagcagaaaaaaatactactattaaaaataaacaaaacataaatcattaagaaaaaaagataacccaagataataacagtcaaattcacagaagaagaaatatacatagctaaaatgcatataaacttacacttgacctaattaatcaacaagataaggtaaatgaggtataattttttcaattatctttttttttttttttgagatggcatcttgctctgttgcccagcttggagtgcagtggcatgatctcggctcattgcaacctccgctgcctggattcaagcaattctcctgtctcagcttcccaagtagctgggactacaggcacacaccaccacgccccgctaatttttgtatttttagtagaaacagggtttcaccatattggtcaggctggtctcaagctcctgacctcaggtgatccacccaacttggcctctcaaagtgctgggattacaggcttgagccactgtgccaggcctcaatta

SEQ ID NO: 39303 - DNA, 1040 bp, Homo sapiens
gaagatgtaaaagcattaaaaaatattggaaggctatgaattcagtatcagccatggttacctcttggggaggaagggaaaaggggagccagttagagggagaattgcatagtctacataacttctgtatcactcgaattcttagaatagtctatgtattatttgtgtcattataaaattaaaacatggggaaaactcatgccaaaatgaaagagaaaaagttcaaagggaaaatgaaaagaaggaaaaaaatgcaatcttgagatttatggcagactagtggatatcatgtggcatacttaagttgctttattcattcatggtctgtgttgaggggggccataggacatagaggaacataatagaattttagggggtggtaagtactcattattcattggtaaaatgtggatttggggccctatgatgagattaaatgtgtaagagaagcaattccatttgaggataagggaaggcagaggctttcacatttccagctgattgttaaggacagacaggtaatattataaaaaatcgaatgtaagaaaatgtagtttaaaaaatgagaaatccatttctgaactcatttaagctttctccccagatctaagatgaaagctcatcagctgtaaatactcagtgctttccaccgtgacagagtttaaattaaaacaaaaaaaaaacctagagcttggcaggaaagcagaggtccatggtatgaacctgtggccagacgtgcctggaaaagaaagagcagaggctgagtttccgtaaggtcctgtttctgctggctgtagccctcctgcagattctgggtttctgtgggatggtttgcttaagcaagaatttgtcagtgggtcaacagccctctccagtgaggagggtgcgtcgggctcctgatgccgagtccagtcacattgcacggctagccttaggccgacaatgctggatcagtcaggctctcctgggttgcaaatactagttcctgaaaccgtccttcctctctccctctcttcctgtctcccttcttgcctccttgt

SEQ ID NO: 39304 - DNA, 1050 bp, Homo sapiens
caacttgattggattgaaggatggaaagtattgttcctgtgtgtgtctgtgagggtgttgccaaaggagattaacatttgagtcagtggactggaaaaggcagacccaccttcagtctgggtgggcaccatctcatcagctgccagcactgctagaataaagcaggcagaagagcgtggaaggacttgacttgctgagtcttctggacttcatctttttcccgtgctggatgcttcctgttctcaaacatcagactcaaagttctatagcttttggactcttggacttacaccagtggtttgccaggggttcttggacctttagccacagactgaaggctgcactgtcagcttccctacttttgaggttttgggacttggactggcttccttgctcctcagcttgcagatggcctattgtaggacttcactttgtgatcgtgtgagtcagtactccttaataaactccccttcaaatatacatctatcctattctgtctctctacagaacactgactaatacactatttaacaccaaataattgtagactgtaaacctcaagctattttcttcaatttttaaaaaataatcatctggagccatccatccaaggagttgatgctggtaataataaggatgataagcaaagaacacttggttcagaagcctagttagcttcatggcattactgttcaggcaatggtgttcagtttgagtttctgaatggaattatttttcaggaacaatacgaaaacactgtaggtggtgagtaacatgttagataatgacataaaataggacaaaattctctagaactaaaatgcttctttgattacccatagctatgatatccactgtgttttcacctctgttacaattattttacaaatagaggaaaacacaaaacattcttaaaaatctcaaacctaacttgcctgaattcaggcccttagacatttcaatatttctttaattcattccttaatcacattattattgaagcaactattctgaaccagacattggtccagaataagatactgctgaata

SEQ ID NO: 39305 - DNA, 1057 bp, Homo sapiens
cacacacacacacacacacacacacacacacacacacttcaaaaccagaagaagaagaaacaggtaagtcttaccaaaggagagccaaggaaacatgttcgtattagaatagttgttgtgtaggagtctatgagagattagtgccgccaccacagccctcacagctagtgcagcagttttcacttcttgaaagggttaaatagtctcatgactacactagtgtcaactcatggagttaaggtttaaaactggaaggtactaatagaggtctatctagttaagtccatcattttccattgaatggactcaggggacttttccaagaccacacaataattgtgtgtaagctgcagatgttaatcctgctttatcccaaacctccgtgcattgggaggtggtagtgttggatcgaggtgattctgttttggagggcaaccacccagctgacatttcttaagccagagcccagcaccccctggcctgttgcccatggtgctgtcatattttgacctaaagtgaactgagacctcagatgtattcatctcagaacagagaatagtatttccatataaccatttactgttcaagggagaatcattttgaaaaatacttcattatgggaaaaacaatacaaagttaaacaacacaagcaaaggatagaagtattttatataatggtcagaaattatcctgaaatgatactggaacacacgatggaaaacacaatttaaaaactcagttgcatttgatcttacaagcatcataacaactcaattcttttttgctttagatacagaatcactttctcctaggtcacttccccagtatacccattctcctgacttgattgaggtcccgctctgagtccccagggcccgtgtgtgtctctgtcatggcactcgggacactgtgccaacattgtctcttcatcttgctgcttccctcactacacttaaccctctccatgccgtgagcaaaccgatttccactgcttattagcagatctgacaatatctggtacattctagtactcactagaactttgaagggaacttaa

SEQ ID NO: 39306 - DNA, 1090 bp, Homo sapiens
ggctgtcagggacagttcatgctgggaagttcacagccagcacaaccttctcctccttcctaatgggcacagtggaaacctgggccatctccccaaagcagcagggtaagctcaggtgttggggaccttaagtttcctcactgaatccaaacgtttggacctcccacattcttccaggcactcttggaaacagtctgttcccgaaaacccaaacaggaagcaggctgaaatcctcctcaccctcaatattgctctcagccaaatttcacaatcctgcctgccaagattttgaaatagagaggggaggtcaagttttctttctctgtttccctcgcctccacatctttctcttcccaccgtcgttctggaagggtgttctgctttctttacctcatattctagacctttctactcaggccatgtaataaattctaagatctagtagccaggcttggctctccatgtgctaagtgagagcaaataggacttaaaaaaatttttctccctcaattctgacctttatgactgttaacccaactccaggattctatttggtcatcaaagaccaaactgaccctttcttttcacctttccttgtttcttgtttcttttctttctttctttctttctttttttttttatgacggagtctcgctctgtcgccaggctggagtgcagtggcgcgatctcggctcactgcaagctccgccttccgggttcacgccattctcctgcctcagcctcccacgtagctgggactacaggagcccaccaacacgcccggctaatttttgtatttttagtagagactgggtttcaccgtgttagccaggatggtttcgatatcctggcctcgtgatccacccgccttggcctcccaaagtgtcttttctttcatttctaccatcacagccctaatgccctttctataccagacaggtcagtgcattgggctcacaaatgagcaactcaagtacacagaaatgcaaacgagagaagcacatcaaaatgtgtctaccgcactgcgtgtccttcaaggagattggtgtgggttccaggggattgtgtgtttgatcagcaaaaaaataaa

SEQ ID NO: 39307 - DNA, 1053 bp, Homo sapiens
ttttaaaagaaatttcaaaaacagctaggtgacattaaaatgtgtgagctttcctctacccctaggacaaaaactcatgtgcagtcatgcgaaaactatccagcattcatatcaactttcttattgaagaatttggtgctaaaccatgttctttagggaaaaagtccgtaacataccagataagttaaccattcaattagaaattaaataagagtggctgcagttgtaacttgcaaagttatggaatctatattaaatgtgaaaaagtttatctaaatccaattagttgattgaattatatgaaaatgccaatattcaactgtttctgatctgtaaaaaaatgcagattttatacagtttaacctaataaccagtagtaatattgagccatactcttccagttgaattttaatttactgtggtaactactgtttaaatcttgaaaagtaacgattgccacgctgtgatttgattaatagtgactaaatatatcctttatattttcttcttgggaaaaaaatggcatcagaacatggctttcaatgctgggcttccttctaattatgcctcagccccatttttccagatcccagagttttagttggctattttggaaaaatctaagagaaaactaaaggccttctgaagtttaggtattttaatggccctatcatcaagtttgctgattatttctttggccacctgaaatctgctgctgagcccttctagagaatgtgatgcattctctaggatgtatacatatagatatttcttcgaatataatgtaacataaaaatgtgaccccaaaatttaaaactgaaatagttgcctatgttgaaggataaggatgaggtccccctaattgtgaagtcattgaatttctcctcagtgccttaggtagaagcagctgtggtttttgagcaggtgaaactcctgttttactgtcagaatgcagtgctgcagtgaagactcactagcttttaaatctgtaattagaaccagagcatgtgaatgctccaaaatggttttggagtatagcaagtagcttacttt

SEQ ID NO: 39308 - DNA, 1034 bp, Homo sapiens
tcacacgtcccttttttgtagggaaaagacagtctgttttgaaggaacaccaccttggaggaaagcttattcctgtagtatttggactttcatcctcatatcgagatatgagaaaattgttttgttcatttatacaatccctgctggaaagtgttgccagaaataaacaagctctcaggagcaaatgattcatttctcatctactcagatgacatctggtttaagtgtgatgaatacatgcttgtttaaatcatgtggtgacggtgatgctatctgacagaaatgtgtgcaaatatttggggaatcccttaagtgcctgctaccaaagggtgagcttatttaacagggggaaaagcacaaacttcagtctatcaaatcaatgcttgcatccatttcctaaggctataagatttggagctacagcggtcgctctatttgaagagtaggtggctattttgacattaaatgtagatgccactagcagcatgaggatgtgaaacaaatgctcaatggtcactgggacatttaggaaatagcctttgaataaaagaaatgtcaagtgaccctacatgtttgaatggacttcagtacatttaatggtttggttattgtttttattaccttcacagttattcatttaatagtgtttagtggattgtgctaagccaaacacagaacaccgaggaggaaatggaagatgtgtgtctgccaggggacttcacatggccacaggggaaataatcagtcttaacataatgcttgattattcagatccacacgggacagatgtggcacatcctgaaaaatgcatgggcattatcagctattttgaattgttcttgccaagcccactcttcctatcctgaataacctgagaattagcagtatttaactgaaatgtattgagagtcatttgtctgaagggaatttaaattatatatagaaattctaagttatctgaatattgaaagttgaaggcttatgcataatgcacaacaattgctcgctgagttaggaataaacatttacatgga

SEQ ID NO: 39309 - DNA, 1033 bp, Homo sapiens
agggcagaagctgagagcaaagaatggtgtttgaggcttttggcaataagggattgaatgatgagaactttttgccctgtccccgacccatagatgagaggaggatgcttatttctatgtgacgccaacctgtagcaagtgggaatatgtagaccgatttcatctacaaccagggaagtggctgattgactacaaattagacatcttgatgtcagtagaggttatttaagtgatacagactaagaaaagcacattgacacagtcagcacaggataacatagattctctgtgaggctgacttcgcccagtatccagcagtggctgtgtaagaaatcctggtctctgtctgctggctgcactgctctctggagaagcacgcacaagaaagaagcgtttgatttggagatgatggggcggagaggtagccggaagaatgtcttcacctgagtttgctttggtcgcttgttgaacatgctggctccacaggaagattagacctttcttgtttgttcggagcaagcattcagaacacccagggccctcagcctcctacagccgctgggcaggtaaaggggaagcctgatgccttgccctgaactaaggggcttcgttaaaatttctctttttctctctcctgtagtctaccttgaactagactgatggttgtgtttattctttggtctctgtgtgcttttgtttttgggggtttctttttggtctgtgatctctagttttgttcagcagtgatttgtaggaggcatgctgactgtactgaataccaccccaggtactgctcagaaggcgtccctgaacttcagcagctgttagatcctagcataaaccgacacagagagacaggcttgtggtgaaacactggcctttctgcatgctgtttccaatcaaacacagattgtcctttccgcctgggagaatcatttccaaagccaagtgcctttcactaaagaaatgtcagcactctcatcaaaggctttgggcttctttgtaaatgtccaactgcatgggctagagtgct

SEQ ID NO: 39310 - DNA, 1047 bp, Homo sapiens
ttatgaggcaatgtttcctagtggtttgatccatgtgtctagggtcttgatctaggcccaccactcatggctctgtgatacagacaagttgcttgggaccacttctccagctatcaatggggatatgaaagtttgcccaagtcatgcagaggaggccatgctcgcctcattcatcccggtcattaaagaaggcctcgagagctcagtgccagctcccactgtgttccctttggttgctattgaaatattaataagattattgaatactgttctcccatgaactgtgtcacccttaactttgaatgtatccagatgacttttataagaaagcaacatgtgtgtcatgaagagggaaaaaaatgacttcttcagccctttttggaaacagttaagatagaagtcataaattatgaagaagttattgagaaaaaagtgaaaatttttgctgatgttataaaagaatatcttatcctcccctcataactctaaaatataaaaatattttttaaattgcttatcaagccagatatgaaaattaggactagtgaatatgtgaactgatatgagctccaagagtttgccaaacaacaagtttgtaggcctccctgagtttatttgatctatttttcacacttatgattataaaactgcttaggatgtgttttattttaaacgaaaccagcacctaacacctagaggtgctcaagtattgattctccttcttccatacttcatttacaaagttaacttttaatggcaaaaactgcaattacttttgcaccaacctgatagaaattgtgagtttggaagactccaaatgtacacttctgaatggctgattatccagcaaagactccaaacaggctgcctggcgaagaggctaagttgtatcaggctctcctctgctctagcagaaaagtgaatttgcacagttgcctgagcttcttggataatgtttgatgtttttccctctctactgagagagagagagagagagagagagaaagagggagaagaatcaggctcattactaggttttttttttct

SEQ ID NO: 39311 - DNA, 1091 bp, Homo sapiens
aggcttaattgaatcacagttctgcagacttaacagaaagcatgactgggagacatcaggaaatttacaatcatggcagaaggcaaagggaaagccagggccttcttctcatggttgcaggagagagagtgtgagcgagcggggaactgccactcacttttaaatcatcagatccaatgagaacttacgaacacaagaacagcatgggggaatggcccccataatccagtcacctcacacaagatccctcccccgacatggggattacagtttgagatgagatttgggtggggtcacagagccaaaccatatcacttgatttgcctgggataaccttgtcttagatgcctattgtcctggcatcattatcaatagctccttcccttcattatcaaaagtgctcagatttaggtgttaaagtatgtggtcacctgctttttggagatatttctgtgagttgaagaaagccaggaggtggtgccactttgtagaatgtgtcaccatgtagctcccagggtagaactgaggaacccttccttgctgaggtgcctgaaacagatgcagagtgctgagtggagaactcagactgttcagactggggacgcagagcagaattgtgggctggtagcaccggaaacatcatcacaacccacagagtggagcccaggagattggccatgcgagggatgactgaaaggcctgtgcatgggagaacatgtataagacaccccacaaacccctgaatgtaaggggaaactgagtggaggcagagatccgtggttttgctattggaaagtggcggggttgttgaccacatctttcccagcctaggggactgtcaagctcatcccttcatgccccccaggtgcatgtggaggtgtgtgcagtgtaggaatagcataggagcagcggcacaggcttcacatcactcttggactttcaagtgatgctcccagtggaggtctttcatcaggcccagcccccaacctcattctaggcaatgtgtcctttctggcggtcagttcctaaggaccttctggtggtccctttacttctccctcccagtctcctgcccacaacgccagtgagag

SEQ ID NO: 39312 - DNA, 1026 bp, Homo sapiens
attttgaacatattttttgcccgatgtgaagtatctccttttttttggttacttgctggaacagaattctaaactgttaccctttcaatgtctcccaatgtttcttcagaggttttttatgtattgaacaaaaagttttcaatccaggtcagaaggatcatttcttatgtcatctcctaagagttttataattttgcattttactctaagtctttaatacacctgaaattgattcttatttatggtataaggtaaacatctaattccattttttaaatgacccatttaaaagttagtcccagattatttattgaaaatttgcagacccagaaataaagccacacatctaccagcatctgatctttgatgaagttaacaaaaataagcaatgaggaaaggacacccacccaataagtgggcgctgggattactggctagccatatgcagaagaatgaaactagatgcctatctatcaccatatgcaaaaattaactcaagatagattaaagacttaagcttcagacctaaaattataaaaatcctagaagaaaacctaggaaatacccttcaggacattggccttaacaaagaatgtatgactaagtccccaaaagcaattgcaacgcaaatgaactttgaggccgtgtgcggtggctcacacctgtaatcccagcattttgggaggccaaggtgggtggatcacctgaggtcaggagctcaagaccatcctggccaacatggtgaaaccctgtctctactaaaaatacaaaaatcagccgggagtggtagtgcatgcctgtaatcccagctactcgggaagctgaggtgggagaatcgcttgaacctgggaggcagaggttgcagtgagccgagatcacaccattgcactttagcctgggtgacagagtgagactccacctcaaaaaaaaaaaaaggaaaattgacaattggggcctaattaaactaaagagcttctgcacagaaaaagaaactatcaacagagtaaacagacaacctacagaatt

SEQ ID NO: 39313 - DNA, 1021 bp, Homo sapiens
caggagtttgagactaaccccagcaacatagtgaaaactcatctctactaaaaatacaaaacctagccaggcgtggtgatgtgcacctgtagtgccagtaacttatggggctgagacaggaggattgcttgaacccaggaggtcaaggctgcagtgagccaagatcacaccgctgcactccagcctgcatgacagagtgagaccctgtctcaaaaaaagaaagaaccctgtgggatggattggaatgtagcaatcagtgtaaattcataatttctacaataagcatacttgtgtaggtaatgcatgtaatatgagcgtatgcatacatgtctgtgtccacataggtatatatttgcctgtgtgtatatatacgcagatattttctagctctattcaataaaaaggcctagaaacaaaggcatcccagtaactatgaacacacctagcactctaatcttagattctaatgctgtgcctcactaaaagaaaccatggctctgttgaacaaggactcactacattactttaagaagtaaactctgggaaaagaaaaacttttgacaaattaaacttaacagaatttatttgagcaaaaaatgattcatgaaccaggcagcactcagaatcagaagaggttcaaagagctccacccaggagcatgagaagtgagcttccataggctgaacatggaagccaagtagagaacacatctgatttgttacagcaaggtgtttgccttatttggatatggtctgatgagttggctgtctgtgattggctaaagcactgctgcttatgattggctgagacctgtttttttttttttacataagttagactcctaagttagattccagtttgtttcagtactaccttaggttgcagtttctctttattcttttttttttttttttttttttttttgagaccaagtctagctctgtcacccaggctggagtgcagtggcgcaatctcggctcactgcaacctctgcctcctggttcacatggttctcctgcct

SEQ ID NO: 39314 - DNA, 1079 bp, Homo sapiens
agataagccatcttgtcttttgtatgatcctacctgctaactcatatgtagccctttccctcatttccaatagaaaacatcaaacttattttatagatgggatagttttttttcaaatctagtgaaatgaagaaggaatcaactgaaatttaagcagaagagaataacatttaaaataaacttctaacttagaagaaatttgaatcttcttctctgatattttgctcctagaatgatgtagttgtggttatttctagaacacaagtgtccatattatattatatctcatggtctgacccaagcagtcatgtggaatataatgattccagtgaagtgatgccatgaaatacataaggcaactgttctttaacactttcattgatataaatactatgctcctccatttgggcattctgtctaagacaccataagaggatagaatcaagttataagaagaagaatatatagtttttcttctatagtgatatagaagatatagtttagatagtgatatagaagatatagtgatatagtttggctctgtgtccccacccaaatctcatctcaaattggaatccccacatatcaagggagggacctggcaggaggtgatgggatcatgggggcagtttccctcatgctgttcttatgatattgagggaggtctcatgaaatctgatgatttaaacatggcagtttcccctgctctctctctctctctcctgctgccatgtataacataccttgcttccctttcaccctctgtcatgattgtaagtttcctgaggcctccccagccatgaaaaactgtgagtcaattaaacctctttcctttgtaaatttcccagcctcaggtccttctttatggcagtgtgaaaatggacaagtacataaaaattggcaatgggaggagggcactgctataaagataacctgcagatgtggatgcaactttggaattgggtaatgggcagaggttggaacagtttggtgggctcagaagaagataagaagatgtgggaaagtttggaacttcctagagactttttcaatggttttgatcaaaatgctgatagtga

SEQ ID NO: 39315 - DNA, 1035 bp, Homo sapiens
atgaagaacctctactaggacaatgcagaggggaaatgtggggttggagcccccacacagagtccccactggggcattgcctagtgaatctgtgagaagagggccaccatactccagaaaccagaatggtagatccaccaacagcttgcactgtgtgcctggaaatgctgcaggcacttaataccaccctatgaaagtagccacagggtctgtaccctgcagagccataggggcagagcttcccaaggccttgggagcccaccccttgcatcagcatgccctggatgtgagacatggagtcaaaggagattattttggagctttaaggttttttttaaattttttaatttttcttttaagtcagaagtgggacttgaagaagctttaagatttaatgagtgccctgccaagttttgaacttgcacagggcctgtggaccctttgttttggccaatttctcccatttggaatgggaacatttacccaatgcctatagccccattgtatcttggacgtaactaacttgttttttattttaccaggctcataggcagaagggatttgccctgtcttagatgagactttggacttgcacttttgagttaatgctggaatgagtggagactttgggggactgttgggaaggaacgattggttttgaaatgtaaaaagacatgagatttgagaggggtcatgggtggaatggtatggtatggctctgtgtccccaaccaagtctcatctcaaattgtaatccccatgtgttgagggaggcacctcgtaggaagtgattggatcatgggggcagttccccgcactgctgttcttgtgatagtgagggaagtctcatgagatctgatggtttaaaagtggcagtttcccctgtactcactctctctcctgccaccatgtaagacgtgccttgccttccccttcaccttccaccatgattataagtttcctgaggcctccctggccatgtggaactgagtctactaaacctcttcctttgtaaattacccagtctcaggtcatt

SEQ ID NO: 39316 - DNA, 1058 bp, Homo sapiens
taaattctataacaacgtcaggtatcaaaccaaattcacactcaaaaatttcaagttgagaatgccctttatgtaaacccaggttaaagattttatcagtaaattcacagaggcaaatgcaaatcctctgcagaaactcacctgctgtccaggcctcaaagaaatgtcatggatacaagtgtaatgacatacactgaaataatgagcttctagtggaaaacactaaacacataagcaaacaaagttctatacacaagattttgataccgggatcatcagaaacaatgtaaaatgagtatgtttcaagaaataaaaatatgaacttaaaaatatgtcagaaaaaaagagactttgtttaaatgaccaaggagacttgaaagcaagaaaattgaacttctagatataaaaaaaaaaataaaacctaaatcaacaaaggattagatacagctgaagagagaactgaaaagctgaaaaatagattaaaagaaaattttcagattacagagaggtgagaatatagaaaatacaaagaaaaagttgagagacgtgtaggatagtataagaaggactaacattcatataatcagagtgcaagggagagaaaatgtaaagaatggagaagatattaatccttagaatcagtaagttctgcaaatccacatcaaaataaatacaaggaaatccacactaagaagggtcacagtgaagctgaaaaacaccaaagataaagagatttacagacagggagaaaaacaactattatgacaaaggaatggcagttatactgatagctgatctctgaatagaaacaagggaacccagacaaagcagaataatatctaccatgtgctgaaagagaataagccaatcaacagttgtctactccatgaaaatacttccagctagaagtgaaaatgaagatatttttggacaaacaagagctgagagagattttcacctatttattatcactaaagaaattagaaggatgcatttcagaaagaggaagttgattacaaatggaaggcctgggatgcaagaaggaataatgagcaagg

SEQ ID NO: 39317 - DNA, 1060 bp, Homo sapiens
cagggctgggaagcagaaataatgcattattttgttgagcttattaacatttgggcagaaaggatagattccttttacatagttaggcatcattttaacatgtacattataggtggtggcttttttgtaacagaaataagtgtagctatcccttaacaggagcaatttcccttcatatttcttgcagctcttgtcccatgaggcgacagatgagtatgtgatagcaatactgattccagtgctgagatgccatctgatccactgggagagctggtggattcaaatcaatgtcagctcatgccttctgggcagcagtctttcagtgcaggatttactctatggatcagaaaaacagctggtgacttgcaatatattatacaaaagacctttaaaatgttttgttgtttccagctatgatgtagtgtgagtcacttcaattttttttatttgtgtgcctttctgatggaacaaaattccgttaagcaactggtaaaaacataatagtaatttaaactggtgtctgtagaatattgagactgaagagtgattagaaataaggttttactttaatgtgcatttttagtgtaaaaattttacccatggaaagcatttattggaaatcctctcctgagattccctgtaaaatataagcatatgccaaagccaataatccttgtgggttacttggaattattggaaaagaataatttttaccgagttattttgctaagttgtgggttacagttatttgtttccagggtatattgtttgtacatgacagaattttggactttcttctttcctttaggtcaagttttttccccataaaagatgtataataattcatattaacattaaaacatttattttgggaggaaatactcaatgcttttagtcccagaactagtcttctttccctcactgagtcatttttggtttttatactttggtttttcatgggtttttttaaatgaggtttctttctcactttaaaaaaaaaagtattttctgtctctgtagtccaagtttctggtaacaattaggatcactagtacagaaa

SEQ ID NO: 39318 - DNA, 1055 bp, Homo sapiens
ggctataaaagagtgtcattttgtgattcagaaatactcactctttaaaatgttagtttcatttttagcgtcctcacattcttttggttccttttattggaatcccatcttataacctaatcctattaatatttatagggtccacatgaatatgaaattaactagtaggttccatttatgaaaagggatcaactattaagtcctatattttgttctttaactttggaatttgattcatgatatcttgtaaagctttgaagtcaactgacagtatgacagatttacaaacatctgtttgaatttggaggcctttccatctcttctgattgaaagtaattatactcctcttctgcacctgttgcattgttttatgttgtcatatactcgttgagtgcatgtacacgtatctgtcacgtcacttagattgaaagcttcttccagccagaaatttgtgtcatttgtctttggatcctcagtggtaatcagagtctggcatatagtttatgttcagtgtatttctaaggagggtagatttaaggagggtagagatgacatcatcatagtaataaataagagtaacttttcttaaagactggatttctatacttgggaaatggatattactttgaaggggagaagagagtgagagcaagagtgagaaaagaagaaaatgaatggagttcatgagtacctaggagttgtttggctagaataaaacaagtgtttcattacaggaaatgaagataatataaagagcagcttaaacttttttttagtggactaagttgagaatcctgtggagtgtagagttttcatgtctgggtagtcatgcctttcttatagttatggagggttaggtatgaacggggaacatttaaccatctgaattgaccatattaaccgaaaatggcagtaaagtaaccataaatgccagggaagtaaccatgcctacctaggacacatcagtgataagaaaatgcttctttcaactttttaacagatttattgaactgtaatctacataccataaagttcacctttttaaagtgtacaat

SEQ ID NO: 39319 - DNA, 1031 bp, Homo sapiens
caacagtattattttgattcttcaatttttataatatgatatcctttgatggtgggaactatgtcttacccatcactgctcctagcttactgaactacagtgaatgttaattgaatcagtaaatatattaataatcaggattgactggatttaaataagattattgcaactcaaagaatcctcgggagggcatcatccatcttcaccatttgttatgaactcttcatgtgtattaattcatttaatgcaataacactataaggtgggaactatcatcattcccccattttacaaatgaagaagctggggtctggaggacccatctcgccccatcacacagttagcaagtggcagaacaggaatgggaagccagatattagatacagaatttatgcatttgcaaccacacacactgccagccaaaaacatgcttttcctctccaagagcacaaccgctagctttccttattggcttatgaaaactggaaacccagtttttaaaagactgtgaaaaaaaattaagccaatatgcttatcattttaaaaggtactctatttaattgaggatatatgttttcatacttttattcccaaatggttatcacttccttaattaaataatacatcaattatatttgtctataaatatgtatgtgtatatatacatgtgtgtgtgtgtgtgtgtgtgtaccaggccctcaataagtatttgctgaatgtttcttttctgcaaaatctatgtatactaatgtttgctaaattagtatacacagtctttctactgctgtttagagggaaggtgcgatgatttcccatgtttttaaaatcagatggttcaatatattcatgccacatttagagaagaaagcaattcacggtagagtatgaactctcaaagactttaagtctcaatgtaatttatcaactttatatatcaacaaacttttatttagtcctctctgtatataaaaagcttattagcgatcacatgctaaagcagatttttaaattgctagagccttaaaatgccc

SEQ ID NO: 39320 - DNA, 1047 bp, Homo sapiens
ttctatttagtggtgggggcggggagttgctggccatttgtcatctctcttcttcaagtgggatcatagtcagtttgagtgggatcatagtaagtttagtgctaggtttgcattttaggagattctgtaaacttttgtcatatattctcagttcagcattgcatatgatttctattattgacaacaaaaggaaaaatatcccttattgtctggtggcaggtttgttttgttatatctacaattgaatatagacgtaagaaaaatattatttaagatttcttctatggttgttgaaaatttgattgccacctgcattggaaaacaacaacaaatacaacaacaaatcttgtgcaaaactgtgcaccgatttcagaaagtgaaagtatcacatcccctttgaagagggagaaaaactgttattggaagttaatctaaaatcaataccttggttataatgaaagccatctgctctaactcagagtgaggcagactttattgtcttttcaatcacctactaatcaacaggaccaagatttcctggaaatttaactgtaatttttaaaaattgtatatctcaatctctatttttttccagtttgtattcataacaaaacatgagtaactcaagtcaaaaaacaatggcccctggataacaaaatcacacctgagaatgaaactagattattgaaaacatataagttttaaacactctaaattatagatctcacattaagaaattattgaaaggaaaagaaagaagctctataatgacatctctcaaagataatcactattcacagtttaatttttattatatttattttttatgtttttttatagatacaattaaatatatatgcttagctacatatttttaacttaacactaaaacttaagtttttctgtgttgcaatataatgttcataaccatttgtttactggccaccctgggtggattaatacattaaaataatcatttctttgttgttgaacttataggtaaacaggaccaaacctcttaatacacatatttaaatgagactcgat

SEQ ID NO: 39321 - DNA, 1039 bp, Homo sapiens
aggcaacatggtgaaatcccatctctaccaaaaaaaaaattaaaaaattaactgggcaaagtggcacacacctatggtcccagctacttgggaggctgaggtgggaggattgcttgagcctcggaggtgaggatgcagtgagatccagccactgcactccagcctgggcaacagagtgagactctgtctcaaaagcaaaagagggtagagaggaggaggggaggaaggacagtgacaactatgagatgaattcacatgttttctgagatgacagttagacatacagcaatgacaattcactgagctcagagaaaatgcaccaaaaacaatttttaagctcaatagacatttattaaatgaatgaatgaatgactaaagagattggaggtctctatttgatgacagctattgagaaagagtgttttttttctctcctcattcctctcactttttaaaactgaggtaaattcatataattcgctttaagccattttaaaatgaaccattcagtggcattcacagcgttgggtaaccaccacctctatttaactccaaaatattttgatcacactaaaatatatctcctgcatcataaatgacacaagaagtttaaaataattaattgattgaaacttacataaaacagattttaagagaaattaggcattttaatttttttaaaaaaggtttcagaggaggacatgtccaactggcttaagggagctgctgacaagttctgactgccctagggctcctcctgaggtccagccacaacccctcttcaccactgaggcccctttcctcctgtggggtccccaaactgtggcttcataaaaaaacaaaaacaaaaacaaaaccttttcccctgagcttaatggctagggtcgcgagtggtgtaaagggtctatttgagtccctcgacttggctgtgtcccatgagcacacacacacacaagctgcacatccctcggttcacagctggctcattttaccattccctcagcaaaggattattgagagtctcatccctcaggtcttt

SEQ ID NO: 39322 - DNA, 1081 bp, Homo sapiens
agtatggtctgattggagggttttggcatggggaatctggaggcagattctatacctagaagcaggacatcctgtgtggctggtcaaggctttctctagttagtcctaagttgtaggcagtgaccaaaattaaggaagctgtcagttactaatgaaatcctggccatttggggcagattgttagaggagttattgtttgggttgctgaattgttactagagatagtggtctgatttcccatgagtctgacctgcagagagcaggctggctttctggcctcgctgctctagacaatagattggtttcctgggctggttgctgcagactgtggccattgtccatttgcatatacagtctctcaccatcaaactgagctccatgtgctcatctccccttctgaaggtcactttcatccaggattcttatgtatttccacccttgccagcagctgtgagcagattctacaggggccaataacactgcaggcatctctgctggtgttgagtggggttaccaagcaggggctccatcacggagcagaactgctgcccagctgctcggcctggtacagtgcactacacaccatgctccataaagaagcatcttagatataagaggcccagactttttacagaattgcaacaagtaggaggtaatgaattcttactgcatgccagccatcgtaagaagtatttacagatattttctcacttattcctcacaataaaactatgaaatagatactactatttccaatttataaatggtgaaactgaggctgggagagattaaataatttgtcaatgatcacgcagctaagaagtggtgagtctggtatttgaacccaagtggttttaatccatgttgcatcattatgctactgtgggagaaagagagggaaaaataaacctctttctgtactaagcacctaagaaggaaagctcatcagagtgctttgcttcaataagtaaaggaagtggaagccttctgaagtctccaggaagagctggtgataaagatagctcaggagtcagggctctcagagcttcctgtggggccggtcctctgaagatacaaagag

SEQ ID NO: 39323 - DNA, 1062 bp, Homo sapiens
ggataggattcttgtcaaggatatggtagaggaacttcaccataagaccagggttaccttagattaccccaagatttcttttgacattctgtaattttagtaccttacatttaatagatactcaacatacataggaaggaaggacagaaggggagggacagaagaaaggaagaagggacaatgtgaatcatccaaaaagtattgctatcatgattatttggttttcattggtattcattatgtaacatcaagctcaccttcctactatatgttgagtttatacagtgttactttttataaatatgcatctgtgagcacatataaactatgattgggagaagcaaaggggtgatttattgatttatgcaacatatgcagagacacctctggagccaggcattggcaaagtagatgctagggatgcaaaaaagagcaagacactgaggcttgggcctgtctgagacacgtccacgtagacagctcactaaagagggaggccccaagtagatgagaattaagaaaagggctgagttcagaaagatgtgatggctaatctaaaagcaaaaaataaaattcactaattctagattcattttcctcttctgacttttccaaaattacttttcatattagttcattctcacattgctaataaagacatactcaagactgggtggtttataaaggagaaaggtttaattgactcacggttcagcatgactggggaggcctcaggaaacttacaattgtggcagaaggggaagcaaacatgtctttttttaatttttttatttttattttttattattattatactttaagttttagggtacatgtgcacaatgtgcaggtttgttacatatgtacatgcgctgcacccattaactcgtcatttagcattaggtatatctcctagtgctatccctcccccctcccccaaccccacaacagtccccagagtgtgatgttccccttcctgtgtccatgtgttctcattgttcaatccccatctatgagtgagaacatgcggtgtttggttttttgtccttgcgatagtttact

SEQ ID NO: 39324 - DNA, 1044 bp, Homo sapiens
gtgactcttgcaactgatcatgttttcctcttcatattttatgccagaaagccaactacaagcaaaactcttttttgatactaatctcacttctggcactatctgattttcatgcacattttttccttgccttactttttgtttttattttaaatccatatgagatagctatattatgtgcaaccatgtaagctgctctaaatcactttttggataaaggatatccttgataaaaaataaataatggatagccatatttttccctttgggttctagtttggaataatccattatttatctcagaactcagcaagtcagaatcttgctccaagccagcaaaatcatctaagagaatgccccagaattactgcagaggtcacctttaggcatgaatggacaatgcgtttcaaatggcccattcattctgtccttggcacagatgctgttgtggataattattttgatgctaatatatgtgtatatcttttttaatgtggatactagactgaaaaattggactgagaccaataatcaacagatggcaatcactcggggtcatgactattctgggccacattttcactggtgactttcaattatattgagacttatagtcccaatctggcctagcagtatctcccccattgtctgcatacccactcagcaccatcccactgtgacagtctgtgaatactctccttacaagaaaaaagactttcctgtatgtgactgcacaagagtcccaaagtaaagattgtagaaatatttcaccatcagtgaacttgaaatatcctgtatttttatttcttagtgttattacacttagtgtaagtgatgcttcaaaacctattctttttaaaaagcatctgtctcaaggagtatcatttggaaatagcatgaaaaaagtgtcgtaggtcactgcaaaagtagatttgacctgtgtcagtcatatttgaatgattcggtttaatctcacactttgctattgaacacatactcttttcaagccactctgtgtgtgctacaggatgacagctctgaagg

SEQ ID NO: 39325 - DNA, 1032 bp, Homo sapiens
tcttaggcccatcttgttcctggatgcttattttatatgcatccaaatatgcacaagacatatattcagtatcaccaaatagtagttttattgtatgtaataaatccttggcttggcgcactcttatatagattagaaacagtattctttatgtcaatgaatgtcaccacttctgtcaagtacttctagtttctacaggctcaagaataccttttcttgacaatggttcaggatataggctggtattctgccagccttctcactgttagttcatttctttaatagcatcttggtgagagtcttttcagaacccagggactccagcctccaccccttctattaactaaaaatccctgaataaccctccatatggtgccggcatggcatttgataaataccttgctgattatttatctgactttacatttattttgacagattgagcacgttagtctgtattgaaactaagctcttgttgtaaatatcttcctacggctctctggcgctgtgttgagtgatctactgaacttctgccacagcaaacttgggggaaatgaggaaaaggaaggcacactctgaaacaaaagcagacaaaagcaattctgaaaagcaagaaaagggacagaactccattggaggtcctggtgaatatatttgtaccttctgtcagcacgtctcgtgactgtaaactgctgtaactaccaggatcaataaagggcaaggccttgagatagtaattatgctaattggtagtgactagaaaacacgcaggctgcaggataagcagacagtgtcttgggagaaacagacacatttgttaagaagggcaaggtctggtaggcttcgtgagacttttcctataatcagttttctaagaaacaccacgtgcatcagccaacatagtttgagttcttccctcggtagaagattgtaccaggcactgcagaagaatatccaagaaagaaagactcagcacctgccttctggaagcttacagcttagctcattctccaggcatgcccaagcacgtgc

SEQ ID NO: 39326 - DNA, 1056 bp, Homo sapiens
aaaatccaacttgcattatagcagaatactaaattctgtcttctaattaatttttaaagctcagatttgatagcaggattaatcttagccttattttcaagacaatttaaaaattactagagaacatttgtttcatttaataaaaacgtattaccctacagtaaattgcaattcagattatacgttgagcttccatttggctgaagtatgtactcttgaacggctttgtctaaaattagagaccattttcctataaaacaagagtgcttgagggcttgaacatccaaaaatgttaccttaagagtaacgggctgtggtatagaaactgccatcatcagataattacaaccacttaaatgaaagcacctctatccaccctttcttttccttccatcttctttttctatgggtgctgttcacatgctgtcataattccagggagagttgcataatggaaaaaaacaaaaacaaccctgtgctttgagctagggatccagggtttaacaccctactctgcactttacagtttgtttgaccttgaactggccacacaagtattctgagcttatttttgccatctccaacataggagaaataataagacctatctcaccaggcttttgtgagaactgactgagaaaacaaagagctcctgtcaaccactggatgatggtagctgggggacttctcttaagataggaagtcagcaagatggctgtcgcggattcctcttctccatatgcgcatgtcaagagacagaggctaattctcctcttctgaatctgggctggcctgagtgactagtttgactgatagaaccaatggcagtgacattctgggacttctaaggctgggccatagaagtcttacagcttccacctgtgtctcttaaatgcctgctcttataatgttataatctttcacaacccagccaccaggctgtggaaagcccaaagcacatggagaggctatgtgtagatataccagttggcaaccgagctgagctcccagtcagcagctagtgtcaacacaggccacacgagtgagccatcttgg

SEQ ID NO: 39327 - DNA, 1031 bp, Homo sapiens
atttctcttcagcacaaacgagtctgtagaaggtcaaacaggaatcagagtagagctccaaggaaaggaggcatttgtcagaatgtagaaacctgactgggcacagtggctcatgcctttaatcccagcactttgggaggctgaggcaggcggatcacttgaggccatgagtttgagaccagcctgaccaacacagagaaatcccgtctctactaaaaacacaaaaattagccagacatggtggcacatgcctgtaatcccagctactcaggagatgaggcagcagaattgcttgaacccaggaggcggaggttgcagtgagcgtagatcctgcaactgcactccagcctgggcgacagagagagtaaaaaaaaaaggaactcagaattctgattttattgtagacctaaccagagggataaacgatgtctttgtggctcaaaaacattgaaacttcatgtaatagcctaagaaaatacactgggaattgagacgaaactgatggaacattcttctgccttaaatgtcctgtgagaggtttccatgaaagatgatatatacattgcaaagagctacaatgagaattgaggattccatatcctggcacccccatctttgtccatcagaagcagagttagaatgtaatgcaaaagcaagaagattgcatcagtacaaaatgggaccaaactgtaccctttaggattctctatcattgctaacagtgggtcacaaatctggtttcaatcaacttatcagctattgccaagaaatttagaccctgtccctatagcacattttagactacattttgcttgactttctgtatgggtagatttgattccaaaaatatattttaagatcatcagaaacaaagaagctgtttaaataataggtgacttgttttaatgattaacttcgctttcttcgaggaaaggaatgagcagagcgaacaaaacagcagagagatattgccaaataactgtgccctgacatgtccacacctggcaggaggggcacaggaggcaagttca

SEQ ID NO: 39328 - DNA, 1033 bp, Homo sapiens
aacctctgcctcccaggttcaagtgactctcctgcctcagcctcctaggtgcccaccaccatgcctggctaatttttgtatttttagtagaaatgaggttttgccatgttgcccaggctggtctcgaactcctgacctcaggccatccacccgccttggcctcccaaagtgctgggattacaggcatgagccaccacatatggactaaatgcatctttttttctgccataggattttatttggtaaggatgtgctgtctgtcatttacagttcaaaagccaaaatcaaaattaacgtgataatctcttctaattcagaaatttcacaatctgttgtttcatcctctgcctcttaactcttcagggtcaggaaacaacagcagtaaactccacaccttggatcccagtggtagagtcaaggtactccgcaaagacttctggatgaccttgagtctgggggtaaagttacacacagcactgtctggtaggacactctggttctctagttataatgctagggacatgactctgcctgcctactcctcaaaaaactgagcaaaaaattggcctcaccccagtgtttggcaccagaatgagtacccggtatgaatctttgtccgcaaacatttatatttgttttaaagccactgtgagcccctagctgttcttcatttttgtcattgctgagctctcctttccttcccagagctgcaccagatttaaggaagcttatacaatacccagtaaggcaaaccaccttgactatggtctcaccagcacaccccactgtcccagaccacagtggcccctttgatgcccagcagctctctgcttcctccatgacctctgcaagtaggagaatctttgtggaggctgtgaatcccagtcccatcacttctcttcctgtgacatcccttaagtcttccttcctagggtcttctgcctcccagaagaaagccggggagccatgcttctctacgacctttgcacctcgccctcctcctagaccaggggaagtgttttcctacatgaaa

SEQ ID NO: 39329 - DNA, 1087 bp, Homo sapiens
tcatctccatacataatgtatgattgtgggagagctctctggggaaacaaacaggcaattgattgcaatgactattctctatttattccagtgataaaaatgaaagactggactccacatcagattttttttattaaagaacttaaagaaaaatggtttatttgatgtcttattacatcataaacacttaacaaatttctaagcattcattttattttagcataataccactacttaatggattgattttttaattgtaggaaattcaggtatttgttttcaatcctgattttttaaattctatagttgcttttccctgaagtaaaaataaatgtgacaatcataaatggagtggggaggtaatgcatgcctacatacacatttaatcgttcagtcaggatgctcattatatatgtgcatttgtatctacttttatctgtcaaaatgctttaggctgctggtaatagaaaactcagctcaaagtggtttaaacagcaaggaaaatgcattatctcccacaacgcgaagtggggcacctccggggttggacaattctgtagctcaactgtgtcatcaagaatatagttttctctcttctttcttctgtgccttcgaggacacgtagcctgtgtattcccactggcttctttatggttgcaaaatggctgttgtaagtacacttatgtcactcaggacaccatctgatttccagtggtagaagagtccatctcttttccggtatctttctctttttaggagccaggcaacctctccggaagctggggtcctacctcaagtctcattagcaaggattgggttatatgtctctgcctacaacactcacgatcaaagacagtaggaatgccctgattggtttagagagttcaggttaacccttaagctccattgggggtggggaagtagtatattcaacaaaattttggattgatgagcagggaaacttggagtcaggaggtggtctgaggtggctgttggggaggcaacaataccaaacatttattagcctaagtatagctctacgaagtatgaatgttactaattctgaaatgttccttgtggttttagg

SEQ ID NO: 39330 - DNA, 1050 bp, Homo sapiens
ctaacatcattcccccccatcattcccccccgacataacaaaagaaaaaaaagattgtgtattttcaacacggcaaggattgttcttgtgcttggttgatggtggtgaacagaacagccaaggtctcagccccatggaacttacaccctcccatgaagcacttcacatgcaagtcctgccatcacctagcactagaacctgcctctgggtggttgccctggaaagagcagttaccttcgaagtcagactgatgctcactgcaggccaacctccaccacttggcagctattcacctgtcagagttcagtgtcctgggaaaagcttctgagccgcagtcctggtccacaaatggatataataacactcaccttgcagggattctgtgaaggtgaaatgagacatactgagtagaaagtacaatatgtggcacatactaggtgttcaatccatggtagcccttcattaccttgatgaacaaatagatcaaaagaggatctaaggaccctcacaggggtgagccactgtacccatccctaggatcgcttgagctcaagagtttgagatcagcctgggaaatagagagaccccgtccctacaaaaagaaaaaaaattagctgagtgtggttgcacatgcctatagtcccagctactcgggaggctgcagcaggagattcgcttgagcctgggtggtcaaggccatggtgagccatgatggcaccactgcactccagcctaggtgacagcgtaagaccttgtctcacaacaacaacaacaaaagagacagagagagagaaagagagaaaaagacctagtgccggcatagagaatatggcatgtcattgtgaaatttcagaagagtagggttaaatggaagagtgttgttttgttttgttttgttttgttgttttgttttgagacagagtcttgctctgtcacccaggctggaatgcagtgtcatgatcttggctcactgaacctccacctcccgggttcaagcaattctcctgcctcagcctcccaagtagctggaatcacaggcatgcaccacca

SEQ ID NO: 39331 - DNA, 1050 bp, Homo sapiens
ctcttttcctttgttgttttaggcccagtgtggggcggggagatgttagtgagatcctgagggggcttttaaaatgctaactcctttgaaagcagttaatttacatgttctcttgggaggtgtctagagttgtgcctatcagctaatgacttaattaattttacgtcttggaatttgagagtcaagcacatttcaaatattctgacttcaccttaattttatgatgttccttttagcccactgaagaaagccttgtggcctctctatgtggagaagttgcagggttatgtactggaagggattgaagcgcccttggaaatgcaccctcaactctcatttagagagaagggtttggagggcttccaggtgtaaaagacttactcagggtaacagagaggaggcagaactcaggcgtctggatgttcacttctttggcaaagactaagtcaatggctttcataattttatttatttatttgtttatttatttatttttgagaaggagtctcactctgtctcccaggctggagtgcagtggtgcaatctccggtcactgcaacctctgcctcccgagttcaagcgattctcctgcctcagcctcccaagtagctgggattacaggcgtctgccaccacacctggctaatttttgtatttttagtagagacagggtttaggctggtctcaaatccctggccacaagtgatccacccacctcggtctcccaaagtgctgggattacaggcgtgagccactgcgcctggccggctttgataattttggttggggttgccgaatcttttcctgctaaaggagaccccttaagcttaagtgaccttcttccatgattcccttctcctgcctttctgcctttatttgctgttctctaccttgtctttcttttgctcagccatacaacccttccctctgccacctggcttcttactgaggtcctttgcatgcagctctatggggacggagtgagaggcagtgctcctgtgtagagtcctggggctgtgctggatcttgcgcatacatttccttacttgat

SEQ ID NO: 39332 - DNA, 1464 bp, Homo sapiens
caccatgttggccaggctggtctcgaactcctgacctcaggtgatccacccacctctgcctcccaaagtgctgggattacaggcatgagccaccgcacccggccaaacttgccacttacataaattgttattttgggatgatttagttatgaatctaaagagagcctacaggaatttgaaatctttgggaaagtctgtaaagaccataaacatttattctgaaaaggtaaaacatttcatttttaaggctcattttattgtgaattacagttttttaaaaaaaaccttctcagaatgtatggcattaagacatagtctactggggtatggtcattactgtcttctgcaacatgttgttgtaactcacctaacatgtgacgcccaggtggtgatttactggaagagcgtcataacactgatgtgtagtagcaatttgccttgattagaggattgggaaactgagacttcatgatgagcattaaataggtgtcaaatgattcctaaatgatatgtagaagatattataaaatcttcatgatgtaactttagcattatcaaagaactggctcctttttcaacagaagaaaatgtcagctagttaccccacgttaatattttgtatcaagaactctttggtttgtcatgcccctgagtggctgcatattctgagtctgggtctttagaaagcaggatgccttctatagtggaagagcttccatagagaccaggaggggagacgaatagaatgaacacattccttaaacctcgagagaagcttaccaggtcacatcccttaatctaagaagtgctgctctagagattagaatgatcatatttacattggtatgatttcttgcacttcatatgtacttttacatatgctgattggttttattttattttatttttgaatacaggttaaaaaaatttcaatagtttttggggaacaggtcaggtagtatttggttacatgaataagttctttaggggtaatttctgagattttggtaaacccatcacttgaggagtgtacacagcactcagtgtgcagtcttttatacctcatcctcttccacgcttccccccaagtcccccaaagtccattgtatcattctgtttttttttttttttcttttcttttcttttttgagatggagtcttgctctatcccccaggctggagtgcagtggcgtgatctctgctcactgcagcttctgcctcccaggttccagtgatcctcctgcctcagcctcctgggtagctgggattacaggcacacaccaccatacctggctaattcttgtatttttagtagagacagagtttcaccatgttggccaggctggtctcgaactcctgaccttaggtgatccgcctgcctcagcctcccaaagtgctgggattacaggcatgagccaccacacacagcccatgaggatgcctgtgcaagtgtctttttcatat

SEQ ID NO: 39333 - DNA, 1037 bp, Homo sapiens
ctcactgcaacctcagcctaccaggttcaagagattctcctgcctcagcctccggagtagctgggattacaggcatgcgccaccatgcctggctaatttttttgtattttcagtaaaggcggggtttcaccatgttggccaggctagtctcaaactcccaacttcaggtgatccacccgcctcagcctcccagagtcctgggattacaggcatgagccactgagcccggccacaatttttttttttttttgagacagggtctcactctgtcgcccaggctggagtgcagtggcacgatgttggctcactgcagcctctgcctccctggcttaattgaacctcccacctcagcttcctgagtagctggggccgcaggcgtgtgccatcatgccccgctaatttttatatatttttcttggtagaactggggtttgaccacgatgctcaggttggtctcaaactcctgggctcaagtgatccgcctgccttaaagtgctgtgattatcagcgtgagccaccgtgcctggttgataattctttctcatgtaggccacccttattctgtgaagcttttctcttcctgttgggctgtggccatacctgtaaagaggaataacatcccagtgggtttagatcttgtcttcactgttcagcctcttccatgacagaggtgggactgggtctgctgtcaaggatcacagaggcagacaccatgctaatggttcactttattggtgtcagcagcattaagattcacagctggacaaaaatataatgaaacagagctggccaagggctggatgagcttctaggattatatccccatttgttagtttggtttttctagctggtgagggacaaggcactatcaattcacaggtgccaactgtatgttctgttgagaggtttttgtgtgggtgcaaagttaatgaaatcagggtcacagttttcaaaatctctgtggtttggttttcattgaagtgtatgacagcgagtttcgtactttatttaaagcaaagtgcatgccctctatattc

SEQ ID NO: 39334 - DNA, 1004 bp, Homo sapiens
gaatttcagcttctttttctcttgctcctgaacatttagaaatggtttttgtttgcttgctttaataaaaagtagtacacctgagggcttaaacaccaaactagcatactacttcaatactagtacttgccaaaaaggaaaaagtctgagctttgttgtttccatttgcatacaacagacagcattcctaaatgttgaggaaattgacactaactggggagaagagttaggaactcaggtaaaagtggccactttgatggcggaacctagcaggtatccagggtttggccagggcttggccagggcttgggagggaaaggagcatccctgtttttggagtcaggaccattcagggggtgaacgaggcccaggccaggtgcctttttggagcctggaatattaaaaccaggatgccaaaattgtagtgtgatctcagtctttacatttaacaattatatacatttttaacatggaagattacagtataatttatttaggctaatcagaagctaattataggctatttaaaaatgttaatttgtagcacactagaggcagtatgatctgaagtgagacaaaatgtaaaggagtgcagtgaatgtttgcttatttccaggccctcagagtgggtttctgtagctggatctatgtcatttagcggtgatgtcaacagtctacatttgagactgtaggagatgactgagtggtccaagccaagtggcccacctattctgcagaaccctgtgtggggcctgaggcagtttggcatctggaatggaattaggcagacacctgcagggcccagcctggtagtcagctgaggcagggccctgagcctatgctggtgttgtcacacactacacctgacattgtcctcctgacgcacgcagtccatattttagactgatctctcaccacagctcctgtacaccgaaatgactaacagtagagagaactgagctctgggctgggcctggtggctcatgcctgtaatcccagcactt

SEQ ID NO: 39335 - DNA, 1060 bp, Homo sapiens
tgtgctatgtgtcgcaaaacccttcacaagtgttacctaattaacggcacaatgtctgacaggtggcagacccctcagaggcctgcaggaagagggggctcctgcacacacgccaccagctcagaacagtggctctgtgtcttggggttgtgttgcctctagagagaatgtgacttcgttggattgcaacagaaacagataaataacccaggatctgccctggaacacggggaatcattaagtgagattcattaccattcttagcaaccttgggtttttgccacacaaggccagttatggttagttgagcagaaatttgcaggagagaccagcctgaatttagacccagccattgagggagacctcattgtggggatttactggaaagactcagtcctccagtaggtagttgaagtctgggcaagcagcaggtgatggggaccctcaagacaagataatggggtagaggtagccctgggaaactgagaacagcccatatttgtgtgtctgctcatagctaggtctgtgagtaggtggaagagactcagtcactgaacatggatggggtggaacccctgccctgggagaagacgagggttattgtgcagttaccagaacaaggccttgcaaagaagaaatgaaaacacacttgggtacaggctagagagtaggggaggagggcagagactcaggaagctaaaggaagcctgttatcagccctggagcactgactgggagggccagtagatcttagggtagcagttaagagtgtgtatccctggtcgggcgcggtggctcatgcctgtattcccagcgctttgggagggtgaagcgggcggatcacaaggtcaagagattgagaccatcctggccaacatggtgaaaccccgtggctactaaaaatacaaaaaatagctgggtgtggtggcatgcacctgtagtcccagctactcgagaggctgagacaggagaatcgcttgaacctaggaggcagaggttgcagtgagccaagattgtgccactgcactccagcctggcaatagagcgggactctgtcaaa

SEQ ID NO: 39336 - DNA, 1050 bp, Homo sapiens
ctcctcctcccgggttcaagccattctcctgccttagcctccctagtggctgggactacagatgccggcctccacgcccggctaattattgtatttttagaagagatagggtttcaccatgttggccaggctggtctcaaactcatgacctcagatgatccacccacctcaacctcccaaagtgctggattataggtataagccatcacgcctggctgacaatgttgaattttaagtcctggtaaaatcgacacatgttccatgaattgactggaatagagaagtcagacaagagtggaatgatttcctggcaagggtgagaatgttgactttcaggttgccctgggatctacatgcctgaccgccctgcactagtccatgtgttgactgctggagctcatctagtgggacggctggttcgtctgagacaggtcagccaggactgaaaggttaaacagcagccagcaggtcatggagtcaacgcttggactcccagaactttgcaaatagttagagtctctttgaattttcaataaaaataaagacgtgatggtatttttaggtttaaaacatggagaaaggggcctcctttaaaaggtgagaaataacctacttgaatctgatcatatggacccatttgtcataagcaggaaaccaaataaaagccaagactagatagtgtacaaagtaatataatttttttttttttttttgagactgaatttcactcttgttgcccaggtggagtgcagtgacgcaatctcggctcacagcaatgtctgcctcctgggttcaagcgattctgatgcctcagcctcccaagcagctgagattacaggcctgtgccaccacgctgggctaattttgtgtttttcgtagagatggggtttctccatgttggttaggctggtctcaaactcccgacctcaggtgatctgcctgcctcggcctcccaaagtgctgggattataggcgtgagcccccacgcctgagcaatatatacatttttaagtagagtttatctggaagtttctgttcttctggtttatc

SEQ ID NO: 39337 - DNA, 1070 bp, Homo sapiens
cactactgcactccagcctggacaacagagcgagaccctgttacagaaaacaaaccaaaaaaccagttaagtagcaaagtttgggtagggcacagaattaaaatctctttcagaagagcacacatagttttaggccccaaagtagatagcagagatgagcatacagcaggaaaaaaaaatcgtcatatatgattgactagttagaaatttgtacctgttttccttaaagctgaaagttatttagtggctcctaggagatgcagctaaggttggatataaacatggactagagacctgaagacataataatctcatgataatcccattttccaacgggcagatactctcaatcatacagggagaatgtagcatttcacaggccaatatatcaaaatggagagaacatcctagtgtataacataatgtaaagactggaacaatccaagtgtccctaatgtaatggaaatattaaagtgattaatacctctaatacccaaaagtttaaacatgtcaagttaatgtgaactttgagctttcttttctctgaaagcacaatggtaataataatagtattatactaactctattgctttgatacagtgtgctgagagttttgctgcattatcatagttaattctggtaacagctctgtaagacagatttatcgtcatgcctgttttccaggtggaggaaccgaaacatagaggggttaaataatttgtcctcaggcctcccagctggtatttggttctgcattcaagctcttactcaataatcaatactgcctacctcctcccacatacatgcagaaaagaatttcgcaggttgaaatcacagttgtgaaagtggctttttcctggagcaataactgtcattgtagtggcgctaccacatcctcaagctccagggcttcgggattgtccagtcaccatcacgtgggcaggcaggttcaattatttctgtttttaagttgcttggcacatggaacatgatttgatcactgtcttaaattcatatgtgcacactgctttgtaatagggtttgaatgcagtgacaattgttttgaaccc

SEQ ID NO: 39338 - DNA, 1024 bp, Homo sapiens
aattgcagtaaagtatacataagatgacatttaccatatcagctattttaaagtgttcagtgatactggtactgttaatgatattgatcattaagtacattcacattgctgtgcaaccagcatcataatttacttccagaagttcttcatcatttcaaaccgaaactctgttccaattaaacaataactctccctacgcccccgcctcacccacctccacacacaccctgcccctggcagccaccgttctactttctgcccctgtgaatttgacacctctcaatagctcatgtaagtggaattatacaatatttgtctttgtgtgtctggtttatttcactagcataattctttcagggttcatccacgctgcagcatgtatcagaacttcatccctttttatggataaataatattccactctatgtgtataccacattttgtttatccattcatctgttaatggacacttaggttgcttccagcttttagccattatgaacaatgctgctctgaacactggtgtacaagtatctctgagtctctgctttcagttcttttgcacatacctagcacatacctaggggtagaatttctggatcatgtagtaattctgtatttacctttttgaggaaccgccatatgttttctcacagtagctgtatcgttttaccttcctgccaacaatgtacaaaagttccaaattcttgcctttctcatcaacacttgttgttttacttttttgataataattatcctaatggtgtgaaatggtatctcgtgattttgatttgcatttccctcaagcatctttcacatgttcattggccatttgtgtatcatctttgtagaaatgtctgagtcttttgcctggtcttcagttatgttgttttgctgctgttgttagcttgcaggggttctttctattttctggatattaatcccttatcagatatgtgatttgtaaatatttcctcccactctgtgggatgccttttacctctcttgatagtgtccttgatgc

SEQ ID NO: 39339 - DNA, 1050 bp, Homo sapiens
aaacgtcaagatccatgaggaatgtcaatatttctgagagctaggatgttaatggtttaaataataaaacctgttcttcattttctgcgaccaacaatacttgcaacattttgttttacagggtaaagaaggagactttgtgtacaaagaagtcatcaaatcacctactgcctctcgcatctctcttgggaaaaaggtgaaatcagtgaaagagacgatgagaaagagaatgtctaaaaaatacagcagctctgtctctgagcaggtatgcagctacctggtagaatgttcccttggttcttcctgacaagaaaagctgagaatggcccttctgagattttaaatggtgctaaatacacatactccttggcattaacctgctccaagtccgtgctttatttacgtagagaaacactgaattcaacacacgtttattaagcactttgggctgctcagcaccgtgcttggtgctgggaatacaaaatacagaacttgccttctgtgtacagacaagagagacagacatgtaaagaaatggttattcttcagtgcactaagcgttgtaaatttgaatacaaaggaaggattttattttctaaactatgccttgctacaaaatggatgttacctgaatcaaacctaaagctttttttttttgggggggggggtggcagtagacttgtcgatcatagcataagttgttctagaagcacatagccagtctaagaaataaactcaaagttcttcctgggtaccaggctttggtaataatgtttcagagaggggtgttttccctcatttgccttatctgtagccatgaaggaaggtatcatagaattgatttttcccccctggatctataatttcattgctagagaaatgactgtttctgtctaaattgcatgggtggagggagtaaagatagttggagagctgggcctcaaggtaattatgaccattcaattttcaagacactctcctccagcacctgtatagcactcattttgtagcctgttgaagttcctgtgtatgagctggttgtctgcttga

SEQ ID NO: 39340 - DNA, 1049 bp, Homo sapiens
gaaaatagtatgtttgctgtatatgtgggttttaaattcatgtttccttatccaatgccaataatttgtacaaatagaaatataagaatctagccaattttttttttccaggaatacacttttttaaaagtgcatgtttcctatccaagtagattaaatatcctctgactacacttccaggtattctagtaatcatggattgtacttgatctacatttgaagtccagccttgctactgggcttttgcgtatgctgagtctctaaacctttaagtattttgtctgtgtggtagacagattttttttttcttggagattccaagaatatctattcgagaatgagaaatagtatttgagtgcttaataaatagtgacattggccacgactttaaaagtaagcgaggatgtaagtttaagaggaggagaatattggttatagaatcaaatataggtatagattgatttgattgatttcgttgaaggccaagtcgctgagaattacaaaacaacacctgtccactctgatgaacttcttcattttgttgaaacccatggcaggactcgggccttgatggaatgcctggctcccctccgccttcacagcccgaccccgaacacttggacaagcccaagctcaaggccgggggttctgtagaaagtcttcgcagttctctcagtgggcagagctccatgagtaagtcgagtttgtcattgtagattattttctttggagttaatatctgacatatactgagcactaggttcaggcaatttcaaggtgaataagaccaagtcctgcccttcaggtgctattagagaatcagaccaataaactctctggactcagagtcgtgtttgtttattagtagacatgcagcagcagcagcccaaaacaggaggtgatgaattttgatcggagacaatagggaaagcatctcagaggaaggatctagagagcagggggaataagccagggagacaagcacatgaagatgaccagcaaaataaagggagtggggaagggaggggaattttatatgtgactgataa

SEQ ID NO: 39341 - DNA, 1022 bp, Homo sapiens
ctcatcccaaacaacaaaaacaaaagaagatttgccactggcctgtcctgagttttggggtttgtgcctcgtcttgccagccttactcttgctgagctaatacaagagccctcagcacgtgttgctgagggctaagaatgctcctaaatgctaataaaatttatttcatttgacactttaatattagctcccaaatttggaaagttggcaacataactgtcttcaagcacaagtcttacagatctccgaaaaacatatgacctaatctcaccttgtgaatggggcgtttattctttctttgcttctccttgatggtgccatcactcagaagggtctgggagccccactgccaaaacaacactctacctttctcctttcctcatagccccaaggccagagtcagcttctgttcgcataactaacttaaaaggtgtcaacatattccaactgtgtgctctctccaaacttatcttcgtgcgatgaataccttattggaagaaaagttgtgatcacactagttcattttgatctcatctattttaagataaattgttctcttccaaaagctcagggcagtaactgaggataaagtcgagatctgttgactctgaaacctctgcttttcactcaccttgttgatttcatgccgtgttctctcctctaggtaacagcgaccagtcaggatcccaggagaagctgctcgttgacagccagggcctgagtggatgctcaccccgagactcaggatgctacgaaagcagtgagaacctggaaaacggtaatgtcagcatgagtcgctgggaacctgctttgacaagtactgatttcaaagcacagttttctgcaaaaggacgattctattcctgtcatgaactcagcaatcatcgtttcctttctcacctctacaccattctagtccaagttagcctccctatctattctcctggctgctgggtgaggttaataaattctgtgtcaaatacctgcagctgtaaaacctaaattgtgtgtctcctatgccc

SEQ ID NO: 39342 - DNA, 1034 bp, Homo sapiens
gatatgtgatttagactttatgggagctaaacttgttggactcattcccagctgatatgctttcctttccatttttaatttataccactttaaatggagatatagaactttagttctcagaattgccaatctttacgtatattatatatgagcctggcaatttagagtcaaaaaatgaaaagtatgtcatgttattgaatttgaaattctctaagtttaagtgcatttaaaggaaaatgtgaaaatagaggtccatatctgttacaaaatagtttctttgaacctaaaaagccaaattttatttttcttctgcatttcacacatggtataaatataatactttaggctccaaacagtaatctaggaaatgaatgcataaaatatgacgttatcaatagaaattgttgacatagaaaaaatgatattcttgttcatagctacaagtttatattgtggggttggttggggacacagtggcactatattagagaaaggatagaaaatggaattcagctatggtaatccgttctgtaaacaaatagcatgaatggtgaaaagcaatctgccttgtaaactattttttaatgtagactagtcttagtatgaattgtctaagaacacatataaatgtggattatctaaatactgtctttcttcaaattccctgtcatcaatccaggcttaagacagtggttagttttgttttggagaaactggaaagaaagtggtcaaggtttttgagtcccaaaataaatagtatcttttgcttcctcagagggagactgaaggagcaaaaacagtagcttgacctgcagctgtactggtgggtgtccatgatggacaatgaaaacgcatcttatttgatggattgtagctgctagaattattaggagttgctgctttttttttgttttttggaaagaagacttgaccacaaattaattttgtcataaatatatttatttgtattacatagaaactcggctttaagcaaacagtgatatacataaatccctttttatcagaaataggga

SEQ ID NO: 39343 - DNA, 1607 bp, Homo sapiens
attttgttttggcagataacaggattgaggccaccttgttttctttgctcatgcatttcccaactcaaaaggctgttcttgtttgcttgtagagcagagatccaaggcctgagagaccctgaaatgtttgtagttatattcttcattcgtgctgcgagataaagagttttcccagaaactaaagggagggaacaggaaatatttgttaagatccataacctctggcttttgtctcctcttttcacctgggcaaaggatatcagtgataatattttgggtctcataagatgatgaattgttcaaatgtatttggagaatactttattcaagcatctttgtctttctttcctattccttgtggctgaagagaggcatgtgctttttatgcaagggtcttgaaatgtatgcagttaccatggtggcactctgtctctgacccaaactctgtcatagagtgtatgtttagccatgttttcaggggtgcttcctagcgtggtcaggagaaactgctagagctgaatttggttgctgggcaggcttctatcttttttttttttttttaatagatgcagggagtataagtgcatgctttttacatgggtatattgcataatggtgaggtttgggttcctagtgtacccattacccaaatagtgaacactgtacacaaaaggtaatttttcaatcatcaagccttttctccctccctgcttttgagagtccccattgtctgttatttccctctgtatgtccatgtgtacccattgtttagctctcacttctaagtgagaatgtgtggtatttgagtttttgtttctgagttacttcacttaggacaatggtcttcagctccattcctgttgctgcaaaagacatctgtatatagaccacattttctttatccagtcatctgttgatggacagttagtttcattccctgactttgctgttgtgaatagtgctatgataaacatacaagggcaggtgtttatttgatagaatgattcttttccttcccgtagatacccagtagtgggattgctgggtcgaatggtagttcgatttttagttctttgagaaatctccatactgttttccacagaggttgtactaatttacattcccactaacagtgtgtacatgttcccatttctccccatccttgccaacatctgttgttttttgactttttaatactagtcattctgactggtgtgagatggtatctcattgtggttttaatttgcatttctctgataattagtgatactgagcattttctcctttgtatttttgtgggctgcttgtatatcttcttttgaaaaatgtctgttcatgtcctttgcccactttttaatagggttatttgcttttttcttgttgagttatttgagttccttgtatagattctggatattagtcctttgtgggatgcatttttgcaaatattttctccctttctgcaagttgtttgtttactctgttgattctttctttgctgtacagaagctctttagtttaattaagtcccttttgtttatttttgtttttgttgcattgcttagccatatattctttgcccaggccaatgttcagaagagtttttc

SEQ ID NO: 39344 - DNA, 1034 bp, Homo sapiens
cttattgaatagggtatcctttccccattgtatatttttgccaactttgtttacgatcagttggttgtaggtatgtggctttatttctgggttctctactgtcttctattgctctatatgtctgtttttgtaccagtaccatgctgttttggttactatcatcttgtagtataatttgaattcagataatgctatccctccagctttgttctttttgcttaggattgctttgactattcagggtctttttggttccatataaattttaggattgttttttctaattctgtgaaaaatgacatcggtaattttcaaacacacatgctctacaaacaatttgtgtagttaatacaatcgtcacagggtcctgaggtgacatacatcctcagcttacgaagatgatgggattaagagattaaagtaaagacaggcataggaaatcatgagagtattgattggggaagtgataaatgtccatgaaatcttcacaatttatgttcagagattgtagtaaagacaggcataagaaattataaaagtattaatttggggaactaatacatgtccatgaaatcttcacaatttatgttcttctgccttcagcctgtccctccgttcggggtccctgacttcctgcagcatcttgcctaattgctctggctaggacttctactattatgttgaatagtgtagtgggagttggcattcttgtcttgttccagttcataggggaagttcttttaaattttctccattcagtatgatgttggctgtgggtttgtcctatatggcttttattattttgaggtatgttcctttgatgcctagtttgttgagggcttttatcatgaaaagatgttagattttatggaatgctttttctgcagctgttgagatgatcgtatggttttggttaggcttatatcttcatacttcatttgttttatggcataatgcgtttctgtgccaaaatatagcctctcttccccagattttttccctgtcaccttgtcagaatgatagttgactttgtt

SEQ ID NO: 39345 - DNA, 1989 bp, Homo sapiens
cacaaaattgtttaaggaattttaaaaaaaattatagaaaataggatctatgttgaaagaattataaagtgcattacaatttgagacttaaatttccatatcttttaattttacctaaatttatatgaattttaaaatggtgattgttggccaggtctggtggctcacgcctgtaatcccaacaatttgggtggctgagatgggtgggatcacctgaggtcaggagttcgagaccagcctggccaacatggtgaaaccccatctctaccaaaaatacaaaaattagccggctgtggtggcagatgcctttaatcccagctactcaggaggctgaggcaggagaatcgcttgaacccgggaagtagaggttgcagtgagccaagattgtgccactgtactccaacctgggtgacaagagcaaaactctgtctcaaaaaaaaaaaaaagtgattgtttttcatgtttggaattatatgacatgtatgtattaagagtctaatttatttttcaagtataaatgaggtaaatgcaaatcccagaagactgttttctatgcacacacaaaactacatttcttttagtacacagggaaaggtaaatattcaaattctttccgttgggtgacattttgttcacatatttttgtagggcatccatacttttgttttacactgaacaaaaggacagtgtgagggacagatgtcagagtgaaggtgtgaatttgcaccaaatgccaggtttagggctcagaatagcatttttttgtacgtggggcgccatgaacgcaaagacttccagcgggatgggcgttgagcagggattgtctaagaggaatcaaattgccaaatgtctgctgccagattattcttccctaaaattgatctccctgagaacttgtcttgcggcccaattcccaccagcttccctctgtcctccccgactttataaagaagcttatctgactctatgctggtgtcaaacacctccaggtaccaaaggaagaattcaaaatcctggcatggagaaagtgaatgactagtgactacagcaaacccttttgcaggtcacgtggctcctattcttggctttcaaccaaagtgaaggaggatctaatctagttatcccctcaggtagatcaccaacagatcactatgggatttagaaagatgttaaagaagcgtgtgacacggctataactaaacactctccattcctgtctgttaaagcgaacaaggttattttatatatatatatatatataaaaatataatgaataaataggaataaaattgaaatcagtgaaatttacttatagacaaggccctattcactgtatttatgatcaaattccacttttgattttaattatttgtgaaatgtgtaaaatctttatattgttttgatcaactgtgaaacaaaggtaatcttaataataactcaaattcaggatatatagtttaaacttttaaagcattatggtcacaagaatattttttaaatgaattttactttacctacatagttttgtcatgtagaaatagaacagagagatcaatacagtaatttcaagcgtgaagtataatctgttagaacaaaaatctgtggggggaatggaatgaaaatacaagctgaaaaatttgttactcagactttcttttcagcattttttagaggatttgtgaatttcagagaaaaatgagtgcatgaggtcaggtgcggtggctcacgcctgtaatcctagcacttcgggaggccaaggtgggcggatcacctgaggtcaggagttcgaaaccagcctgaccaacatggtgaaaccccgtctttactaaaaatacaaaattagccaggcatggtggcaggcgcctgtaatcccagctactggggaggctggggcaggagaatcacttgaacctgggatgcgggggttgcagtcagccgagattacgccactacactccagcctggagtctgacagagtgagacttcatc

SEQ ID NO: 39346 - DNA, 1025 bp, Homo sapiens
taaggctcgcagggtctgtccagggcacctgtaagtaagccatcatcactgacattgtgttgatttaagaattgaaactccaggcctggggcaacttgccgagggttataaagccattacatggtagggagtggggtcttgagccagagctctggtcatctctgatgacgaccaaggcccacccccctccatcccatccggaatccagattgcattggttgagcgtatcacccctctcttccctctgttttccatcctcatggtggtcacagcagctcagcccattgccctcttctgcaaggccgagcccaccctcctgggctgcagccatagctgtggctgtccttacccgctgtggatgccgctgtgggacttctctctttttctctccacaaagaaccaaagaatgttctttgtggcacatttttttttttttttcaaccagaaagtactacctcaagcctcctggaaaattccttattatttcagaaacatcactgtacttcttccgttgactcagcacttctgtctccttttcaagtgtggatttcagacccttgtcattctatggagcaaatgaaatacagtcttgaggagaagcattacgtaacattaaatttcatcacagctctttttaagaatactttgagaatttcagagtgttttcaagggaatctctttgacgttagttcctcctcttggttcctcaccagataaaggaaatctccaactctggggaagacatgtgagggaagtctgggagaatgtcgtgcattgacacccatgaacttgctgacatctggaggaatgagcagggctgagagaattccggtcctggtcctgcctctgttgctcccaccacgccagggaaataataattcccactcagcccgctccacgggatgtcgtaaggacaaaatgagatgtgatatatgtggaaacacttggaaaattcagacgttaaagtgactctagaaatgtaggtgtcatcatggctggaaatattagtatagctttgagagaaa

SEQ ID NO: 39347 - DNA, 1042 bp, Homo sapiens
agagcaagactccatcttaaaaaaaaaaaaaaaagcatacatgcatttaggcattaagatgctatagaccattatcttttatagtctgtgtcacacttcatgttatgtatcaagaggagaaaagcatctcagcccaagatttgattcctgattttactactcaatagctagatgatttggggacaactgcataatatctttgagactacttagatatacaaatgaggactatgataatgcctacctcaaaggttgttgtgagggttaaatgaggcaatgcaaatgaaaattgctttataaagactaaagtgctatattaatttgcctttattgaaattacatactattaaaatgaccagcgaactaccatttgtgcagagtggttgaagaatatggcatgctgattatttgaacattctggataatagaagtatagtacatgtctttctggttaaaaagaattacaataaagtattcttaacatcaaagcttactaacacaactaatcgtttggatgagatttcaagatatttctatatattttgtgggcagcacttgaacacttgaatagtataagatgttgaggaaaaaaatgcttaggaaaagaatacactctaactgataccccaaaccatgtatgttaaaaaagtagttccttaaaatatacatttactcattattgatcccttgcttataaaaaatgtatgaattgaggaaccatcattggatatacagaagtagaattatagaatttgtttttatgggtattttgaggggtagaaaacaagaattattttattttgccctgttcagacaaaaatatcatgttagctttttaaatagtatatagtgcaattggaactcaatcttaagacatttttgcttaatgaaaatgctaccatgacagatcttttttttttttcctaacaggatgtatatgattctcttttcattaaatttgcctcaaagagtttcaactctcaatttttagactaactttactttagataaaagggtttttatactattatttcttttttta

SEQ ID NO: 39348 - DNA, 1034 bp, Homo sapiens
agctgagattacaggcgcctcccatgatgtccggctatgttttgtatttttagtagagacggggtttcaccatcttggctgggctggtctcctgacctcaggtgatccaccggccacttccaaagtgctaggattataggcatgagccaccgcgcccaaccttctccgataattcttaatagtttagaaagcactgtcagctgggtgttgtggcatgcacctgtagccccagctactcaggaggctgaggtgggaggagcacttgaacccaggagttcgaggctgcagtcagctatgatcacaccactgcaccctagcctgggcagcagaatgaaaccctgtctctaaaaatgaacgaacaaaaaccaaacaaacaagcaaacaaacaaaccccacaaaacaacagcaacaacaaaataatagaaagcactattttatatgctgctttatatactttagttcttacaaataaatccaaaggtcaatacattgtaaaaacaaagaactgtgtcaaaaaacattcctaatatgttattgatttattcagcaagcttttatggaacacctgctatgtgctaggcattgtggtatgcattgggaatacaaagccttaatgattttaagcacctgttctgaagggaagacagtaagaaaagtgagtgttcagagtacacagtgataaggtatgtgatggaaaatgtatccttcgaatgttgtgggagcgtagaggggtggtagttggaataaacgtgaaggtcttcccagaggaggtgatatttgcattgagttttgaaagacaacgaggagttgttcataggaaggagggaaggaaggcagttcagacaagaagaacaatatgtgagaaggccagtgtgatgattttgagaacaccattcaacatgtctagagcctaggggatgaagagatgggtgctaggagggtaggagtggtggcaaatgatgaggccagataggtaagcagtggcaagtttgtaaagagcacaccagtgtactccattaaggggttgggagttt

SEQ ID NO: 39349 - DNA, 1133 bp, Homo sapiens
ctattcctccaccctcataggcgaatgttttccttcctttacttttcttaaaaatactttttaccagcataagatcctaaacatgacccctttcctaggagagatggcttttgcctgcttgtgaggggggtgggctttctactcctgccctggcagccgccaccctttacctgggatggggataggtgggtgggaggctttcttgccccacccctagtagcatatggcttttgcctcatgctgaagcagggtcaggtgtggaatgtgggcaggtttctgtccctccccagcaggagatggcttttgcttgatataaattaaagaagcgttgggatatgggtggatttaataccacctgttatggactgaatgttctagtgtctccccaaattcatatgttgaagcttcagcccccaatgtcatggtatttggaggcagagcctttgggaggtgattaggtttagatgaaatcatggagatggagccctcatgatgggattagtgcctttattagaagaagaacagacaccagaactccctctcttcagcatgtgaggacacagtgagaaggtggccatctgcaagccaggaagagagccctcaccaggaattgaatctgctgggcctttgatcttggacttccccacctccagaatgatgagaagtaaatatctgttgtgtaagccacccggtctatggtattttgttatagcagcccatgctgactaagacactgtccctcactggcaactaatcatcaccttgtactcgagcgaggcctgaagtgcagatgggcttgtcaggaaactcctgtcaccaactcaaacctcagcagggcctgtgccctgagcacagctcactcaggcctttggcactgtcctcagagtttctcaggggagttcagagtcctgtggaaaaagagtaggcagtagggacagacttctcgtgtttggggatctcagaagtcttaatctgtcacactaaaccacacggaatttcttaaaaccttagttttttgttttttttttttttctcacctgcttttcttgctgccacctctttctcccatacactgtcaaagctgaaacagtgcttgtgtcctttcttcctcagaggtgcgtgtcaccctttga

SEQ ID NO: 39350 - DNA, 1076 bp, Homo sapiens
ctcaactctcttttctctctacagtccctaaaactataatacaaggtgtcaccagagaggaagagcaattttttttaaaaagcctataaaattattactaccagcaccatacattgccagtgaacctgactctggtgttaaaactacttctcaaatagtatcccttcatatctatccttatgaattacagattatcagctaaaatacaaaataattccccaaagaaagttgggagtattgtatactaattaatctgcatcaagtcataaaagaaattgacatatgtaaggtgatgacattgagtttttccaagctggcattttcaagttttatgaaaggtacaccagtttatcatatacattgatttaatgtgattattatatcagctatctattgccacaataataataatgctgtgtaacaaacaaccaccaaagcccactggcatacaaaggatacatcgattattgctcatgatctatgggtcagctgggcagttcttctggtcttacctgggggacttacttatgtgttatgactccccagctggttggtctgggagtagttggctcacctgtacatggtccttcatcttccaacagacaaacctaggcttgttcttttagtgatgcctgggtattatgagagtggaaaggcagaggctatatgaggcctaagctcaaaaccagcacaccgtttcttctctgcacaccacagcaagccacaagtctagcccagattcaaaaaatgaggaaagagactctgcttctcaatgtcttatagcaaaaagtatggatgtcggaatgggtgagaattggcgccattttaaaaattggtctcattctggttactctggctgcttagcacattccctaaaacttagtgacatgaagctatcttattttgttcacagctttgtggtttaggcatttgggaagggctcagcttggcagttctcatttgggagtcacttggctcacccacatggatagcagttggtgtctacacatggcttttgcagcatttgagtagtcagactttcagcatgacaggtggcttccctcagaatgagtgtc

SEQ ID NO: 39351 - DNA, 1070 bp, Homo sapiens
aagctggtctcaaactcctgaccttgtgatccacccaccttggcctcccaaagtgctgggattacagaagtgagccaccgtgtccagcccagaagaaattttaattggcaagaaacttgaccattacgaaatagaatgtgtccttcaccatttatgctgaatttcagttgtgccatctttatatttctgaggcaatgtaaagcaaacctgctgtagaccaggatactgaaagggccattctatatcaggcaatttttgaagcctttattacaatctgtgaactaatttaatatgttataaatgaatactcaattaatagtcatacattttgagtccacaccccccctttgccatttatatgagataaaatataactgtttcattttcatgtctgtaaaaatcttttcggcctttccaggaacccatctggatgcatttacacgatgcactttccatcatttcaaaatttattaaattttatagcaccttccatgttatgggcgctcaataaattgccatcaccaagttaaatgatggggtaataaggacaggactctggttgttcacactaatgacacagtttgcattgatgatgaagtccccagaacagagggcaggaggagccacctgtatgaggagtgtgtggggaggagctgtcctttacagcccgctgtaaggatcatgctgtacaaataaacctaactgtgtgggtggtcctttctctgcccccttctgcttttagagacttagaagagctgccaaagtacctataggaggtgtttgatttaaaaggaaacacaccagttatgccttcttgtaggggcatgtgagccagtagagtttgcagctgcatggagagatgaagcaaaactctgaacattcaactgcattaaaaaaaaaatcatgccaagagggcctttgagcaagaaattcttgcagatttatgacacccgatgcctgaactctgtgtgtgacatcagggttatggctctgtaagctcttaaccctgcagctgacccagtcagcttctggctgtactaggggttgatgcggttcactgtggttgtttg

SEQ ID NO: 39352 - DNA, 1018 bp, Homo sapiens
tacacctatggttttcaaatcacactgtgaggcagagtcacttgggaagattttgcaactaccaatgcttggatcccaccaaaaatggattatcagcttctctgatatcagcttctcctccaacatttggaggatcccaaatgtggtatttttgaagaagtttcccagatgatgctatggtacagttaaggctgagaactagaactagaagctttcagccaatttccctggtatgtggctagtattgcttccattgtacagagaaggtaaaaaggggtaacttgccaaaggtcatttggccagtaaatggtaaggtggaggtttcaacttagttctaattccaaatttagagcttttttcatagtaccacactacctccctacttccctattttgggcaaaactcactttgctaggtattgaagggaatgttgtctgagtcggactccagtcaggaaacagaaactcgttggctattgcaaacagagggtatctaatacaagaggtttggtacaatgatattgagagggcaagaggaacaaaaggaatagttgcagaaggaacccaaaggaaggtatgttcccagagatcaggcaacctctaggatcctgggatggaaacttggactttgcatctggggctgcactgctagagatgctgcttctggtgctcatgctggaaccactggagccaggtttctcccagaccctcagccccatgtgaatccaaaccctgtttcaaaaggaatgtccatgggaaaatggggtttgatttacacgttcagttttcaggctacatttgctagaatgcacctcttttgtatgtgcaagaatgccaataggtgctctgaaagctgaattctttagctattcgtcatatcctagtggttagcatcagaaggaagccagtacagttgggtctcggtatctgcaggggattggttccaggcccacctgcagataccagaatccaagcaaacttaagtcccacagtggactctgagggacctgtggatacga

SEQ ID NO: 39353 - DNA, 1053 bp, Homo sapiens
tttgagggagagtcagatggtcatatgcacacatctgttatatgtaactgtcttacaccaatcattattttatttacaagatctagctatttgagagagattgcaaaaactggttttagctgcttgtgtttcaagtcagaagtgcgtgaaggaggtcaggccatgatcactacagtgtggaggccgccggctgactttgttgaggaaaatgaggtccagcctgtagaagggagctagggagtacagagcccgaaggaaggtggtggggagttttctcgtctgcacatccctccctctgtggttatcccagcaaagtgggaatattatttaaaccatgtactgctttattttgctggagcatttgatatgtttaaaaagtgtcagaccatttcctcggcaggcatatgcttgcacttagccttaattcctacccttggagaaggcaaatacagcgtggccctcgtctgtatattttaagaggtttcttataacaggcctagtctgtggcaatcctagtgagtagtacttagtgggtttacaaaccactctgtcgcggtgatgacatactctgtgtggttctgggagctaaataaaacaccggaaatagatattaaataaaataaagaacacgcctatgtaattattgccagaaatgaaattttgcaaccctaaatttgaatgtggtctaggcacctgaagattcctgtagctaaacaaacatcatttcccagattaaaatttcaggaaagcaacgtctatcaagtgtcttatttgggtaaaatattttgaaaatgttttgactgatcacagggggaatgggaagcagatggtaagtgagacaggtgcccctaaagtccacatccccttctgaatggctccatttcctattacattagacagcaaaggccactggcccaggccaatgtcacttatgttctgctaggggacttttggccaactcagaagatattggtccttactgtggaattgttttgtgattttaaaatatagatctctttaaaccctgaaaaaatatatttttaaaaggactaa

SEQ ID NO: 39354 - DNA, 1121 bp, Homo sapiens
aaaaggttcagggatggatcctctccaccctttcgttcacctggtaaaatactatttcaaggactaatttataccatcgtctcctttaggtagctttctctgacccactttgtcactgaggcagaattgtttcctcatctctgtatgacttagcactgtttatgtacttccatgtcacttttttaaaagcaagaatgaaaataacttttatttattgtgcaatgtgctagacattaaactaaatactctacacattttgtctctttaatcctcaaaacagccctgggaggtaaggctgttgtcctatgttacaagcgaggaaagtggggcttaaagagaataagttacttgccccaggtcttacagttagtgaatttcaaagatgcagtaggaacccagttctcgcctgttttcaatatattcttttcttattaagataaaatttgcagtaatgtgcacatatcttacatgtacagtttgatgagttttgataatacacacatctgcttaaccgttgatccagtcaagatgtagaacatgtccactgatcagaaagttacctcattgccccttccctgtctgctccagccactcaggattagggctgcctgttctttatttaaatcaattaatttatttcttattttattttattgtttctctcagttgaattttattttattttttcctgcttttattttagatacaggggtacatgtgtaggattgttacatgggtatattggacccaagtagtgagcatagtacccagtgagtagttttgcaacccacgctcctgtcatttcctgcccctgtagtaggttgcagtgtgtattgttctcgtgtttatatccatatgtgcttaatggttacctcccacttacaggtgagaacatgtggcatttggttttctgttcctgtgctaattcacttggcattatggtctccagctttgctgcaaagaacatggtttcattgttgttgttttttttaatggctgcatagtattccatggtgtatgtgtaccacatagtctcgatccaatcctccactgatgggcacctaggttgattccatgtctttgctattgtgaatagcatggtgattaacataagagtgcat

SEQ ID NO: 39355 - DNA, 1876 bp, Homo sapiens
gtgtgccgtggtggtttgctgcacctatcaacccatcacgtaggtattaagccccacatgcatcagctatttttcctgatgctctccctccctcccccaacaggcccctgtgtgtgtattcccctccctgtgtccacgtgttctcactgttcagctccacttataagtgagaacatgtggtgtttggttttctgtgcctgtgttactttgctgaggataatggcttccagcttcatccatgtccctgcaaaggacatgatcttgttcctttttatggctgcatagtattccatggtgtatatgtaccacattttctttatccagtctgtcgtctgtcattgatgggcatttgggttgattccatgtctttgctattgtgaatagtgctgccatgaatatacatatacagatatctttataatagaatgacttatattcctttgggtgtatacccagtaaagggatcgctgggtcaaatggtatttctggttctaggtctctgaggaattgtcacaccgtcttccacaatggttgaactaatttacattcccaccaacagtgtaaaagcgttcctgtttctctgcaacctcaccggcatctgttctttcttgagtttttaataatcatgattctgactgatatgagatggtatcttattgtggttttgatttgtatttctctaatgatcagtgatgttgaactttttttcatatgtttggttggccgcatgtatgtcttcttttgagaagtgtctgttcatgtcctttgtccactttttaatggggttgtttgtttttcttaaagccatttgttcttcaacaggggactcctgtactccaagtaacactttctgctcccagagccacttccctaccccctgcatacccaaaatactggggtgatattttagatttccagtcctccagatacataaggacaaaaatgtgcaaccttttgcatcatataacaaagttctttctttcttccctaacagatatcacacatgatgaagtctgatagctagtgtcgggtagttgacagaaaaacaaacaaaaaggtttttttaaataaaaaagcaagcctgtgggtcttcagaataaaatcactttgattcagctataaaaatatgacttagaaacattgcagtgagcattgccaaatacagctcctctgctaccgtctgtcctggagctgcacacctgtccctgtaccgctgagcccacgctgtaggatcttggaattggggcgtggacttgttcattgtgagcacacagaatgtggacatgattctgaatgtgtggctgtgttggaacttgcccaatctatttcaagatgataaattacatacttccggaaaggctattctgttttccccacagaagatcttaactactctttgtcttctccttttatagaactgaaaatttaattttgtctaaatgtgcttttcttcatatttacttacattctcagcattacagtatactgtctacagaaacacagtcctagtttttcattttaggaaaaggtgattcattatggaacaaatcttaattttaatattaccatgctttggtagaagtcagtgttggaaaactctagaaagtattgccttggaataaaaatatcaggtgggggaaggagcaaggatagctgggggagggctgagcttctatttcctgatgaattgaagttcacatatggatggggtgagatcatggtgtaatacacaaaacttgggtcaagagggtagaaattaaaggtaggaaaacattttagaagcctctgttgctgaaatatttttgcattgtagtggatattaattattccgatgttaattattcgctaggggtctgtgttagtccattttcacact

SEQ ID NO: 39356 - DNA, 1022 bp, Homo sapiens
tgtatgagtggggggggtcatgtatgagtgcggggatcgtgtatgagtgggggggatcgtgtatgagtgtggggatcgtgtacgagtgcggggggtcatgtacgagtgcggagattgtgtatgagtgggggggtcgtgtatgagtgtgggggatcgtgtatgagtggggtgtcgtgtatgagtgtgggtatcgtgtatgagtacagggattgtgtatgagtgcggggatcgtgtatgagtgcggggggtcatgtatgagtgtgggggatcgtgtatgagtaggggggtcgtgtatgagtgcgggggtcgtgtattagtgtgggtgtcgtgtatgagtgtggagatcgtgtatgagtgcggggggtcgtgtataagtgcgggggtcgtgtatgagtgcgggggtcgtgtgtgagtgcggaggtcgtgtatgagtgcaggggatcatgtatgagtcgggggttcaggtatgagtggtggggtcaggtatgagtgtggggatcaggtatgagtgtggagattgtgtatgaatgtggggattatgtatgagtatggggattatgtgtgagtgtggggatcatgtatgagtgtctccaggactgacagaatatcccctggtggtttaagtcaagtggggcccagagaaactctggacagatagagggtgatgctcttagttcctctttttacccataaaacaagaggttcaacagaacaatacattgtttgcaggaacaatatgttctgaaattataagctctgaaatttattcttgaaaagatctttagggccccagaaaggtttaggctcccatatggtttaggggataagctctatgcccggaggtgccctgtgccagcccactcccaggcaacctgtgagctaggcctggccctttacaatttccttgcacccccttggagcaggtgctgaccagaacagcttgatcaccttcccctgtcactgggagttctgtgatcatccacgctccatcagcattctcttttgacaagaagcttgttttg

SEQ ID NO: 39357 - DNA, 1024 bp, Homo sapiens
gtaattgttcctgagatgataaaatagcaaactgtttcaagatataggaataataaaattacaaagatgccataatggatcttagattttcttaaacggtctgctggacccatatggtagttgcaaggtagaatgagttttattctctttctttttttaaaaaaaagtattttctctttttctttgtaatatctctaagaaagaataaagttataaaatattaatccatacaaatagctagaactgcttcaaatttataaaacctaaaaaactaaaagtgggtccaatggatgctaatagtatattgagggttaagatatattactgatatctacacttacatacaaaagcatttttatatataaaatattatgtttgcatataaagtattagtattcaaaattccgttgtaaaatgggttcattagaaggcggcttacaattattatgctgatccagcaatctccaaatgaatgagaagtagtaatatgaactgagataatatttgtatagtgctttgcagtgtctggcagtgaaccattgctcaataaagttgagtccttcctacctacacccccagaagctaatttccctttagtattgattgtttaatgcctacttagtctaagggatcaggaagacatttaaagaattgaagatgatctctgtaatctaacagcttataatctggttgtgtcatgaggtttgatggaatcaaagacagagagcacatgcttctgtgactgatagattcttaagtctaagtgacatgcattcatccaagtgtttactatgcatcaaatttgtcttgggctctgtgctgggtgctgaggctgtcaggccacagaatgcacagtctatgccctccgggagtttagtccagtcaaaggacaggctggcaaacagattcatacagtaagtatgctaagtgggctgctggatgctatgatgaggatgcacactcaacacaaggagaatgcaggaagctcaacttgaccttttttccaggtgcaagtcctgaagtt

SEQ ID NO: 39358 - DNA, 1109 bp, Homo sapiens
acgatcttggctcaccacaacctccgcctcctgggttcaaacgattcttctgcctcagcctcccaagtagctgggataacaggcatgcaccaccacacccagctaagtttgtatttttagtagagatggggtttctccatgttggtcaggctggtctcaaactcccgacctcaggtgatccgcccgcctgaacctcccaaagtgctggcattacaggcaggatgcttttttgacacccccacttctactcagctttctttccttccttcagaaccctgttcagggtgtgaaggacaagttaagccatctccgtctctctcatactgcagcccacctgttctttaggtcataaccacagactcacatctttaaagaaagttagcaaatcaactcagaacccttacatgggtctttctctcctgctgtctcatcaatcagagcaagttcaactttctactaaatttatctatatttatatatgtatgtttataaaaggtatgagttaggtgtgcaaaaatgtaacattatgggttaaataaccttatttaacccataccttacatgatttaaggtattactaaacatgcatcctaaggtaaataaacccagcacaggaactgcccatttccactgatgatagaaaggtgtctgtttctaatcgtttagtctcagcttctcaggggtctccccttctcatttctttcttcctttctccttccggctgatccaagttcccagggggcctttggggaacagacccttgtccaggcgctgtcctctgtccaggattgtctcagttcactaggcctggtcttgggattcagcccattgcttccacgtctgaattggctggccctgacccctccagggtctctggtgaagcccagaggccctgcatccccccttgccctgaccccaggcacctctagcccttttttcagagattcagaaaagttccagaaatgttcttatcatgaattgccccaggatcgtgtgtctgagaaggtcactcagtcatcaccactctgaagctcaagctctaatgagaagctggacctctctctgagaggtagagcctcagagctcacaccctgggaggccagctcctt

SEQ ID NO: 39359 - DNA, 1095 bp, Homo sapiens
tataaatggaattagtgcccttataggaagagatacaacttgctcttggacttcccatcctccagaactatgggaaataagttttcattccaatgcagtattttgatgaaaatgtgtcataagtggtgctgaatgttttccattgtactgcattaggagatacataaggtttggtttctctttttttgcaatattgttaaatacagtcttaactttaagtatagtcttaactttcatactctcatacgagagttcagaaatcttacccgaaactcgattctacctttgataaatgaaatatggcagtggtccccaacctttttggcaccagggaccagttgtgtggaagataatttttccatagattggggggtgggtggggaggatggtttcaggatgaaactgttccacctcagatggtcaggcattagattctcacagggaacgtgcaaccattaatatatcccttgcatgtgtagttcgtagtcttttctatgatatgtagtccaatttaatttgcaatggtttgaatgtttgtgtcctcccaaaattcgtataccagaacctaatccctaatgtgatagtataagagttcacgctcctatgagaatataatactgccgctgatctaataggaggcagaggtcaggcagtaatgctcactcgcccgcccaccactcacctctttctgtgcagcccagttcgttacaggccacggaccagtaccagtccatagcccaggggtgggggatccctgaaatatggtatatagaactaaatatataaaatctaatatatacattgatatttatacatgtaatataaaagattatgtctttcaggcttctataacaaaataccatagactgggtagcttataaactacagaaagttatttctcacagttctggagggtggaaggtcaaaaggtcaagatgctggccgattcagtgtctggtgactgcctgattcctggttcacagatggtgccttctcacatggtggagggggcatggcaattctctggggtctttttttataagagcactaatcccgtttatgcctcaggacctaatcacttccccaaagtcccac

SEQ ID NO: 39360 - DNA, 1042 bp, Homo sapiens
gagaccccgtcaaccggttcttatccaactattttttccgtcgctttggagactggagaggggaacaaaatcacatgatccgcacccccagcatgaggcaggaggagcgctacctggtaagtcctgtcgcatgcaaaaggcggtctccccactgcctgaggagtgggccctccaccagggaaggttcactcttcccttcccaggccttctccttggcgcctccatggagcgtggcgcagagagggtgcttccgcaggaaggaggtcttggcgagagaaactggttccgggtgacccagatcctaatgaacatttcctcaaattattttctgattttgctttgctcagttgtctttagtgctaggttttgggacccagagcgttaacagtctttcctaaggagtcctgactagcactgtagtgcttaagaagaacaaaggtgttgggggggtgtctgttagagggcggcagagccccttctcatccctcagcccattcagttcccatgaccactctgggagggggaggtgttttcagatgaggaccctgagattctaaaggttgtgggatttgccacagtcacctctcaggtaagggcgcaactgcgaccgactgtttcgggtttcctgccttcacagtctgggttctttccaccacagcgcgatagaaccctgtcattgcaccagtaattgtttgctttctctggacttgttttgggaccctcagctccataagggatgttagtctcgagcccagtaattatttccgcagcacagaggttggtaacaaaaacggagggcggagttgcgcgtctttctttcagcactagaacgaaaggtacatttcccatccctgtgttgagaaacatgtactgaggagctgacagcctggtgcccaggaggctgaaatcctggtctctgtgtctgagagagcccttggggttcacccggacccatcctgggctgttgtcgggcacaagcaggaaagtaggaagtgttgaggatcagtcagaggtgttgttcccaaagctggaagatcgccca

SEQ ID NO: 39361 - DNA, 1061 bp, Homo sapiens
taaaggaatcctaggatttgcaggaaccccaaagaggatgaggactctctcattttacaggtgtgggaacgggcctgggattcggggtggggtaaagtccctgccaggaggagaatccagacctcctgattccacttcggtgctgtttgcccactcagaccttatgttcctgaagggtaaagggagaagaggactgggccgagtcccacgcttttgaagcagaatcatttgatgtaacatcgtctctccatctttacaaagacatcgctgttacagcaatttgttttcaaatattcaagcatcttatagctataccttattttctgggaacaactagcttttctcaaactttctatttctttccaaactcttcttcctttgcatttcctggaaaatcatttttaaataaattagtgctcgcatagatgcaagttcaacttctagcagccatactgtgaaaaggcagttgtcttaggctcatttctttttgtccagagctggaagctccccagtgtggaggtggctgcctcctttttgggggtgggagtcctctgaacccaggcacacttggacacatcccagcacctgagactctaatccagctcatgtccagcctcctttatttccagggtagggaaatacctggcacacagaccatatttaatgaatggtggaaagctttttctaatgaagagcaactgttgtcatctccagatgagggagagcatcttattcctgctgaagccactcccttttccagtcttggagcttccatgaaagtggatttcttatgctgtcattttcaccctgctggttacacatcaagttctcaaaaatgtcaaattgggctgctgccctaaccattattgccacttcactaggccatcctccatttgaagaataggaagaaaagggagaaaatcttcccagagagaacactgcctctgtgacactgtttattcggcttggctgtaaaatgtggaaagtaatgcatgtttaaaagaaaagatgtgtaatttacagcttcttaattcataaagaattcagtgaatcatgttggc

SEQ ID NO: 39362 - DNA, 1048 bp, Homo sapiens
aaggaaaaagacaaagattatcatattaacacccctcggccccgcatgcacctgtaacctacgtgtcctttttgataacccaccacttccagagtggcttcattgtcaaccacctgtgtcaccagagtaaattcaagtgtgtcctttcttgaggtttctggactggatgttgtcttgtgtcctttcccatgggtgtggtttccctggcagtcagttcctcagtgaccacatttaacaaattgtaataaatgcagactagaaccataattcacagttttgcaatacaaaggaaagatgaaaaacaactggaggcttaaagtcctgtgagatacccattttaccttgctttaattacggcagcagatgtaaatttgatttgccccaagcctaggtggtctttggctagggctcattcacctctgacacagagaccccacatctccctgacttctgttgaagaagtactgggaaggtctttgaatggaccctgagcacacttgacattggaaaagggagaaatctttgactaagaccctgtactttgagcagttttcagtccatccattcagctacaaatgtggaagcaaatatgccaaggtccttgaaaagaatgttgatgcttgattgcacgatgtttccctttaaagttttggccttgagaacttcaaagtgatgacactgttcttcctgccatgcccgctcttagctctgtgtggtcagtaagcagcgactcttatttttcttttatttttggaaactaagttggagtgagggcataaaccccctcacttgaattgttttggcttaagatgtatctgagattttaactttgttatttccagctgcttccctcattaaatttaggtcattaatttcataaatcagcatatgccttttacttttatgtgcaaagcccaggtgttaaagctcgagtaactctttgtttggaatggtgggtttcgtatctggcccatcccaaatgggcttattgtgcctcacaatatttctttccttccctaagtcctttggtccttcatctttatcaagg

SEQ ID NO: 39363 - DNA, 1033 bp, Homo sapiens
catatgaaaaagaaacgaaataattaaagtaaagttggcattatgtctcacttatccagaaattctttatctgccatcctgccatcagacacatagccataaactcagaagtagtgtaaaggaccagaaagccactacggtagatgccacagatattaaatatccaacatcgcaagctgtgcttacaacagggagagcaacgtgcttctctgcctgatgctgatgcttcctggatggctgtattgagaattccgaaggacacttcccatctcaactagagtgtgtcatcagtgattcatgctagacatgagcatggaatgggagaatgatggtatctggccatctgccactttccaatccattaagcctcactaaaaagtcttgtttgactcctctggttctggctcagatttttttacaaggttggaaaaaagccttttacaaggaagagtgtatgaggcaataaaagttaacttagaccacatccattccatttaacccattaaacttgtactctgattaccgtggtccacttatgggtcaaggatttgggtactgcctcaatggtgaatgacagtcatttttctctctcccacttctaacacagccagcgtaagaaaccgtccttttccataatatccatatttttagcgtgtgaagactggctccaaaaatcaattttaagtccacattgaaaaagagctttttatatcatcgtgttacattgcgtcatgtgcagagtaagatgagctataagaagtccaaagttccacagtggtatattttgcataataccgtttgtgtttccattaaattgtattgttgttttgactgacatagcacattacatgtttctgtatttttcttcctctctgttttctctgtgagttagccagagtcactatttaaaaaaaaaaaaaaaaaaactatcagaatcaccaggaatggtgtttttgaatataagattaagtaaaaaggaatgaaatgctgaaggtataataaagatggcataatcttaacaggtgagtggcag

SEQ ID NO: 39364 - DNA, 1090 bp, Homo sapiens
acacacacacacacacacacacacacacacacacatctgtcagtgtcaaactcttcttagaaaggtatttcaggtctagtgtcttgcattttaatgggttttcatacacaatgagatgctcttaatcaccctcaccacatggctggacagacatatgcacccccctattcacttctcatatgttcctccctggaaactgcacctccgcctctcatggtaaactcaagtgcttgagtactctcaattgtgttttttgcagattctgtttatttccgttgaatttgttattgtaattgtgtaatttacttaattggcatataaactgaagaagtatgaggggattattgtttttaagaaaaagcataaattatatttctctcattcccaatttgaactaaaaaaattgttactagctaaacacccacacctaaacacctacacccacacatgtatatcagatacagtagcttctaccgactcataatttcatcaaccatatttgggagttgtgtccagtcttaatctgccttgccagtatagtctctggaaaaacatcctacagctgtttggtttatttgtagattgagttatcttttctccttagaaatacctgagaatgaggcatgtcttatttagaatctctaatatgatctaccttgataaaagttggttttgagcccttctgcttacccccaccaagccatttcaagctctggtaacgccctcagaaacaccatgtccaacctcatataagagaaatggaaaacctggacgtcacaactgttgcctttgaaagtgagagggtgtctgtatataaacatcctgctactttttaagctaatatagtgttagaagtgattttacagctcctctaaaatttgcaaactcttatgagactattgtaggtacttagttgttggatgcatggatacacagagaagccctaaattcatgcaacaaacatttattaattgccaactgtatacctactaattggctggcaactggtggcgccaccacgaagcacagtgggtaccactgttctcccaaggcctgtgaccaaacttaagactcggagccaccaggaagt

SEQ ID NO: 39365 - DNA, 1068 bp, Homo sapiens
aagttcatgtcttagggcatactaaaatcattactctttccctttattgaagagtttgataactgagtagattagagaacagagagaagaaaagctaaaatctaagatactgatttaagggatctagtgacccttaactcattgtagattaactaaccatctgaagagctgaattaagatgcaaaaacaccactggccatttttctttggtgtttgtcctgttattgaaaaacaaaaacaaaaaaaaaaataggagtttgctgacttctggtaactcctctctagcaatactaaaaatatgtataccagtctcattacagaagaaaaaacactaatagcaatgactctttggagagctagtaaaaatcgtaatgtctgttagtcatatgggttgtcacttatttcagattgaaatgatattcattgattctttcaaatcaatactacctgtcccaataactcaccatttagacaggttaataacctttctcaataacagcgtaactgtcttttcttctgttcctttcttgtagaaatatatgctgacatcaagtaaatttgtctcctaccaaaaatattggagaaacttagcctttagaactttttttaaacagtcattttatgttaatatttgcattttatggagacagaatagagtatctcagaagcttaggatagtaagtacttgagatgaaataaaaattagagttttagcaagatggataaccaagagaatatgcttggtatttcttccagccggtgcgcagctgctgatattaggacaagtactgtggagtgggcattcagaaaacactgctcaatcctgaccatgagtttgaattagggagcaccaaggccccagcaggtttactcggtagaagcaacctcactggttgaacatatacataattattacatatgatcacatatgtcatcttatacataattattttttattgattaatccttattatgtttgtttattacttatcaccttttaaaaatgagaaactgaggccaggtatagtgacttgcacctgtaatcctaccattttgggaagccaaggc

SEQ ID NO: 39366 - DNA, 1079 bp, Homo sapiens
cacgagacaatctgttgttattggaggggtaacaggaaaagcttctcctccaccctctgaagcttacttgaaaatgaacttacaataggcagattaacaggaaaaaaaggaataaaatttattaatatgcatgaaactgagcatggtagctcactcctgtagtcccaaatactcaggaggttgaggggaggatcgcttgagcccaggagtttgaggctgcagtgagccaccactgcactctagcctgggcaacagagcaagaccctacctcttaaaaataaaatgctacacaggagaaaatcacaggagagtggttacctcataacccagggaggtccagcttttttctatacctttcttcatagggaaaggggaaatggaggttaaatgtggcaattttgaagagtagtaaatgatatttaaggggaatgaatgggcccaatgctcagacaatggaaggtaaataattctctttgggaactgaatgggacccaagaacaggcaatagtttgggacaacgttcatctgagctctgagtgtggtgtttaatcttcagtcccttcctctgtgacatgagttttgatcttctctgattaatgaaattttaggggaggtgactgaaggcaattttgttcctctttggcaggtccaatttctaggtagataagggaacttcagagaacagcttcatccaggatgtactggtctccaatggccttcaatttgaaatatcgccataccaagttgccatatttggcggtcaccctccctggatccttaactattcaagaaaggatcttttaaagctcttgccttgtagccaaacatgaaaaagtcccccttccctcttgtcttaaaagtctgtcctctctgtggagtgttctagcaaacatagggctgggcctcctcatgttctgactagcactatcaaatagccaaagcacttttgtcaggctggtaaggtgacatgcaattaaaatttggttggaaaggctacctgggatcttatcaaatatcaatcttattaaagacctctcattactgtataaaagttggataagatatgtcaatgtaggggg

SEQ ID NO: 39367 - DNA, 1027 bp, Homo sapiens
gtaaaatggaaatggattttgtatcaaattaaactttatgtcaatattttaaaacttacaaaacaagattattagaaagtggttagacagctcttccatgcctccttctgagggtaaagcccttttctggtgtatcaagaaataaaagagggaaaatggatagattctgctgttcaaaagaatgtagaactcagagttaacaattgaatttggtccaatcgcatggttcacatctgatgaaaggaaatttgatagcttgtgcttcgtcaactcatgttgacattaacacctagagttggtaagtgtttccaaatattgtcaggaacccttcttctcttctaatacttggatatgcagttgcttccttaggtgctaccagagttgtacaggtaatgtgggtcctcgccgggatcccttctaagctactgcaaatgatggctcatgtgcgaccccggttctcttccagagcacaggaagcttggaaacatgactgtgacggtgaagaagactgtcccctctcctgaggctgtgcagatcctctaccagcggatgagatacgagtacgagttttaccactacgtcaaagagcagttccacctgctgaagcgcaagtttggacttaagtctcacgtcagcaagccccccctgaggccacacttctttatcccaactccactggaaaccgaggagccaatcgacgatgaagaacaggatgatgaaaagtggctggaagatatttataagaggtgatgtgactgtgttgcctctatggctttatctcccttttccagaaagttctttgtttggggaagtaaaatccttaagggactaaattaatgcttgggtgcattaaaaagaacaaaacattcccacatgttggggtcattgggagatgcccggttttgcgggttttatttgtttaattttattctgtgttttctcttggctctttgggtctttcccgggtacactagatggctccatcccaaggcatcttgtcataaaacagctttcccccaccccatat

SEQ ID NO: 39368 - DNA, 1047 bp, Homo sapiens
aaagggcatggctgtgtcttttgcacccaatatgaaacatcttctcccaacactgctttaatggaagttctaggaaccaatttagctcaggcatttgactcctacagcagaagttctgagcctgaccacagatggtgtgtaatctatcaaacacacccctggccaagttgggtcctataggacctggtactatgtactattgtaacttctagttccctaagaggtacctgttttcagtaaaaaggggtcctgagttctgtgcaggtggaagagctacccgagaactacctgagttctgtgcaggtagagtcccatttcttatgggacctgtgtgctcctgagaactcttacttgagacatcaaaaagaagcagcaagagcttctgggacagagactgcttggccagctttgtaagtaagtggctgcctccaatgtgatgtgagtacatgttgggcagtctcactgtcctaaggtatgtcttctttccacctcccactgcccctcccctgccacctatcaatgatgccttggttcagtcattagaaatctgttgctttgagttctgaaatattttcaccttaaaaaaaatgctgaaaatacacattctcctgggaagacgataaacagctagctaagaagccgaggttcagtggtggcagcaggaaggacactgccacaaattttgtctatttcatatttgtcccctagagccagccctagcaaatgtgtgagttgggagtagttaatagtaaataagactctgactttacacaagctacacattttatacttttcataaaccacaaagtctctctagaattttttctgccttcactaaaattggactgtagccaagatataaagcaagtcatttggaacctgccgagtgagcactgaagctactttatcatgagatgtgtgttaagaaggctgcagcccacaggagtccagggaaggcggggaccacagaggcacagagtccagcacttggccgctcatgggccttctttctgcctcagaggacgggggcagagaagtgatgaaggg

SEQ ID NO: 39369 - DNA, 1066 bp, Homo sapiens
tctaacttgcactcttcctccctccgcctctttccttcccccagtggcgtggcggagagggaggccccccgagtcccccagtccggtgggggtggggagcatcgggccgggcctgggctccggggcgtccgtgcggggggggagggggagcttcattggaatcgagcgcctaggagagccccgggtgggggagggcgcaaggggctcgggagggcccctccctgcgtcggcgcccctgacccgcccccaggcatgtgtgaggtgggggcgggggaggaaaaatctccttttggggagccgaggtctagttaaagatgactcaggggcgggggttttggggacagacacggggcagttatgtgggggtcgggcgggagggagaacatcgttcctttgcggatcttggttttctgcagccgtctttgaagtggggggcaagccctactatgaatatgtggccccttaaatttcactggatgtttctggttttcggtcccatcaacctcaaaccctacgattgtggttgagtcagggaggctgcaagggtctcttggcggtgctgaacaggtgacaggtggatctttctgttgctgatgctgtgagatgttcaggcacagtcgtacaccaaagtgtcagagaccgtgtgagtttgtatttatgtgtttggccatgtttcattccatatatagtatatttgagatgttaggtttccattcttcaagtcagcttaattgttgtggataaattcttcaaatgtttctgataagagggttttccaggagagcggagggaatttgcagcctcacaggggtttctccgtagttcacgaaatttaggcccccagtgcaggctgttgagtacccttattcattggaaagttcttgaacgctaagatcgtattcagagcaactgtacggcaatataattttgcatccattttgtctgttttaggtaagtttgtaaagtgtctaattttggggtcagattgattcacattttagaaaaggaatttcgtttccgctttagcatactctaaaggttatgatgatcattatgcaattccaga

SEQ ID NO: 39370 - DNA, 1507 bp, Homo sapiens
ataggttgatgagctggatctcagcattttaacaaggaaataacagtgtataaaattccaattcatgtaaatacttttaaaatatttagtacagtacctggcacatagtaactatagagtaaatgtttgctttttgtcatcattttgcttgttaattcaaagaatcttttatacaaattattaaggaaagtttttgcaaagataaaataactcaaattgtgaatgggatttttgagggaagagtggaataaccatgcaagttgcaatacttattttcatttttagactggaagatcacgaaacagcacctcaagtgcagaacatgtcttcctttcagtctttacttcacattattttcagtggttggcctgtagttaagagctcaagaaatactgtgtgttaaatgttgaatagttcttaatgatcatttttctgtaaattacagctctttttgtagtaaactcctgagtctgaaaggtgactgcactggaatctctacttttaattttaagcactgaataagatatcattatgcaaagtctcttaaatgctattttgtgaatctagccaaaagttcaaaaaatattctagaaattgagaggaagaaatcaattatttgtagctagattagtcttcattaacctatttctatgatgttattggcatcaaagtgaaaaagtaatatagcagtttttaaaagagtagaagaaaatttatgaataattatttgctcttaactgttaaagaacaagtttaccttatctttttaagataatttcaatgaaagtgtagatttgtcctggttttatggattaaatagcttggtcgtttacttacatttctgtgatacaggaaatactggtgttttcactgaaaagtgaaaacgtcccaccagcatcccacctcccatcttcacagtattttaagcattcttcagatgcctaaatcttagtaccagtcaactctttcctgttctgctgtaagttatcctctacctaaagaataataattttagctttccccaaacttaagacttctgtcaggttatgaggctttcagtcatttacccaaaatatttcttggatttttaaaaagttctccacaaagcatgtatcgtgtgctttatattcaaatatgaacaaataggatgaaaagtatttcattttagtatttgatgtgccacagtactactttagaaatgagataggaatacatacaactgaatattttatactcttgtaattttttttctttgctttttttgaacaataactgtctactacaggacagaaataattcctacaaggtgtcagtttgagtggcttcagaaaggaagtctgatttacctacaaacaagtacaagagacaagagcagtataagaatttgtagtattttaattgccttgttaaaagaaaatggaattcttgtttcacttaagaagaaaaacaaaaaccggcctagtaccagtgctcctagtacaagtcacagaagccagataataaagta

SEQ ID NO: 39371 - DNA, 1049 bp, Homo sapiens
agaaaagagccagacttgggaggaagaggcaggcatataagtatctatttgagagttgattaggacccaaattaaggcactgataatggggtaattaagaagaataggtaatgtgtttgagaaggaaataattgaatgtgacataaagcagtgaagatcacacatgccctgggtgcatagttgtgatggtgatgttcaccattacagaacagaccagggttgcaacaggtgaggaagacatttgagttctgtttgttgattttaaggttctatggagggagaaagaggaagacttcacttgatatggaggagatagagaatgcttgtcttgattagataacatttgagcaggtacatgaatgaaaatagaggcagtagcaaatgcagtggcctttaagtgggatgtccttgccatcttctaagagcaggaaggccaatataattggagctggggggggcggggttggggggtggaagtagggtagatggtatccaactgtgtatgctgttcatgtagggtgtttagactgtgataaggactttagattttactcaggatggggtaggaagtcaccaaagggctttaagataaaatctaatttgtattttccccctcacttcttagaacattgtttatttattgacatttgtatgtgtgtggttctgtaacattattatgtatatgtataaattcatgtgaccttcacaattaggttataaaaactgtttcatcatcataaagagactcccttgttttaccccttaagtttcacctttccttcctggcaaccacttacctgcttctgttctctatcactataattgtcacttcaagaatgttacataaatcgtacgtgatgttacctttggagatgggctcttttttttttcacccagtataatccccttgaggtccttccaaattgttgcatttatcaatatttattcctttttaatgctaaagagtttaccattgtatggatataccacaatttgactttggaatttccaactttgggttgtaaaaataaaactgctgtgaacaggtt

SEQ ID NO: 39372 - DNA, 1008 bp, Homo sapiens
cttaattaaataggagtatctaggttctgatagaggtgaactataagcctaatttatgtctgttttaactccttagtggaacttttggcttatcttgatgtattttctggtactcgaagttgccaaacagatgatcttctgtgcttgatttattgggggcacttgctgagtactttatatgtgcctatattatgtatatgcagtgttctatgtgtaagcacatagcacatgtctccggggatcttataacttagatgaagagacacagaagtagactgtaagagaataattaaatgttgattcataaagcattgacctacagctacattagtagttgtaggaaaagatccatgtgggctgaagcaggataaaaagaattcaagtagaaggtgaaattggaattggttttgaagaggtagttaagattttgataagcctcaaggtgaagacataacattctaagcaagggcagtagtgtagtaagcaaagaaaggaaagtgtgggttgaacatgttcagacaggcctgcccagattcctaagggtgtggggactgctgggaaatagaagcaggtgaatttaatagagtagttttaatctgcaagaccctgaagggatccagggatacaatttagagggctgcatgcatttagataaaaaaaaaaaagtgacatctttatatttttatgaactttgaactgaaatttagcatttacttttaataagattttaagcggcagactacagtaatattagcagtacgtatatcttttattactaatagaaaaagcacagatattttcagattacagctgttgatatctctataatttatgcatattactacttcagaattatggtttttattagactcccactagattttattgtattattactaaagaagcatatgtatgaatatatcacatacaaggtttttaaaaacacttgataactgtttcggtataattggttttcttagtaatgtatattttatgcatttaaaacca

SEQ ID NO: 39373 - DNA, 1050 bp, Homo sapiens
agagacggggttttaccatgttggccaagctggtctcaaactcctgacctcactcaggtgatccacccgcctcagcctcccaaagtgctgagccaccatgcccggcctcaataattactcttgaaatttgtttaattgctctgttcatatttactgtatataaatgtaggcatttactttacgattcataagtaataatgctaattttttgtgttaaacttttattcagattctactgacatattatttgaactttatgtttttcttctattaaataagggtgttggactagataatctataaggctcctttcaacatcaaatctatgattcggaatcttttaagtttcatcaagtagaataaaaagcttaaactacaatttaaaggagattctccttagattatgctgtgagtgtaaataagatgccagaggaacaagtgagagaatgaatgttataactttacacctacatccttttggctaacattaataagaggcatagaaataagaattctaagaaactagaatgcagagtgttgaccggaaaagaagttttcagaaagaaaattattagtaacgtcaagctagtacaataaagaaggaaccttggacatgaggttagacagctacagatacatttctggttttaactctgctgcttattggagtttcgatgagtaaatattacttaatatgtttttttaaaagagtaaaagcaagttcattataatttgtaaataacgttgtatacctggaaaagccaagagaatcaactgaaatattactataagtaatgagatttcagtatgatgactagttaaaaaatttaaaaaagtggtttatctgaagtggtttttttatttgatggtctttaaactgaaagcctattcatatgagttactgaatggaaatcctcaaacttaaataccctttccccttctttctgaggaatgcagtaattcagtcttatcatctaagttttagtatattttgaataagacacttccatgttaactttttaaaacttttaaaatgaagttgtggcagag

SEQ ID NO: 39374 - DNA, 1051 bp, Homo sapiens
gtcttccacttctctctacctagtctccattgctatccacagtacaggctattaccatttcctggctgaactacagcagtggttttctgactggtcttctcatatattcttttaccctttttccatacaatagccgttttttatacacacatgatttcttgatcatgtcacctttcctacctctgagctttaaatccttcatcggcttcccattgttcttaagataaaatccccaaatgttaatggcctataaggcacttcatgatttgggccctacctattttgcttgatctttgctctctacagtttttcccaatgtaccatgctcccatgctctgctttggaatgatgtgaaagagaaaaacagtggctgtgatagccacaagcgagatggcaggcagcagaccgagtgcagaagacgcagacagaagataaaataatgagcaagttaaaatagttatctaaattataaacgtgtatttatgtgcctttaacctagcaatttctgtgatctgcagggcaaggacattgactctaatacttgtactatctccagcatggtatctcctgcatactaggcactcattcaatgtgtggttggtagataaatagatgatgatagtcccagttttaaatactcttatctagttgcctcataaatgcccagattttcataagacctatatatccagttgcattctttgtttctgtttgtttttttaatctggagacgtggtctcgtgttaaacagttagcttttgtatactcttatagtcctagaaacatccactatgataaactgcactgaatatgaagcataacttgcagtctgagtgagccattaaccagtgcctagtactcttcactgtaatagttactaagaaatcaaaaattgtttacataatctttaagaaaggaaagaatatggcacattttataaaccgttccaatatgtctacttatgttttgtagtgctgtatatactctgctactatttagaaggaattaaccctcctagatcattttagctggtggaagtttagatgccaga

SEQ ID NO: 39375 - DNA, 1047 bp, Homo sapiens
cggggctcagtcaagcatatttactcttgaagtgatttttaaagtttgaaattatatgaaatttttatcaaatctgtaatttataataatgactacattttgttcacacccttatcaccattatcaccttttaattggtctacctgcctttacctaacccagttttggtctctccaatctatcctcttctgccagagtgcagagctgttcacacacttaaaacctgttgattgttccctgtgcccttctgaatgaagctcatatagcttgactagggcatacaaggtctgtgatctggaatcctggctgtttctacaccctgatctttgtccagtccttcctgttcataccctatgttctggtcatcctgagctgcatggaattctcccaccagcaatgccttttcttatagtataatggttaagagcatatcttttggtgataaaccaaactgagttcaagttttgacagttgctagcagtaacttaattaacttctctgaccctcattttctgactttcatttcctccactgtacagtgggaataaaaaaaactacacagagagttaaatttgacaatgtagataaaacaaccagtagggtaactgattcatagtgagtattcaataaatgttagcagccaatactaaaaggaataacaacagcagaaagcccataaggtatatttggtaaatgaatcagtggtttacatttgttaatataaaatgtgaaaaaaaaatgagagaataaaaacatgtaataaagatggagtcagaagttaaaagaaagtgtgggaaaggagcggagatagtggggaaaaatagtctcccccctagaacccaagtaacttctccctaacttttcaagtaaaagagaattttgtggtaaaataaagctatgctgttcagtaggttattaaaaaactaacagaaagatactgtaagttctttgataaatttctgtagacttcgtattgaaagaactgtccagagcatttccctacatatagtacaggtatagagattttgaaataccgtaactgggagt

SEQ ID NO: 39376 - DNA, 1033 bp, Homo sapiens
tttttttctgagatagagtctcactgtcatccaggctggagtgcagtagcacgatctcagctcactgcaaccttcacctcccggattcaagcagttctcctgcctcagcctcccgggtagctgtgattacaggcacatgccaccacgcccagctagtttttgtatttttaagagagatgtggtttcaccttgttggccaggctggtctcgaactcctgacctcaggcaatccgcctgcctcagactcccaaagtgctggggttacagacgtgagccaccgcacctagctcagtgacacaatcttgatctagtgtttcattcacttaattcaagacaaaggaggcctttgctggaaaatgcatcttttctgcttttaccctacatagttcacagacactctctgcagttactaaacggggtggcctgagtaatcctgatctttaagcaaggatcttttctaaactctgagtggtatgggtaagaaaaagaaaagaaatatctcggtcttctgcagtgaaattgatttttctaatgctcctggaaatactgttttagagtagaaaaataagtggagccaggcactagaatcataggaaaatactttttccaaattgagaagggaacatacgtacatacataaatttggtaaccaaaatgcattttttcttttttcttttaatctaccatttgaaatctaaaatactgtgataaaaactgtcaaaagtgaaaatttgtttatgaaaggtatattgtttaatacatcctctactatagagtgatcagaagcaaaagaagtaaattaatgaaacatcaagaccccactcatctcagcactaagtctgtcagcaccaccatccttcctaaaggaaataaattaaacttgattccttaaggtactacaggaatcagagacaaaagtggaaagaacaaattaaggttggagagaaattttcagtttaaagtttatagatatgaagaaaattcttattttacccattaagaacaaatacagaagtgaaattttcttactggt

SEQ ID NO: 39377 - DNA, 1059 bp, Homo sapiens
gcagctgagaagttgtaatagacaactccagattgacattgactgcttaaccaaagaaattgatctttttcaagcccgaggtaaagttcagtgtatttgtagctgaaattcatcgtatttaattcaccagcagtttttctgtggctaaaaacagacttatcaatcataatcttactgtctcagaacatgtggctttggagccagacagacttttaagaatatatttaaaaagtcacccccatctcaatggcactatcttaactgataaaatatagaagatagtaaaaataaggtttatacattctttagacaatgatagtttcttatacttgagctattaatgacaagcaatgttttcttatagtaaataatgtttacaatttaattcagttccatagagaactaaaaggaaatgttatcacttaaacctaattctgaagttggataaataataaaaagatataaaatggaaaagacaggaaggggaaggaatctaaccaaaagagaagtctttaatcacacttgggactgtgttctagaatctgttcaactggaagatgattatttttatttttattctttttaaatgttgattaagctatttatctttaaacattcatagaaaaataccataatttaactctaaaaagttggtgctgttctagaaactacaatccttgaacttactctttttgtgtaaaattttaaccattctattacatagtgcaaggtttttatatttacttgaggtaaagctgtttagttacttaagtccatgtttgatcgtttaaaattacattttaaattgtgaaattttaagttattttaacttgccacatagaacagggatctacttctacttctattaatgtcttaccagcattaatttgacttctttcacagtttaccacttacccgtgtttatgagtactacattatacctaagataatatatttgaaatatgttttgaaatcttacatataattcgaggttagaggggcaaaataaatgaaaagcatttcttatagcgtgtttatttttagaaagaaatacttgtt

SEQ ID NO: 39378 - DNA, 1079 bp, Homo sapiens
atttaaacacagtcttgaataatcattgagtcaagaaggaaatcaaaagggaatcttaacagtatcttcagacaaaaaggaaaacatagcatactagaacctatgggatgaagcaaaggcagtactaagagagaagtttctagagataaacaatactacattaaaaaaaaaaaaagaaagatctcaattatacctcagggaaccagtagaagaacaacaagctaagcctaatgttagcataatgaagaaaataataagaattagagcaaaaatagagaatttagaaacaacagaaaaagaaatagtaaaactaagaggttttttaaaaaatcaacaagattgacaaacccttagctagataaattgagaaaaaaaggagacaaaatcagaaatgaaaatgaagacaacagatgcctcagaaataaaaggatcataagggaatattaggaacaattttatgccaacagactagataacctagaaaaaaattgatacattcctatccaaaaaatatccaaaaaaaattgatatcacctattaaagctgaatcaagaagaattagaaagactgagtagaccaataacaaataaggagattgaatcagtaatcaaaaatctcccaacaaatatccagcatggatttagaaatttaaaaaaaaattcccaacaaagaaaagtccagaactggatggcttcatgagtgaattctgtcaaacactcaaacaagaattaataccaacccatcttaagctcttccaaaaatgagaagggggaacacttccaaactcattctgaggccagcctcaccctggtaccaaaaccagacaaagacactacaactaaagaaaactacagaccaatattactgatgaacatagacgcaaaaagtcctcagtaaaatactggcaaaccaaactgagcacattaaaaggaccatacgccatgaccaagtggggtttatctctgggacttaaggatggttcaacatacacaaatcagttaatgtgatacagcacacacattgaagtaaaatgaaaggaataaccatgtagtcatcttaatagatgctaaaaagcattt

SEQ ID NO: 39379 - DNA, 1028 bp, Homo sapiens
tcagccttttttcagtagaatggtagggaaaagtttgaatattttaaagagcaagtgttctgagaatgacaagaaactatgtcggtacacctcttcctagtcaagacttgaatatgaacactctaaatacaaaggcgaagggcacggtaagtgtcactttgaccaacaaggtgaaaccccgtctctactaaaaatagaaaaattagctgggcgtggttgcaggtgcctgtagtcccagctactcgggaggcggagacaggagaattgcttgaacccgggaggcagaggttgcagtgagccgagatcgtgccactgcattccagcctgggtgagggagctcaaaacaaaacaaacaaacaaaaacaaaaaaaccaagtgttaacgttttaggataatgacattaccccacgtgggtacaaaaatgatgagcatgtctcagttctgcagggcattccaagaagccacgacattgcctgccataagaaccacctatatctgaaattatatgtggaccacagttgcatctggttaaacaataggaatgtgatggacaggcaccaagggaccaaataaaagtgaaatagttctaaaaagttctggaaatacggacattattttcctatttttcaagttttaaagattcataattgacacctatgtgtcaatgagatgtttacgtctatataatctgcgaaaaatacattttgactgcaggcttaaaatacactgcattgtcggctggctcttagtgatgattttactatttcagttctcccttcttgggccttcatttcactttcagaaagtccagatctaaactcggaaattcacatattacgctgggtgcagtggctcacgcctgtaatcccagctactgggaatccaaagccagaggattgcctgagaccaagagttgggtgttggatgataagcctggttaacatagcaagagcctgtctcaacaacaaaaagtttcacagattaaatgagtgctgaacaactagaaagagaatctcattacctggact

SEQ ID NO: 39380 - DNA, 1035 bp, Homo sapiens
aaggattgattaaaaaactcaatgttcttactgcttgggcatcttctctcacaggattttgtggatggatgaatgtatgtgcttattatgttaaaacgtgggattggctgtatcttctggctggctttatagttgtgccatgttggttcctcatggccaacctgtataaaagaataggaaagatgggccaggcgtggtcgttcacgcctgtaatcccagcactttgggcagccaaggtgggtgaatcacttgaggtcaggagttagcaagaccagcccggccaatatggtgaaaccctatctctgctaaaaatacaaaaaaacagctgagcatggtggtgcaagcctgtaaacccagctacttgggaggctgaggcaggagaatcccttgaacccaggaggcaaaggttgcagtgagccaaggtggcaccactgcactccagcctgggcgacagagcaagactccatctcaaaaaaaaaaaaaaaaaaaaaagaataggaaagatgttgctagtgtggtatttcatacaaagtctaaagatcaacacattttaccctttcaaatgagtgtaagcagtcataaagatttgtcagattgtctttgtttttaataaatctgaaacagcattgaggtcagggatgaagaaagccaaagaaatgggttttcaactgtcttgttccatgtaaatgtcatcaaaataatcacactcactcacagatttggtggtaatctttgttcaaaggtgtcactacttttttttttatagtgaagaatgaaaatcttgaaaatttggaggaaaaagaatattttggaattgtcagtgtaaggattttagttcatgagtggcctatgacatctggttccagtttgcaactaattgtcattcaagaagaggtagtagagattgatggaaaacaagtaagatagtatgtttattaattgggaattaaatgatatttagatttgtgctagatattatgcatgtgttcagttattttatttgtttccgacttgataaggaaggtgcctaatgtt

SEQ ID NO: 39381 - DNA, 1050 bp, Homo sapiens
gaccttaagttctgctctcgctcttaaagtatagaaacatgttttgtacacagtgaacttcccatgtattctaaaattttctaatatgtttgtctttctcttccttctcttgtgctctaggtactggaaacagttgactctgctccatttcgtttataatggactagcctaacgaatctcttgtcaattagcaattattttcacttgatttgtagttagaaaacaatataaataattttacaggctattaacatttttgtgcttgtattgttagaacataatttttaaagttgtaagtaacttcattgaggtacattctaaaataaaatcaccatttaaaatatacaattagttttgacaaatgtagtcacccatgtaactaccagcacaatcaaaatatagaatatttttatcatcccaaagctaaaacattaaaaaatttaaagtttattcttagagattgatgcaacttgcatatctaatcgaaattcctttttcaggtaatgtgtcagtggatggaaaagtttagaaaagatctgtgtaggttctggagcaacgttttcccagtattctttcagtttttgaacatcatggtggttggaattacaggagcagctgtggtaataaccatcttaaaggtgtttttcccagtttctgaatacaagtaagtatttcttatttttgaaatgttagtatttttaatgattaaaaagtgagacatatttgctatgttttagaatagaaaatataaaaattagaaagggtaagacaaatgggagggaaaataacacctactgtttttctagctcatcttccaatgttagcaaaattgaaacacatttattgaatagctattgtgatcaagacattcttggagagattcagatgtaagtaagacaaactctgctaagaacttaaaatctagtagcagaggaaggaaacaaatacatgtaatggaaaatgcaactgtatgatcagaggtgaacaaaacccgaggacttcatgatgtattttcaaccccagagtatcagtttaaaatgttaatttcag

SEQ ID NO: 39382 - DNA, 1065 bp, Homo sapiens
atgtttcccaggctgatcttgaactcctgggctcaagtgatctgcccgccttggcctcccaaagtgctgggattataggtgtgagcccctacacctggcctactatcatgttttaataaaacctttgagagctacttaagacaactttgtcttctccccattgttcttttaaaaaaaatcttatggctgttcttgcagttactcccctgtgaactttagaatctgtttggttctataaacaactaacccccgttgatgttcttattagaataacactgaatttacaatgcagggtcctagattcaatccaaagacgtactctctggtcagggattttaagtaacaaaaagagcaacactatctaaagacctaaggttgtgttgtggtggtgagtattatttagagagaggcttaggcttaggctttttgctcagcctgggtgtatctaggaacctaactctgccttggagatctatacttaccctattcttccctaaaataggaaataatgaacttcctcgatgcctttctattctctcagccagtttggttaaagtgactttgggctcagtttgtacaaccactatgaatttttaaatagaatgtagcaaaagcacctaaccttaggtgtatattataaccttgaagtagccttttctcactatcaaactacaggcagaggaaacatttaattttgatagtaattaatcactttctatttcagaggaattcttcagttggataaagtggacgtcatacctgtgacagctatcaacttatatccagatggtccagagaaaagagctgaaaaccttgaagataaaacatgtatttaaaacgccatctcatatcatggactccgaagtagcctgttgcctccaaatttgccacttgaatataattttctttaaatcgttaagaatcagtttatacactagagaaattgctaaactctaagactgcctgaaaattgacctttacagtgccaagttaaagtttaccttattctcggccgggtgcagtggctcatgcctgtaatcccaggactttgggaggccaatgcgg

SEQ ID NO: 39383 - DNA, 1092 bp, Homo sapiens
ggctggtctcaaactcctgacctcaggtaatccacccacctagacctcccaaaatgctggaattacaggcgtgagccaccatgcccggccatggttggtttttttgagaccactttatatttaggccaaataggtatgtgtgtgatgggggtggagaggatgacaagtagaatgaaggagtgatgtttcactttgccagactttaaattaattacattgcatggagctctattatgcaatactctctccatactgctgaaaaaaataatctgcaacttacaatttgatccttgagttaccaaccagtaacacttgttctttacaccctttctcattccctaagtcattagaaagcaccagttctaactccaaatgatgacatggtcttattttatctattaaccataagcttacagattctagtgaagaaaaaactttaggaggctacatggtctattggagagtgtaggctctgcagtcagaagatccctacccaggcttctgtctttctcagtaagacttgggaccacagcaaggtccgcaatctcctgaggctctgttttctatggttgggataacatggtaagttattttcttctaagtagtcacacatggaaatcttatctaaaattttataccattaacttttatttcacttattaactcataccattaatactttactttagctatgtttggtatgcatgagttaatgagtgattagagtactatgagcagcacaggtttagaaatgcctatttgcctatagtgcagcctcttacataggcaaaataaaagtcaagtaagaattttattttatttttttaaaatgcaaagtaaaatgtgtctttaaaactctcccaggaggtgaagggaagctaccataacaccaggtgggaaggaagacatactgggcttggctcatgctttaattagctactgtgtaaaaatgttcagggattttcagttatccgctggcacccagaggcaatgggtaaggttaactggagctagagccaatatttttttcttcctagaaggagtaacagcagcaaacagtaggagagaagatgccaagttagaagtgcatat

SEQ ID NO: 39384 - DNA, 1078 bp, Homo sapiens
cagtggctcatacctataatcctaacactttgggaggccaaggtgggcagatcacctgaggtcaggagttcaagaccagcctggtcaacatggcaaaacctcatctctactaaaaatacaaaaattagccaggcatggtagtgcacttgtgtagtcccagctactcaggaggctaaggtgggaggatcgcttgaggctaggaggtgaaggctgctgtgagccgagattgcaacactgcactccagcctaggtgacagaatgagaccctgtcaaaaaaaatagaattcatgtcttgaccaggattggtgacccatgcctataaatctagcactttgggagtctgaagcaagaggatcacttgaacccaggagttcaagatcagcctgggcaacacagcaagaccccatctgtaaaaaaaaaaaaaaaaaaaaaatgagctgagtgtggtggctcatgtccatcatcccagctgcttgggaggcttagatgggaagagcacttgggcctgggaggtcacggatgcagcgagttgtgatcatgctcctgcataccagcctaggcaagactgagaacccatttcaaaaaaaagaagattcacgtctttgtcactaatagcataactctatcctaattacataaaactactctgtttcttagaggcaagagtgacgtaatcagtgaagcttaacaaagtctgaagtttaaaaggctgtggaattcaatctaaacactctaccagaacttgttgaattacatttcttctattggtactctgatttgtattggtggaagaaagaacctaatccaaagattaggtcattaaaatgaaggcatttggtgcagttaatagatcggaggtgacctaagttccacaataaattatgattctcaccttttggcatcattgttacaatactgtggttatcatattataactaaacctattgatttaaaaaacataatttcagattcctacagaagattagtaatgcagatcccataatgtgagcatgccccaaaactggtagatttggatctacatctggagaaaaagagacaaagagaaactctaattatt

SEQ ID NO: 39385 - DNA, 1026 bp, Homo sapiens
tattcgctactatgcagtaatcatatcttgtcacatggtatttttaattgtcctgtgttacttagcttttcatgtgtttgtcttatttctcaactcgatttgtaatttccttaacggctggcaccattaaaaaaaattttttttggccgggctcattggctcacgcctgtaatgccagcactttgggaggccgaggcgggtggattacctgagttcaggagttcgagaccagccaggccgacatggtgaaaccccatctctactaaaaatacaaaaattagccgggcgtggtggtgcctgcctgtaatcccagctacttgtgaggctgaggcaggagaatcgcgtgaacccgggacggggaggttgcagtgagccaagatcttgccactgcactccagcctgggcaacaagggaggaaactccgcctcaaaaaaaaaatttttttttgaattttctctaagaatttaacagtcatccctttttttcataaatgcccattaaatgtccgttatatgcctaaatctgtgctagacagacaaaggtaattgagagaaattaggagtactgtttggcacatggttggtactttttttttttttttttttttttgagacagagactccctctgtagcccagactggagtgcaatggcgcggtcttagctcactgcaacctccgcctcccaggttcaaacaattgtcctgtctcagcctcctgagtggctgggactacaggcgcctgccagcacgcctggctaatttttgtatttttagtagagaaggggtttcactatgttggccaggctgatgtcgaactcctgacttcatgatctgcccacctcggcctcccaaagtgctgggattataggcgtgagccaccgcgccaggccggtacttgatatattagtcattttggatttttttttggtggggggacaatacttaatgtggaaactgagtctttagtgtttggtaagagagaatgttgattattttttttttttagacagggtttcactgtcaccca

SEQ ID NO: 39386 - DNA, 1109 bp, Homo sapiens
cttatgtttcttttgcattcttgattttgtcattttacatatataatgtttatggaatttgtcatttagtcagctgatattttagtgctttctatatgacaggcactggggatacagcagtgaacaaaacaaacatccactccctcttgtagcttctaatgggagcagccaagtatagtatgtcacatgataagtgacaaagtagggagggaggacagagtgtgtggggcagtaggtttatagttgtagagaaggcctcagtaaggtatcattagaccaaagatttgctggaggagtagacacatatcacgcaggtagacttgggataagcattccaggcagaagaaatagcgaattccagatttggatttaggatctgggagaaaagattggaggcaaggatccaacaccaaggttttaggccttggcaactggaatgatttgccattttctaaattggaaatggtgagtgagtgagcagccacgtttattctgtgaggaggggactgtgggagatcagattattttgaggaatgcttttcttataagacatttaagtcgagatttttagtaggcatttgaatatgcaagaattatgatttgtagtttttatatcctaaaagcatttacttttgtaaataatgaaattattttctatctacagcaccagttcttagccactagtaggtgttgctagtagaaaagagcatttattctttccctttttttttttttgagacagagcctctttctgtcgcccaagctggagtgccgtggcgtgatcttagctcactgcaacctctgtttcctgggttcaagcgactcctccatctcagcctcccgagtaactgggactacagatgcacaccaccatgactggcttttttttttttttttttttttttttttttttggtagagacggggttttgtcatgttgcccaggcaggtctcaaacccctgggctcaagtgatccacccgcctcagtctccaatattgctgggattataggcatgagcccctgcgcccagccagcatttactcttaatattccactacttttgtatgcacatgggaaaaatagaaccagctggtaaaatcctaagaaa

SEQ ID NO: 39387 - DNA, 1034 bp, Homo sapiens
aggattacaggagtgagccactgcgcccaaccaattttttttttctttctttctttcttttttttttttttttttctgagacagagtcttgctctgtcgtccaggctggagtgcagtggcgcaacctcagctcactgcaacctccgcctccccggttcaagcaattctcctgcctcagcctcctgagtagctaggattacaggcatatgctaccacgcctggctaatttttgtattttttagtagaggcgaggtttcaccatgttggccaggctggtctcaaactcctgactttgtgatctgcccacctcggcctcccaaagtgctgggattacaagcattagccactgcacctggcccaatttttttcttttttttaatagtgttatggattgcatgaaattacttgtggagtgtatgtgttttagtagccagctacagaagtttaacattaacttctaatgttacctgcattttaggttttgtataacattgtagtttgttagagatgtaaaggaatccaaggaacatatcctttgagaaataacatctaaatactatgtatcaattaaaagttattaaggtatagtgaaagatccattttattttttttccccattgattggcagaggaaggtacatattttaaaataatctctggtacttagagaatatgctttaccgtaacttgccatcacataaaattcttccttaattatattgtgaattttttttttcttttttgagacggagttttgctcttgttgcccaggctagagtgcaatggcgcgatctcggctcacgacaacctccaccttgtgggttcaagtgattctcctacctcagcctcccgaatagctgggattacaggcacatgccaccatgcccagctagtttttgtatttttagtagagacagggtttcaccaagttggccaggatggtctcaatctcttgacctcgtgatctgcccggctcggcctcccaaagtgctgggattacaggcgtgagccaccgcgcccggccatgttgtgaat

SEQ ID NO: 39388 - DNA, 1032 bp, Homo sapiens
ccagcctgaccaacatggagaaacctcatctctattaaaaatacaaaattagcctttgtatttttgtatttgcttatatatgcaaagaatctattccttcctttttggaaggagtcacaagaaactagtaatattggttacctttacagagtgaaacctggatggttggaaatgggagtagggtggagacttttcacttataaatcttttaatttttttactgaattaattaaaagttaaaaattcacacactggaggtctaaaattactgaaacacatgatctgaatgtaagaattctaatcaaacagtttacttaagtaatacctgggcagatagccaagataacttggttatcttggtagatgacaatagtagaaaaattggtagaaagttggcaactttatttatataccatgatgtgtgtactttagtcttaatgaatattttgttttcttttggcagcatgcatatgcgctagaacttctatttgatcagttgcatgaaggagctaaagctcttgatgtaggatctggaagtggaatccttactgcatgttttgcacgtatggtaagagttttatttctcactctggccccaacagaagaatattatatgatttggctgtatgtttttttaactagtggttttcatgtttatttgtttgttaattctattaggatagcagttggaatgagcatcacttaggattttgttgttgttgcaagtgacagaacatgcaacccaaactggcagagctaaaagggagtttatttagttcatataacagaaaagtctaggggtgtatacggtctgttgtgtggctggatttagaagagcagatgttgttattgacgatagggttctctctgtttcttgatttggctttactttcctccacatgttggtgtcattatccggtaagctctacccttgtaatcacaagatggtggccagtagctcccaaactaccttcttccaagttctgatttggcagaaaagaatagaataagcctggttttcttttctttttt

SEQ ID NO: 39389 - DNA, 1072 bp, Homo sapiens
attaaagagctagtagatgactcagtaaataatgtcaggaaggacgatccaacacttctgtcttcagggagagtacagcttgttggtaagtatcagaaaactttaaaaatttcttcagaggatttttattttcagaagatccaatgcaagctaaataatactcagaggtaattattgtatttttttttacaatcacttttaagtactaaaaaataaaaacgattatttttgctcacctagtgtgtattttgcagccatctctttgtgagtttaattttgtattttcctattaacctctgagattgaattttttgtaatgtgtctgaccattaggattttgtcttttgtgaagtacctgttcagatattggattgcttgtatttttgacttacagggcttctagccctttgtctatatatataaatacatttcttctcccatctgaggtgtgccttttcatcttattggtacccttttgataatagaaattcttaattttaatgtagtcagacttaccaatttttttcagtgctttctgtgtcctttttaaggatactctgagaccatgaagatatgtctcttattatttcttagaacctttatcatttttagcttttcatgtttaggtttttgatcttcctgatgttggtttttgtgtatgtgtgaggtaaaggtgcagttatatgtttttgtgtatgaatatccagttgtattccccagacacactcagttttgtttaaaagataaaatattggccaggagcggtggctcacacctgtaatcccagcactttgggaggctgaggtgggcagatcatgaggtcaagagtttgagaccagcctgaccaacatggtgaaactccgtctctactaaaaatacaaaaataagctgggcgtggtggcgcacgcctgtagtcctagctactcgggaggctgaggcaggagaatcgcttgaacccgagaggtggaggttgcagtaagctgagatcgcaccactgaactacagtctggcgacagagctagagtccgtctcaaaaaaacaaataaaataaaataaaggcccgggcagctct

SEQ ID NO: 39390 - DNA, 1031 bp, Homo sapiens
gagaattgtgcagtgagtggtcaaggagacatcacacacggatggaacttgaactgaatcttaaagaatagtaggatatatggccgggcatggtggctcatgcatgtaaccccagcaccttgggaggccaaggtgggaggattgcttgagcctaggagtttgagaccagtctgagtaacatggcaagaccctgtttaaaaaaaaaattagccaggcacagtggcgcatatgcctgtagccccagctactctggaggctgaggtgggagaattgcttgagcccaagctgttgaggctgcattgagccatgtttgtgccatggcactgtagcctgtggtcctagatttctgttacatatggcttttgcgtagttcttgactagatgaccggggatgaaggtgacactgtttcttctgtctagtctcatccgtttttttggtaggcttagatcagttatgggaagatgaaagttgtataatttgttctggtcattgacttgctgcttattggccaagtgactgggaaaatgacttaattgctttggccctgttgattatctgtttaaaaaaaaaaagtagctcacgcctgtaatcccagcactttgggaggctaaggcagatgaatcacttgcgctcagaagttcgagaccagcctgggcaacatggcaaaactccatctctacaaaaaatacaaaaaattagatgtggcaggcacttgtagtcccagctactcaagaggctgaggtgggaggatagcttggattgcgtgagcctgacaggttgaggctgcagtgagccatgcttgtactactgcattccagcctgggtgacaaagtgagaccctgtctcaaaaaaaaaaaaaaaggtagattgaactggtggttttacacattttaactgaagtattaatataatgtagaaaattttacaagtcataaacgaacagctcaatgaatttgaacacatgaccaatgggtttttaacttttcaaaaaaaatattgataacctagagtgaacagttaaaatctgaaa

SEQ ID NO: 39391 - DNA, 1034 bp, Homo sapiens
aagtgatcttgaaagatatttctagatttaattaaattgaatttaaatattgtagtaatacttgcaagtattataggggtatgtatacatctgatttaagatagatgtactgaaggggctttccagttttaagatagcagaatgaagatgtttatgccttcttttggatatcaccccaagataaccagaaaaacagaagcataaactccatactcaattaactaggagactatacctgcagtcctgaactccacagtgtgtgaagatagaaagcagatggaataatagctgacccaggagggtagaggaagtagaaactaaagagactacagagtgaaatattatgcatacgcagtttgcactgcaaaactctgaaaaggcttaggaattggtggcatcaagaccttgaaaatcataggtaaaacatgggtctgaaaagagggaatgctgcttgagactctgcatgaggaataatcagcactaatctctacgtaagaaattttctaaaaactgatggacataattctaacacaaagaatttttaaaataagaaaaaagaacaaccatatcatttatattcagaatattaggggataaagagaagattctgaaagcctctagaggccaggtgtggtggctcacacttctcagcagtttgggaggccaaggaaggaggatcgcttgaggatctgagtttgagaccagcctgggcaacatagcgagaccccatctgtacaaaaaaattttaaaattagccagatgtggcagcctgtgcctgtagtcccagctacatgggaggctgaggtgggaggattgcttgagcccaggaagttgagatttcagtgaaccatgattgcaccactgtattccagccgaggtgacagagaaagaccctgtctctaaaaaaaataaaagcttctagaaaaataaaacagatctcctgttaaggactggtaatcagaaaggcatcagactgcaaacagcattagaattcgtaagtcagagtaccaaaccatcaaattctgagttgaaaa

SEQ ID NO: 39392 - DNA, 1041 bp, Homo sapiens
gccaagatggtctccatctcctgaccctgggatctgcctgccttggcctcccaaagtgttgggattacaggcgtgagccaccgtccctggcccactgaacttttaaaattggtatataatgtacctctattaaagcatcttaaaaattcaattgatctaaaatagactgacatctttgagtaataatgctcatgaatttttgaagctattcttggtgtgtgattgtcagccaggaaacagctgcttagttttgtttcattagccaggtgggtatttttggttttcagctaaatgttaacaaattttcaatagtttgatattttactaaaatatatgagtatggtaactgaacactaatattgtaaatgaactaatggattatttttagtgttctaaatggggttcagaggctaatacattattttaggtaagtgctaacattcttctaggtataaatcattgcctacaacttattgtgttcttaaagaactgaacagtaaaacaaatgggttctgattggatttcagttggatctctggattcctctgaccattttccagaaagatgagtgttgtgttctcactgaacctagcacgtggctcaaatagagggctggtgaaagaatcccacttgaagaaaaccagctgacccaaggggccaaggaatgtttgtgtattgtaatatgataaaaaggaaatcaggccgggtggggtggctcacgcctttaatcccagcactttgggaggccgaggtgggtggatcacctgaggttaggagttcaagaccagcctgaccaacatggcgaaaccccatctctactaaaaatacaaaattagccgggtgtggtggtgggtgcctgtaatcccagctacttgggaggttgagacaggagaatcactagaacccaggaggcagaggttgcaatgagccgagatcacgccactgcactccagcctgggcgacagagccagactctctcaaaaaaaacaaaaaagagggaatcaagtccaataatttccttatccttaatccttctaatat

SEQ ID NO: 39393 - DNA, 1040 bp, Homo sapiens
cccatctctactaaaaaaaatacaaaaattagctgggcatggtggcgcacacctgtagtcccagctaatcggaggctgaggcacgagaactgcttgaacctgtgaggcggaggttgcagtgagctgaggtgagatcatgccactgcactacagcctgggcaacagagtgagactcggtcccaaaaaaagaaaaagagcatctctatgtgtgggtcaaaggaaaatctagtaaagggccatgtgaacagccatcagtaactgaagagaggtgttgctgagtggcactgagttgtggggccagaacacaggttttgaagtcattgggagcaagatgaaaaaaatcctgttattttcctatggaagagaatgtattgggtactcagctgatttgaaacagtaaaatgctgtggaaggctggaggagtagctgctatctactaagaatgaaaggaaaaagtaagttttaagtgttcaggaggagttagtgagccttaggaaaagacatgtaaaacacaagaacatgtttaagagagaaattgtggacacctttccctttaaaattatgtttccattgtcttagatgcagaactccttcaatcagataatctacaggtaagaagatcacttttaaaagtcacattcagtctacctgatataaatattttgtagaccttgattctccttccctcgagtatgctttatgtggccctgggcatgtcactttctctaatactcaatttcccccgttgtaaaatagggttggtatgattgaatccaaataatgcagtaacagctcagtcaataatagcaacttatgattatattaaaaggaaaaaaaggcttaataataaaatacaatttattaaaggaatcatgtttacatagatacagaacatcttggatatttcaacaccatagcaacacaaaattaatttcttcatgtataaaagatgtgctgaaagctgcatgcctcatcagtttttattttattggttatggctatagttgacatctttccatataaaaacaaactgcacagca

SEQ ID NO: 39394 - DNA, 1050 bp, Homo sapiens
gtaagatgaccttgaagcaacataatgctttttattttttatttttattttttgccatagaccttggagagcttgagcaggattgttatgaggagaaactttcactagtgatgaaaatgctgactgagggtatcatcaaaccctccaaggactagttgttatataagttattaatattaaaaataacatgataatatataatattaactaagaattgtacatgatttcaaagtttgccaaacactttcacatacatgattttatgtgccttcacagagactttgaccacctcactcctgcctttgggaccgtgaaagagaagtcagtatagagtgagccctagctcacatgttccgtggtagggaagtggacaggggagaggacagcatttctcaggggcattcatttctaaatccctccagcaccatcaaagattttcctgcatctgcaactttacaataggtctttttgggagaagtggaaattatttaatgttgtgtttaccgtgagcagtggttatttctgggctgtgagttgcaagtactgaaggggaaatactgacttttataatttataagactttgttgaattttttttttgcaatgagcttgttgtaaatgattttctattttttaaaaataagtgttgacatctgcttcagccaggagggagcaacaaggactggacttactctgtgacctgaaatgaaaaatctgtgaaaaaaatgtatggaacaatggttttcagacattgggcaacaggcaatgcagggcccaagagaagggagacaaaggaagtgaacatgctgcttgctccagcttactgcctggagagggtttccaagccgcaatgcagacaggcgaaccaaaagagactctgagttggaaaatagagctgagaattcagggaggccagggtggctagagtaccagagaggagagagtgcaacggaaggagggagctctggagatctgtgcagggttcctctgagtcttcagcagaagttcgaccaggtacatgcatgtgaggaaacttcccaagacagagagg

SEQ ID NO: 39395 - DNA, 1006 bp, Homo sapiens
gggtacagagccaggggtagtgttggagggaaaagcatgtttcttatttgtgggagaggttccgaaatggggagggcctgggaaggatcacccaggagaacagacccaggtttttctcagccacttaaaccaatgcttcatcttttctcaaggtggaaagtgatatcaagaagcctctgttagcctggtctgggtcctgctctcccttcagggaggccgcctgtctactcaccactgtgcctttctggaaagcaggagttcaagccttagcaagcccagaggcccccagcagacgatgaggacattgtcggctcaacatctcaggccactcattaccttcgctcatgatcccagcagccatttttcttaacaccttctgccactttctgtcggtgctaatggatggaactcctgcacaagttttaactgaacaagaaatcccagcaaaaggcatttttttttctacttctttgattgtagaaaagcagacacttctctgaaacatgaccttattcttccaaacagtatcgctagtaaaatagcatgctggacttcagacctcagggatccttttgatgcactgaccaggaattgtgataatccttttcatttttatggctttttacagtttctcattctgtcaaccatattgaagtgaagtggcatagtcttcactcactgtaatctccagctcctgggctcaagtgatcctctagactcagcctctagaatagctgggactacaggcacatgccaccaggactggcaaactgttttatttttaggtagaggtagggtcttcctatgttgcccaggatggtcttcaaatcttggtctcgagcaatgctaccaccttggcctcccaatgctctgggattacagacatgaaccacagtgcctgttgtagaaatttttaattatttaatatgaaaatattacattcatgattattttatttagtaaataaaataatagagagcccagaaatcaacctgcacacctaccg

SEQ ID NO: 39396 - DNA, 1047 bp, Homo sapiens
taaattacacatgcaaaaagtcagtggataaagccaggcatggtggctctagcctgtaatcccagcactgacggatcgcttgaggccaggagttggagaccagcctgaggaatatgatgaaactccgtctctacaaaaaatacaaaaattagccaaagatggtggcatgcgctggtggtccctgcttctcaggaggctgaggtgggaggatcacctgagcccggggaggttaaggctgcagtgaaccaagatcacaccactgtactccagcctgggcaacagcctgcctcaaataaaaagaaaaaaaaaagtcagtagataaaagaattctaaattgccaaaggaaggaaagaaaactgcttaacacattccctttggaacagtggttagggaaatgcggggtggaagcagtggttacaatgtgtgctttgaagtgcgatgaacctgaattcacatgtggccctgtcattcagtgggtatatgtgattaggcaatttccttcacccctctgagcctcactttctccatacatatgtgtgtgtgtgtgtgtgtgtgtgtatgtgtgtgtatatttcagacagtctgactcctgttgcccaggctagctagagtgcagtggggctatcacggctcattgcatcgttgaccacccaggctcaagtgatcctcccacctaatttttttttttctttttttttttttttttttttttgtggagacaaggtttcactgtgttggccaggctggtctcgaattcctgggcttaagtgatccgtcagcctcagccttccaaagtgttgggattacaggtgtgagccactgcgcccggctactttctctgtatgttgaaggaaatcatcctggtgcctttgcagggctgtcaggaggactgattggtgagacaccaagcatagtacttaggacatagcatgtcagtgttgttattggagccacaagctgccactaactgttggttattctctatgatggagacagaggaaaggggtgaagaaaacaaggtattcacatctatttggtgcaataatt

SEQ ID NO: 39397 - DNA, 1024 bp, Homo sapiens
tttcagccttcttctgcagacaggtgggtctcttggcagacagatgagtctctttaactctgtttaatacctgaggatgcctggttctcactgtgttttcctaacgtgctttatcttgttcagtcttcagaataatgccgatgccagccagcgctaggaatggaggcccgcagaggcttatggaactggcccatggtcactcagccaggacatgggagcccaagactgcagacctgaggctcctaagcaccccaatctctcatctcaacttcaggatagcctcgtgagttctgctcacgccattcccaggatcccccatcctcaaagcttcctctgtcttagtcctgcccatccttcaaagcccaacttgaaccccgtctccatgaggtcttttgttttaggctgaaatcaatttgcttatttggcacctctccctcccccccacccccgagatttgttaaggtattattgaaaaataataattatatatacttgcagtgtacagacatgatgctttgataggtgcatacgttgtgaaatgattaaatcaagctaattagcatattcatcacctcacatacttaccattttctaaattgtgagaacacttactaacttacccatacttcttggtatttataaatcaattacaaagaaatgctatgagtctccctctgtcgcccaggctggagtgcagtggtgcgatctcggctcactgcaagctctgcctcctgggttcacaccattctcctgcctcagcctcctgagtagctgggactaccggtgccccccaccactcccaggtaatctgtatttttagtagagatggggtttcaccgtgttagccaggatggtctcgatctcctgaccttgtgatccgcccaccttggcctcccaaagtgctgggattacaggcgtgagccaccacgcctggccgtgtgtgcatttttatcttctcaattcgactgtaagctcctagagggtaggaacattggcttataatatattctgtcctctggaaggc

SEQ ID NO: 39398 - DNA, 1010 bp, Homo sapiens
atggtcttcaaaagccctcaggagcaattttcccatccactttgaaggatataattccactgttggtctgaagagcaaatgccctgcgtaatttagagctgggcctcagaggggagtgtgttaccggacagtcccctcagcaaactcagttattccactgggcttttgctgagccctgctgtgtgtttggactttatgtgaccttcaatactgactgatccataggcttgtcattgcataggtgagctccacatcctgtcaacttgattttgacaatctgaagctggaaaagctttggggagcagcgcctctgcacactgtgtcaggacctgggcttccggggctccagagtggttgataaacatcatggcggctcagagagggagaagccaaccaacagtgtttgctagaggccaaggtggggtcagggcctgaggcgggggatgacctgaagctggggacggcctggaccagtaggtggctgactcaaagactgagcactgagagcctggggaagaaagggggagaaagttcaggaaatggataccagctgggggtggctgctaagaatgaggcaaagctggagaagttgctggggtccaaccaggaggaccttgtgggccaagccagggagtcagaattttcagctgagtgaggagccatggaagcagtggtgtggggtggtcaggtttgacttttcttttaagttatgcttgacttagtcttttttttttttgagacggagtttcactcttgtcgcccaggctggagtgcaatggtgcaatcttggctcactgcaaccttcgcctcctgggttcaagagattctcctgcgtcagcctcctgggtagctgggattataggcacctgccaccatgcccagcaaatttttgtatttttagtagagacaagatttcattcaccatgttggccaggctggtcttgaactcctgacctcaggtgatctgcccaccttggcctttctctttctctgtgtgtgtgtgtgtgtgt

SEQ ID NO: 39399 - DNA, 1031 bp, Homo sapiens
ttttgagtatgttctcctcaatccaaattgttccctgctcaggagaaaataaagctctggggagaggcttaaccatttaatcatgtaccatttaacacctctttctgggaatggaaacatagatcagcataaagaacttgtcccattagtatttgccaccgtttttcctttgaaaagtaaagatgtgtttcaatcacttcatttgttaaaattaaagcatggcctctccttctccctgtccatctgctgtgacttgtgatctgatttgagtgtctgttctagtagcagaagcagcagaggtagatgagacaacaatttactgcctcagtggaaacttacttcatggccgagtcagaataacacagttggagtttttaaaattaattggaattttattctacactacttgtctggagtctaagctacaaagctgttgttgtaaaggtgaaaatctagcctaatcagtgccaatggcatttgcagaagatgccaagaacttcctgggtctcaggaaggctggaatgtacttgtcctcccttctccctccctccagtaaacacaaccttccaccctcccctcaggctccagctgctgcttgctgcacctctatagatcccgagtttgggaactggctggagtctctgttgaaggactggagaaggttacaaggattgtctctgcccctgcctacctcaggcctcccagaggtgggggatgagggagtctgtggaagaggaaagaactaagggaggagcccagtgtgagaggctctgctcccgcctgcggcacttccctgcacctgccacaggtccaattcatgggaacagctggactttctagccactgtcgttggtctaggaagttaaactgtgggcctcttacccaccgcagtcactccctggaggtggcctcagagctctggctccagagggcacctgtcttgcatggagaggtaagaaatgtttgagttgaactgaatattcgctgccggcctggggtcggtgagattagtgagaagggaacaggtggcg

SEQ ID NO: 39400 - DNA, 1050 bp, Homo sapiens
tggggcagagatccctgtgatcctcagagggactgtgaagggctgggactgctgccttagaccaagttttcttgtcaattgcaatgtctgcgtcaaaatttttctccaaatgatggtggagatccagcacctcagcagcgagaatttgccacgtgaaacataaaccaaattatgcaaaacccataagacatgtgagccatctgggggataaggatgtcttcccaaccaagactggaaattcagaagctaaaatgaaaaaaagtagacttatttctaaaatttaaaataaatacgaaatttttatggcaaaatgcaacataaagtcatcaagcaggacatttgggggaaaatgataatgcagaggacaaagatattacatttacacaaagagattttataaatcaacaaggagaaaagtatgaataattatagcatttgtgaacttattagcaacctagtaaatatttttaaaaagattataccctatgacttaacattccaggatatgtgtatgaggatatttgctaagctttattcaatatggcaaagcaaaacaaaacaaaacaaaaaatcttgaagcatttactgagcacattctgcatggcagaaactgtgttaagtcctcattcaactgtttgaacagcacaatgagtcggccattagacacagccccttattaggatgagaaactctagactcagagaaggcaagcaattcagtcaagattatacaaagaagctacatggcagtaaatgccagatatgaaaaaagatgaagctaaaaatgaaaaaaaaagaataacatcaagaaatgtaaaagacagaactaaaacttaaagctaaggccaggaacggtggcccacacctgtcttcccagcacgttgggaggttgaggtaggcagatcgtttgagcccaggagtttgagaccagcctgggcaacatggtgaaaccctgtctctacaaaaaatacaaaaattagggctgggcgccatggctcatgcctgtaatcccagcactttgggaggctgaaaggtcaggagatcgagacca

SEQ ID NO: 39401 - DNA, 1026 bp, Homo sapiens
tgccctcagtatgttatccagtgccacactgacttccacaagaaaaccacactcaagactaacttgaaaagtgcatagaggtcagaaactcagctttgggataaagcattttttgtaaagaattaagtgaataaaaataaacatctaaaatatttcaactgaaagaaaaaatagattccccattattagagccaatggtttaaattcagacatatggaaaaatttaattttcaattccaggctttaagcctaattctggaagaaaacccattaaagtaatgaagtaataaaacaattgaacaataaatcttgattttgtagagaacagaacaaatgcttggagatacgtcatcattttcatgcttgtggattcatacagacaccagcatctttgcctaaaagttacaaggctgtggtttgtagccgacctcagagtaggagtgggtaggaatttacaggatgttattcttccaagaagagttgggagcatttttgggggatgtagaaacttaaaacaatccaggtgttgaagtagttaagggactctttttctggaaaaataattagttctcaaacctgtttaatttgaatattcaatagagctatcaccaggaaccaaaggaaatgaaaatgagggacagatatggttcctacccttcacgggcttatcacagaatgctttgactttcacacaaatgttttacatcatttcattacctttactccagcacattccaattagcctcctggcaagcaagtaaattgcagctttcacagactttttttctttttaaattttgtttttggagttgtggagactgtgctgcaaattttgctcttgataaatgacattgaaatgtttttaatgccccgagataatgaatgggaatcttaatagtcttctaattaaaatgaaaaatagaaaagtcatgagtggacattttaggagtgtagttctgttgtttcttgttttggaatttgtggatacactaagtgtaatttgtaattaaaaacaattgggaaaca

SEQ ID NO: 39402 - DNA, 1050 bp, Homo sapiens
cctttgtaagtttctggaatttttgtacatgatattttgagttcttctacaataaaatttaatggtccatttgagaaagtgtactcatattaaatgtagtgtctattattgggtagtctgagacaattcctgagtgctcaactctcctttgatctgtcgaaacatagtggttgccatggagtcttgctggccgatgaccaagtaggagttccacattccactcagctgggcgcagtgttcctaatcaggccggacctgaaactctagcacaaaggactttaaaaccggaatgctttatgtgtaatcactgaaaataagttgattatttgtagggcagagtatggtaaaggttaaaaatttcatgtttcacttatttaaattttgatttgtttctggaaaaatattttagtcttctgatgatatgaaatgtaaaattctctctagtccccctgctttgtacaaagtaatacaaaacaagatttgtcttatttgaccttaaatataaataaaatggcagctgaattattgtgagcaatgtagctcaagtatctggccgtcatctttgcattttattgcagtgatgactccatgccattgttaatctggatttatttttaaacagtttaactagggcctttttttgcaggcttttctttgtttctcccctacttagttctgaggaaagcctaaaataagatccctgtaaacactgatgttcattttttaactcaaacatttgcacagccccactgtgggttcaggaaagacaaaaggaggctcctgacttagatctagccctcaaatagagaggggagaaagccttgaagacacatcactgtagatagctgggatgtgtttttgctgtacagaatgagtaggagtgaggagaaaagatgacttttgcctggatagatggggggttgaagaggcttctgagatggtttttgattgcctaccgaggtcattctctgacctagtttgatgtctaactcccttataattgcatcagcttgaacccataaggcttcagtctgtggggagaattaaccc

SEQ ID NO: 39403 - DNA, 1035 bp, Homo sapiens
ttgtgtgtgtgtgtattccctgctctgaaaaagcttaatatttaaaaaatgaaattcaacatactttaaatctttgatatttgtagatgcagtttaggtgctttcacttatttgcaagttataggagaggtctttacttacacaagttgatgattttgctaaagcagaaaccgcggatgaactaataaatgactgtcccataggacccaatatggcccccgctgtcacttcaaagctgtccttcaggactgtcacttttctggtgggtaagcttagcaaactgcccaccatccacacacacagcaactttgctgtctttgtttacgtttaacatacatggaatctctcagaaatagcactttagaaacatgtttcttggcaaaaagcaaaaaaaaaaatccaagtacaatgtaattttattggaagttaaaagtagctgtgttgtgatctgaggctgtgcacgatggatgagtcattaggaagcctagaacctctgtgtattttatcccatctaagagtttagagctttgtgtctgcctcgagaatatcaaatctatggtataggaaggttccctgcccccaacagctaccatgcagggtaggagtgagacacttagaaaacgattaaatatgagaccacatgatccttactctaagtgtaataaacagctgttaaagtaatggaaagagctgtgggttggagtggttgtagcagatcaaacgggagcttgatgtgagctggctcttcgttgagcaggagggaagagcccagcttaggcactggtatgggagacacagacatgatgtgggaagccacaggggttgctgtggaggccagaatagaggatgaagagtctccacagcccagggaggaccctgcctctcaaactgccttctcagcatgctggatttactgatttccatcaaactggtgaattttgtgagaaattccaacaagttgtcttctgaactatttcctttaaaaatcacttatttaaatagccatgtgtaggttcagcctgatttgaaaggaaa

SEQ ID NO: 39404 - DNA, 1050 bp, Homo sapiens
agaggtcgttagaccacacttggagaactgctatccagatcatttcccaaatttgtacatttgctcagtgcatgaaaaagacccacccaaagcctactatcacaaaattttgtaattatgtcaactaagagaaaactttaaaagctttcagaatgggctgggggtcatcagaatgatactggaatctcaatagcagcattggaatctataaatcacaggtagacaaatagctccctgagtactcagagaaaattacttccaaccaagacttttatatctactgacatcattagccaagtgcgaagggagaacatttttgaaacaggaagagtctcagaaagcataccttctgttactcttactcagaaactattgctcgattttgtaatctcccaaaggaaggaatacattggaaatagcaatacagaagaccagcaaaggctatcattaggatggtgttgaagaaacaaccagcaggcctggacagcagcctgtccaggttggagcagaggtcaccaagaaagaaatgcaaagcatagaatatctgatatttgaacacagtgagacaagattgatacttctggcatacaatttgctaataaattaatggtctttatcttgaaaaaagaaaaaaaaagagaaacaattttaactccagggaaaacatgattctctaagaaaggaaatgaaatcatagtatactctgaggctaacagggcataatacttacatagtcttaaagatgtaaattctgacatttaatcgaatcaaattacataacagaactagttaagaaggctggccacggttgctcacactacccagcgcttcagaaagatcacttgagcccaggaagacctgcctggttgacagagtgagaccctgtctctaaaattaaaaaaaaaaaaaagagagagagagacatcttagaactagttgagaagacagaagggtaagtttgaggaaactgagagtaaataatacctaaagttgaaaaataatgaaaacacattatcagcatggttagaagcatggaccttcttagagcag

SEQ ID NO: 39405 - DNA, 1126 bp, Homo sapiens
ttttttttttttttttgagatagagtttcgctcttgttgcccaggctggagtgcagtggcacaatctcggctcactgcaacctccgcctcccgggttcaagcggttctcctgcctcagcctcccaagtagctgggattacaggcatgcatcaccatgcccggctaattttgtatttatagtagagacgggtttcttcatgttggtcaggctggtctcgaactcccgacctcaggtgattcgcccgcctctgccttccaaagtgctgggattacaggcgtgagccactgtgcctggccaaaactgctattttcatttcaagtgtaattaccttaaaaagatacttcagcggcacagctggcttgagcaactgaactggaaacaagatgcaggaccccaacgcagacactgagtggaatgacatcttacgcaaaaagggtttcttacccgccaaggaaagaattggaagaattggaagaggaggcagaagaggagcagcgcatcctccagcagtcagtggtgaaaacatatgaagatatgactttggaagagctggaggatcacgaaggcgagtttaatgaggaggatgaatgtgctattgaaatgtacagacagcagagactggctgagtggaaagcaactaaactgaagaataaatctggaaaagttttggagatctcagggaaggattatgttcaagaagttaccaaagctggcgagggcttgtgggtcatcttgcacctttacaaacaaggaattcccctctgtgccctgataaatcagcacctcagtggacttgccaggaagtttcctgatgtcaaatttatcaaagccatttcaacaacctgcatacccaattatactgataggaatctgcccacgatatttgtttacctggaaggagatatcaaggctcagtttattggtcctctgagtgtttggcggcatgaacctgacaagagatgagttggaatggaaactgtctgaatctggagcaattacgacagacctggaggaaaaccctaagaagccgattgaagacgtgttgctctcctcagtgcggcgctctgtcctcatgaagagggacagcgattccaagggtgactgaggctacagctgctatcccat

SEQ ID NO: 39406 - DNA, 1048 bp, Homo sapiens
cctgctgtgggacatctggctagagatttccaaagctgagggtgaaaggtttgggcatcggtgtgactgtgtaacactagagttctatctaccatctcttaaactacaggtagtcttaccggtgtgggctgaccttccggttatcaggcagcctgctgcaaccactagaaactgcctttgaaggtttccagtccggcacaacatttgtgttctcattaaacagtagagcataggctttggggacacacagctctgggctcaagccttagctgttgctgctctgagcctgttccctcgcgtagaaaggcaatcataatactccctactttatggggcagttgtgggaatggaattaaatgctaatgtgggccgggtgcagtggttcacgcctgtaatcccagcactttgggaggctgaggagggcagattgcttgagcccaggagtttgagaccagcctggcaacatggcgaaactccatctctaaaaaagtacaaaaattagccaggcgtggtggctgtagtcccaggtactttggaggctgaggtgggatgatcacctgaatctggggaggtcgaggttgcagtgagctgagattgcaccaccgcactgcaacctggagtgcaggctggaggaagagaaatatatgggtcaattaggcaaatcactcagatcgtaagtagatatactagtaaaatagcgtgacttagggtccttcactggaagcctggtattaatgcttccattgtgtgggtgggggaaggagagagtgtctccagctctctgtctgtgaggtctcccagccgaatattggccaagggagtgaaaccagaagcaagactaccatgagacaacgttccagagaaaggagggactaaccagagcaggtgcccagctttggccagtcaggctcatcttccagtcctcagtagattattatcaactttaagtgatgtcacagactcccttcctccaaagctgtggacctcttccttcccatgcctcttgttacttggaagtcactctacttccaaacatgtcggctggaga

SEQ ID NO: 39407 - DNA, 1050 bp, Homo sapiens
ggaaggcccaggcgggcagatcacttgagcccaggaattcaagaccagcctgggcaacatggtgaaaccctgtctctacaaaaaatatttaaaaaacaaaatgaactgagcatggtgaagcacatctatagtcccagctacttagaggctgaggtaggaggatcgcttaagcccagaagtcagggctgcagtgagctgagactgcagtgccactgcattccagcctagaggacagagtgagaccccgtctccaaaaataaataaattaattaaataaagccttgtgaagaatctgccgtggagcataatgtaacccataaagccacttaactgggcgcacataaactacataaactacagtgtgtcccagttcattgagagtgaaaatcaagcaagggaccacctcagtgtggtagagccccctccctgccctccagaccctgctctgttctctgtgtctgaccattgactggccatcactcaggcactagttgagaatgccaatgtctttagttattgtaatttcagaagcacatccttgctggacaaagaacctacctgttaattttttaaagtaatgttcatcattttgaacattgttttctttcttttttattcagctgaccctcatgaggaatttaacttggttttctgaactgtgttggtaacatttgaaggacatagaaacagttttcataggtctcaagtgatataaaccacaattctttagaaaatatctttttttttttacccattctggattttgaaatatatacagatctcatacctcagattctcatatgatatgaactgtttcaaaacacattgatagcagaagatacatactgtcttctagtcaagagggtagcgctgtatttagtttaaaacattttaatgcattttatttgctaaatacaaaattataatattctgtataactttccaaatctcatctgtcctccctttcccccatctctttatattcagatgcttgtccctccagcttaaaaattcatgactttgagaaaattcgtcttcatgttatctaaa

SEQ ID NO: 39408 - DNA, 1054 bp, Homo sapiens
atagcacatttctaaatagtctacaagttttaattttagcaactttgtttagtatgaaaatttgatctaggaataatggagaaaggttttttttcccctctttttttcataatcccactactgtaaagaaatgaataaactttttgaaatattaaaaagaaaagagctcttatttaaacttaagatgagaagaacttttaataaacttgtggctgggtgaagacagagttttataatgaaatttttattcttaccttcatggtacagagtccctcctccttacccccgtaaaaatagatgggatgttgtgatttatgatgaggcaattctgtagagacattttatggaatacgtaatcctaggagagattttcctgatggctaatatcccagacacagagctcagaaaacaattatacccagctagttggttctgttcactctactattgcatgagtccaatgtttagattttaaaacaaggaaatttcaacattctgttttctagctgtaagagtaactactttaaaaaaaaaaaaaaagacaaccaaaaaaacctatttcttagaaaaagtcttgctctgttgcccaggctagagtacagtggcacgatcacagcctcaaactcctgggctccagcaatcctccctcctcagctaattaaaacaattttttttgttgttgttgaggcagggttctcactgtgttgcccaggctggtcttgaactcccggcctcaaatagtcctcccgcctccacctccaaaaagtgctgagattactggtgtaaaccaccatgtctggcctaaaaaaattatttcaaatgaaaaaactacgcactgctcttgtagtgccctgcttgctaaacagcagatttcatcataagcaaaatcattttgtaccctaaatattaggacttatttactgatgtaacaaatgggaccaaggagaagctggtcttccgtcttaggctcagaaaacagtatcaaaacagcaactctgtggctcagagtaatttatagcatcattttaagctaatgtaattctatttagtgtgg

SEQ ID NO: 39409 - DNA, 1048 bp, Homo sapiens
atcaatatctattatatctgtgtggagtaggttttctctggtctgattttgacaaatagaagagtgtctacagcgtggtttgcctgtctgccctcctggatgctattaaagctttgttttgttgaacaatcagatgcccaactctgttgccttgtggaagatgagtaaatgcagtgcttcttaaagtggtttcttctccctaccccacacatcttttggtactaccatttggggaagccaagcaaggatagtaaattgatcagaacacagttgtgggaatttggcctgaagttagtgaaataaaactttaaagagtggaaaaaaaaaatttttaacaatgcttgtgatgtactaaagaacaattttatgaggccttacttggtaatgtaataggctctcttcaatacctaatactgtgatgttatgaacatgggaacatttggttttgcaaagtgttgtcatcaacaataagattctcaagagcagaagtttccgccatagtatgcacagggcctgtggactttttgaatatttgaaggactgtcatatggaaagggatcaggcttagtgtgtaggactccaagagctaggacacaacatgaatgcagatgccttctctctagaacaaagaacttttgaactgtaacagctgtctgtaaatgagtgggccaccccagaggtcatgaccttatcaccatctgtgttcaagcatggcagggagaagccctgggcagggatatctggaaggagaaggacaagtggggactttagggtcccttctaatcctgagagtctggcagtgccctactcacccaaggaccgttgagctaggccctgtccccaaaccataggccctgtgcccacaccctgccccaataaatggctcaggaagaacaactgctatatactcatcagcaagaaatgccccaccatcagctgaattatttaaaccattttgatgagtggttttatggcctttcttgaaactgatgttgttattagcactgcctaataccttttccttttttggtttcttggtaaaggtgtg

SEQ ID NO: 39410 - DNA, 1040 bp, Homo sapiens
tacaaaaagtagctgggcgtggtggcaggcgcctgtaatcccagctccttgggaggcggaggcaggaggatcactcaaacctgggaggcagaggttgcagtgagccgagatcatgccactgcactccagcccaggcaacaagagcgagactccgtctccaaataaataaataaataaaaataaaaccactatcagttaccattttacttgtcaaattgacaaaattggatttttcaaaatagttatgataccaaattttggcaaagaaattgaaatggactcccacacactgctggaaagtgtatgttgataaaaacacttcaggaagaagagtagaaatacatattaagtgttttaccgtgcatatcctttggcccaaataaattcatttttagtgtaccctaaggaaaaaatgaatgtatgggaatatagatcattttaaattaaatataccctcacatagtttataacattaaaaaatggggggataataataggacatcaggttaactgtattttgaagaatctttaatgatgtaaaaatgcttgctatgttgagagtgtaagagctaaagtataaactgttacgatgttatgattccaatatttaaaagtacaaatatatatttataaaatatatatacatatgtaatttttcatgttttctccagttaacattattttatgttataaagtaaaattttaacaagaaaatatttaaccttccaagaaattaaggaaatgcagctttaaaaagaataacactttctcaactattaaattatttcttagtctaaaagttactttatttctgaagtaactgatctactactagtgttttgcagatgacacttcatctctttcaaaaagcaatttggtgatattatcaagatctcaaaggccggatgtggtggctcatgcctgtaatcccagcactttgggagtctgaggtgggcagatcacaaggtcaggagtttgagaccagcctggccaacatggtgaaaccacatctctactaaaaatacaaaaattaaccaggt

SEQ ID NO: 39411 - DNA, 1412 bp, Homo sapiens
gccagccccagtctcacccacaatactaaggcagcaaggaaacaaaagacaaaaccaaaacacaggcattcatggaggagtcccttaatctgacatatgagggactgcattggcagatttcccatgctaacaggtaattcccattaaccacacgtatacctataatcggagacagcaatctcttctttcactcttatcatcagctttggatcaaactcaaaagagttattttattagaagagagtgtgctggacaaaagaacttggcactgcattttatgctcagacatcacaaagttcattcagtgttattgagactcttttaagaattccttgtggactggcagtcaggatcagatgaggcttggtggagctccactcctccatgatctgttttctgcagctctcatgtactttgctccttcggtagcaaatccactgcaagagtggctagacatactgtctaagtggatttgctcaattgatcgctgcctaattgtagagctaatggacgaggaggctgggtcagggcgggcactggaaagttgggtgcttaagtgaagtggtggttctgatgcatcagctctgcaaataaagtagcttctagaaggaagcactctattttatgctgacagagatctctgcccataccagttcttactttgtcaaacacatatttataaaatacatgttatcatggcagaatactttcaaagatataaactgatgatgtatgcaaagcaaacgagccctctgtgtgaccttgaacaagccattagcctctctgggtgtgtcccctgtagacattctcatctgaaaaatgagaagttggaccagatgaggagttggatgtggatgtgtagccgtggactcagagttagacactgtggaattggagccctgactggtagtgtgttttcatttctctagggctcaattttttatttaataaaaagaatacttctgtattttaatgaataggatcaagtgagaaactgctttgtaaaatatgaactatgttcaggtcagcaattatactaattctttctatgatctcatctagtctaagatgccgtaagtgggggggtttttcatgaggatgaaatctgtccgttgccagatggttcaaagggcaagccctaagtcagaggttttacctcaactgctttcaagtcacagataaccttgggcacatgaacccttctcttccttggtttccctacctgtaaaatagggctttggatagggcttccctctcgaaaggacttggtaggtttgaaatgaggcatcaatgagatcatggggttgagtcctggcacctgacacatggtaagactcaatccttcttggccactcctggctgtcattgttacccccactattgatacactactgatgaaggttacattttct

SEQ ID NO: 39412 - DNA, 1056 bp, Homo sapiens
gctggtggcaaagccagtgtattgcacagtgggaacggggtgtggtcaggagacagtgttccttgcccattgcttggtcaagcctgcactgtggggctcgttcattccttgcccttggatgaagtttataatagttccctctcattctcagttaatatctagtccctctaacacatatattttttaattcctctggtcactttcaatcataagaatagcccctaaaattaaaaatgcatatccagttgtatatcaaaaccaaaaactccaaatgtcactcagacttgagctcctctcctcccctgtctgggcctcctctggctgacagtgggaaggggaaggtggctgcttgcttctctgccacccttgtcttgcacttgggctcgccctggcccctcctaggttgaagctttggcatgaaatggtgcccatgtagcctctaccagcagacgtcctcacacttttggcagaagccccctgagcagtacctcatttagactttcctacctctgattccacacctggtctcgggtaccacagacctctgacctctggctggggacacgccctgagccttgccaactggtcttctggtcctcacttgtggcttaagggggaagcggggacgccaaggcgggtggatcacctgaggtcaggtgttcaaaaccagcctggccaacatggtgaaaccccgtctctactaaaaatacaaaaaaatttagcggggcttggtggcgcatgatgtaatatcagctactcaggaggctgaggcaggagaatcgcttgaaccccaggaggcagaggttgcagtgagctgagatcacaccattgcactccagcctaggcaacagagacagactctgtctcaaaaaataaaaataagggggaagcagcttcgcatgctcttcactgggagctgggaggggagctggatgtggcacactgataactttctttgaagaaattctttcccaggttctaacccgtcaacccttttgaagcctcaatgggctaaggcatacaaaatctatttcaaactgctttgcaaaccctccc

SEQ ID NO: 39413 - DNA, 1052 bp, Homo sapiens
attaaatatgaaagtaatggaaagatgtttatgacataaggagagaggaaccttcgcctgtcaggataatagaaattgaaagatttttatgacctggctcagcagaaaaaggagtatatgatgttagcaattttttagaattgatttttcagaagaaacatgcaaaacaaatgagaattaagtagctagaaagcctttttcccccctttattcagataaagtaactgaagacttttaatgagaagcctggtttctgtctttctacacggtgcactgggaatagtaagctgttagaagtcagtgcttagaagtacctaccatcctaaacacaggaaccaaaaacaagggaaaaaaaaaaaaaaaggaagataaataaagtaaaagtaaaaaagtacctaccgtcccaaattttgtatatgatgatgttcacgtttttgaacttacacatattcttctgtataagtaaaatatttcataaaattaaaaatgttttataaaattaggaacagaatttcttaaagatcaacatggtactaatacatcttacaatctgtctttcaaagtttcaatagacttaacttagagtcattttttaaattgcattttgatgccaatataattcatgtgtcattttccgctataatacaatgaaaatccagataatggagatggattttcttctgagtagccacgcatattaggtttcaggctccaattgcctggttttgaattgctctttgccatgtgctgtctgtgaccttgggtgggtcacttcacctcccccaaatctaggtttctccaatacctacctccaggcttgttctaggcatgaagtgcagtgatgatggagaaggcatggactgtggcacaaatagaagagtcaggggttggcagctcctattcccactgtacgatgccaaggatctttacctataggataagccttcagaaacataatttggtctttcaagtgctgaatacctctgtgagtatacttttttccatcttttttcttttggtaaatgaaactcactgagaaatttgacttctga

SEQ ID NO: 39414 - DNA, 1057 bp, Homo sapiens
ctttaggaatgaaagggtatctaagtggaatgataaaggaagacttcatgcaacagaagaatttaagtaaaactgaaaaactgaaactaatgtgatcatggcattaaatagtgtaaccctgaagacgcatccagtatataaggaacaccacagcagtgcctatactcaccgttattattcatcattattctgaagcatgaataagaacaatttcaaaaattataaatattggaaaggaagagacacattttattatttatgtacagaataattatataactagaaaattcaagagaggcaactgacaacttattttaagtaataaaagttttagtttgctagtggatgcaatgtaaatatgtaaatgtcaatagttttctttttttgttagccataaatacatactgtaatagagaaaatgtcctacttatacatgtcccccaaaggatagaatacttaggaaataagtttagcaagaaatgagcacatagaataaaactataaaactttattgaaagacaaacaacaagacctgaataaatggtaagacacatgacatactcttagatgggaataactggtattaatcatccttcctctgtcaaactaacacctaaattactataaaattactatactatatcatgccacactatactatactgtatttactgtaaaaactgcagaggaaaatgaacttcgtggttaaattaatcacagcatttgtctagattctgcaagaatgaattcatgaggatggatttaaaagctttttcaaggccgggcgcagtggctcacgcctgtaatctcagcactttgggaggccaaggtgggcagatcacttgaggtcaggagttcgagaccagcttggccaacatggtgaaaccctgtctctactaaaaatacaaaaattagccaggtgaggtggtgcgtgcctgtagtcccagctacttgggaggctgaggcaggagaatcgcttgaaccagggaggcagaggttgcagtgagcctagattgtaccactgcactccagcccggcgacggagtgagattctgtc

SEQ ID NO: 39415 - DNA, 1085 bp, Homo sapiens
tacttctgggtatgtccacactgctggagctcagaaatgcacaatgaaaaaacaaaacgggttgtggaagtgtgtatacaatctgttacatttttgaaaaacacataacacaatgctatattctgtttatgcatgtgtgcttatgtagaaaaagtctgaaaacctgatctgcataagctctgagttcataggagttatgaccatgggaagaagtagaggggtgggatgagcgcatgggatactgaactcagctatgctgctttacttctctgaaagaggaacaatcttaagtaatcatggtaaaatgttaatgtttgtccatttcagggtggggaaggaaatttaggtctgtaatttaggagagaggttgaggccagagccaagattggcagttgtgatgagtatgtggttacatcttcactttttttagaactaaatctggatgtcaatggccatgtttagtgggccaggggccttacattactttcttgcagcactgatggcttttgtttgaggctgcacaaattcctgcatttcccttgggttgaatggtagggatgcgggcagttggtgactgggtgaaccacctgacttgagcagggctacgactctctctgcaaacgaaacccagagacatgaacagtgctgagatttctcagtggtttcccatgtaggctgctttccaagggcagcaagcatggcttcatcactcacccagtgcttctgattcagcactgtgatgctcggttaagttttaatgaggttttaaattttttcgtatgtttgagtgtttatgcaaacaaagatgctgaattgtaaacaccagcaatctgagtaccttcttttgatttctctctccatattgtttagtccctttttctttgtttgttttatgaaattgcatagatgttttggttgagagtagattgtttttacttttcagggacaggcaacaatttcatgatataacttctaaaaatattttaaacaagtatgaaaatagttttttcttccaaaaaaccatttcttcatttggcacatacacaaacaaatgagcagaatttagagtaatttagagacagaat

SEQ ID NO: 39416 - DNA, 1027 bp, Homo sapiens
actccttgatcatcatgggttctgtgctacctggtagtccaggatggttgcacaagctccagccattgcatctgtatcccaatcagcaagaaaaaggaagaaaggcatacccccttttcaggaggcttcctggaaatcacatacaacatacctggttacatctcatcagtgaccttagtcacacagccatacttagctgcaagacaagcgaagacattcagattctacctcttcttcttgaaatagaaaggtgagttgccaatccactgtcagcgtgacgacagttcaagaggttttcctagacacagagttgagttaatcccgtcatctgtgtcatcgtctctattttgacagcatctgtcaggtggtcaaccagagtttaggcaagaagacctatgacttctctacacagacatgattaggattatcttctaaatcaaccaaactgaccagcccaccctttcattcttctgtgcatcacagatcatttttgaaaaagagtttaggacacatccaatagtaagagtgtagttttataaatcaggactcagtcttacagtggaagattatatggtagttagtgtcatggagaaaagcttcatattagattagttgaatcgattgggatacagaaccgtctttagagcatggcatcgttacattgcagataaagcatgtaggtagagaatgatatctttgttggggagagccccaaactgctcttcaggaacctttctccgagatttgcaagccaattaggcataatgaaaccttgtttttaatgcatatcttttgccagtataataaacataataattaaatgtttatatatctttcgtattttcctgtataatacaactaatcatatttttgtcaggctgaggacatctcaagaggagggaaaggtggcaaattgagggtctgttcttcttttataccagatggcaattataacaaattacttctggacttagggatgggggaggggtggggagatgggaacatgagaattattcctgatttttgt

SEQ ID NO: 39417 - DNA, 1025 bp, Homo sapiens
aggttaagcatccctaattcaaaaatccaaaatccaaagaagtgctcaaaaatccaaagttttttgagtgacaacatgatgccaccagtggaaaattccacacctgatctcgtgtggcgggttgcagtcagcatgcagttaaatctttcatatatgcacaaaattattaaaactattgtccagggccaggcacagtggctcacacctgtaatcccagcattttgggaggccagggcaggcagatcacttgagctcaggagttcgagaccagcctaggcaaggtgatgaaaccctgtctcctctaaaaatacaaaaaaaaaaaaaaaacattagctgggcacggtggcacacacctgtagtcccagctatttgggaggctgaggtgggagaatcacttgaactgggtggcagaggttgcagtgagccaagatcatgtcactgcactccagcctgggcaaacagagggagaccctgtcttaaaaaaatatatatacatatatatatatagtttaggctatgtctataaggagtatatgaaatataaatgaatttcatgtttagacaggggtcccaaccccaagatatctcgttatgtatatgcaaatattacaaaatctgaaaaaatttaaaagccaaaaatcacttcagtctggtgccaaccatttttgcataattgcattttccatgttgcattttgcaaccattttgcataattctgtacttctttcccttttgggtttgttttcataactgctcagtaaaaagtgttctgtgtcatctttccattattttgggctaaatcatgttaatggccaagcctgtcagaattcatttgttttgagttaacttcctggtgtccagttctcaggagttgcaagaatagagctcttccctcatgcaatcatccaaaatcccaggcctctaaccaggattggggaacaccactgttggccaagagcagaaggcttaaagctctggtcatagtcatggcactgtacaaactgttcttgttccctacaagaaca

SEQ ID NO: 39418 - DNA, 1041 bp, Homo sapiens
ggccctattaccttacccttgggaatttattccaagaacgtaatttgaaagagattaaagcacataggcacaaatattttcagtgcagtattgtttatattggaaacaacccaaatgttcagtaacagggggaacaattttgtaaatcttgctacagcaacttaacaaaattataagctgccacttataattgtaaattttgaaagtttgtagcacagcaaggaaactgatcatgttaaatgtttctgatatcttagttaatttttctcccgccagttccgatcggtgtcctggtcataccgtcagcatataagtatgtatttcataaacatttactttgtattaactcagtagtattcccttcctagagtggtttgcttcccagattgtaatggacaatcatctcacctggggatcttgtaacaatgtgattctgattctgtaaactttgtggggagcccaagattccacatgtcttagaggctctcagatactgctgatgctgttgatcacgaatcacgcattgagcagcaaggtcctagagctctttgtgtatgaagaagatactactgacccagtgcctcgctatcttgaaaggcagctgtgacctttctagcaactgagggggtggggactagaaacgagtgttttctggtgtttctctaataaagctgctgtcttgtatccagattgaccatcagtatccttatgcccttcaactaacttgaaatttgtcagttaacagaaattactgggtggcactaaaataaattattcttaatataaagggtaagaaagggtcgggtgtggtggctcatgcctgtaatcccagcactttgggaggccaaggtgggcagatcacctgagatcaggactttgagaccagcctggccaacatggcaaaaacccgtctctactaacaataaaaaaaaaaaattagccgggtgtggtggtgggttcctgtaatcccagctacttgggaagctgaggcaggagaatcgcttgaacccgggaggcggaggttgcagtgagctgagattg

SEQ ID NO: 39419 - DNA, 1088 bp, Homo sapiens
ataagtgaagaagaaatccgtgaagcaagagcttagcagcgttgttgataagcctggagtcacagtggtgagagaacggggctgatgtattaatatttaatattaccacagctctcgcttttaaggagttgtttgtgagctgggtatatgggcgctttgcacatgttcacctctttggtcctaacatccctcttaggtggaaactggtgatatcttcccattttacagacaagaaaactaaagcacgaagagactaagtcaactgctcagtgtcccatagctaggaagaggcagagctgggagaaagaatatccagatggttgaggtcatcaccctgctctgttcttcagagctaagtactgtgctcaaaagtgtgtgtgtattggaggtctggggggagacatagttaaaggggacagtgactgagtgacccccctgaagagaaagggtgacagtgatgggcataggcacagattccatgccacacaggggacatcatcgctggcacgcagtcagtgtttacggaaggaaggacacagggaattaattggaggctagctcataaaaggtttttcatttttatgaggccattttgtgaatgaggaactagaatattctggactacagaggcggtagagatcaattgagggagaagattttggatgagtgaaaagaaaaatgttccagttggaagctttgagttctcagacctagaggtgttcagcgcaaaatagatgtagccctgctgtgggcaagtcagaggcattgaagccaactcagatggcaggtggccaaggagaccctgggttcctgttctttggtcctgggtaaggcttgccagggtacctacaacccttggcacatgccagagcctttctacataaaccactgtagggagagtcacccccagatcctgctgtgagtgtgcctctgatcatgccatctgatcatgccatcttgccgtctgatcatgaaccaccccactctgcatagcaaaggcagttattttcatgaatgatttcacaaagtgcggctcttttcaaggaaaacatcccaggtgaaaaagaggtcagtaatcagaagaaatg

SEQ ID NO: 39420 - DNA, 1023 bp, Homo sapiens
ttacaggtgtgggccactatgcccagcaaatttttgtatttttagtaaaggcagagtttcaccatgttggctgggctggtctcgaactcctgacctcaagtgatctgtcctcctcagcctcccaaagtgccgggattacaggcatgagccactgcaccaagccccggatacctcctgcttgaccagaccttctgcaaacacaccttagatccctctcaaatctagatgcttctccaacactggcttctaggttctttatgaaacctctgctggccggcagtatataacccaccacccagcctgccaggcacgtcattcagctgtgttagacagtttcgagggatctgcacctgtcatgagcactggcccaaccttctcaaagcatcccactcatccctgtgattctggcaaagcttgccccagctttctttcctcgatggttgaaatagcacccaatgagaaaaaaacagtggcctgtatttattatacttacacatgtcacaagaatccctgtagtgtcattgaaagctttcttctagcatgcaaaatgattgtcactatgatgtaagtttctagaaatgccttatttcatctaaaattatgagagaaggtaaaatgatgaactatcaaagtcacactacatgttggccggctgccttctaccactcactccatccctccccaggctttctgacttaaatttagatcacatgagaccattgcagtggagagagtgtccactttctcaatctaaaagcaagctcgtgaagaccattaaatatgatcacaggaacaaacattaaaggtaccacacgtaatggaccacttaagacagaaaactacgatcttagggtttaggggaaaaaaacactcaaacagcacaggcttccagtctccccagtctctgagaggttgggatttttttttttaataaagtacaagggctccttgaacatgaacacggaacgagcgttgcacctgtattcattcatttcgctcttgtaacacattgatgttcctaag

SEQ ID NO: 39421 - DNA, 1050 bp, Homo sapiens
aaaaattagcttggagtcatggtgcacccctgtagtcgcagctactcaggaggctgagatgggaggatcacttgagcctgggaggttgaggctgcagtgggctgagattgtgccactgcacgacagagtgatactgtcttaaaaaaaaaaaagaaattatagtaaactatatttttttaatgctacaatggataaaaatggttacaactagataagaagcctctaaattgcctgaacacctaagacttatttgctagttgacatctgatctatttctgacactgaaaatttcagtgctttagggtgctaaaaggaaaaaagagggtttgctaggaatcctgcagttgctgagggggtactctgataagggaattttaagcaattacagaacatctcactaaagtttttaaaaaatctttaaccagattaaacttatacaattttgttataatttgtgtttctccaggttccaattgtggacaagataaggaccattgctcaggctgtctatggagccaaagatattgaactctctcctgaggcacaagccaaaatagatcgttacactcaacaggtaaaagttctacttttaggggaaaagaaaaaattcaccttaggctctcagaatactcagcttgacttgaggatttgtacatatcgcaccagctaacctttgcttaatctattgtatggttaacaaagatgaaggtaatatcctcgggtagagtgtagactatatttagaactttatggtgaggcatatatcctctgatccatgcatcatttacttctgtgactataaatgtgtctgatatgggtggtatccctgtttttaggtgatgtgtgatctttcatccctcccactcagccctgaatgttgaagctatcctttggagtagagctgcggagtcagatttagatgaattgcaatgcttcctcttccttacaggcctcttacttactaccttaaaaatgctagcgtggtgccagggtaggcagataggagtgcagcctataaagatgggaatgtttgctgttcttcttatgcaa

SEQ ID NO: 39422 - DNA, 1090 bp, Homo sapiens
aagctcccctctggctctagttggagaatcccaacccaagcaagtccatccttaaacaataaacatctccagcattgctggctttggaagaccccatggtgagatgctggagcttttttccgctccagatttcgcttctaaatatttacttttactttccatgttcacttataggccagggtttttttttcctaccattgaattatttcgtcatgttctatttaattattgctttaattggcattggtgaccacaaataataataaatactattaactggtgtaacagcttcactagtctatttcactgccccatgctgttgtaactgaagcccccagcacaagcattcccagctcgtggtcatctaagacctttgaggtcattcttacatgcattgctagtgttttccatattccttgatggtagccaatttttccttcttaaaataactttcttcattcctagtaagcttcatatgtattttatgtattcttccctcttttttatgacatgatacatattattgaaagctaggaaataatgcaagattcttgaacgacataataccacttagtacatctttttgtaagagatagtttttctaatacaaatctttgatatgggaagaaacaagcaagttgttttttaaggttttccaaccctatattctactacaaattaccctgttatggtatgcttccaaaattctttcaaggattatggtttatagagttcaataaacctaatagtttataaaacttctcaaaaaataatctcatgccaaaaataatttagtagtaggtggtctttgtcttgtggtcacatggttttgatattgtctttaagtttctataatttacaagggctgtttaatcagttggcataaatttcatgacaaaaatactaatatgtaagcaaagtatatgaaacaatattattgagaagtaaattacattccatgtagaaaaagactagaaagacaacaccaaaaccttaaattagacagtgttattatgagtagctttttttcttctctttttccatatagatcaaattactacattgggcgtatatcacttttataacatga

SEQ ID NO: 39423 - DNA, 1565 bp, Homo sapiens
gaggcgtataatcagaagcagctaagcaatatatgcaagggaaataaaatgaatgcaaaccaagataccggttttgtaaattagatagccaggccaccctcagagtcagtttgagggtatagtgggaagcctgaataaaaagagaagttaaacttttaagaaaagggtcaagctttaaaactggaattgggttttcaaatctaatgagtaaaaagaaaccccaaaactggaattgtaattgtggagaaatataacggataatatctggaactcgcggcagtttacaggcttaactatgtatgtgttccttaaattatccacccgcagatatcagattacaataagtcctcacttaatgtcattgataggttcttggaaactaccactttaagcaaaaagacatgatgcatatgaaaccagttttcccatagtctaattgataggaaaaagagttaagttatgcagccacacagtacctcgtttggcttaaagtcactgtttccaagaacctatccacaatgttaagtaaggacttaccgtatatgaaaatatttgcagtaaattgcttttgagagaattggttatcacactcttctctgggtatcattgaaaattcagaatgtttaattacatcaggctatactcactggtataaaatcagggagcaagtataaagtaggtgtagggaaataatttatgttggattaaatgatccaatgaagggattttattaagcccctagaagtcccagaatgaaaatgtataactgcatgactaacccctaagaatttgctggggtttctgcattaagtacgcttcccaggccatttgtaatgaaggtaccgtgatctgttaaggaagagacctacagctgggaacaaaaagagccaattccatcctagacatcagtctcctgtttgactcattccaaccccaagaatatgttgtagagtgtaggacccatgaaagttacttactgtgcttccctgtaccttccgtcatccagttcccagacatatctgtgtttcttctctgaatgcctagttacttgggatcccatgctgtattggtctgttctcacactgctgtaaagaactacctgagactggatagtttataaagaaaagaggtttaattgactcagttttacaggctatacgggaagcatggctggggaggcctcaggaaacttacaatcatggtggaaggcaaaggggaagcaagcacatcttcacatggcggcaggaaagagagagagtgaaggggcagtgccacacacttttaaacaaccagatctcatgagaactcactatcacgagaacaacaagggggaaattcacccccatgatccagtcacctcccaccaggcccctcctccaacactgaagatcataattcatcatgagatttggctggggatacagcgccaaaccatagcacatgcctttcccaggactggtgatggaggaacggtgcccttgtcacacctaccagaatatactcacccacctccagacactccatttctctttcaagcacacctcttcacttgtgccgccagctaa

SEQ ID NO: 39424 - DNA, 1069 bp, Homo sapiens
ggccgtgcatgctgagcattgagacacatcacaagggagtgaaaacctgctgccatacccccccagaggcagcaggatgtttggataaataaggcataaacacctggagaattaaagcaagtacaattagtgcagcctttgccaagagaaaggtgtaagtgctaaatgcagtagatgttcaaatacggcagagaccacagtgggcagggtaggccaagaatgctgcctaaggagtggggcttggggtgaaactggggcatttgagacactgcaggcccatcaccctggctgcgccctcctgagggaggcagggactgaggcgggaggcctggagaggtctgtgcgtgagcctgggggctcattgataaggagcttccagtgggggcaataacattggaagtggagaggatggcatgtgtgccgggagacgcagtggagtggaagtcgccggaactgacaagggatgggatgtgagcaaggagtccaggtgagtcctggggacctgaaaggatggacccagagagataaacgacttcaaaccggcacggcagtgaagtgactgacccgcgagtgccctgcaccgaggctgacatttgacttcctgccaagttggccatcagacagttagaaatcaattttggagttcaggagagaggccagagctgaaaattggggagttgtttacattgggagtgatatacagtctctacatttccatccagttcaaaacattcttgcgtgtctgctatgcactgtgcactgaggttaccaagactggaaagacccaatccctgtcctggaagcttagtgttggcaggaggcagacaagctgatacatgcaaacaaagggctcacaggtgccaggatgccaagggatacagaagaaggatggttgcttctctacccaggagtgccctgaggtgtcttaaaaagaggagcatttatgactcaggcagggtggcacattccagacggcagtgggcaggagcctgactccagagcgccttagaggctgccgctgggagttgagctggaccctgaaggcagtagggtaagccataaattaggg

SEQ ID NO: 39425 - DNA, 1995 bp, Homo sapiens
gggattacaggcgcgtgccaccatgcccagctaatttttgtatttttagaagagacagtttcaccatattggccagactggtctcaaactcctgaccgcacattatctgcctgccaccacctcccaaagtgctaggatttcaggcataagccaccatgcccagctggaggccttatttttactgctattcagagaacctgtggcttatccatggagggcttaagctttgccttttctcttgctcatttccatacctagcaagagcttaagctggtttattgcactgacattctaatgaaatataaatagcttctcaacagagagataagaaagaggagtatctagtacagcaagaccctctgggtgggtcagggccagctggggccgtgccggggctctgagtggaggaggtggcgtgggagcactgatgctcgggctctgtcacatccgtttttggcatttgtcctggcaaaggctgcatttctgatctttcagaaagctgtgggtacactgtacagaaatgtgttttgcttgctttgaaggatgacctactggctgacagccagccagaattaattccatatacatttgcagattttcagtatgagagacggcaattagcctacagaaacccatttaacccccgaggtggagctgtatggtgaagactgttatttatgggagtctgtgtaatttgcctctgtgacaagggacagccatggctcaggagggcccacgccaccctccttttcaaggactcctgcccctgcctgagtggcttggcctggcctggccatgtgagtcttgtggacacgtgcacatcagtcagggacccctgtggtatggaccaaagggttgttttttactgttttaacttatttaatagcatctcatcagtattacaggcatgtgccgccacgccaggctaattttttttgtatttttaatagagacggggtttcaccatattggccaggctggtcttgaactcctgacctcaggtgatcaccccgtgtcagcttccaaagtgctgggagtacaggcgtgagccaccgcacctggcccacagagcttctaaaggaaatgtgttggttttttaatcaaagttgaggcagtgcctcagtgaggggcaggctggagcagtggtaagcgcgctgaaggagtcgggctctctgggcccaaagtcctgccctggccacagagtggctcccttccccctgaggtgggatgatgttctccagggccttttagctccaggctgctacagttctaaactggtggtggtggtggtggtggtggtggttgtggtggttgttttagatgcagtctcactcttttccccaggctgggatgcagtggcatgatctcggctcactgcaaccttcgcctcctgggttcaagcgattttcctgcctgcgccaccacgcacagctaatttttgtattagtagagttggggttttgccatgttggccaggctgctctcgaactcctgacctcaggtgatccgctcacctcagcctcccaaagtgctgggattacagatacgagccaccgcacctggccatgattgttgtttttataaaatcagaatataaaatttgaaaatgttcttttttggtgagaaatgagaactaccaaaggagtaaaatgctctaaaagccatcaggtccttcccacagtattgaggctctgctcttaccattttgttaaataagttttgttcctaacactctttgtgatatgaagtattcttgctaatcaagctgcccggagactggcgtttcccagagcagtttcgaaagtggaaatgatgctgcatttcctacccacagtctggagggtggctgtgctctctgcacggtgggtctgtgctgctcagttacgggatggtaagggaaggctctaactcggtgtcttacaccatgcactagggagtcgcccgctttatttacgagcgagttgatgctttcagtgggttttggctttgcctggt

SEQ ID NO: 39426 - DNA, 1084 bp, Homo sapiens
acaagatacacttagttcctccagcattgaactatgacgacacctgaaatattgtctgcagaagaggctcattagagactcagtccccaaggtttttattgggtaatggtcacgtaccaaatttcagtctctcagaacaaaagcaaatgttcagcatagaccattttgtttgtgaaatttaggcacagtgagcccctcttgtcagttagaggatagttgaaaccctcccacaatccaagttctcagactcaggcctgctacattatttctttcctacacagtagtggatttggttactaacatgttggatctgaagcatttgttgtaatttacagtgaagatgtccactgcacagttccgtattgagtctgaggttcactggagacatctgtgctatcaatgaaagtttctggagtcattagcccctcaaagggtcattaaaaccaggtcttctagagagaaagtctaaccctgtattcctttaaaccaccatagagaccatctagttcttcacattataaaaatgagaaaactgagtccccagcgatgtggcttggttgcacatttttctatttcaagtctgttactccttccatcataccagactgcctcacaaaatgacaaagtcaggcattgttcataaaagaacaaaatggcatttaggttataaatcaggcccttgtaagtttggttaatacaacttatttcccaaagatcctggtcctcagaccctcaaaaggagagctgatcacatcaaggcctctacctggaaggaatttctaagcagcctctaagtcaactgttcatgttcagtccaccttgatttacaaagaacagtgaatcattaagacctttctctccaaggccgggtgcggtggctcacgcctgtaatcccagcactttggaaggccgaggcgagcggatcacgaggtcaggagatcgagaccattctagctaatacgatgaaaccccgtctctactaaaaatacaaaaaaaattagccaggcttggtggcgtgcacctgtagtcccagctactcgggaggctgaggtaggagaatggcgtgaatccggggggcagagct

SEQ ID NO: 39427 - DNA, 1047 bp, Homo sapiens
attctaaatattaagcaacattgtaagtacagattttttttttttttttttttttgagttggagtctcactccgatcatccagactggagtgcaatggcgcgatcttggctcactgcaacctctgcctcctgggttcaagcagttctcctgcctcggcctcctgagtagctgggattccaggcacccaccaccacatttggttaatttttgtatttttagtagagatggggtttccccatgttggccaggctagtctcgaactcctgactcacctcagcctcccaaagtgctgagagtacaggcgtgagccaccacgcccggctagtacagaattttttatggccccttttaaagactgcaaacctttttataccaaaaaaaaattatttttcctgtatttattttacacattagtaaatgaatgaaattttggctctaggtttagaaagcaatttcattttaagctcattttactgtgtcattggactttttattaattttattcttgaactacttagctgaaaatcgaattctgtcattatatgtaatcatataatgcttctcataatgttacactttaattagatgcagttgaataataacctaaaaaatcttcatagtctataaaattcacacttatatttataagacaatattatctcacccattgatacataatgttatgttaaaagtacacaatatggccaggtgtggtggctcacacctggaatcccagtactttgggaggctgaggcggcagatcacttgagcccaggagttcgacatcagcatgagcaacatgttgaaaccccgtctctaccaaaaatacaaaaattagccaggcatggtggcgcacatctgtaatcccagcaacttgggaggctgaggcaggaggatcacttgaacccaggggacagaggttgcagtgaacagaggttgcagtgagcggagattgtgcctcctctgcactccagcctggatgacagagtgatactctgtctcaaaaaataaaaagagtacacaatattatctcacccattgataca

SEQ ID NO: 39428 - DNA, 1049 bp, Homo sapiens
tttctattgtatgtttgcatgtataaatacttaccattctgttacagccacctactgtattcagaacaataacatgctatgcaggcttgtagccctggtgcagtaggctgtaccatacagccaaggtgtgtaggaggctataccatctaggtttgcaagtacactgtatgatgttcacacagtgacaaaatcacccagtgatgtgtttctcagaatgtacccgtctttaagcaacacaggactgtgctgtaaatgcaaggtaaccatttcagtaattcaacaacgttatagttaaagagttgtaaccttgttatagttaacaaagttaatatatagttatctacaaagtagataaaatgaaatcattaaaaataatccagaggaagcagaaaagggaaaaaggaacaaagaacagataggacaataagaaaaagaatagcaaaatagtagatttaaactcaactatatcgataatcacactagatataaatgtcctaaatacactaattaaaatgcaaagaatgtcagattggctaaaaatgcaagagccgactattactgtcaacaagaaaccctttttaaatctaaagacataagtaggttaaaggtaaaaggatggaaaagcgctaatactaatcaaaagaaaattgaattggtatatcaatatcaaagtagaactagagcaaagagtagtaccaaggatataaaagaggcttgtttcattatgacaaaggggccgtttcacgaacaggacatagcagttctaagtgtttaagcatataataacagagcatcaacataaatgaagaaaaaaaaagataaaattatagggaaaaatagaaaatccacaaatatagtcagaattttttaaacccctctcagaacaagtagagtaaaaatcaataaggatttagaagacttaaacaatgctacaattcagcttgactccacccaacaacagcagattacgcattcttttcaaacgtacacagaacatttgccaaaatagaccatattctgagtcacaaaatgtcttaataaatttgtaa

SEQ ID NO: 39429 - DNA, 1074 bp, Homo sapiens
aaaaaaaaaaaaaaaagactgaccataccaaatgttggcaaggatgtggaacaactggaaccctcatacactgctggtaggaatatataacagtaccacccccttggaaatcaatttggggtcgtttcttaaaaagttaaagtgcacctgccatatagtcaagacattctctttctaaatatttacccaagagaaatgcagtatatgtccatgtaaagatccgtgcatgaatgttcgtagcagcttttttgtaataatatacagtaagctttacactttgacatgtgcagtttattgtatgtaatttgcctcaataaaagttttaaataatacaattttatccaaaataaagttgtgaaaagtagaaaaatgaggaaaaagtttcaaaggttagaggggtcagtccaggagacctaacatctaactaatgggaattccaataagacagaagaaaccagaagggaagaaattatcagagaaataatcctcagccttccacccaaaattttctctcctagaactgaaggactcccaaatcaaaagggtcagcaaaataaatgtatagactcacaccaacacacttcatcataatagtaaaaagaacagtagagtcaaaaagaggatactaaaagctttcagagggggaaaaaacaaaacatgcaaataatctggaacccgaatggcatcagacttttcaacggtaatactgggctgggtgcagtggctcacgcctgtaatcccagcactttgggaggccaaggcaggtgaatcacctgaggtcaggaattcaagaccagcctggtcaacctgatgaaaccccatctctattaatagtacaaaaattagcttatttcttaaaagccagcaagggggatggttttttccttgggctggtggcacgcatctgtaatcctagctactcgggaagctgaggcatgagaattgcttgaacttgggaggtagaggttgcagtgagccaagatcgtgccactatactctagcctgggcggcagagtgaaactgtgtcttaaaagaaaaaaataaataaaagttatcaaaaaacaaaaacaaaac

SEQ ID NO: 39430 - DNA, 1060 bp, Homo sapiens
ttaaattgtatcgtcagccaggcgcaattgctcacccctataatcccagcactttgggaggccgaggcagacgaatcatttgagtcaggagttcaagactagtctggccaccgtggtgaaaccttgtctctaccaaaaatacaaaaattagccaggcatggcggcgggcacctgtaatcccagctatttgggaggctgagacaggagaattgcttgaacccacgaggcggaggctgcagtgagctgagatcacgctgctgcagtccagcctgggcgacagagccagaggccatctcaaaaataaataaataaataaataaataaataaataaataaataaataataaaattgtgatgtagttaactggtataatcttttcagttatttttaaatttttgaaacaacacgctgtatatcagccatccatcagagaaggaaagaaatatgtagaaggactgtcttctgcttcagatcatgaactgtaggaacaaaatagatatgtgtaaaaatgctgctccttttctgaaccaaaataaaattagatttttgttgttgtggttgttgttggaaaaggtagtagatttcaggcaaaatcagaaaataaattatttcagaaacacaacaaaactaagtacaacgatattttggttaagaaaattatggttagaaattatgattctatcactttatgaaacagaatctttaataatttttcagcttataccaaggatattcttttatttcttaatgactagttttaaatatatgactattctctctgtacagatttttaattaatgctcataaaggctattgatagaactcattctttctccaaaatggagttaacccgaaatgggtagagattcagaagcttcattgtagttaaaattagggtcatgaagggcaaaagcccaggtatttcagcctttgtagaagaatccattaatgcagcattacaagtaagtgtaatttagtggctccttagttattttaagcaagaggcctccttaaagggcacacagataaagtcaacatagatctccactgaccccaggc

SEQ ID NO: 39431 - DNA, 1175 bp, Homo sapiens
gcaaactgtagatcccaaacttggaagttctgggaattctgccagtatccccaagtaaatctcttgggaagtttagaatgctgcatggcgtagctgtgcctgctcttatagagtggtgcagactctgcttctccacgtctgctaagtaaaatattccaaacacagatcagccttatctagcgaaccatcactctgctcttgaattttcttttggcctcaaactctagagctataacatgttaacggtttaacaccagaggagaaagctattcttaaactactcaaacatggtttttttttctatttttcagactcctgaaacagactactctttgcctttttgctgcagttggagaagaaactgaatttgaaaaatgtctgttatgcaatgctggagacatggtgaaataggccaaagatttcttcttcgttcaagatgaattctgttcacagtggagtatggtgttcggcaaaaggacctccaccaagactgaaagaaactaatttatttctgtttctgtggagtttccattatttctactgcttacactttagaatgtttattttatggggactaagggattaggagtgtgaactaaaaggtaacattttccactctcaagttttctactttgtctttgaactgaaaataaacatggatctagaaaaccaaccagcaagttttcagtgccagataaaactctgcgctctagaggtaactcctcatgggaggcagctaggagtgttacctgacaccagtttcctagaaaactgtgacaagcaaagcaataacacacgtcgagaaatatctgatcaagcgggaaatcttctgactgtcggggatctctagtaagatctcttggaatgaagtgcactgtgtatccaaaactattttccagcgccagtgaagttgctcttacctaaaacaaatgggtttatgctagtttccaccaaggaatgagtctcgatggccattaaactttctaaggcccacagggctaggaaaagtcgctcttaaaggtcaggtgtttggaaaatgtttttccttttgcccaacccttaattagtagtagagaatgttctgtggcctattcccctctctgggagttcctgacccttctttgttttccagtttttcctacaataatataaaattacgtaaaagttaaaacaaa

SEQ ID NO: 39432 - DNA, 1036 bp, Homo sapiens
accctctccctttacagtaaatttgtaaacccttataatcttccaatagatttatacattgaaaaccctatatattccactcagaaagctgtctttttttttttttttttttttttttttttaagataggggctcactctgttgcctaggtggagtgcagtggtacaatcatggcccactacagccttgacctcccaggctcaggtgaagcccccacctcagcctcctgagaagctgggactataggcacgcaccaccccacccagctaatttttgtattttggtagggacagggtttcaccatgttacccaggctggtctcaaagtccgggactcaagcgatccgcccgcctcagcctcccatagtgctgcgattagaggcgtgagccaccgtgcctggccgtgaattgatttttaagcagttgtcttctgctactcatgtttttattcttttcctctgcattgaaaggttaagtttctatttttgaaaacattttttaaataaatattttaggagtctccattcaaaaagctttagcctagggactcctttccttacctacttttaccagacaactcctcaactcaaaatgtaagtaaacatcctgcacaccagtgtgggagagttttccactgctcactttggaaggactatcatccaggtgctgctggaaaccgcaaactgtttcccatcatgtaggctcattcgaagtcctctgggtgtcataactcgggctctgatggagttgtttttgctcattcactaccctactgatggtagagtgtatttgactccagctgagtgatatgcagtctccactaagaagaaacgttaattaatgggctcatcaactcctgatgacttgaggcattcatagagaaaaagaagtattattatggggagtactgggaggagccagttatcaaccatcttttctgaggccacagcatgagaaaagaaaaatcacataacctttggcatggtgggtttcagttagaaatcttcccaagaagagtggatattgatttctttctg

SEQ ID NO: 39433 - DNA, 1031 bp, Homo sapiens
cccacaagactatagactggaaagaaaaagggtgaaaccacgagaaacaccagcatggaattatagatagaggtagacgaatcagcaaaggaaactaggataaaccaggcgtgtgtctccgaggcgaagaaaggaagggttccagaagaagggaatggttagcaaaggcaaatgccactgggagtccagtaagagaaccacagcaaatgttcgttgggtttggtagtttggtgtttactgatgaccttggcagtagccggttgctgaagcaatgaagacagaagacagatcatatgggatgcagactgcatggaaggggctagagggacagagcatttatgaactgagaaataagccagggagagacagagagagagactgaaagagtaaggccttgggaggagctggaaaggccacttgagaataacagaagggaaggattaaccttgaataggaaaaatgtctcttcctcccagtccctgagaccggagagaaattgtaaggatgatgtggatgtaaacaagttggcccaggtgtggtggctcacgcctgtaatcccagcactctgggaggccaagacaggtggatcacttgaggtcaggagttcaagaccagcctagccaacatggtgaaaccccatctctactaaaaatacaaaaattagccaggcgtggtggcccatgcctgtagtcccagttactctggaggctgaggtgggaggatcgcttgaactcaggagatggaggctgcagtgagccaagatcgcaccaccatactccagcctgagtgacagaataagactccacctcagaaaaaaaagttagggagtgtgcttatgggtaagtgtaagaggacactgtgggaaattgagagaattcacaaccaatggtctctattttcacccactgaataagaatgtattcgtttcctgtggctgcagtaaaaaaatagcacaaacacactgggtggcttaaaacaagacacttatcctctcacagttctaaaggctcaaagacagaaatcagggctat

SEQ ID NO: 39434 - DNA, 1050 bp, Homo sapiens
aaccagtgtagtcctattacccccatgcttagcactgtctgaaatgtcctctccctccctcccatccttactttttttctgatcaacacctcttcatccccacttcagcattccttccgctgtgaagctttgggagactttctcaggttgagctaatcagctcctcttttgtgaccttctggtacttcctattcttctagttagagcagcggtctcatgaatagactcctatttcctgggttatctccctcacgaaagagttgtcttgaggggaggagtatggtttgttcatctttgtgcttccactggttaacaaagtacctggaaaaaaataggcattcaatgtgtgtgctgtggtattgttgaatgcggtagaggatggctgagagaatgcagagcctgagtgcagaagcggggctgcaggtgctgggggctgaaccagggcagcagtagtggggatggagatgcttaggacagctggtcctaaatcctggtcattattaaatcgccttaggaggctggggaggactttaaaatgcagatgctcaggctacttccagatgtactgactcagtctctagggaggggactccacatctgaattcattagaagtcctttagcagggccgggtgcggtggctcacacctgtaatcccagcattttgggaggctgagcgtgtggatcacctgaggtcaggagttcaagaccagtctggccaacatggtgaaaccccatctctacaaaaaatacaaaaattagccaggcatggtggcatgtgcctgtaatcccagctgctcgggaggctgaggcaggagaattgcttgaacccaggaggcggaggttgcagtgagccaacgtcacagctctgcactccagctatctcaagaaaaaaaaaaaagtctttcaggggattcggatcctcagacaagtttggaaaccactgacataggtagtgtcctgagtcaaacttggaggacacatggaaggcagggaaaggggggaaaagaaagaggagtctgggtcctaggtttgcccagcatggatgatga

SEQ ID NO: 39435 - DNA, 1024 bp, Homo sapiens
taaacaagcttttgattactcaggcttaacgtttagatgcactaaagcagaagtcttggttttatctatggttcatttctgtaaaatggaaggagtctttatcttctattcaatcttttgtaatctttattttttccgttagatccagagatagactggaaatcttttacagtctttatatgtaagatccaggcgggggcagggggaatggcttggtctgttatctgccagggtttaattttgagacatggccgtttcacaactgcagggtgcgggaagattagatgacctgaatgctggtggtaagtaaagcctcacacttcacattattccttaattgtctgtttttaaaaatttgtcttaaaaaaatattaaggtggcaacatattcaggtggcaacagagggtggggtgaccagtgacaaactgacttccatgtctctggctaatcttgatttctggagccaggctccagactaagtctggacaatcaattaattagcctttctatatgtattgcctgatgaatgatttcaatgctggacattgaacaatggtctgttgcaacagggtgaggccattgtctctggcaggtggggagatgggggctcttgttagctccatttgattacaagagccttgaatcaccaaaacataaagatgtactcgaatagaagagtccgttgtctgactggtaaatttaaggatgtgtttgaccctcgtgcattaaaacagacaattggccgggtgcggtggctcacgcctgtaatcccagcactttgggaggctgaggcaggcagatcacaaagtcaggagatccagaccatcctggctaacacggtgaaaccccatctctactaaaaatacaaaaaattagccaggcgtggtggcgggcgcctgtagtcccagccactcgggaggctgggacaggagaatggcgtgaactcgggaagcggagtttgcaatgagccgagttggcgccactgcactccaatctgggcaacagagcgagactctgtctcaaa

SEQ ID NO: 39436 - DNA, 1041 bp, Homo sapiens
agacagggtttcactatgttggccagactggtcttgaactcctgacctcaagcgatccacccaccccagcttcccaaaatgctgagattataggcgtgagccactgcacccagcctagctcccacttacaagtgataacatgcagtatttgtttttctgttcctggcttaattcgcataggataatggcctccagctgcatccatgttgctgcaaaggacatgattttattcttttttatggctgcatgtcacaacttttaaatttacagtatgtgggaagtgccttagattatcctgatgaaagatttcatatttttaatctccttattaagttacatctgtctagacttgctgatactttggggattgggtggaagagaaagaggagtagaaaatgaggataagtaaaatttttttgcattgagcacactttggatggatttcattgttcaaataattctgataatttgcattagatttagtttttattttttggtctccagtaacaactgtttgtagaactaatttctatggcacgtaattgcatgtggagctaaccctcctggggcaagccacttatgcctacaaactctcccttaaccatattttctggggccagagacaattggactactgtggagtgaaaagctgtagattattgtgtcctcaaactctctgccgctcctgcaatgaatactggaggtattgtaactgtatgtgaacttgaacgaagatcaggggaaggtcacacagagccttcttgaatggagttgcaaattcttcctctggcaaatacaagtaaagggaaatgtcacgagtttgttgctttttatggtcatgaagagggaaaaatccccaaagcttgtgattcctttgctgtgagctgaccagctggcttttttcagcattggagaagaacttgagaaggacactgatttattttttccttgagtctgatcactgacagtctcatagaaaagcaaataactatattctgagactgtaactaaactaaacttttaagaaggttgtttctttgt

SEQ ID NO: 39437 - DNA, 2209 bp, Homo sapiens
tttcaggttcctggactccaggatttgggggactggactgatgatggtgattctgcatttcaccaaagtgatttgacaaaattgagtcattcagcagctctgtctaaatgtgggctgatcaaaatatctggaataaatgtaattgatcatcctggtcagagctgtctgctgtaaaactctccttggccttgccagggttaattctttatcaacttgcatgagaagtgaagacggacatctcaaagtgacaaatgatttaaaaagttaaaagttaggatagatagctgatgctggatcacatatttttctcttctttcttttttaaattttttgatctttacttcaattatcttctgtcattgcttatttctttcactactcctatttaaatatttttcaaacttagatatggtgccagcattttggtataaagaggaaagacagtgttagctctcagtgcagcagagcagtcagacttgaagatggcgtaaggaggaaggcactggatctgtggaaggacagaggagggaggagtctaggtagaatagaagaaaaacaccctgatgaaatgcatcaattcctgtgcattttagaagatcgaattataaagcaatttggcaacatgtctcaccatataagtgttcatatcctttgctccagtgctgctaattctggaaattcaacaaataaataacacaggggaaggaaaactgtattccataaaatgtttgttacaaatgtttgccatagccttgtcgaagatgttgaaagatcagttcagtgaatcatgtatggtacatatacctgatcattgtcattcaggggcacaggagaaattttagctactaggagaaatgtttatggctgtgaaatgggaaaatatgcaaaactgtattccacaatagtaattgtatttaaaaaacgcatgtatgtggctgaaggttgaaaggagatactcaggaggctgaggcaggagaatggcgtgaacccgggaggtggagcctgccgtgagccgagatcgcgccactgcaccagcctggcggacagagcgagactccatctcaaaaaaaaaaaaaaaaaaaaaaaaaaggagaacatgaaaatcacaaagtgttggaatgatagggttttagattgtttcatcttttcaaaactttcatttctctttcttgagattttgtaaaaaaaaaccagcagacagatcaacgggaaggaattgaggatgagggagaatatagcttataagtaggggagaaggttaaaaattagctgggagtttaattgattttatattcactgtaatctcaactgtgagaaggtggttaatatagagcattttgaatagactcttatgccatattaatagaaataacaccatactgttgtttgcaccagtcagcatctatttggactattgtacttaattgacatagtcacattttaatgtcaggcattgctgcattaaagtcagacatgtagattttggaccttaaaagactcattcagttttcagctgtttgagagacagttgtcaaagcatcagtagacacatcacagtgtggaagagtccacagaatgccaaaccctggccaacagagagagggtggggtgtggagtagggctattgggtggttttcagagcaccaatccatttcctctgacgatttttgcaaagacagtcatagatatgtagaacaaacaacaagattttgtgtctatagttattatttaccatttctgatccctgttttcaggacctattacatttctagaatgtagccataaaaagacaccatcgctatgtatcactatggttaatgaaggcttttcataggcaaaaaatagcagggataatggcaggaagttacagtgtgaaaggttccatggaaggtggatgtggtttcttcaccggatttttccattgccgggagacagacatcgttcctcaggcacccaaacctgtctctctcggcgtttgctgatagagtgggctgaatggtcatcgtccttgtgccctcttcagttgccctgactcctatgcatgctccttgagtgtcaccttcctacctgacagatgccatacccttccatccccaactcccattttatcttttccttctaagctggatctaggaaccctcacgggacccacaagtaaccgttattaaaacagtgtgactgctgggtggggtggctcatgcctgtaatc

SEQ ID NO: 39438 - DNA, 1034 bp, Homo sapiens
tattcatttatgcttgtgcaaatatttctataggactaattcctggatgaaagggaatgccccacccttccacccttttctatatgataaatttctgacacatttacttgttaaccaaggaatgacttaagtttcaaaatatgcttaatgcattcagctttcaatagctcacagcacacactgtatataaaaatatggaacgctttacaaatttgggtctcatctttgagtaggggccatgtatcgtttccattttagtgtctgtgctgccaaaccaaacgagcgctcttttcttttctttctttttctttttcattttctttttttttttttttttgagaaaggaccttcctcttgttgcccaggctggagggacacaatcacacctcactgtaaccccaaagtctgggctcaagcgaccctcccacttcagccccccgagtagctaggactacagttgtaggccatcacgcccagctcttttctttttgaaaatattgtaatattagatactttacggaatactcacaatgccccattttggcaatcatatttcacaaacctttgacttttgactgagttgcagttagcttgaaacactcgcgttttgctttcacttagagaattaccatttcttatgtgtaattctaaagatatatacagttaacaaggtcatgtttaaatttaccagtaaacacattggcagcttctttccattctgcaggaagtggctgtgtttctgtgctttcatcctgttatttccttagggtaaacatctaggcttcatgcaaagtagaaggggcatgtgcgtggtgttcaggatgtggatttgaatccccaactcagccacttacattagataagtgacttaacttgcgagcctccctctacaaactggatgaaggttgctaaagaatatgtttttacaagttgtgctaattttaatgctactgagaacaaatgagtgctcagatttggccacgtcagtgatattggtagtgttactttgacaggtgaaggatggtgttttaagt

SEQ ID NO: 39439 - DNA, 1074 bp, Homo sapiens
aatttatgttaatagttgacttattaagaacttaatatgttcctggtgatgtttccaatattctttgaggtatataaaaatgaattcttggccaggcgaggtggctcacacctgtaatcccaacactttgggaagccaatgcgggtggatcacttaaggtcaggagttcgagaccaacctgaccaacatggtgaaaccccgtctctactaaaaatacaaaaaaattagccaggcgtggtggcacttgactgtgatcccaactacttgggaggctgaggcaggagaatcacttgaacccaggaggcggaggttgcagtgagccgagatggcaccactatgctgcagcctgggcaacagagtgagactccatctcaaaaaaaaaaaacaagagagaaaaatgaaaaaatttttttctttttaaaagccagtcaagtttagcagtgtagggttgtataccgactttagtaacactgatgttaatttctgataacccactaccatcggaccagcctaaaaatgaattcttaactccattttacagagaatggggaagatatgagggaggtaagaaatgtgctcaaggtcgtgaaagtaacttccttaaggcggaagcaaatgtatatgaaacacacttgtgaaatgggtacataatgcataggatacatgtgttctctgtcaggagcctgtagtggcctgctgtagaactgtgatatgcttggctccgtcccgttcaatgtttttgatgaatggcttagctgaggacattaatatgttatttacatttggagatgatataaacagaggagttaaagctccagcagtgtggcctgttggcctagatgatcttaaaagatttatgaaccctggcaagcaaggttattaacatgcttgaagcctaagaatctatgagttttagggttcaatgtattttcacttctacagtgataaagtgagtaaaaaggaaaccgtgtctgttctcccaatttccctctaagaggataaaaccaaacaacaacaatgccatagaggtaaccattattaaagatttggtacatattgttccagactttaaaa

SEQ ID NO: 39440 - DNA, 1047 bp, Homo sapiens
aggagccctgaacggtcaaggagccctaaacagccaggaggaagaagaagtcattgtcacagagggtaagccgcccctccaggaactggaaggcacacagcacttgcaacaaactttggactcagcagaaaatactctgtcatactgcctggtggtggattggtgttaacagcaaaaacaatcaattggttacaaaaggaagtatttatctgaccatttggataccccctatacttagaccttgaagttatgtttcctttttcttatctggaacttgatgctttttaaattattgttgctttgtcccaactgcttgtctggagttgaatgtgaattcttgttggaaacagaagtcatggttgctttaaaagagtcattatctctccctctagagaggagcctgctatacttgtacaactctttctgataggcgcattgcaaggcacgtacccctctttgcttaaactatgatgtgctgcgtgttttatagctcttgagcctagagatcttcgaggaatggttattgaagagtgaccgtttggacacagtattgggatttgatttttacccatatagggggtgaggaaccgtatcttgaggtcagaattgagagcatgtggcccagtaagtctcttgtgaaaagcgaaaggctgcatgttgaagaaggaccttgagctcgttgttccatttaattataaataaagggataaccaataactgctatcaaatatatgtaaaatgatgattcggcatacggtaaattgattcgtgtaatatgaataagagagacaaatgaagggaaaagtcctttcacaggagattcaacatcgcctcacttagatgagattcttcaaacatgtggaacctgtttttcttcttgtttgatgcccccacagagctgcttcaagcagggagctgcttttgaagttggtgggaatacttatctgtatatagcaccacaggcacaatataaagttagaaatatacacagtctcacaggcggagtatttgcatgacctagtgtgagagtttcaaataattttcacc

SEQ ID NO: 39441 - DNA, 2305 bp, Homo sapiens
gtgagcaaaagagactccgataaagagatggctactaagtcagcggttgttcacgacatcacagatgatgggcaggaggagacacccgaaataatcgaacagattccttcttcagaaagcaatttagaagagctaacacaacccactgagtcccaggctaatgatattggatttaagaaggtgtttaagtttgttggctttaaattcactgtgaaaaaggataagacagagaagcctgacactgtccagctactcactgtgaagaaagatgaaggggagggagcagcaggggctggcgaccacaaggaccccagccttggggctggagaagcagcatccaaagaaagcgaacccaaacaatctacagagaaacccgaagagaccctgaagcgtgagcaaagccacgcagaaatttctcccccagccgaatctggccaagcagtggaggaatgcaaagaggaaggagaagagaaacaagaaaaagaacctagcaagtctgcagaatctccgactagtcccgtgaccagtgaaacaggatcaaccttcaaaaaattcttcactcaaggttgggccggctggcgcaaaaagaccagtttcaggaagccgaaggaggatgaagtggaagcttcagagaagaaaaaggaacaagagccagaaaaagtagacacagaagaagacggaaaggcagaggttgcctccgagaaactgaccgcctccgagcaagcccacccacaggagccggcagaaagtgcccacgagccccggttatcagctgaatatgagaaagttgagctgccctcagaggagcaagtcagtggctcgcagggaccttctgaagagaaacctgctccgttggcgacagaagtgtttgatgagaaaatagaagtccaccaagaagaggttgtggccgaagtccacgtcagcaccgtggaggagagaaccgaagagcagaaaacggaggtggaagaaacagcagggtctgtgccagctgaagaattggttgaaatggatgcagaacctcaggaagctgaacctgccaaggagctggtgaagctcaaagaaacgtgtgtttccggagaggaccctacacagggagctgacctcagtcctgatgagaaggtgctgtccaaaccccccgaaggcgttgtgagtgaggtggaaatgctgtcatcacaggagagaatgaaggtgcagggaagtccactaaagaagctttttaccagcactggcttaaaaaagctttctggaaagaaacagaaagggaaaagaggaggaggagacgaggaatcaggggagcacactcaggttccagccgattctccggacagccaggaggagcaaaagggcgagagctctgcctcatcccctgaggagcccgaggagatcacgtgtctggaaaagggcttagccgaggtgcagcaggatggggaagctgaagaaggagctacttccgatggagagaaaaaaagagaaggtgtcactccctgggcatcattcaaaaagatggtgacgcccaagaagcgtgttagacggccttcggaaagtgataaagaagatgagctggacaaggtcaagagcgctaccttgtcttccaccgagagcacagcctctgaaatgcaagaagaaatgaaagggagcgtggaagagccaaagccggaagaaccaaagcgcaaggtggatacctcagtatcttgggaagctttaatttgtgtgggatcatccaagaaaagagcaaggagagggtcctcttctgatgaggaagggggaccaaaagcaatgggaggagaccaccagaaagctgatgaggccggaaaagacaaagagacggggacagacgggatccttgctggttcccaagaacatgatccagggcagggaagttcctccccggagcaagctggaagccctaccgaaggggagggcgtttccacctgggagtcatttaaaaggttagtcacgccaagaaaaaaatcaaagtccaagctggaagagaaaagcgaagactccatagctgggtctggtgtagaacattccactccagacactgaacccggtaaagaagaatcctgggtctcaatcaagaagtttattcctggacgaaggaagaaaaggccagatgggaaacaagaacaagcccctgttgaagacgcagggccaacaggggccaacgaagatgactctgatgtcccggccgtggtccctctgtctgagtatgatgctgtagaaagggagaaaatggaggcacagcaagcccaaaaaagcgcagagcagcccgagcagaaggcagccactgaggtgtccaagg

SEQ ID NO: 39442 - DNA, 1049 bp, Homo sapiens
aaaggtctccttcttggatatctgcttcagtgacagaacctcttgaacaagtagaagctgaagccgcactgttaactgaggaggtattggaaagagaagtaattgcagaagaagaaccccccacggttactgaacctctgccagagaacagagaggcccggggcgacacggtcgttagtgaggcggaattgacccccgaagctgtgacagctgcagaaactgcagggccattgggtgccgaagaaggaaccgaagcatctgctgctgaagagaccacagaaatggtgtcagcagtctcccagttaaccgactccccagacaccacagaggaggccactccggtgcaggaggtggaaggtggcgtacctgacatagaagagcaagagaggcggactcaagaggtcctccaggcagtggcagaaaaagtgaaagaggaatcccagctgcctggcaccggtgggccagaagatgtgcttcagcctgtgcagagagcagaggcagaaagaccagaagagcaggctgaagcgtcgggtctgaagaaagagacggatgtagtgttgaaagtagatgctcaggaggcaaaaactgagccttttacacaagggaaggtggtggggcagaccaccccagaaagctttgaaaaagctcctcaagtcacagagagcatagagtccagtgagcttgtaaccacttgtcaagccgaaaccttagctggggtaaaatcacaggagatggtgatggaacaggctatcccccctgactcggtggaaacccctacagacagtgagactgatggaagcacccccgtagccgactttgacgcaccaggcacaacccagaaagacgagattgtggaaatccatgaggagaatgaggtcgcatctggtacccagtcagggggcacagaagcagaggcagttcctgcacagaaagagaggcctccagcaccttccagttttgtgttccaggaagaaactaaagaacaatcaaagatggaagacactctagagcatacagataaagaggtgtcagtggaaactgtatccatt

SEQ ID NO: 39443 - DNA, 1045 bp, Homo sapiens
ctaaagtgctgggattacaggcatgagccaccgcacccagccctatctttgttttttgtttgtttgtttgtttttgagacagaatctcgctctgtcgccaggctggagtgcagtggcacaatctcagcttactgcaacctccacctcctgggttcaagcgattctcctgcctcagcctcccgaatagcagggactataggtgcatgccaccatgcccagcttatttttgtatttttagtggagacagggtttcaacatgttggccaggatggtctcgatctctttacctcatgatctgccctcctcagcttcacaaagtgctgggattacaggcatgaggcaccgcgcccggccccatctttgtttttttaatggagttaaactatggtattattaggtcactttgacaactatcctgttgttaataaatgagagagaaaaaggagattttatttacgctgattcttcctcctcctacagttaaactcattgtctgtttggaagaccagaatgtgaagacaagtagtagaagaaaatgaatgctgctgctgagactgaagaccagtatttcagaactttgagaattggagagcaggcacatcaactgatctcatttctagagagcccctgacaatcctgaggcttcatcaggagctagagccatttaacatttcctctttccaagaccaacctacaattttcccttgataaccatataaattctgatttaaggtcctaaattcttaacctggaactggagttggcaatacctagttctgcttctgaaactggagtatcattctttacatatttatatgtatgttttaagtagtcctcctgtatctattgtatatttttttcttaatgtttaaggaaatgtgcaggatactacatgctttttgtatcacacagtatatgatggggcatgtgccatagtgcaggcttggggagctttaagcctcagttatataacccacgaaaaacagagcctcctagatgtaacattcctgatcaaggtacaattctttaaaattcactaatgatt

SEQ ID NO: 39444 - DNA, 1982 bp, Homo sapiens
cggcggcggcggggcttttcctgtccggttacgttaaggtcacatgaccgagagagcggagagactagtgcaaagaggctgcgagcggctcccgccgggggggagaggcggcgagagagcagtggcggcaagagccccctccgccccccccccagccgctcccctccccccgcccgcctccgcctcctgctgctctgccgccgccgccgccgcctgcagcactccactgccgctcccacccaggctccgcgctctgctccagccaaacttctgcagaccatgtgcagccgaggcgaggaaacttctctccacctattggggctggaggcctgagtcacaagccccttgtttacataaagtgtttaggtagcacaagtccttgagatgctcggggtagagatggagagccactgctcgtatccttctgccggcttctgcttgagatctcttggcctttacccttgtcccttgacttttcgtgtttgttttaatctttaagacttgaaatggagtggcctttagaaccggggagatactgtaaaccagcagtatctttgtgtcaccaatggtaactgaaagtcatgctgaagtacagattcctgtagcgtgcacagaggcagaggtgcttcctttaccttgcagatgagttgagcggcgtaagatgtttctgttagggttgaatttcatggttatttcagcaacgattttcgtttttgaagttttggcccccccaaaaatgaaagtctgcaacgcatgtttgttaagagaacagtttattctcctgttaggttttggtctttgaggtatggattccagagttggctattctgttagatttagaggtgtggaaaatcttttaacggggagatcctgaaacacggaaacatggcagggaagttagaatttcctgatggtcatttttaacattttaaagtttactttttggttgttgccatttttctagaatccgtgtcttttttggggaaatacagtcctttgaggactagaatttaatgatttctttacacatctaggattttttgagatttagaaaggatatggctttattcctaaggaagtggaggcagcagtttctaggatactctggtttcaaggcatgctaacttggttgtgatgtctaacccattttggtttacacagtctgaccactagcacaatgcctggcacatagtttacaaatcatttaaggcaagcttaccatcttaagacaatttaatacatagaagtgtccctcctaaaaatctgagtttgatttagaaatccagttatacctgcaggtactgatgactaattccttctttgaagacaaaataagcagctgtgtagcttcagtggctctcaaatggataatagattcagtgtatactcgctttgaactttcctgttttttgatcagctagataaatgactttagtgggtaaatgtctgcctccaaaaccaaattctgaccctgatctaagtattctactgcaccgctgtcactggaatatcaaagttggccttcagactggtgcctggttccttggattggcttgagtattgaggtctgtctcatcttactagggaactaaaatgatgttgattgttttgtagagaattgtaattagagatctgtaggttcttaattcttttggaattccattctgaaaattttcaaccttatggtgttggtggagtgctcatgtgaagagtgaaactgacttaagaataaaagaaaaagtgggcaaaactaatgctaaacttgagaccattgggcagaaatttgcctgtgtgtgtagagtaattggtcttgagtcaaagtaactatgcttatttttaacatcactgaatattttctagcgttacactctatataggcttgtagaaataaacccaggggtaagcccagaaattgaatatcagtcctaaagaaagcctatcaagagcatcctattctctttaagagctgctattcgaattta

SEQ ID NO: 39445 - DNA, 1050 bp, Homo sapiens
ttttacttcaaagaaaatcacagtgcaagcaatctgagtggattcatcaaaagttatacatgaatattctgcagagtctggtgttgctgaaagttttgatttgtgttctgctgagacacaaccatgaaaatatgcacttgcttgtattccgaagaggatagttccagtgagacttggacaatgagcagaaaaaatttttttttgagacgaggtgtcgctgtgtcgcccaggctggagtgcagcggcgcgatatctgctcactgcaacctctgcctcctgggttcaagcgattctcatgcctcagcctcccaagtagctgggactacaggtgcccgccaccacacccggctaattttttgtatttttttttttttagtagagacggggtttcgcagtgttagccaggatggtctcgatctcctgacctcgtgatccacccgcctcggccttccaaagtgctgggattacaggtgtgagccattgtgcccagctcagaaaatttaatagtactagatctcgtgtgtgtgtgtgtgtgtgtgtgcgcgcgcttaggttgaaggtggaatttaacattgatttaaaaaaaataatagtaggaaaaaataaatgcggtttgagtccaaagcagcatttttcactaattttatgaaggaagtccttttgagtaatgtcttaaattaggaaaatggcgtacttttacatgttagacattaaactctagggcagataaccatgccctgtgtgttgtgtatcaagcttagcatatacataggaaaagatgtattgtgagagtgtcttacatttcgttggtttggtcataaagtttatagaaaatgcttgttttatagttggttgttattgagatgagagtccctcaaggaactccctatgctttagggagctttttgttttaaacctactggttagacttgtgggttttaatgttttcagctgtggttgtaagaaacacattttaaattgcacctagtatagacatacatgtaaaacaaacaaaatttttacgaagtagtacttgtattaagagtgatg

SEQ ID NO: 39446 - DNA, 1025 bp, Homo sapiens
gacattggtagtgagcgaaggcaggataaatttctaaagacttccttaaaaatttttttaatccattaggcttttctaaattataggttgggatacaataagttatcttacacctttgcttcacggaatgggctaatggctacttttttttttttttttttttttttttttgagatggagtcttactcccatctcacaggctggagtgtagtggcacaatcttggcttactgcaacctccacctcccgggttcaagtgattctccttcctcagcctcctgagtagctgggattataggcgtgcaccaccacacccggctaatttttgtatttttagtagagatggggtttcaccatgttggccaggctggtctcgaactcctgacctcaggtgtgccacctgccttggcctcccaaagtgctaggattacaggcatgagccactgcgcctggccggataatggctacttaaatcatttttcagttttcccttaccactatgattcctgactgtttctattctgacctaaagtactgtttgtacacaattaattttgattaccctttttgcttgttacttgtctccctatatcttgtatctctcactctcactgtaagctccctgagggcaggtacttctttttatgtacactcctggtactcaattgcttgcagaattgagttgaatttgtagttaaaggatctaagatgatcattttcccactcgaactgagtgaaaaaggtgtttattgttgcagaaaacatctgcgtataggtattggatgctagtggtgcatatatgaatacctatctctgctcttcaggtggtcacagtccactgggggagaaaaacacagatacttagtacaatttattctatactgcagatgtgcagagtgctgtgggtatgtagataactttaagctgaatcttggtcggtgagcaggtgttcagaagatagacttagtggccaagtgcggtggctcacgcctgtaaccccagcactttgggaggccgaggcgggtg

SEQ ID NO: 39447 - DNA, 4586 bp, Homo sapiens
tcaaatagggttaatagtaattatctcataacattgggtgaacataaaaacaggaggggggccgtagcacagtacctcagtaaatgataaaatcggtatatttttgaaatcatcactgatttaaaaaaaaaccttagaattatgtagtaaaagtgacttttttttttcagtataccgttctgtgatttttaacatagtatttatttgttgtaatcaccaacacgagaatataggccaggtctatcactttattttgctgtctttatagacctgtgctgtttccacccctaacccctggctgtcaccgatctgttgtccatcactatagttttaccttttctaggatgttacataaatggaattacacagtatgtcgcctttgcacactggcttcctttacccagccagattgggttgagagcgatttgtccaagttgttacatctatcagtcgttgaaaactgatctttaaagacattttaattttgaatcattatttcctaaacgtgaatctgaattccttaacagttcttcaagtagtgtttggctcaggatttttgtgtttaaaagtaaaataaatggtaaaatatatagggaaaaattactgcttccacctgattggtaaaaaccatgtgtgacattaacatgcttttctttagggaaggttcttgtttttagtagttgatccatattaaagctctgtagagttgccacaaagtccagagttgaaaaaggtggctgttaaaatatcagtttctaaaatgtggccgaagatagcgtgaccagtcctggtttgcccaggactttgccagtattagcagtgaaagtctggccgctctcaggaaaccccttggtcccagtcaaacccagaatgggaccaagcgccgtggctcattcctgtaatcccagcactttggaaggctgaagtgggcagatcacgaggtcaggagtttgagaacagcctggccaaaatggtgaaaccccgtctctaataatagcctgacatggtgatgcacgcctgtaatcccagctgcttgggaggctgaggcaggagaatcgcttgaacccaggaggtagagcttgcagtgagccaagattgtgccaatgcactgcagcctgggtgacagactgagactgtgtctgaaaaacaaacaaacaaacaaaaccccagaatggttggtcaccctatctgaaaagagacacacaaaatcagaggattccagttcatcaggtttcagtagtgaaccatcggccaagtatttcatctaatcttaattgcctttgggtgcttagagtcaaatctctaaggtaaccagaacccaaaccacatgaggttttttagattaagatcagcaccttgaatttaaggttttgtggctagaggtttagatttgattggaattacatcgttaatttttgttaaattgttgaataagcaacttcccaagccttgtgtgtagaagctagattaaaagtcaagtttctacttaaccagaatctctgttttgagtttttaaattcaactggtgatgtctaaatcttaaggatattgtaagttccttaactagtctgttccattttcctgagttttcacatcacctctctacctcttgtgtagattttattttttattttgaaacggattttcgctcttgttgcccaggctggagtgcagtggcaccatctcggctccgcaacctctgcctcctgggttcaagcgattctcctccctcagcctcctgagtagctgggtttacaggcacatgccagcgcacctggctaatttagtatttttagtagagacggggtttctccatgttggtcaggctggtctcaatttccggacctcaggtgatttacccgcctctgcctcccaaagtgctggaattacaggcataagccaccacgcccagccctagatttctttatagagcatctgtctataagcagattacttagttttcctgatgtcttcgttggaatgtaagctttgtgaaagccaggggccctatgtgtcatctttaccactatgtcttagatcttagagcagcccatcataagttctaataagtaattgtggaattggatgagaaaatgaatatgagtcagttttacaatgctgcatgcttcccagattattttaacagtctaggggatgtggaaagattttgttttaaaaacgtttaaaagtccacgttttgtttgatattgttcagaggaagtgaaaatgtggtctttaaaaaattttgttgcccgggtgtggtgactcacgcctgtaatcccagcactttgggaggctgaggcgggtggatcacctgaggtcaggagttcaagaccagcctggccaacatagtgaaaccccgcctctactaaaaatatcaaaaattagctgggcatgggggtgggcacctgtaatcccagctgctcgggaggctgaggcaggagaatcgcttgaacccgggaggcggaggttgcagtgagcggagatcgcgccattgcactccagcctgggccacagagcaaaactctgtcttaaaaaaaaaaaaaaaaggctgggcgcggtggctcacgcctgtaatcctagcactttgggaggccgaggtgggcagatcacgaggtcaggagatcgagaccatcctggctaacacggtgaaaccccgtctctactaaaaatacaaaaaattagctgggtgtggtggcaggcacctgtaatcccagctactcgggaggctgaggcaggagaatggcgtgaacctgggaggcaggcggagcttgcagtgagccgagatcgtgccactgcactccagcctgggtgaaagtgtgagactctcaaaaaaaaaaattgtttcattaaccctctatgagggaagggaatttagaatggtgacattaaaccttcctttaaaatggcaattcagaaccagtggagagagctgaaagtgagagtagatttggatttggaaaaattccctctacttctcatacacatcaccttctcccaacacaggcactttgtaaaggcatagagcagggtctgaggagattgggttggtgaaagagagaactgagtcacttgagattagtacttggtaagcaagagagtgctaatgaattatttaaaatctgtgtaacctgagtgtaaaccaatacatagactaagttagtgcttctcagagcttagggagcataggagtctcctggagaattagaagaaacagattttcctagctccggccccagacgttctgatttagtgtggtgtagaactcaggagttagtaatattaatggacagtcttgagtatttgctgatgcaactggtctgaggaccatactttggaagacctgctttagatagtagacaggacagtaatttaaaataggcaaatatggtttatttttaaaatggtaaaactagaaagatactgattttatgtgtttaaaaaaaaaagtctgcatctgactgctatggttatccaagaaggcaccccagaatacctgttggccaccgctgtttggtatatgcaaaaatgtgtagtttttaaaagagtctttttgggcttgcactgaggagccaccctattttatacagtcaaaatattgctatatttaagttaaccattctgttccagtgcaggattcagtaacatctattctgtaagtttcagttgtgatatttcttaaagattcaaagatggatcctgggaatttgatttagcctccatttcatctgggagttaatcctcacagcaaccctgtgagataggttaataattaaaccctcctattcacacatatttcattaatccttacagcaacctgagagatagtttaataattaaacctactccacagatgaggaaactgaggcccaagaggttcagtgattcgcccaaggttataacagcaagaattggtggtgaaacaagaattcaaatccagattggtcttaatagtgagctctcatgtgtgatagaaattagataccactttgaggactttgggagccagtggtgaatgtacttactttaggctctaaatactctgtgtaatttcttggtcattttgttcttagagaggtggtgatcttaataaagttttgactttattaagtaattaaaagtttttacttatgttacaactaaaacaattctttaaaactttcataacttgaagttttaaatcctaaaattagttgaaaaagatgtaattgccagtgtatcgtaaatactggtattttaaaataaagctgctttatcacttttaaggaaagcccttgtaatttagtgcattgtaatagtgtattgagctgatgtccaccatgatccatgtaaacataggtgaactatgcaaatacaagtttttcttcttgaaaatgttacatttcctctacaacactttatgctaataaatgtttatgaacctcttttgatgatcctttcatttcttgtaaatttttgtatataacttgaaatgtttaatttgctgtaatcataaggcatcaaatgttcatggtttttttctggactattttcacattgttagtactgattagttgaccaaaacagcaaattgcatacattgatac

SEQ ID NO: 39448 - DNA, 1022 bp, Homo sapiens
tggaattgtacctcctaaaaaaaatgggagaaaacataatggcttcaattaaaggaggctgcatttaccaatcttccaaattgtccttttttgtttttgtggcttcccaaaagtgttgacaaataggtttaatgtatttaaaggttattgaatgtagtggaccaaactattgaggataggtgagagacgccgcttctgtaagtgtgataagggaagatgggaagagcaggatacactgcaggtgtgcacacaggtatgttgattttatgaaaattggaacttgatctaggaagcaatttttaaagttattttgagacagggttgctggcctcaagcagtgctcccaccctgacctcccaaagtgctgggattacaggcgtgagccaccatgcacatcctaaaaagcaattcttggactatctgtgcctatatgctccttggagagtttttgtgggtacccttggcatacaggtaggtacctcaaatggaagacagctactgaagaactctcgctggaagacatcagatgtttatcctagcactgttaactgcagataaatatgtccatcagttagtacagatgaatgtattctcttggtataatactgtgtagcagttaagtgagttgcaaaacgaaaggatatgtgtgaaaaaaaagttgacaggtgaggactatagtggggcatcgggttatgcataaaagtaaggcaatgaaggtaaagatttgatttttaaatgttgtcaacccaaggaggtaaatatgtagatgttaaattctttgtgcttggtattttttaaatttccccaaaatatctctggaacaaacatctgtgggaagaatattgtgactaacttggtgaaaggacaaagtattaataaaaggtgccggtgaacagccatactcaaatcatgccatcgaaaataggtatttaagatttcatttctgccaccagaagcctgtcttgttattgtatatattgatttctctcttttttttttttttttttttttttgagacggga

SEQ ID NO: 39449 - DNA, 1022 bp, Homo sapiens
cagagcaattgaatataatatccttaacattttcctgctaaataacaatcatatttgggactacccctcaaacaaagagctagagaaataggggagtttaatgtgagcagaaagagtttcaaacttaagaaggcaatatttttgccaaatgtggtggagtatataactatttaaactggaaagacattttaggagatgatgacacaccaaacacaaaatttatttgaggcatacggacctgattaacatatcacattaaggtttagcaggccaaaatggttcaatctggaagagttcaattttaatgcctatttacggcaatgacatttgactcttacacctgatgcttaagtgctgtcggaaaactgtctaaaaaagtacaaagtgggggaggtgggcttatgatattatgaaatgttagataaaggacagatacagttaaaataaaaatgttcttttgtttataaggtctattttattttctcaaagaaagaactcacaaccctgtactggactgaggttaccagttctcaatagttctgcacacagagaaaatctaacatgtgtgtctgtgtgactgtacacagttgtacacaattttttcttgatcgaacataactgcttgcctagttgatgctaaattttgttggtctaatatccaaggatcttcttcctaccccaatatcagattcttgcctaaatgtcagatctagcaaaggaaattaacccaaagcattattctctgttcctgaaggatgataggaagtctgtttagatttcaactaccttctagtttaatttttgttgttgttgttctagaattgaaacaatgtctctattccattcaaacatatatggaggataaactatagtgcttgccttagaaaaaaacactttctacaaagtattactttgattatttgctttttaaaatagtatttgaagacatagtgcaatacgagggtagatatcccttttttaaatttttctaggtaggattaaaagttattctattttctaca

SEQ ID NO: 39450 - DNA, 1025 bp, Homo sapiens
gattggaactagagtctagaagtaatttaattttaatactatattttatttaacccaatatgctccaaatattatttcaacatgtaattaacataaacatattactttttataccaggtgtttgaaatctatatgtattttacacttacacacctcaattcagactagccacaaattgctcaacagctgtgtggctactggctactatattggacagtgcagctctaaagggtttagaattaggagttactcacaggcaatggtaatatactacttctttaatttctcttgaatattataaatcaacatatgtttactggacacctaccatgtgcctgccttcccctttgcctataaagatgtttatggtttcccattctaaatgggtccttttcttttcaaccctttaagtagctgcttattgtcacccctcttttcccacccagatttctggagataaaatgccatttttataacttttctcctgttaactctaatttacctctcaagctgttacactggattctataatcatatcaagaccatttttattcaagttaccaatgacaaaattgccaaatctaaagacttatttcagtgtgagctgaaaaggttgttttacctttctatgtcaggtactacggattttttttttttttttttttttttgaggcagggtcttgcgctgtcacccaggctggaatgcagtggcaccatcttggctcactgcaacctccacctcccgggttcaagcgattctcccacctcagcctctcaagtagctgggaccacaggcacgcaccaccatgcccagctaattttgcattgtttgtagagacagggttttgccatgttacccaggctggtctcgaactcctgggctcaagtgatcggcccacctgagcctctcaaagtgctggaattagaggcgtgagccaccacgcctggccaaggatctcttacttcttgaaattttctattggcttctacagcttcatttatttatctacttcagggtcacaaag

SEQ ID NO: 39451 - DNA, 1086 bp, Homo sapiens
tttgaggatttaagtggacgctggacatgactctccagaccttcccgggtcctcactgaggctaacaccgattgggggcggtgggggaaatgaacctacggggtgttgatctgtggtcacgttacacgtagtgtttataattgaggcattgttgactaggtaatttgccagctagggacttgagctaattggatggttggtaggcaggcaaaggttattctgcaatatcttttatttttactcgctcctcttctaatccatcacgacataaagacaaatggtagggagagatctgtgcatcgagagatggaagattatgggggaaacatttctcgctggttcattcacgtgtcaaacaagattttaaaaagcagattccattttcactgtgtagttgaatttactagtctggaagaagacaggttttgatgtattcaatttctttttaaactccgacttcaataggccttaatgtaaacatcaaacatagcaagtacacatctgcacagtcagcattagtatccctacccgtacgccttggaaagtgtaattatggccgggaacagtggctcaggcctgtaatcccagcactttgggaggccgaggcgggccaatcacgaggtcaggagttcaagaccagcctggccaacgtggtgaaaccctgtctctactaaaaatacaaaaaattagctgggcgtagtggcaggcacctgtaatcccagctacttaggaggctgaggcaggagaatcgcttgaacctgggaagcggaggttgcagtgagccgagatctgcgccactgcaatccagcccagtgacagagtgagactctgtctacaaaaaaaaaaaaaagaaaaagaaaaagtgtaattatgctggtaactaaattagcataaattttatgaactcttaaagtgccaatactttattcgatactatgattgttaaagagtatctttaatatttacctcttaaaatacgaggctttttgctgtgacggcccaaataggacagtacttttaaatgccgttgcatagttttatcttgttttaatttctttaaaaagaaaaacagtatttgggaatctt

SEQ ID NO: 39452 - DNA, 1056 bp, Homo sapiens
tgccatcaagggctcactgcaacctctgcctctgcctcaagcaattctcccacctcagcctcctgagtagctggaaccacaggcacgcacctccatgcctgggtaattgttgtgttttgaatagagatggggtcttgccatattgcccaggctggtgtagaactcctggtctcaagagacctgcccaccttgacctcccaaagtgctggaattataggcatgtgccaccgtgcctggccgctaagtaaagatttcttgaatgaatggatgcaatcctaggtagctaaatgaccttggccaaggtagttaacatttctgaacatctggttattactttggggaggagagttggagagggaactagtccattgaagatttcagttaggttaagtccattgtgagttttatgttgtctagtaattatgttattttcaagtctgattttgctgtttttctgtttgaaatgacatatagaagtttttttcttacattaaaaatagaatacaaggataattgaaactgataatggttttgagagactgcatgatttgagagtgttaatcacacatcattaaatataaaaaaattttaggcatgatggaaatgcatgtttcgtggagttcaattatttcattctagactagcattgaatttgttatagtaattgtgattaacatttaggggactttatagccccagtgtcccaaagagtcatattctatgatcatttgcttcttttttttttgagatggagtcttgcttcttcgcccgggctggagtgcagaggcatgatcttggctcactgcaacctccgcctcctgggttcaagcaattctcctgcctcagcctccccagtagctggaattacaggcatgtaccaccacacccggctaatttttgtaattttagtagagacggggtttcaccatgttggccaggctgatctcgaactcctgacctcaagtgatccgcccgcctcggcctcccaaagtgctgggattacaggtgtgagccaccgcgcccggcccgtttgcatctttttcagaaggggtatca

SEQ ID NO: 39453 - DNA, 1165 bp, Homo sapiens
cagatactattttaggcactaggattcaacagtacaaaacagaccaaatgaaaaaccaaaacaagcctctgccttcatggagtttacatttcatttctgtgtgtgtgtgtgtgtgtgtgtgtgtgtgtgtgtgtgtgtactagaaatgcatgtttgtttttcctcatttagtgccattttatttattgaaagttgtttacattttaattgcagagaggattcttgttgggaaagttgatttaaaaaattaagcaaaggggacaaaattttaaaaggttagctcattgctttctatctcttccttttttgtgaagtgtaatatttatttgaaagtgattcttagtcattatgatttcaatgtgttactgcactcgctaagggaagacaataaaataaaactgcactaattggcacaaacaacccagacctaatttagtgataagtacatgtgcattatggaacttttaaaaaatattattcacatacataaaaaggctttaatgaataaatgagaaggagaataattactatccaaagttgggagccgctgtggatatagttgcttatgtggttttcttaaaatagggacaaagtttactaataagactagtatttatttactaaatgttaataaaagctcaagaactgtttgcagattatccatcttgtctctggctgaatatgagcacctttgaataaaaattgtcgagatgaatttttaccatgttacttttttttttgctgaaatgacttctataagtggtttttaaatttgcctttgtaaagattattaatatatttggcttttctttaacatcaagaaataaggtttaatttttatagcaatttctgttgaacaagaaattccaaatccttattctcattttatgagataactcagaagtttttagaagcctgtctctgttttggtggtaatttcaagaatgaaagttgtgagcaacttagctgaagagtagtaaaatcctaaaggagttgtttagaggctgcagcatcattcttgtgcaaaatttcctaatcagtactttgatttatttgcaaaagcaaagaattaaatgtctgagttctcttagagctgtaacagtttattaattccaaataatcctatgggtgaaggcctatgaataaaatgtctttttttttgaga

SEQ ID NO: 39454 - DNA, 1072 bp, Homo sapiens
caggcatgagccaccgcacccagcctaaaatctcttattttgctagtcctacacaattgtcctttttttcattttaattacaaaataatttttgagattgctttaatacaataatagcctatgaaggttttaatagtaatagcatctggtggttggaaagagtgcacggaaagttgctggttgtttgagctttgttacttgcttgccatctgtcagccattctgcagggtagtccgcaacattagatacctacacagccttttcctcagcaagctctttctgatggggtggggctgggaatatgatgaaaagtaatatgaggagcattatgatatgaagagtagtgatgtcacctatgtatagtttgtgtacactgtgatgtatacagtagaaagggtggaggcattgtgtgcaaaacgtaaaagctcattgtcaaggaaattgcagctttgggtaggggatagggtagggaggagtgattggataattgagcctgggttttctgatgaagggcctttatatagcatgcataggacctccttctaaatcaaaagggaattgagagtctgaagggctttaaatgaaagcacaagttttaaatttgttttagaaaaatgactagcatctttgtggagcagggaatggcaatggcgggatgagtttgggataggaaggttaaattagtctagagaggatgaggggctcaattaaagtaatactaatagggagaagaggaagggatgactgcagtagaagtttagtaataatagggagctggatatgaggaagatgggtgttgccagggctttggtttaaggttgatttaagagtatggtaccagtcactaagatgggcaaatcagggagagaaagaagattgaggagaatgataatttgggggggatagggtggatgggggattttttttctcaccaagaataaaagaaagatcctcactgtggacggaggcttaaaatcacctttatctcaaccacccaaagactgttatggttactgttttgttaagtacagtagtttgtacatcttgaatatttgttgtctgtggaacatca

SEQ ID NO: 39455 - DNA, 1132 bp, Homo sapiens
agcctagaggaagatcttgtagaatcttttcatcctcaggtttgtcctccctccctccctttcccccatccctatcatgttgggtttgtgagtataagacatttaaaagcaactctgtgtgaagtatgcttgattttaaattctgcctatacaaccagatgttcttgtatgtaattaaaacttaagtagtaaattgaatggcctgtgaataaaattaaggattcaaattttgtttaatgagattttattagaatttcttatcattaagctcactcatattattcagcattttatttactcttagttacataattctttgccttaagtctactgtaagcaatttattgtgtacatggaattgtgcatttaaagactccatcattagatatagaacccatatttatttgggaaattccaactaatacaattctggtattttttttgcaaaaaagctttataaatgaattattctttttcttgttctcattttggccatttcattgttaatagtactatattaaaaggtaacatgttttcattttgatgtttacaaaagacatgggaatgaattgaaattaaaggaaggtggactgtgtggatcccaggaagattaaaatgaagttattttcatttatacaccagtgtatttttgtgttttgttttctcccatggagaattgtttctgttttctttgattttagaatagggtggctaaaggccatcacaaacatgttatgcatttgtagctataggaagagctagttgtggttctgtaactgggttccctgttaactgtcttgcttaaacctgatatctaaaaaccacattttttttttttttgagacggagttttgctcttgttgcccaggctggagtgcaatggtgtgatctccgctcactgcaacctccgcctcccaagttcaagtgattgttctgcctcaaactcccgagtagctgggattacaggcatgcgccaccctgcctggctaattttgtatttttttgttgagacgggtttctccacgttggtcaggctggtctcgaactccctacctcaggtgatccacccaccttggcctgccaaagtgctgagattacaagcatgagccatcgcgcccggccaaaactacga

SEQ ID NO: 39456 - DNA, 1041 bp, Homo sapiens
ttgagcctgggagacggaggttgcagtgagctgaggttgcaccactgcactccagcctgggtgacagagtgaggccctgtctcaataaataaataagttgtctttttttgagtctcactctgttgcctaggctggagtgcggtggtgcaacctctgtcttctgggttcaagcaatcctcctgagcagctaggactacaggtgcacgccactacgcccagctaatttttatttttactagagatggggttttgccatgtttgccagtctagtctcaaactcctggcctcaagtgatctgcctgccttggcctcccaaagtgctgggattataggcatgagccaccgtgcccagccaataaatatactttttatacctatgaatattggcataggattatagatacatgattgcaaaacttgtcaaaagtaaagttctgagggaaaaattaagagaaatttatatcatcagttatggctttggcattctacttttttgagtaaaattaatctgctctgttcaagtgaatttaggtgtgagaaagctggataaactgcttttgctagctcgtatttggttgcctgttacctttgaaaccttatactaaactactgtatgaaagtcaaatcatcacatgcttggatacctaatatgtaacacattgtggaagacatgaaaaaaatacctttattggctgctacttattgaagattatcagttaaagtcagagttttccaaaatgggtggattgatggaaagataggagggatagatggaaagatggatagatctgtgtatctgcatatgtgtgcacacaggcatatacatgtacatatgcctctggatgattataactgctttaaaatgtttgatagctccatcatctgtgtcatcttgggattggcatttgttgattgttttttccctcgagcagtggacagattccctggggtatgtgaagtaagtttcactttttttttttttttttttgagttggagtctcactctgtcatccaggctggagtacagtggcgtaatcttgg

SEQ ID NO: 39457 - DNA, 1025 bp, Homo sapiens
gcatttttcttaaaagattatttcttacatttgatagtgagttattaggtataacatttcagattttatgtgctttgtttgcagttacatgtggtatgtttttttcaaagatgcttttgaaacactttgtttgttgggaggctgagccaagcagatcacctgaggttgggagttcgagaccgcctgggcaacatggtgaaaccccatctctactagaaatacaaaaatttgctgggcatagtggcgggtgcccataatcccagcggctcgggaggctgaggcaggagaattgcttgaatcctggaggtggaggttacagtgagctgagattgcaccagtgcactccatactccagcctgggcaatagagagagaccccttctccaaacaaaacaaaacaaaaccaaaaaatcattttggaagttttcagactggtcctttttttagtataaaagggaggagctttggctttatcaaaaacctgatctgggaggattccctcagtatgtctgtaacatctccttttggcctgtgctgtttatctttaaaaattctgatcactcaagaatattgctgtgtcattagaagttaaccaaagcttatatttaaagttttattttaaatattttttataaataaatttgaaaaccttaggaagataaagttttgaaaggagtttttattttaagggactataaaagtcactatttgtcgtattattttagaacatgcttttcttaatatggaatttgctgctgttatttctaaagtttctgttctttggtcccattttatcagcaaaatcagtttattaatgaaacaaatctgttatttaccttttactcctgtatgcaaaatactgaatttttattttcacttgtaaacttaggaaaaagcagatattgtttttaaatttaatttctactttgagttattaataaaaagtttcacaaaaatatgaaaactttcaagtttatacacatactagaaaataaaagcattcacttatttcttctactgtattag

SEQ ID NO: 39458 - DNA, 2022 bp, Homo sapiens
tacagggtagaagtcttgggggccatcttagaattctgcctgccaaagctattctaaccaaaccaatgataattttgtagtatttccttttaatatttttttgtgagctaccatttttatttataatacaaatattttaccttgaggctttggaagtttcattactatcacttataaatatacccatattatttctgattataaaataagggattttatttgagagttcaagtatctgtagtgtagttttaattcttaacattttagttgtggtggttaccgtcatatcccaaaataataattttatattgctgtttctggaatggtcagttttagacattatttattgattttttgcagcagcaggtgatgcactagttcacttgtgtcattcctgccctgtaatacctctatttggggtggtgagactttggaattctccatgataaagtgttttcctccttggttgtattttcttgtgtgtattataacttatggttttcttcttatttcatcatttaccaatctttttatcacgtttccattttctggaagtttgtcacatctctgctgatttttctcccctcctcattctgcttttcattgtgaatttttatacctttttctttcttgagttctttattgtcctcccagtaagaggaagaaaagaaaaatatctggttagcatgctgtcttgaattcaaagtatgaagattgtgttggctgcagaaactttcatgaagtttctgatttctttgaagatttgggggattctaatcagtactctcaagggcttaaaggaccattgttaagaaagatggactgggttgattacatttagttattttaggttcactcttaaggttaattcctttgatcatagaaccagcaaccttgtacatgagcaaaatgttgatggttctctgggatgtaactcataataagctgtttgttgggccctttaaggtcatagtagaattcatttcatattgctgaaattgggaaaggcacaaaaatgtttgaagtgaatacacttacttgaaataacaagcatgaaggtacaacattttgttaaattttgggttttgggtaatgagtttcatttaatgcatagaggaggggaggacataaatatgctctccaggggtgtgagattgcagtgtttatcaaaaaagaaaaaaaaaacccacatctgtagaatggagaatgttgccgaatccaggggctggcctggttttgtaagtaagttctgttggaacacactgtgctgattcatatacaaattgtttatggctgttttcttgctacaaagggcagagctgaggagttgtgatagagacagtatgacctgcaaaggctagaatggttactatctggccctttgaggaaaaggtttgctgatgctggacctaattgatgagtgcttttgagatcttgattagagataagttttgtgatggagtagccatctcagtttaggtaaaagattccttaaacctcgaggaattagaaattgatttgacttatagaagtcttcagattaaaaatatgcatttgctgtggtgcctacaagtgatagtatagaaacttaaaattttacaagtttaaggaacgttctttaatgtacatgatgggagttgaaacataaagaatgaattaattacactgaaaaccaaggctcttgtttagtatattttctttccttttttttttttttgagacggagtctcgctctgttgtttagtatattttcattgaaatgataagtcttgagtggccaaaggaaaggacaggtgaagactggtaggttatttcaatctctgaggtcagatgagcatagagaatttgcacaagtaaagggtttcgtcatttgacattagataatattagaacatggcatatgtggggaataaacttttcatttaggaagcatttaggaagttcagagagagtaacagcatagcaggcaccagtagccctagaaaaggtagaatttgatggaacaaactaactgggatcagc

SEQ ID NO: 39459 - DNA, 1049 bp, Homo sapiens
aacataaacagttgattaaaacatattttatatgttatatatattatatactgtattcttaaagtaagagaaaagaaaatgttattaagaaaattatcaggaagagaaagtatacttactattcattaagtagaagtaggtcatcataaaaatctttacccttgtcttcatgttgagtaggctgaggaagggaaagaggagtgattggtcttgctgtctcagggatggcagaggcaaaagatgtggaggagagggaaggggaggcaggagaggcagacacactcagtgtaactttacagaaataataatttctgtccaacttttttgctttttcatttctctaaaaatgtttctataccatggcaccaattcttcttccaccgttggctttaattttagtgcctgtgtcataggagggtttgtgtcctaaaaataaatcaaaagcagtcttggataattgtaacccttctgccagattgtctaaagtagatttgttttctggcactgcttcttctgctgcttcctgaccgtctggcactggtttggaagcactcttcttcatcaagttgtcttctgttaattcctctgacgtgtccattagctcttgaatttctccaagattcatatcctgaaacccttcacctccctccagcagcacccccccccctttttttttttttttgctatatccacaattttatgattaccttcattggttctgttataaatcctatgaagtcatgtgcaacatctggacacagttttgcccagcaggaatttattgttttgtgcttcacgggtttcaaagctttttttgtggcagtggtggcatcttcagtggtataatacttccagacttatatgatgttctattggggttctcttccacagcattgacaatcctttttataggctacagtgtataatgagccttaaaggtccttatgacccccagatctagaggctgaattaagagatgtctcgtttggggacatgtagactactttgatgccttcattgttgcatggagttatggttgaccaggggca

SEQ ID NO: 39460 - DNA, 1038 bp, Homo sapiens
taggatgccttgtgtttcccttttatatactctatagtcatactcgactcacctcctcctccccatccctaatccctaatgcctggcagtcattaacctgttctctttctctattttacatttcaaaatgttatataaattgaatcatacaaaatgtagccttttgagattgacttattttgcccagcgtaattcttttgagatctaaccaagttgttgcatgtatcaaatagttccttccttttttttttttttttttaaatttaagttctggtatacaagtgcaaaacacataggtttgttacataggtatacctgtgccatggtggtttgctgtacctatcaacttgtcatctaggttttaagccccacatacattagctatttgtcctaatgctctccctcccctcgtcccccacccccgactggccctgatgtgttttgttcccctccctgtgtccatgtgttgtcattgttcaactcccacttacgagtgagaacatgggatctttggttttctgttcctatgttagtttgctgaggatgatggcttccagcttcatccatgtcactgcaaagtacatgatctcattcctttttatgtctgcatagtattccatggtgtatatgtaccacattttctttatccagtctatcattgatgggcatttgggttgattccatgtctttgctatcgtgaatagtgctgcagtaaacatacgtgtgcatgcgtctttatggtagaatgatttatattcctttgggtatatacccagtaatgggattgctgggtcagatggtgtttctggttctagatccttgaggaattgccacactgtcttccacaatggtttaactaatttacattcccaccaagagtataaaagtgttcctgtttctccacagcctcaccagcatcggttgtttcttgacttttaagtaatcaccattctgactggtgtgagagtttatctcgttgttttgccccaaaaactccttaaactgataagcaacctcagcgaagtctcaggatacaaa

SEQ ID NO: 39461 - DNA, 1967 bp, Homo sapiens
atccatatcattagaagtgacataagagaggaagcctggatgtcatctccgccttcagctaagtggagctttcatttactttgtacctctatccaaattaacatgttttcaagcacgttaagggtagcaaatgcaaaaatgatagaaacatagaattttagggctagaaagtaccattgaagtattttaatttctcctttccatccagggcccagatagcctctatgaaatgactgtactaaggttttgagagtaaaaaccaaaatgtcatgtttctttttttctctagagtaaaatagtgagagtactaaacttatggcagaagaataatgtatttaagagtgagattattcagccccttttggatatggcagccgggattccgcctccagttgtcacacctgttttggccagcactaccactgctatgagcaatactccaggtatgttgctttaatatagatttgttgtctaaatattctactcatactttttggatgactgttcatataaaaaataattcgacagtgcaggaaaatttgtccagcattacataattgaaagaaaatatttgtagagaaaaataaaattagatattatgtttgtgtgtaattatttctaaaatgtagaaaactgattttcatttaatccacagaaacataaatataatgaaccttagaaatttggtgtgtcaattagatttttcctgatttaagttgtctgtaacttcttatacttgcatttgtatcaacttggtatttataggatactagggggacttaatattttttaagaaaccctgaaacaattatttaacaaaaccaaaatttcaaaatcgtgttctcttgaggcatttaaatgactatgataaaaaatttttatcaaagtaatttaaaaattttttgaaatttttatgaaaaaatttttttcataattttttcataattttttaaataattttttcaaaaatttttatgaaaaaatttttatcatagttccagccctgcgcagtgactaacacctgtaatcctagcactttgggaggccgaggcaggcagatcgcctgaggtcaggagttggagagcagcctggccaatatagtgaaaccctgtctacattaaaaataaaaaaatcagctgggtgtggtagtgggtgcctgtaatcccaattactggggaggctgaggcaggagaatcgcttgaacccaggaggcggaggttgcagcgaggcgagatcgcgccgttgcactccagcctgggcaacaagagcaaaactctgtctcaaaaaaaaaaaaaaaaaaaaaaaatttttttaaatcatagttccaagaattaaattggttagcatttcataattttgtatgtattttgtgtgtgtgtgtgtatgaacaaaaattgatgtactgttttttgagaccttgctctgtcacccaggcgggtgtgcagtggtgtgatcatagctcactgcagcctcgacctcctggcttctagtgatcctcccatctcagcctcctaagtaggtgggactacaggcatgcactaccatgcctggctaatttttttttgttgttattgttgttagagacggagtcttgctgtgttgcccaggctggtctcgaactctagggcccaagtagtcctcctgccttgggctctgaaagtgttgggattacaggcatgaaccactgtacctggcccaaacatggttttatattatgtgtacttactataaaatttttttattgaagattgtattttgaatatttcctcatgttactgaatttttgtctctaaagtaagatttttaatggctgttaagtattgtaggctttagaagtacagtagtctccccacatccacagttttgctttccatgattccaattacttgcagtcaaccacagtctgaaaataggtgagtatagtacaataagatattttgacagatagggaaaaagagagagagacc

SEQ ID NO: 39462 - DNA, 1022 bp, Homo sapiens
cagcttctaagtctaatatagtctaacactaaatagctagaccacataaaaagcctttaaattgagcattcagaagaataacagcattctaagatgagaaccatattaggaatagatccattgaatatggccctagatgttttatcaagcttattaccatggaaaaaccacctaattattttaattcttagtcttctgtaaaatttgagtattagtgtttatcctgcctctatcataatttgttttgttatgtaagataatacatatcaaaatgctttaaagaaaagatctactcaaaacactttataatagtataaagtgatacaaaatgtttatttacacattaaatgatagatataacggaatgccattgacatttaaaatagcatttgtaacttgtatttgtgtgaagcactttttaatatgtctgtttctccttctttcccccagaagttgatggataggtttgattttggggaagactctgagcatagtgaagaacccaaaaaggaaattccagcttcacaactgtaagaattttttctttatagccatagtttttttatatttagtgggatgttgccatctgaattactaagtatacttagtaagttgggattattatttcaagctgttgaacctctaacattatacaaaggtggtagagatatgtcttgttgtctctttgtattattttgagtcttttctcagatctttgcaaatagactgtatcaaagttacctataagaacattgatacatattggtaaatctggttgtaatattttccatattaggctttaagttatttaacttaattgtaagagtggttggaatactaggaatgaagcttgcttctagtgcttagaggccacttctagaaagcatatgaaattgtggaaacacatcaacctaatgagaattaaggattggagttatgaggatttttttttttgtaaagaaatgtgttgtatgtttttattaaatcagttacttttttttccctaaacaattctgcagtgc

SEQ ID NO: 39463 - DNA, 1022 bp, Homo sapiens
cagttccaaaatttcacagcttagaataataagatccctttgaaaggaatagaagttctgaaaaacctcattgttcaaaaatgaatctaatgaagaaaagagagtggtaaaactagaactgtttttataaggtagatagtataaaacctatgagagatttagaatgcagatctcggctcactgctacctccgcctctcaggttcaagcagttctctgcctcagcctcctgagtagctgggattacaggcatccgccaccgtgccctgctaatttttctgtattttcagtagagacgggtttcaccatcttggccaggctggtcttgaacttctcacctcgtgatccacccgcctcagcctcccaaagtactgggattactggcgtgagccactgtgcctggcctgttttttctttgtagcattttttattaatgccaattatcagtgaaaatctagattcatttaactgactgccattatgtatttttcatgctataatttatttattagtcctctgtagtttatattttcacaattgaaaatttacttgattttaccattttaatattttagtcccttccttttatggagctgttctctgcttttatataaaaatgagtttatacaaatgtttaattttggattgattactttataaatgatttaacatggaatttcttttatgtatggctcatgtttttaaacatgtaattgtgatgtttgctgtgtttacattttcattcataacaaaaagtatctcccaatctttgtgtgtttgtatatgttctcaataggccactcctcaggatagtcaggaaggaacctttgggtcagagcattcagcgtcaccatcacaagggagtagtcagcagcattttcttgaacctgaagtcaatttggatgattccatagatattcagcaacaggtaaaagtaaatgtttttctgggtcataaatttctaaaagtagctaaagaaatcataaaatattttatactagcagtgccctgaatatatttttcc

SEQ ID NO: 39464 - DNA, 1054 bp, Homo sapiens
tttataaagtcattgttccttattaacttgttgaaaaatcatgtatttttattctttccttatttttagccactttttaaaatgtacaaaaggtatattttattaaaaataaaattaaatatgtgtatcatgtaatttaccacaaaattgagttataattaggattgtgagaggaggaacaaacctcgaataccaaagtagattttatagtttagaattattttagtcactattttctagttgaatgtaatggtagctttatatttcaaaaaatgcaaagaagcaaatttatagtgtggtatttaaaatgattaagaagccgagtgccatagtgtgtgcttctggtcccagctactcgggaggctgaagtagtaggattgtttgagcccaggagtttgagaccagcctgggaaacatagactcggtatctaaaattaataatttaattgaaatcattaaaaagccaatattaaattgaagatttacttcagtgcttaaaacataatatagtgttatccagagttaacggaaatattttgatctagtgagtaaacacacgtatcaaataagtaaaatggcatatataaacagtttacctggctcctattaatttttgattttacagcaccatagagcatgctacgggacttgaatgagtaaataaataggatgttctcataaatcaggacctctttgctttacctagcttattagggatcaaataaggcagcgtatataaaagccatttctaaaatagaaaaaatatatataaatatgaggttgtagtccattttaagaatatgaagtttcatttgtagctgttggaatctttgatttaaaataagtaatttttcttgtgctattttttggggtttttttttctgtctaggtttcatgccgcctccagttcccccacctgttgtgccaccccctacgattccaccagtagtaccaacatgtaagttttctacttttagagttttctttattcatggtagtgttaattttagtgtgtcagttctcattcttgtgaattaccgttaatatttttatt

SEQ ID NO: 39465 - DNA, 1036 bp, Homo sapiens
agagcttaaataatggatttggttttttgcttctttgtggtactgaaattactgtctttgcatttcctgtaaaatggaagttagcaccaaaggcttgcttagattccggttcacctgttttagcaagaatacttgagaagcaaaatgctgtaggattggtattatctatcacatcagaagtcttgcagtgcctttttgtcctcctgccccacaccttttttggggcggggcgggggggggggcggtgtaaaactttattttttagagcagttttttaggttcacagcaaaatggagccaaaagtacagaggattcccataagcccccacccaccacacttgcacaggctctcattatcaacatcctccaccagagtggtacgtatattacaattagccagcctatattgacaaatcattatcacccaaagtccttagtttgcattttgattcactcttggtgttttgttccccttttaatgatgttaagattgatcagaacatttagtggaacagtagaacctggtcattaaaaacatttcctttcatccattgatcattgtttcttagatctactttttattagttgcagagtggtgatctttctaaatgtataattccttccatgtttcttaacttaaatgaagaaaaagttttccttaatcaggtaatggtacttagttaccttgaagtgtggttggtacagcaaagtcagggtagatgctatttttttctttaattgccatttctcagagtcatgagatctataggtatttccagtgatacccagtgaccaaagagagatttctcatttctcttcatcttctcctcccttgtccctctctcccttttttttttctccttcagtttctttagtatttatggattaatggatttttacttctagtcagttgcatttttctttttttgaagtgtagattgtttcatctttggacggtgggagacctgtgttgcctccctgtcacattagttttgagagctacttagctttttggcccagtatatcccagacaaat

SEQ ID NO: 39466 - DNA, 1025 bp, Homo sapiens
ttattttttgcaaaagctttctatcataacaacaatgaactatgtggtggaaaaagcatgtactttgatataaaaatcatgcagcctcctcagtatgtgtataatatctgtgtatgtttattgtggaagtcgtgtagtttttttctgtttctctgtatgtccgtcttcatgcacatacagagaaaatagaaagttgaaaaagtttagataataaaatattcttttaaatctggtagaatattggagaaatctggctaattaacatgggttatagttaaagctcttggtcttgatgaaggtaaaataagagatattataaagagatacactggtagtttggcagttctatttttaatataggtaagcatgaagccagagttagcatggagccaaatttcacataaatgcttgcattgctttgtttcacactatatttgctattctgcgtagatagtactgacactaaagtactcactggtcacgtgcctgaagttaatttcttaattgcacaaaatgtgtagtggtgctggtggacttaaagacattaatgtgtataccaggaacataatacccatcatgtgttttgtagggctctgggtaacactgtagcctgcaaggtaaactgagtagggaaaaaagtaggggttggcttcctgtttgtttttgcttttgcttttaatttttatttgctatttgttctcttttaggttttacttatatacacagatataaaaccattggtgttttttagtttctaatggaaggcttttatttggttctatgagtagtcattttgtttccaatgccttaccagcaatttatcatttgctctgtttatctaaaatttctaagcaaagatagctccaaaaaatgatagaacacaccagacatttaaaattggattggtcttgcctacctctgatgacctagagagctataagaactttaaggttcctcgtcaaaaatgaaagacttcttataagttctgaacagggatagtacagtatttattttgttatttagaa

SEQ ID NO: 39467 - DNA, 1022 bp, Homo sapiens
aaaacaagatatcttgatatccagcaaaactttctaaaactagaacttaaaattaagggcccagattgtttgtttttttttttttttggtggaaaggcatactttaaatatgggcacataaatattgaaagcaatttgagatgtcccctctctctggttcccaggcaggaaatgtataacagaaacacctgtggagctctctgaaaatattttggtgggggtatggggagtagagggtggtcaccacagagttactaatacagaatctcctgagggtgatatatatataaaatatatgcatacatgcaccttcctgtgtatatatggttttttaaatccccacataccaccatttcagatatattaaaatatgtacatctttattataccatactcttgagattcttaagatttttaaaaatccaaatattttagttacatgagattatgtttagtgtttcaacaaagcatgcagttaactgtggcagttggtgttggaggatgattcaaaagtagagaagtcagttatcacagcttaaatttaagcgttaatctaaagatgagttataggaagaaagggatggcaggaagcatatgagatggttttgtagggaagtattttttttttttatgcaagtgaaacttgttcatggattattacctcaaggaaaatttacttgatacatgtaattaagtgttttgattatagaaagaatctctttggaccaatattgtaggtgttcagggtctagaagcaatgttattagtaagactccttagatgtgcatgtcaaaactaatgcaaatcagtgaattatttgtgcatgagctttgcttaggcatttttcatcccctccacttaagttcctcctttttcatcaggctcttttgctcccatatgtatacttagaatgactcgggcttcttgttctaaagtttattcaagatacagaacaaatattctaagtaatttgtaaaatatatattgtatatcaagggatagaattgtgctaatgggctaat

SEQ ID NO: 39468 - DNA, 1082 bp, Homo sapiens
gtttctctcttggctatttacatttttagcttaacatttcaaattagtttctaatattctaatacagctcatagttggaaataacgtgtgtagatacatacacatatatgcatgcgtgcatatgcgtattctataccttaaaagaaccttcaagtaagccttgtagattttcttttgatcttttttttttttttattatggtaccttgagtattctctcaggaattagacaacttaaaaccagtatcttctttctctgcataagtctcacatctgtttaccaaattcttagcatttaggttttttttttttttacttatgtatgcatatattttattctgaatttatgcccctgtcgtaagttttgtttcttcagtttcttctgggatatctttttttttctgtgcagccacagaacaattatggcttaggaataatttctttccagcgaggatcatctccatgtagccgagggagctcacatacaaattaatctgaccatgagctctgaaaggacagtggctagcacatcttgggtgtttgattcacctggatgtgctcagtgaccagagaatttccatctaaacctcgagttcagcgttactccctgtgtatttaaacatgttcaggaagaatttagctttgtttttgggctaccaaccctgtgtctagcccactgtttggcctgggcacacctaccaactccaccctgtaatgtcaaaatggtacacattgtttctgtaaagtgacatctttcggataacttggtgatctttttgtacatgcgtacctttaatggcctgggcattttcacaagtgttcttgagtgaacatgacaacttgaacctcttgatttgcatggttttgtggcattttccggatcaagagactatcaaaccgttttcacctcagtccacttacagggagagcaagaactggatcgttgaagactgatacgttttctcatcaggaacaactcagtcttcattagtataatgacatctgggcagggtggtggctcatgcctgtaatcccaggactttgggaggctgaagtgggcagatcacttgagcttaagagttt

SEQ ID NO: 39469 - DNA, 1020 bp, Homo sapiens
tccaaatatattagactaaaatatcctgtgaacatggaaatcaatgcatatggcctttctgactttttaatattgagcactttcaaagattggatccatattgttaagaaatgtaaaaacagcctgggcacagcggctcacgcctgtaatcctaacactttgagaggccaaggcaggcagatcacttgaggccaggagttcaagaccaggttaggcaacatagtgagaccctgtctctactaaaagcaactttaaaattagccaggagtggtagtgtgcacctatagtaccagctgtttgggaggctgaggtgggaagattgcttaagcacaggagttcaaggctgcagtgagctacgatggcaccactgggctccagcctgagtgacagagtgagaccctgtctcaaaacacaacaaaataaaagaacagtctcataaatattttcactttggaacttgacccagtcagtgatttcaaacctagtattttcaattaattgaagtgtctagtataataaaatctgatttgcttaatgttggctctgaagtaatttgacttaataacttgtaacaatagatacagagttgtttttctgtctgtagcttaagaagtgagctgggtattgaaagccttagatttgctaactataattgaattatttgtgtctagactgctccttggcatgtttccaaatcatttttgtttcctttgggagaatagagacataacagctgtagggatgaccatgattgctgtgtgaacaagtttgtcttcagtaaatgtgtttgcctacttggatgtaggcctgcatattatttttgaagtcagattttgggtaaagctcatggactttttctaaaatgctccctatcttagaccatcaaatgaggcgtcatgtgtgcaggtcaggttgcagttagagatacatttgaatgatgtcgcccacattggtctttggaatgtggaatctttttttttttgtcctttcattagtacatgtagcagatctgaaagagaa

SEQ ID NO: 39470 - DNA, 1140 bp, Homo sapiens
ggatgaccccatttcttaagttgttggaaataatattttgataaggtccttcagttccttcttcatgcctcaggttccttttgtgtactgttttgtggagagcccataaagagacgagacatacacttgccttttaagtctgggaggaggaaaagtatttctgatacccagttttgccttcccgtaggtgaatttcaccaagttacttcaaaacttttctactcaccacaacacatgccacctttaccatcttactcccctcccagcagagaaacttgcctcttttccttatgtaactagtagatgggactatagtaatttgtttcagtaacctctcaactcatttaaatgatctggtctctgcctcaagaccagtggttctcagctagagttgattttgctttttctccgcccaggggacagttagcagtttttggagacactttctggttatcacaacttggtgtggggtactgctggcatccagtgaatattagagattagggtgctgctaaatattctatagcgcatagggtggcaccaccccataacaaagaactgtccccaaatgtccggagtgcccaggctgggaaaccttgctctagttttagacataacacgctgtaggtcctgagcaaatttttaattatcctggttcactcagaacactgcatcatcaaatgtcttctctttcctgtattttttaattttttattattatttttagatggagtttcactctcgttgcccaggctggagtgcaatggtgcatctcagctcactgcaacctccgcctcctgggttcaagtgattctcctgcctcagcctcccgagtagctgggattacaggcatgcgccaccacgcctggctaattttgtgtttttagtagagacggggtttctccatgttggtcaggctggtcttgaactcccgacctcaggtgatccgcctgcctcggccttccaaagtgctgggattacaggcgtgaaccaccgcgcccagccttcctgtatttttttaaaactctctctcttcactgacaccaggtgttgctattaatgtgctcaaatctctcacttataaaaaagaataaaacctctctcttttctagttactggtctgtttattcttttgtagaa

SEQ ID NO: 39471 - DNA, 1177 bp, Homo sapiens
ctcgaactcctgacctcgtgatctgcccaccttggcctcccaaagtgttggattacaggcgtgagccactacgcccggccttgattcagtccttcgttgacagttccagtggcttcaaaactatcttccaggctcaacactgacaaacacaacttctgcaatgcttaccagagtaatttttccagaattttcctaggtgaagagagagcgtagcatctggagcttacgttgccagagtttgaattgagggcaaatcatttttctttttggtgcttcagaattctcagtgggaatgaacatgttagtaccaattttataaggttgatgtagagttaagtgactgagtacatgtaaagctcttgaaacagtttctgggtaaataatgttagctgctattagtttatacgatcattaatgttgtaatacacatctgaacacacctaccaaaagttcttcatttctgtggtaacctaccaaataaaatttaaactgcttattctgacttgctggactcatcatgacctaactctgtttacttttccagtttcttatctgatctctgctgtaaatacgatgtgtttcagcaatttgatacccttagcagttcctccagagtgcttttactgcttgactgtttcttctccctgaaatgctgtccccatctataccgtatagactcctacttgttgacctgtttgcttttttgattttaagcaaatgagctctttgaggacagagatcttattaatgcttatgtctgactcatagtacacatttagtaaaaatttgttgaaagcataaatgaacatttaaaaaacgagaagagactgggcacagtacactcccagcactttgggaggctgaggtaggaagattgcttaagcccaggagatcgagaccagcctgagcaacaacgtaagactccatctctacaaaaaacctaaaaatattagccaggtatggtggtgtgccctggtggttccagctacttgggaagctgaggtaggcagatcacttgaagatcagttgagcccaggaggtcaaggcttcagtgagctatgttcacgcctctgcactgcagcctgggcgacaaaacgagaccctgtctttttttttttctgagacagagtctcgttctgttgcccaagctggagtgcatgatctcacctctctgcaa

SEQ ID NO: 39472 - DNA, 1033 bp, Homo sapiens
agagagactcaaagagggccagttacttcatgtctcattgtctcagttttttttttttttaatgtaaaatgggccaattattgtgttgagcttaagtgtttgttttgaagacctaaagagtaatgcatggtactaacacatgccacagcatggttgaatcttgatgatactgtgctaagtaaaagaagccagacacaggctggacgcggtggctcacgcctgtaatcccagcactttgggaggctgaagtgggtggatcacttgaggtcaggagtttgagaccagcctgaccaacatggtggaaccctgtctttactaaaactacaaaaaaattagctgggcgtggtggtgtgcgcctgtaatcccggctacttgggaggctgaaacaggagaatcgcttgaactttggaggcagaggttgcagtgagccgagatcgtgccattgcactgcagcctgggcgacgagctgaaactccatcacacacacacacacacacacacacacacacacacacacacacacactgaaactccatctcacacacacacacacacagacacaaaagatcacatattacgatttatttatatgaaatgtccagaaaagccaagtcagtagagacagaaaatagataagtggttaccagtggcttaggggtgagggggtgggaaagaatggagagtgactgccgatgggtacagttccctttcagcatgatgacaatgttctgaaattcgtggtggtggtggtggttatacatctttgtcaacatacttagaactactgagttgtacacttgataaaggtgaaatgtatcatatgcgaattgatacctcactaagaagaaaaacagtaatgcatgtaaagtacttagcaggtacctgttacataataagcttttttttttttttttgggacggagtctcattctgtcacccaggctggagtgtggtggtgcaatctcagctcactgcaacctccgcctcccaggttcaaacgatcctcccgcctcagcctcccaagtagttggga

SEQ ID NO: 39473 - DNA, 1028 bp, Homo sapiens
agtaacttttttccactatgataaactcttgtaacttttggaatattaaggttttttattgttgttattgttttagacagggtctttctctgtcgcccagggaggagtgcagtggcatgatcttggctcactgcaacctccacctcccgggttcaagtgattctcctgcctctgcctcccgagtagctgggattacaggcatgcaccaccactcctggctagtttttgtatttttagtagagttggggttttgccatgttggccaggctggtctcgaactcctgacctcaagtgatccacctgcttcgtcctcccaaaatggtgggattacaggtttgagccactatgcccggctggaatatttttactcaatattttccttctttaaaatgcttaaataatacagtaattttattgcatattaatagaagtatttgaaggcaaaaattaatttcttaaatttatgcttggggatgactggcatttcttctgggtatatggaagctctaagcttggaaaatactctgtatcattttaaaattctaaacttttaacctgattaagacttgaatgaatgtatcatccctacactgaatgcattcatttattcagcaaacacataggcaccaggcacacgctaaaagaaagcaaggtctctgcccttgaggaatccacaatgcagtcaggaaggtaattactggacagagtgattggcgccatggcagagatgtggcagcgtgctgtggaaatgcatccatgaaccgtggaaaggggtggagtagggaaggcgattagagaaattggcacttgacgggcgtcctgcagcttgctggaagtgaagtgcatttgcaggggttactggaaggcatgaaagggtatggagtgaatggagggcagggagtagctctgcttggcccctccggttgtgaggggccctcactgcccagctaagagcttgcagtttctcttgtaggcagtaggagtctatcagcagcaggtgccctggttcagattacagatacattctt

SEQ ID NO: 39474 - DNA, 1051 bp, Homo sapiens
tagtgtgatgatacttagaatagaactggcacatggtaagcattttaatacatggtaactatttttttttcatgatctagattctagagaaaaatgaagactacagactttaggagtatcagacccttcttgttgttaatattcattcttaagatttgagtatcctagaagatatatggaaatggaattggggagggaagctttagatttaaaagtctccctctctttttagcagtacttgaatttcaggaaagcatacatttcacaatatgtgtgtattgctaatgggctggatatgggataaaactaatgaaagccacgcctttgccgtcttgcattatttattcaaaaccagacagcagctgggcgcagtagctcatgcatgttattccagcattttgggaggccaaggcaggaagatcgcttgaagccaggagtccaagaccaatgtgggtaacatagcaagaccccatcttttaaaaatacatataaaaattagttgggcatggtggtgcacacctgtagttccagctactcagttggctgagatgggaggatctctggagctcaagagtttgaggctgcagtgagctatgattgccccactgcactccagcccagtgacagagcaagaccccatctctaagaaaaataagcaaaataactggtccaaaaccaggtagaaacatggttctaattttctgtccaggcaccgtggctcatgcctgtaatcccagcactttgggaaactgaggcgggcggatcacctgagaccaggagtttgagaccaacctggccaacatagcaaaaccctgtctctattaaaaatacaaaaattagcggggcatggtggcatatgcctgtgatcccagcactttgggaaactgaggcgagcagatcacctgagaccaggagtttgagaccaacctggccaacatagcaaaaccctgtctctactaaaaatacaaaaattagcggggcatggtggcacatgcctgtgatcccagctacttgggaagctgaggcacaagaatcgcttcaacctgggagg

SEQ ID NO: 39475 - DNA, 1050 bp, Homo sapiens
acacggactgatggctcaatgtcctagaatgtttatggatttcacctgtgccctgggcctcgctggacttttctagatatctacaagtggcggcttgctctctttctcctcatcccagtactgtggagtgtggctacaaaaggtttgaaggcgttactgatcattgtggtggtgtcagtgatattgtataataattgtaataatttctacgtattgagtacttgctatactggatgctttacgtaaattaatttatccttataacaaccacatgagaataggcactattatttcacttcacagatgaggaaacaaccagtttagcccaagttacacagctaatttgggcaaaaggtgggttctaactgaggagtgtctgatggcaactcctgtgttcttaacatccgttctacatggtttggattaagagagtttgtagctgaccctatgatggaaattcattgagggcttgtgtcctttttcttcatgatctgtgatgtgaatttctcttcataaccagactgtgtgttcagatcccaggctctgccatttgtcttttcagattttgagttatttcactttgcctaaaataatacttcatcttgctaatgaagcctgtagatttcagcatgagatgcattcttaataacctggaaaagtatgtagggacgtacaaaatcctatgtgggtctggatccagcatttatctattgactatacacagattttgtaatgagttatatcaaattaaagaatggaaatccttgttgaaaaatattttatcaaccaaattatgtttaaagctatttttatgttctttcagctcactgacatgtaaccaacttctccatctgatttcacttctgccgtgttcttgaagattttaaaaaaggggacagttggttgactataaaacacagaatctatttgtattcaagatcatcgatttaagtttgacaaactaaaagaatgtaatgttctactcatttgtatggccagtgtctacccagtaagctttttcagtctggaacatttttagttttcctagtg

SEQ ID NO: 39476 - DNA, 1030 bp, Homo sapiens
actgaaatttaatgcttattgtagacaaattatctaatttccaagttagtttttatgtgtaaacacaaccagaaattcactttgaatgctgaagcctgactttttttttctggttgattttcaaggaaccaacttatcttttttatgttttagaaatatgagggatatggctatggccttgacttttttgttgcaaacaagttggtgcaaaagtaattgcggcttttgccatttaaaagtaatgacaaaaaccacaattatggctgggcacggtggctcacgcctgtaattccagcactttgggaggccgaggcagacagatcacaaggtcaggagtttgagatcagcctggccaatatggtgaaaccccgtctctactaaaaatacaaaaattagccaggtgtggtggcacgtgcctgtggtcccagctacttgggaagctgaggcacgagaatcgcttgaacccaggaggtggaggttgcagtgagctgagattgcaccactgcataccagcctgggctgaacagagtgagactctatctcaaataaaaaaagaaagaggcaggccagtcgcggtggctcacacctctaatcccagcactttgggaggccaaggtgggcggatcacctaaggtcaggagttcgagaccagtctggtcaacatggtgaaaccccatctctactcaaaatacaaaaaagttagctgggcatggtggcgcatgcctgtagtcccagctacatgggaagctgaggcaggagaatcgcttgaaccccggaggcggaggttgcagtgagccgagattgcgccactgcactccagcttgggtgacagagtgagactccatctcaaaaaaaaaaagataagaaagaggcagtctgatgtcaggtgcaagtatgagcctttaaagttgatctgattaaaatccactttctgccacacaacagcatgagacttcaggggagttacttacttaaattgtctaaacttaaactccctgttataaaacaggaatgctaataccagtgtgtc

SEQ ID NO: 39477 - DNA, 1064 bp, Homo sapiens
tgtagaaaaagagtatctattagtggttcattaatttggatcatgtttggagttctcagtgagcttgttaaaataagacactgttcctttctttttttcttttcttttctttttttttttccagacagagtttcactcttgttgcccaggctggagtgcaatggcgtgatctcggctcactgcaacctccacctccctccattcaggcgattgtcctgcctcagcctcctgagtctctggggttacaggcatgcgtcaccacacccggctaattttgtatttttagtagagacggggtttcgccatttggtcaggctggtctcgaactcctgacctcaggtgatccgcccgctttggcctcccaaagtgctgggattacaggcatgagctaccgcgcccggccaacactgtgcctttctaaaaactattattccactaaagaaaaaatagagagagacatgcaattcaagtatagtctttcactaacgtgattgttaggtatgttagagatagtaggaaccttagctgagtcgtccttgctctgtggttttaagtgtaaaaataaccctaattattgtatttgctaccttgtgcccactttacagacttgaagccctggtttctgtaagtatatgcatacaagtaaagatctagtgaaggcatagctgagtcctcccatcgagggcagctgggcatggtccctgcaagaactttttttggccgtttgtcccctgctaaccttgcaccacccagggctgtgggtaggtgttcctgtcctagatattccaggggtcacttgtcccttgggctgcattttctggcatcccagaaaagtgagtggcttgtcatttccttgactaagtcatgtcaattctctgccactaattcagtttgcaaatgagtttcttcagctatttaaaaaaaaaaaaatagcatctgctcaaatgggcggccatatagtctctcgaattcagttgtggagacagctgaggacaccagattgagtttgtttcggcaaactggatatatgaaaattgaagattttttttaaatgggtgattgtt

SEQ ID NO: 39478 - DNA, 1035 bp, Homo sapiens
gacccactaaatgaatctcaagaccttttaatacgttgaaagctgcactttgaacaacgtagttctagttctgtttcaggatctagaagaatttcctcaaaaaaaagaaaagaaaactgagtttggattaaaatgtctgaatctccttctctcctccctgctagattgtgagctcgctgagggcagacagtgtatctatttctcctttatatactcagcacctaccttggtgtctggcacgtaggagatgcacagataaatattaactgaaccaaagaactcagcctctctgggtcttcgtgcccccatttgtaaagtggagaagtggccatgtgcactcggggggcagttgtgagaataatgagatcatgcacctacagcagcaggcacagagcccagcactaatagctgctcgatgaatctacatttctttctggatttctacacctagctctttcttggattgactgcttgactccactgcagttttttttttaagtgtaatgagaggtttgaactctattagcctcagatcccaacccacttaggtgcgctaaggttttccaggatgctatggagcctggaggcaaattgcccttcaaggacagcaatttcttcttgaaactcagcacacacaggtcaggctctggccaaaaatgtgagaggtcatggggcagagtcctttcatttctccatgaaaaagtgtgacttgagctgattattagcattttattgcaaaaatgtaaattacttccacatctagaaagattataaaataagtttaggccaggcgcagtggctcatgcctgtaatctgagcactttgggaggccaaggcgggcagatcacttgaagttaggagttcgagaccagcctagccaacatggtgaaaccccatctctactaaaaatacaaaaaaaaaaaattagatgggcatggtggagggcacctgtaatcccagctactcgggaggctgaggcaggagaattgcttgaacccgggaggcagaggttgcagtgagccgagattgcgccat

SEQ ID NO: 39479 - DNA, 1092 bp, Homo sapiens
ggccacttggtgacactcctcagcctccttgggtaatggtgagacctttatttactatgcgatgaagggcctgggattctcttctcatggttattcacacattctaccttttgctccccaaatgatgctgaccaccttattttaacagacaacaccggctatctccagttctctttccaatagatttaagccagagtgtctctaaaatcttaccaagtttcgtacaggtgcggatcatatgctataaatgtttcagtcctaggctctggataaaaaagtgtccatggttttataatttgggcttaaccagtagaacttgtgtgtatacactcttagaagtatttcctgatgtgcttaagattgttatgttttaaaaatatagtatcatgattggtgcagttttgtaagcaaacttttgttccaccggattttacctgctcactttataggaaaataaaacttgttgctttagggtgtcagaggtttttgtgttgggtaaatgtaaaagaacatggcaaggtataactgaagaagagtttattatttactgtggcaaaacacgcccctaatgacctcagaatcagctttcaacaccttcacataccatactaagatgcttcataatgtggcacctgcctgcctttccagttccatctactgactttccccaggcctcctggctctcccccgcttgcacactgcctgctctagacacaccaagctactcagaagttgttatttccagaccattgtttggaatgaatgaaattctgcttacactgttcttactcctcttgcccatctgtcaattacccacgcattcttaatgtgtcagtcaaataccttctctaggaagcttttcttccttatccgtaggcgaagttaagctcctcctcctccagtagtcagtgcttctactagaacacatttttgtatatacctctggcactgccaccttgcacagttgttcaggctgttcactacacaaggtcatcttgtccaacaggcaattggaggctgaaatccgattcacactccacttgccaagcctctagtgcgctcctctccattggagaggatacatttggcaat

SEQ ID NO: 39480 - DNA, 1045 bp, Homo sapiens
gcactccagcctgggcaacaagagggaaactgttgcaaaaaaaaaaaaaaaaaaagcatccaaaaaactgttacgctctcaacacgatggtcagtaagagaacttactttaagtagagaacagtaagtgacattaagtgacacaaaagcaaattccttaagttttaggtggaggagtgataggtcagatttgcatttgaaaccagttccgttcaggcaccttggcttacgcctataatcccagtactctgggaggccgacgctggggatcacttgaggttgggagttcaagaccagcctggccaacatggtgaaaccctgtctctactaaaaatacaaaaattagctgggtgtggtggtgcacatctgtagtccgagctactcgggaggttggggcacgagaattgcttgaatccgagaggtggaggttgcagtaaaccaggattgcgtcactgcactccagcctgggcgacagagcgagaccccatctcaaacaaacaaacaaaaaaagaaaccagtttctttttagattgttgtgagtagatttagggaagcaagcctggaagaaagaaagtcagtggtaacagtgtagatcatcaaaggtggtggcagtagaatagtggggacagacatggaagaagattccagaaatataaaggaagtgcagtggacttggtgactgagaaaatggagggcagggagaatcacatccagtaaaggatgacacccaggctgctcacccatatgacaacctagaaggagaaggttggagacctgtgggatcctttacccaagttcacgtagtttgaaattgcacagctgagatttgaatccaggtctgtctgaccacatgatccttccactcttctatcctgacccaatggttagcatgcccttaattgtaaacaaataaaggatcttaataaaaatcatctagcatttgaaagcttttattttttgtgaaatgttttttcataacattaaggaaaaaaaaatgcccacggatggttaccgccagcagacataggctggtgccctgagaaggt

SEQ ID NO: 39481 - DNA, 1048 bp, Homo sapiens
gggcctcagcaagggttattttattttatttatttgtttttttgagacacagtcttgctgtcgcccaggctggagtgcagtggcgcgatctccactcactgcaacctctacttcctgggttcaagtgattctcctgcctcagcctcgcaagtagctgggactacaggcatgtgccaccatagccacctaatacttattttttttgtagacacagggtttcactgtattggccaggctggttttgaacgcctgacctcaagtgatctgcctgacttggactcctgaagtggtgggattacaggtgtgagccactgttcctgccctattttttttaattttaaaaatttatttttattttgtagagatgagatctcactatgttgcccaggctggtcttcagcaatcctcccaccttggcctcccaaaatgttgaaattacaggcgtgagccaccacgcctggccaagggtcattttaaaatatggattgtatgttttgccactgtcctttgtaacaagatattatttggagcagaacatacacagagaagaaaacagcaaacgagtaaacaaggctgcaaggacaagtgtggccgtggaaggaagaggacagagcaagagaagggagaatgggggtcaggggtgtcctgggataaagaagtcgggattcagcctagagtggcaggcctggtggctcgaggatgaggaaggtggagtgaaggagactcgggaggccgcattaggactgtgggagaatttggtttgaaatattccagaataatattttcatagtgtggtcaatggtgcaacaaagaaacaaactcagtgcatgtttgaacagaaggagatcttgaaatcctcaatccactctttgttttttttttttgttttgagatggaatctcactctgtttccctggctggagtgcagtggtgcaatctcggctcactgcaacctttgcctcctgggttcaagcaattctcctgcctcagcctcctgagtagctgggactataggtgcatgccaccatgcacctataatttttgtatt

SEQ ID NO: 39482 - DNA, 1116 bp, Homo sapiens
cttgcccctcctgactctcatttccactccctcctaagcttccctttcccctgttgtctgctttgtgctaacctagttagatgagggttagggatgatgatgatgttgatgatgatgattttgagacagggtctcactttgttgcccaggctggaatgcagtgtcgtcatcatggctcactgcagcctccacctccctggctcaggtggtcctcccacctcttagcctcccaagtactgggactacaggtatgcaccaccacgcctggctaatttttgtattttttgtagtgacgggcttttcccatgttgcctgggctggtctcgaactcctggggtcaagtgatccacccgtctcggtctcccaaagtgctgggaatacaggcgtgcatgaccaagcccgactttttccttgttttttaatttacgtttttcttttccacccaaccacacgtacaagtgttgctatttttattacacttagtcaagtttcaggctaagaattgggagaaggggtgatatgcagcagtgtaacatcttagtatagacagttacacccatcagttgttaaagacctgtggctgttgcagtgctgggaatgtcactgccacaggcgccagagtttccagcctcttgccctattgctgggcccctctcccttcacatttggcgtgtgtgtctcctggccttctgcctttctggagcctctctgcatcaatgaatgctaaaggcaaaaaactctctacccaccctttatgtgcctggaatatctgggagtggaaatttctgccttttcctttctctgtcttttatcaatctctatagatgaaaaggagaagtatacagattctctctccacactgtaaattgtgcttcctcttcaggagacagaagtggttacagttaattttttttttttgagatagagtctcctctgttgcccaggctagagtgcaatggcacgatcttgtcccactgcaacctccagctcactgcaacctctgcctcctgggttcaagcgattcttctacctcagcctccggagtagctgggattacaggcacccgcccccccatcacgtctggctaatttttgtatttttgtagagatcgggttt

SEQ ID NO: 39483 - DNA, 1045 bp, Homo sapiens
cagccaaatatggcttagagtttagccattagagctgcagctctgtgggagttttttattgcctttgaatatgtgagtttgagattctgtgaatcagtcaaccccaaagttgaagggctccccagaacttgaccctcccagctccatgctggacctctcactgtgctccctgaggcagaagaggccaggagctggggtgcacctgacaccagtgccacccagacgcccttcctctgcagggaagtgagtgcccctgctgcagtggcctgaagaaagggtgtttctgtcaccaagacacttacctaagcagagggaatgatcgagctgtaaaggtgtggaatccagctgttgcctgtattgtgatattaaactctttgaattaggtgagcaataatcactacttttggggtcaggaatttcaacaaaggctgggtgtggtggctcacgcctgtaatgctagcactttgggaggccaaggcaggaggatcacctgaggtcaggagttcgagaccagcctgaccaacatggtgaaaccctgcccctactaaaaatacaaaaattagctgagtgtggtggagcacacctgtagtcccagctatgtgggaggctgaggcaggggaatctcttgaacccaggaggcagaggttgcagtgagctgagatcatgccactgcactccagcctgggtgacagagcaagactccgtctcaaaaaaaaaaaaaaaaaaaaaaaaaaaaaaagaatttcaacaaggcataaacttcattatcctgatgggagccttgggagctgctgccaggttgctgctacccaaatctcatgggtattttggagactaaagcgttgaagacactttcttctattttctttcaggatttgagctgcctctttgaattatacttggagccacttcagaatgagacctttcttacccaagatgaggtaaataaaatcaccttccttctgtccagtgatccacaggttagtctctgtttgccttttagcagaactcctatgagagtatctctgttgatcccaaaagaaca

SEQ ID NO: 39484 - DNA, 1017 bp, Homo sapiens
tatgctaattaaatgacacgtcatattgtttacactgattttggctgtctgtaattgatcactgccagtacttgttaatcatgatgaacaaactgtcttcatgtctgaaatatactgaaagttataaaatatatcagttaatgggaagaaaaggattataattggtaagctgaacatagattgacaacaaaggttattcagtcaaagtagaaagaaagagagagggagagagaaaagtgagcaagcagatgctgttagaaaatgttccagcaaccccacacttgaagaatccctaagctgaaaatggtccagaggcagtaatttagcaagctggctggagtccgaaatgctaaaacctaaacttgaaagcagctattacaaaactgtaaacatgtgcttgattttttttctagaaactttaacttttgttctattttggtctaagtttggaaaacagaaaagaaactgtatgatagcaggtgaatcctaggcacactgatgtctacagataagtctgactcttaagaacttaaaatcctagggaaatccttttctaaaatggtaagatttacattttcagattatgaacaaaaacagaacagcacaatccagatagtctaggatctaatgtcttagagaatcaatgtttgtagctatgcaaagtttatactttaaatataggcaatggattagtactatttcaaatatttaaccaaagccaggcatcaatctccttgccgagtcatctgaagctgagccatgtggcctattaacatcctctacagtcctttttttccttggtggggaggggagtgggtgaagtagacagttaatggtgctttttgcctccagatacagtgttttccctggttcccaagggaaacacacagggggagaaagaatttcagcaggaagtgttgtggtaaaaggggaaaggatgcgggatgaccctgtgaggtaggaggggtggagagagatctggacgctgcaggttggctgctgaagactgtatgacat

SEQ ID NO: 39485 - DNA, 1060 bp, Homo sapiens
tctcaccattgggcatttagcactgctgatgtaaatagaagtgctgagcagtacagtcacaaaaattcttgccacaaataataactgagctctattacaagcaaatgtaaggttcagtatttaaagctgaaactattatgaatcatagttattaataagaggatcaaatacagaaaaacagttcgctggtgtccagtattgggcatttacaaaattcagatctttgatgatagtcttagaatatgcacattacatatatcatagactttaattggaggctgaggataaggccattgaaaaataagtaaaccacgaattttaccaatttttggatttgtaaagcctttataaaagtcttccctttacaaattcaactatggaaaaatttgaattctgtcagcacacgcagcttaataaaaccttaaaatttttttaagattttgataggcagcaatatattttggtgatgtgtaattcacctgataaacaagatttaagcttcatttttttgtgatttatcagttctgactgttcaaagatatttgtggatgaggagttttggttagaattgacatatttaaaaaacgaaatgaggaaaccacatatttgtgcagataacaataattaaaaggggaaaaatgagatattcctgtgaaatactaagaatcatttcatatttgcttttgatgtggagaatacagaaatgccccataatcttttttttttcttcattgttttgttagattaggtaatttgagccttgtttgaactgcttacacgatgaattagggaaactatattctaagcaagttgtgctgggtgtctttttttccaaataatttttctttcatgttaatgctatgaaagtttaaaaaatcctaatctgttagagaggaacaacagtcgttgtatgtatatttttatgtaactcatttattttaggaagaggtattttaacaataatcataccttagagacttgtcagagtgaaggaagggctgaatttaacaaataatcttgtgaatcctaggctgaacactgctgtccactgctttcagat

SEQ ID NO: 39486 - DNA, 1069 bp, Homo sapiens
caccacacctggctaatttttgttatttttttgtagagacgggggttttgccatgttgcccaggctggtcttgaattcctgagctcaagtgatccactcaccttggtctcccaaagtctgggattacaggcgtgaagcccttctgcacctggcccacattcttataattcaggagcttttagtgtattttggctctgtagtcattatcagacatagaagaggcaagaatttgggctacaagggctggagggtggcattgggattttctgatcacatcaccagacattaatttacatttgttcttcagggaaactccctaccattatctgggtcgttgctccctaccaccgtctgggtcattgcatagttacccagggtggccgtgaactagtcagcagccatttagaggaaagcctgcttggcttggctggttcaggaggcggaggctgctgcagggcctgggaaggagtaaggcagcacacggtggctgttaggtcatttgtgttggatgaaagagagttggtgcacagactggacggtgtctcagattcgctggggtttacgagtccagaaatccatgagtccgaggaagtgggaagagagaataagggaagggaggccggaaggtaggagagaaggggaaatccaggcagccggatgagagataattttagagtaagaaaccaacaaaatataatattcattatgtacccagattgaagtactatggtgctaaaagttgtcaaccaaacaccaaaattagcatatctaaaaatcatcaagacggtaatgcatagttaaaagaacagatgtaaggcagaaaactcctccagttcttcagtgaggttatttcatgacatagagtcttgattatttctgtctttgtagccacacggtcattttggagccagattcagtggtgttaggaggttgtggaaagcactcagcggacaccttctttccctccctccccaggctgcccaggcctcctcaggtgtgggagggctcccgagaccctctgcgcccttccttctcttccttattattactgtgccttatgggtaaagta

SEQ ID NO: 39487 - DNA, 1028 bp, Homo sapiens
gatgtttatttttaaaggaatacgtaagaatcaaaattccatgtactgaaaggaatgtaaaatattaatacatctggagtggtggctcacgtctgtaattccagcactttgggaggctgaggtaggaggatcacttgagcccagtagttccagaccaacctgggcaacatggcaagaccccgtctctacaaaaaatacaacaaaacttagctgggcatggtggcacgcgcctatggtcctagctactatgggggctgaggtgggaggatcacttgagccgggtaagccatgattgccaccgcactacagtctgggtgacagagtgagaggccctgtctcaaaaacaaaagcaccaatgtaaagtacatctggtctccacaggggacttcttttaagttcaaggtgtcttatttaaaagaggctgtgtttggaattggattgcagcaaatgggggttgttttaagcctgcccgcctctatattctggaagttatattatgcctttgaaaacaaattggcttggcgtggtcaatcctgcttttagttaatgttgaggatgtgggaaatgcaaccatgagcttgcgggagagatggggtcccaagatttagggacctgtgtagaattgggcatctttctgagaaggcagattgatggtaaagaaaagtagaatctttggctagtttgatgtttatgtgggtgcacttgaaataggatgttgtaggcaatgccgtctcacttttgggaggataatactcaataactattaaaaatcccctttcatcccttgttctgtactcctcattttttttttaatacaacaaatgctttttagcctaatctccgttaattgtgatgacaggtttttaggtgaagacccatcaattatcaatagactattaaatattaaatagtgagcaagaaattcaatataaaagtgtgtatgtaacaataatattcaaatattgttgaaagactgcgtgcttacgtgttttgagtatacctaaagtggatatactttgtgtctccat

SEQ ID NO: 39488 - DNA, 1050 bp, Homo sapiens
ctgtttttagaatactagaaatagtgacattatagtatggaaattaaaaaatgcctatgtttggagcattatagtttgaattcagaagtcacttggaataggagatggatgtctttccagcagtcacataccaaacatttattaaatgcctgttataagtcagacagcatatcgattttcataattttattacttatacttgacacagctaggaagacagtacaatattgtttagaaaaggatggcttggagagaggtaagggttaaaagatgcacttgggtttctttaattttgtttttttattaaagaaataatagcaataatggttgtccattgggtgtcagaagttggggctataaggaaaattagggtgaggaaaaaacatatctggccttaaagaacttactgtctgataaaggaggcagagataaacaatgagttgcagttgatggtgataaattgagtatctgttaaataagagagctgtggggaacggtggagccttgtgaaggcaggctgctggactcactggtatttccccaggctggaagtgcgtcttccgtttacagggcagccacagctgtgctgggtacagagtgttctagaaatgggtttggagttgtgtgctcaggcatcggcttggtggtgcataagagggctgtccaggtacagggcgggctgaggcctgataggtcgctgggcctgtcaccttgaggctaaccttgtttgtttgaatttgtccttctggagtttggatttttcggacccctttatgtcctctttcttacttttgatcttcaaggaagtttattgataagatttctgatcaaagaatggggcagaaaggagaagtgtctctaacagtccacattctttttgataccacagcataatcagaaggtctggcagggagggagaagggaagattctagaattatcgcacgttagaacaataaggaacttcatcccatttgccctttaattaaaaaaaaaaaagaaaaaaaaaggccgggcatggtgccttacacctgtaattccagcactttggg

SEQ ID NO: 39489 - DNA, 1085 bp, Homo sapiens
caccaaatctttaaagtgaacaccagagtattgaggaaggcagagaaggggaaggacccgtgcagccttggagtgggagtgccagtggaagagaggactggcagttctcggggtctgtgctcctgccttccatcttcacctcccctccgtccctcctcttccagcctcagccctcacctctgcagcgagactgtccttgccgagcacagcagtggcctccttgtcaagtatagcagaagcctttacccttcacctgactgcattcctgggctgcatttggcacacctgtttcgttgctacacctgactcccttccctcctgtaagagcacactctccagagtgtctacattttctggccattcttccagcttgtctgtgggttcattttcccttttcccttaagcggtgatattctctaggattctgttcgctacccattgttttcctttcatatattcctcctaaataaagttcatgggttttattgcttcctattgattaattcatcaattaatgtgctgggtacactgttcaacttatgccctggagatataatagtgaataaaatagagaaaatccctgccctctgggagtggatgtcctctctgctgacttctctacctatttttccaggtcaggccttactccccaagctgcagctcattatgtctcttccttctgggcattttcacctggatttcatatcagagcctcaagtttcctatgtaaaccactgaaggctcccactcctggggatatggtgattggcttctccctctgcacactccatctcatttggctgctggcttccatcactcatttggtctccaaatcctgccgcatttcccttctaactgtgccttggagctgggcttgcttcctcccaccactgctgccagttcaggacctcagcctcacctgcctgccagggcaacctgacctgcttccagctgggtcaggtgcccaagggagcagtcctgtgttcatctgtcagaggcagcctgagcctgtagaatgccctgcagggctcacccatgttctggcttctgcctgcttcagcatcttcgtaaattcgtgcttcacg

SEQ ID NO: 39490 - DNA, 1025 bp, Homo sapiens
gacctcagttgtatggcatgggcagtaaccctcattctcagcctcagcagagcagtccgtacccaggaggttcctatggccctccaggcccacagcggtatccaattggcatccagggtcggactcccggggccatggccggaatgcagtaccctcagcagcaggtttgtgctggtcccccgacccgctgcttttttgtaatagttttgtctttgccttttgctgtccacctaagattgatgttaaagagaattagggggcattgcacggattttctgctttaatttttattgtttctttaatcacaggtataattttttttttcttttaaagatggaaaggtgagcttcttaaagtggacagaatacctgtttggtagaagggcagcaggaccagctgtatttgataggtgcactgtgtcataaatttgcagcaggttataacagatgtaagctctgaagtgaacttggcattccaacatttttgtcagactgtgtcagattttgagctgtgaatagaccatcttaaggtgaattttcaagtcatttaaaggtcttttccatgaggatggcatcaagtttttaaaattgaaaaaaaaaaagtttagtctcccaaagttattttgctttcatttcttaaattatttcttctgtaccttttgaaaaaggtttctgtatttcatataagaggatttgatgtgcatctgttttgttaggtcttgatgggttttgtgtttttacttaaaaaagacttttcctgttcttaagagacccaacattttccttttttttctctggaatcaaatggagtcaccttagatgaccatttaccctctagcagtggtaaacctagtcttttggatacttgaaagaatacccctttatgctggctggagggaggatgaaatttggaaaagactaaattagattcaaacttgttagggtatttagttactaggagcaccagaaaggcttatttataaatcgccataccgtacctaagccgccagggagtgggtcaggctg

SEQ ID NO: 39491 - DNA, 1052 bp, Homo sapiens
ttgttcacaaacagggtcctggcactgtgattggctgctggtcccatccatcttcccctaggattaatgtaattggctaagcattgttgtagttgtggctaataatgttcttcagggaaaaagttgaaagataattatgacattgagtatttattgagtggacatcaccacctaggcatgactttgctttggatggcttccagaacgttctgtgtttggtttgtgaacctctaatgagctgaatccagttcatttaatattgctcgtatatttctgcacaggattaaaatgcaggaattcaagtttgtaaattgagttgcccacttaccagctgagtggtaagttgtctttggctcaggggtcacagtttgattcctggctggcgttctgctcctgtgatatgaattttaaatgagtattttgttagaaagaactgcagtgctgatgtgaaatttaacatggagaggagtatcactgtttattttttgtctctgagagtctgaaggaactggccactgactgtgtttgattttagtattaccctggtgatctttgatttgtatggtgataattttgtttttgagatatactcgtgactggatctttgaagcatgacgtgataatagtacatcattttagtctttattaactggaactagatttgtggtctttcacttgccagttctcccacatcatcaggcaaatacatggctaaacagattagttttgcacggtgccctaaaaactagtctacttgggtttttgttgagttcaggggggaaatgaattttctatgcctctgtggagaatattctgcctccaggcttctggaattcagacatggggttggttaacagaagtacattggttgatttcatctattagacagctacacagaagaggcataatttttaaggttactagaatctgactctgagtttttcagattaaaaaaaaaacaaaccttaaagacaccaagatattctttgctggatcaggaatgcaggttttgtttcatttttcttatccttcgtgatcataaatgtacacct

SEQ ID NO: 39492 - DNA, 1028 bp, Homo sapiens
actttatagcaggaacatagaatatgatcattgttttgaaatagaaaatggcaaaattaaatataaactaattatttttgttaaggtgattcatctgaacttattacttcatattgaagtaaaaacaattcaaaacaggtttccttgaagagggcttgaaaaagatttgtattctaattttgctgcatgttttttgagtaaaatatttatttcagaacataagcattttatttggtaccctcttaacagccaaaacacttcttccaatgcaaatgtttattttggcagcagatgtttctaaaaaggagacaaacattacaattgtttggctaaaataaatgtttcctttggggttattaaggcagccaggcaatttctagggtttccacctgtgttaatttatattgttgatctattctggaaaaaaatgtgtttcttttaaatgtaattaaagccacgttttgatatagtttgcatgagagctctgaaaagtaaggatgaatggggagaggaagactggtttaagacttaaaaattccagagtttttcatcatgaaatgtttattatgattcaatctttgaatcctaaatatgaatccaatagtcagggcttaatttttgttttatttaaaaaagagcctagacttcctatgtttgcgactgtgatggtgtgtccaggatgagaaaggatagataacttgactaagtataatggagaggaatgggtgcctggtgcctgttttacattcagactcttaattttttgagtctctatatttacttaaagatgcccattcatatctgtgtgcacatgtacgctcccacatgtgtgtaaaaaacagaacattcatgtgacaatggcattcttgtgtaatgaaacgtgtatatgtatattaatttatatgttaaacatatttgtagatatacatatataaacacacaaatgaaatgaaggtgaacattttggccagtaaaataatgaaatgctatgaaatttcactatgttgtttacagcattttcatacatt

SEQ ID NO: 39493 - DNA, 1036 bp, Homo sapiens
cttggatagttgtagtagctagtcctcaagagagctggagacaaacgtcttttggaagaaagcttcagtctgagatgcaccacagaaaagacagctgtgcagggatggttttccagcctgagctgccaacgatagcgagagcgtacctgaaagcaagagctcttaaaacgctctaagtcaccgaagcctgtcggtgggaatgggaggatgggggagggatagcattaggagaaatacctaatgtaaatgatgagttgatgggtgcagcaaaccaacatggcacatgtatacctatgtaacaaacctgcatgttgtacacaggtaccctagaacttaaagtataataataataataataataataaacaaaaaaaaccgctctaagtaaggattagatgtttctttataatcagtatcataatcattgtttccaaagagaactgggaaaaggtaaagcccagaataattattggcctatgggatctgtgacctcagatactctcttaaaagggtcagccaacaaggaggcttccctttttttcaattagtatattaccttgagatttccagtaggatcttcaggcatcccaatagtcattttccagacatcttaaggatttacatctctggaggttctcctcagtgtcctgggcttcatggagaaatagggcctgccttcttttcttcctacttgtgggtcctgtgccattcgttaggggtcatggagatgacaaggtcttactcttcagtaattggccaaaatttgatggttagtgtcttagtttcttttctgttgctgtaaaaaaaatcacagactgggtaatttataaagaaaggaaatttatttcttatagttctgaaggctgagaagttcaaaggcatggtgttggcctctggtgagggccttttgctgcttcacaacgtggtggaaggcatcacagggtgagagggtagtagcgtgctggctcagatctctcttcctcttcttataaagccttgagtcccattgtagggaacctcattctgatgaccttat

SEQ ID NO: 39494 - DNA, 1035 bp, Homo sapiens
tgtggaattcagaaaattaaggtttcttatgacccataacctgaggcagttcaggaagccctttggggctgtgaagcaggggtaggggcttgtcctggagcagagcacggaagattcaggtgtctgcttggttcctccaggctctgggatgttaagcttattaaatagcctctctagacccagggaacatgttgggtcagctttcaaaattgacaaaattgtctcaggactgaggaagtgtggcctgttccacagtgcttacagcctgctgctgtaaaccgtcgcggtgtgcccccgcacccatcccggccatcctgccacgcggaattgtgtccacctctagataccagctaacactgtgctatttgcttgttgtgtttgaatatatagggcacagatgaaacagtgaaagatttaggaaggttttattgagagttcatttcttttgcaaaaatgttacagcacattaactgctgtaattaccataaataattaaaacaaaaatatgatcataagaataaatgaacaaaatgtgttaagttgtaacatgggcctctgttgattgttctggcctgtttacttccagtcaattactaggcagtttttgtccacttgggctgtttgataaggcttttgtgataaactatgagttcggggcagttggggttgggatgggtgcttatcatatatcatagaaggcatttcatgaagcataaaattcaaattgtaataatgtcactagtgtctaagttaacacgaagagatgaatgaacataggtcagagagatggggaatgatgtccacttttggaagagcaagtttgtaatactattatctaagttattcttaagaattagtaatagatttttaaggcgtatggatgatattatacatttaaagcccattagcgagcacattgttttttgattttcgaaagtttgggaattagtcagaatttacactgagagtagacttcagctacaaaaatattgtgtgcaagtgtaccttctgcacagggttccggtgtgtctgagg

SEQ ID NO: 39495 - DNA, 1735 bp, Homo sapiens
attattttataatttatacaccagccttttatacagagcaatgcttatggcagcttctttctctgtgttaactggtattaaagcttttctagattaaaagccgtaggttgcaaaacatggttttttgcatgtgcagttatttctttaccactgagttgtccttccaagcctggtctaaatgtgcttgaaaatcaccatctgctccctgcagtttggagagggcacagaaagactaaggtgaaaagctgtcacttctaatgttttcattcagactttcacacccttcttgtctagttacataattgtatgcagcaggagttgtttcaaccatttggtcttgtccttattttgagagagagagagagattaattttaagagagttgggtcacagtactgaggcagatttgagaatctgataaaccatgaaagtgttcagaatggaatcttcctgctcagtcagtttgttagtggataagtccattgcataaatgacatgaatatgaacaaaagcacctatacttatgcatatatctccctttgcagaatatgctttaaattttgcagaatatgcttacaaatttttaatgccgtatgcttagattttactttttgaagtcagtatagcacagagttgatgatataatagtgctttacaattttatttgatgttcagaatttattatagataatatagaggaaggattttgaattgttcacataacttattttttcagtgtcttctttttttttttcttaaaaattgatctattttggttttgattggaatgaatggccacaataggatttgaaaatgaaacaggacagaagcctgttagtgtaaactggcaataatttctaatagtcaggaacaagaagaccattaaatcgtgggatttatgccattgaaaaggtagtaagataaaataagaatattactatactctagaactgtaaattttgatctttctgcgagttaattatctaacatccataccaagctggagacaatagctgactctttcatttacttggaggtgattgtaggagaagaaaaggatttcagtcttcagttggcaaaatgatggttctaacttgcatgtaatggaatctttagtatacccacaaaagattatttcattaagatgttaataatagatttttgaggaacagcgttttatacttttcataattaggacatagaacttaaaacagaaattcttttttttccccctctacttcttttctagcttgagaaaatctggatctctttagaaaaagcctttggtctatttaagcactctgtttgtgccagagttacttgcttttttgtgcaaccaacattttagaatttctctaatgacacaaaaacttggtttggaaaaagatacacattccaggccctcagagaacaatagcagagccacgtagtaggtctgtcagccaccttgtacactgtggtcgttagtagagccgagacggagaggtactggttgtatgaaaggtagacagaggagcctttgcaggaaggataggtgacatttgaaggtgccagtgaaggaacaacaggactctgtgtgtttggtggtggggaggggggacaggcatgttcttgacaggggaaacagtttatccattgctttataatcctagactggcatggtgtgctgacgaagagtaacctggagaatgtgatagaagtctgggttaagaaactagaccaggccaggcgtggtg

SEQ ID NO: 39496 - DNA, 1060 bp, Homo sapiens
aacatgacaccacaagtggaaaattccatatttgacctcatgtgatggatcacagtcagaacacatgtaaaacattgtttcagtcacacaagtattttaaaacattgtataaaattgccttcaggccatatatgtaaggcacgtttgaaacataatgaatttcatgtttagtcttgggttccatctctaagatatctcatttgtgtatatgcaaatatgccaaaatctgaaatacttctttttctaagcatatagttttagtttacatttatcttgttatgagtaatgttgagtgttgtcttgtgtatttaaaggcatttgtgtttcctttttcctgaactataaatttatatatattttgaattttctctcttcagttgttggtctttaaaaattatttttaaaatcctttgtatattagggagactgggcctttgtctgtaatatgagttattaactccagaggactggaatcaatagaatagaataatagaatagaatcaattgtgctcacatatgcacgcacacacacacacacacacacacacacacacagatttattataaggaattggctcatatgcttatggagttttgcatttccgaaacctgcagtatgggctggcaggtggtaagccgatggtctgatgaagtcaaagacagcttgctggagaattccttcttgcttaggtggggctggtcttttgattatagttaggacttcaaactaaatggataaggcccacccacattatggaaaacaatctgttattctcagagtctccgttgaaattgttaattccatttacagtaccttccaagatcacatgtaaaatcaaccattgcagctacctttccctgatgccactaaaatcattaactgaatttccttaggtatatggtgtttggggtcattttgggatttctgttattctccattggctcttctatgaatgcattagtattgtactgtttctctattatcttttagtatctgatggggtagtatatcctcattatccttctttttcagttgttggttttctttttccttttgcta

SEQ ID NO: 39497 - DNA, 1110 bp, Homo sapiens
tgtgagtattgctatatatatattcctatgtataggaatttgtccatttcatataatttttcaactttattaacataaagttcgtaatagcctttattactttaatctctgtaccatccagagttaaggcattttaattcataatggtttttcttcttttattcttgataaaaccatttccaaagtgacttggtctttattgtctgtattgtgtgtccttgtaaacaaacttaatgaaattcttctctcaccttgattacgtcttgctttctactttattgatgtttattttgctgttcttcccccccgcccccactcaagtgaatgcttactttatttgaacattttttgtttgatgaagctaaatatgagactaaaattttttctcttaagtactgctttggctgaatctttcaacttttgatatgtatcatttttgttctcttttagttctaagaaatttcttgtttttctaaattgcttatttttttttgaagacatttttattgaggcctgggtttgcattctgtttcctcagaaggattgattggtctttgcttttgccaggtgcctatgggtaccagttatcttgaacaatgttttgtgtttgattttgtgaaagttttattacaagaagaatatacagatacacagaatgacataatgagcactcctatgccctcacgtagttttaatattaccaatattttcccatgtctgctgccctgtctcatcttttcctcctcttccgactttcttcaaagtattttaagtcacagatacatttcttctcaaaatcattctgtatgtgtgtataaaacgtaagggcacttctttttttttcttttttctttctcttttttttttttttttttttgagacagagcctcgctctgtcgcccaggctggagtgcagtggtgcaatcttggctcactgcggcatctgcctcctgaattcaagcaattctcctgcctcagccctgtgagtagctgggattacaggcgtgcacctccacacctggctaatttttgtatttttagtagaaacggggtttcaccatgttggccaggctggtcttgaactcctgaccttgtgatccacctgcctcg

SEQ ID NO: 39498 - DNA, 1048 bp, Homo sapiens
ccttgcaaaatggagttgggttctagactcagctaaataattagtttttttttttttttttttttgctttgtttttaaatatacccaaactttggcacttttgaaagtagtgtcggctgtggcatggtgatcttttccatcagtcactcttacacattgcaggataatctagcattcctaccctatagccactgtttaaatgcatttctgtgtccttgtgacaactaactactccgttgaaattttgtcactacatgtgttatatatgtccttaattttcctgaaattcatatgtaaagtgagttccctatgtataaaatttcaaacatgagtatgattccctgaatgtaatggaaagaggtaggaaaggacagaaagctgcctataacacatttgtgtttctcttaagtaaatgctcaggcacttctccattagaaggcttgtgagagagtcagaggcttgtgcctgggtctgtgggagccatggactccacaggtgcaaacgaggctgctacagatgtgtgggatgaacagctcaaaaccacgagcaggcatagaatccatgggatcaatgaccacacaacagtaattatagaaatgaaagtatagaagaccactttaaataacatgctcacagagttgttagaaaaggtaagttaccccaaagtctggaaatgttataaatttgtaaataaaatacaaatacatagtaaaaactggtaagaaagtaaagatttcttttcttttgctttatttgtattttctaaattatctacataaacatgtaatgcatatataatattcttaaatgttgtgtaaaggattccacgttacccattatacaatgtaaggaattacccattccggtggcagactaggtgctctcaatgtctctattgatcaaaatatctaaaatgctggctcagttcttcaaactaaatgaaacagtgaatcaaacctcttttttttttttttttttgtttaactgtttcttatgcccctcctgtcatccctttcttccttacccaactaaaattccaagcccatca

SEQ ID NO: 39499 - DNA, 1083 bp, Homo sapiens
tatattattaactacagtcaccatgttgtacaacagatctcttgaacttattcttcccatctaactgaaattttgtatctttgatcgacatcttcccaacttccagcccaccccagcccgtggtgcccccatcccactctctactttccaacaaccagcccgccccagcccgtgagccaccatcctactatccacttcccaactcccagcccatgccagcccatggtacccccattccactctccactccccaacaaccagtccatcccagcccgtgaaccaccatcccactctccacttcccaacaaccagccaaccccagcccatgagccaccatcccactcttcacttcccagcaaccagcccatcccagcccccggtgatcccattccactctccactccccaacgaccagcccatcccagcccatggtgcccccattctactctccactccccaactcccagcccttcccagcccgtggtgcccccattccactctctactcccgaactgccagccccaccccagcctgtggtgcccccattccactctccactccccaactcccagcccatggtgccccctttccactctccactcccgaactgccagcgccaccccagcctgtggtgcccccattccactctactccccagctcccagcccttcccagcccgtggtgcccccattccactctccacttctgagattacctttcctagaggccacatttgagtgagatcatgcggtatgaaacagctcttttcaaagcctccagtgttctgttattcagcctgatgggtgatagtcattccttccatccttcgcctgtcattaggattccatgcagctgacggtatcttcctcctcggagcacctgtcttgcttggttcctgggacgccaccctctcctggctctcttcctactttgtggccgctccttgcctttccttgctagattttctttatctttctggcctccaaatactggcccatgaccagggctcagtgttggcccctctttttttgtggctctacccaccttacctgtatgatttcttttactttcaaagctttacgt

SEQ ID NO: 39500 - DNA, 1052 bp, Homo sapiens
gaaagccactgaagtgttcatttcacttattttaagattttattataagagcaaaaaaacaaggacatatatagtttgttgccattaattgcttagtttttggatattaacacagtctattaactcagtaaaaaccagaatatagttaatgttattctttgttttaaaggatattattagtgaagacttgggttatgtttgaattttgaatctttttctttcttcttgctacagttgtctcaggctttgaaccattgctgagggagatttccttttaagtttgaagagcttgtaagcatccgaggagacaacttctgggtcacttagtggctgagcaaggcctattcctagactctgattgttgacttggggcttctaaccttgtgttggggccggttttgggagcacagaggtggggttagataggctgcaggagccaccagcctgcctgcgctcgctctggcaggatgactgatgccaggaggatgggaatgaggactagtgaccttcctctctctgttccctttttctcccttgggggaaaaactagtatagtaaaagctcagcactcgttttgaatataggtgtaatttgctgcgttaacagtttcagtttattgtgtgttttggtggcgttattcctgaaagcttcttaaaataaaaaaagtagaaaaaaagacccattgaagaatgaagaaaaataacattttgagaatgttagaatgtcttttggtatgaatttggttttcttaattgctgtagaaatcagggtgaatctgtagttagttgcaactatgtctgcctgggcctttgcttttccttaatagtagcagaagaaagcaagagaaaaatcctcagattttatacacatcacttctagtatcgaagcatttttggcttttaatggaaaactttcagtgtttttttaatatgttttgaagtataattgggaatttaattgcattggatcataatttgataatgctatgtattcattttcatatttaacatatattttaagttttttttttctttctagtaccagaattaaaa

SEQ ID NO: 39501 - DNA, 1038 bp, Homo sapiens
ataagctagctctgcaaatgacttcagtttttgtttcctggtaggaaaaaacgaggtaacaatagcaactatcttgtggtggtgtcgttaggatgaaccgtgcacactacctctgtgcacagtacctgtcacaagtcccctcttgcgaatatgagctgtcagtggggctttcctgaggtggcaagggctgagcatgccatccttgatgtgcatgttgtatggatttatatcgctttccttttggaaatgatatttgaaattcatctacacacagaaagtggagggaggtcaataatatgccaaatgtctgaagcctagggatgatttcacgaactgtggcaggctgtgtggccaccaggcatcctctctgtggaagtggtcgcagccacctctcccccaccctcacatgttggggataggcttctgtttcccttttacgatttggaattggtgatagggaatttccaaagcacaaagagaaaaggatcaagaaattattgagactactcaaatcgtcattcattccctcattctgaattattgcaagataataacaatgtggccatcttaactctcttcctagcatatctatacttgatgtgaggattggaaaaacttttcttaaataacatgacagttatcacttattccagatccagacaccatggaggctctgttgcattttgtttctgacctgacgctctttgttggattttgctggcatctagaggcctcctcactgacctcttactaggtgccattgccatttgtttgtcaaggaccaaggtgctcctttccctcctccattcctccatcatctgttagtttatagtctgtatgctcttaaattctttttttttttggttactgtctacctatcttcccactcatcccctgctctggttttgctactttttatgatgtagtttgacacctggagtaagttttgttctattccagaatgatggactgtaagtgtaaattgatacttcctttgttaagaacaatttgccagtatatattaacatttcaaatgta

SEQ ID NO: 39502 - DNA, 1076 bp, Homo sapiens
cgcatgcctgtaatcccagctactcgggaggctgaggcaggagaatcgcttcaacccgggaggtggagattgcggtgagctgagattgcgcgatgcactccagcctgggcaacgagagcaagattccgtcttaaaaaaaaaaaaaaaaaaaaaaaatcagccaggcatagtggtatgtgcctgtagtcctagctactagggaggcatgggtgggctgaggcaggagaattgcttgagcctgggagttagaggctacagtgagctatgattaggctgagccacagatcgagaccttgtttcttaaaaaaaaaaaaaagggggggggcggggtgaagaaataccaaactgaaaatttctgaaacaaatgtgtaattactactacgctaaacttttttcacacctttgtttgtgagtcagtttccctttaacctttgactcgtaacataaagaaggttaaggccagagtccatcaatggttaaaagattgtgagtgagatgtagaaaaacagtactgatgaattctgaaaggggaaacctcatttccattgcctggttcttgtgcattgcagtattaccacaatatggcattctatacagcagataaatgtaattatttatatgtgtatattggtttacacactggtgttcactggctgcttaaacttacaaataaccaaagatggcagtaatgttttaaagtgtaaagctgtgcttctttgtttataaaatatgatgctgaacatattctttattttctgatactgtcattgcctttttactgtgtatttgctcttcttgagatgaaaataagtatgtaccaaaaaataaatatagctttttaagatgaaaaagctcaagtttcttatggaatatttttatatcattattaaaacagccaaacagactttatagtcccactgtaagttatatgtagttgttgattgttctaggtttaaacttggcaccttttctatgtgctcccttattaaattaatacttatgttcaaacataagctgaggcagaacacgtttccttttcaatagttctcactaaattttgttttgattttatttcc

SEQ ID NO: 39503 - DNA, 3158 bp, Homo sapiens
ttttaggacatgtctcaggaaggctatggaactagatctcaacctcctctggcccccggaaaacctaaccatgaagacttgaacttaatacagcaagaaagaccatcaagtttaccagtaagacattattgtgctgatttggaaatgtaatgagttaaagacttttagaaagagctgttgtttttgtttgttctactttatattatgacatgattgagaagtttctagacttcaggtttattttgtggtcaatttttcaaggtttaccttttaggagctctgtagtcctggataagtctatttcatgtgtatatatctctgttgcagagtgtagacatcagttggaaggttttatgcggctggtcgattttgtgtgcaggtggttattgctgttgtacagttgagctttctttaggctgttgctttttggcagcgatacagaacagaggtgtccttagaggagtcaaaacttaaaagaaatttgcactttgcaaaggatacaaatgatgagataaaatacctgatagtaatttgaatttcttctaggactttctatttatgtaatgagaaatcacccaaaagaaggtagtttgaaatttgaggccagacgcggtggctcacgcctgtaatcccagctctttgggaggccaaggtgggcggatcacttgaggtcgggagttcaagaccagcctgaccaacatggagaaaccctatctctactaaaaatacaaaattagccaggtgtggtggtgcctgcctgtaatcccagctactcggaatgctgaggcaggagaatcgcttgaacccaggaggcagaggttgtggtgagccgagatcacgccattgcacttcagcctgggcaacaagagcgaaacttcatctcaaaaaaaaaaaaaaaaaaattgacaaagctgtttatttccaccaataaatagtatatggtgattggggtttctatttataagagtagtggctattatatggggtatcatgttgatgctcataaatagttcatatctacttaatttgccttcttttatagagaacctaatttaaaggaagtcttctttattaactaaaagaataaatctgcaggaggctgaggcaggagaatcacttgaacccaggaggcggaggttgcagtgagccgagattgcaccactgcactccagtctgggaaacagagcgagactccatctcaaaaaaaaaaaaaaaaaaaagaataaatctataccaataaatatttttacatttatttgaagaattgttgtcattgcctagtttctatggagaaggtttgttttaagatgggaattcagtatagccatgattttaattggaatttcaactatgtttgcattaacttagatttattacttctaaacatttgagaacagacatttgtagtgaatgttaaacatgacatttgacatgcgtaccataccatatacattttaatgtatatgcagatttagagaaggtaagtgatgaccacaggatgtctactgtctttgaatctgatggatatatttttgaaactctaatttttataccttttacttttatgtgagagagggtgaaatcttattgtggtgtttttccccccccctttagtagtgttaatgtatttgttgtctaggtatttggttttgaaggagggaaataggtaatggattttgtgttgtatgctgctaaactttctgtagcagatagttcgcagcttggtaagcatgtagtgtgtacgtgtgtgagagagagagaaggagagagacagaggcatgcatgctgtcgataaatactacatttgccaagtatttggaaattagcttttgtggttctatgaaatttaaatagatgcatgggaagcaggtaaacagtgaattccacttttttcagcagttttttagtggttttggagaggttcgaccttgtagatttgtcattggctgatgattttgtactgtgacacaggttggtaaatttgtcataaatggatgcagattttctgcatagctataaaaatagtttgtggtaaactgctttcttcatatctactcagaaacttcagcatcactcactagtgcgtgccttttgccatggatctgtgttggattggatggttgacattcagctaactctacagtgttattagggatggcatgaagtattgtagtttcagataactgactgaagagtttggtctgggataggagcttttaagttgattgctggaagagtggatgaaggcatttaggagatgaacgaatatagtcatcaactgtttaaatgttttctgaattgttctatttctgtcttgttatgtatgtataacagctatcttccttaacctttatcttgcctacttcccaaaagtatttaaagttgtccataatgtaagttttttttttaatgaaataccccaattggtattttctttccgtttttgtaactcacagataaataagatgctggttgactcaatagtacttcaaacacatttcaataatctttagagagcagagtttccaggttttatgttaagtatgtagaagattcagttactgaataaaggacaaactgtaagataacctgctacacctaaaacccccaatctgttaggatgaaatttggctgtagttaaatgaaatttattgcaccacttttttttttttccacgagggctttgcatgtgtaaaaactttctgtatggggcttacaaatattttaatttatgtggatacttataataagttgcacacagctaaggtcattgtggtttcagggaatgatttgttgatactctgttacggctctaatagtctgtattttacaatgttacttttattagatactgtagtcctctaacttggctgggttgattctggagagcccatgaagctgtatttgttatcacatctgaatttgctgttggatcctttgtagatttactgttgtgctatggttttccttttcaggtgtcagggatataaattttgtcttttcacctacagtcaatccatgatatttgaaacctgtagttttgtaatttggaattaagtatattgtgttatctgtaccatttatgaaatgcaacatagtgattctaatgtgtaattattctgttcattttatgtaatgacgatgacaagaatgcctct

SEQ ID NO: 39504 - DNA, 1402 bp, Homo sapiens
ctaccaggtaagaattaggtgtatggctattgaatgaagtattttgaaacctttttatttgaggttgatttaaatggttgtcattaaaaggttaagagtggagctgtcttccgttgattgatccttctcaaatccttatgaacattaaaaaaattataagttaatgaaggaaaacccatatctgtcatcaggcttatctcagtgttcaggcatggatgatgcctgtgtgttgctgaagacttaagctgtttattatcagtattctcaaaatgttattaggctatgttgagttttagagtttcagagaaaatactttataaaatggaagcctcctgtgccagggaggaagaggaggttctctgaaggatggtgccctgtcccccagaacagctacaggcataccttatcatctgcatcgtttcaaaaccaaaggtacagatgcattttgatgtcttggggaagttttaaagggaacatgcaatacttcagcttcttaggattcatcaagttcttgaacataattttcatcactggtctgttctatctggagatatcagttatttttggattaagattaagagcatttcaggaccttgctggaaaacctgaatttagaaaatatgatagtgactctgacagatgtttattttccaaaatggattatttctttaggatgtgatatcctgtgattttattccctaggatattttcatgatattgatagtcattttgaaaatagaggataatgcttgaacttgaacaaggtaggaagcaggaaggtatgtctgtctccttctttcaaaacaatcttccatttaaatatttgttctgtaaatgaaaattcaataaaaccttaacagtttggaattcttccaggaaaaaacaggctaaatataatggaaagtctgaataaattaatattgagaaagaactatagtttgcttttaaataattcagatgtttgtgtgcaaagtgtttctaagttgacatactcagttcccgttaaaataaaattctgaattcgtcatagctgagatatttgcttagtggtaatgttttaattttaagaatttgtttaattttttaaaatacatttcaactaagcatgcccctgaaaactttttcatatagtattctgaagatttccatttaaaatatgggggaaatgaatttcaacccattttataggagtgtcaattagttcctaaaaaattaatgaaggagtatgaaggagtactataaaaaaatagacactagacaaaattggagattaagagaggctgaagcataactgatttgcaggatattggttttgataatagaaggataaggatgatctatagttgataaatgaggctcattaagtaagagatgataaatgcagatattcctggctaataga

SEQ ID NO: 39505 - DNA, 1836 bp, Homo sapiens
atctccctgagtctttcttttccccatgggcatgggtggttgagctgtgcagtgagtcagtccacacctggggaaaatgtgtagttggtcttttggaattatgctgtacccggaaaaagtttggctttagaatggtaatatgacacttcattcattggacactatttttgaaagtctggttgtatataaatgaaaatagtgtctgggcatggtggcccagcactttggaaagccatgagtgggcagatttcttgagcctaggagcttgagaccggcctggccaacatggtgaaaccccatcttcactaaaaatacaaaaattacctgggtgtggtagggcatgcctgtggtctgaactactttgtgaggccgatgtgggaggatggcttgagcctgagagatggaggctgcagtgagcagtgatcacgtcactgtactccagcctgggcaacagagcaagaccctgtctcaacaacgacaaaggtgaaaatattagttaatggacactagaaactgctagtaaaagaagaataatgggccaggcgtggtggctcatgcctttaatcccagcacttcaggaggccaaggcgggcagaccacttgaggtcaggagttcaagaccagcctggccaacatggtgaaaccccgtctctactaaaaatacgaaaaaaaaaaaaaaaaatgttcgccgggcatggcagtgcacgcctgttatcccagctgctcgggaggctgaggcaagagaattgcttgaacctgggaggtggaggttgccgtgagccgagattgtgccattgcactccagtctgggcgacagagtgagactccatctcaaaaaataaaaaataaataataaataaataaataaatatgcccattagtgagtgtccaagatagaggtgtgtgaattttaaagacagggcttcctgacatctatgtgcctgcctaaagcccactccattcttctatagtatttcgaaagtctagagctttcaggttactaagcgcattgtaacgcccttttaacatatgcaaaacttcattttcgaaatgctgtcatgaccctggagcagggacacaacttgagagtgttagctcagcgatgctgtgaaattgtggtggcagtgggagtgcagaggaagaaaattgttggaatagagggagggagggagggaaggaggatagatgcttttgaggtttttaatctgtgtgaccaggatgtgttggtggcgttgctgacaaacacagggaaacggtggtgggaagagaaaggaatgcccagagatttttatgagagtaaagcaagtcctgaataactgctcaaatcctgtaacatctaaaaggaagcaactcactcatctttgctactaaagccttatttcttatatagttctttatagaagtaaaacattgtcataaattagaattgatgttgaaatattgatggcattggctataactttgcatttcatttaaatttttggagatgatttgaagggtattgtagcagactgtgtataaacaactccacacatcatcccagagtgtctctaactgtaactgggactagggcaagagcacagtcccaagataaaaattgaaactctgtagttcagttgggactcaggctagtcttattttctttgcttttaggatagtgcagtaaatttctatccaaataggttcctttccttgggtaaagacaagttactttgtatttctttgtttgatatatacttttgaatgatttgggctacattcttactttagttcattttggaggaatatttcttagtttaatttgtctcattattaattcctccttctctgaaactt

SEQ ID NO: 39506 - DNA, 1028 bp, Homo sapiens
ggaatatatactcttttgaaaatagtgaataatgagtccaaaatatgagtttttaatatagtgctaaaaaagtggtttcatgtttgggaaaattatcaaaggcctaaattaggtgtcatgccacataaatgattgaataattatctgtttttgctgtaacttgcttaactactttgttactctgtccaaagaagtagcttattgaacccatttttatttcacaataatttttaaaaataattattttataagcataaaacgtgtaccagggtggaaacccatttagtcaggaaagagttgaattgtgaagagagtgtttttttatacatgtgtttttctttgttttgagggataggtgtgtgagtgacatttgtaatttagcttgtttttctgggaagaagattgctgatccttgggtttaaagatgagggctcaagattaattgatgagactagtgatggtctaaattttacagaacatgcatgccactaatagcttaatagttaggatgataacagtttgtgagtgaatttatgtgctttatttttctcgaacttactgactttgaatacgttataaaattggagctgtgctcctaaggagtaacatggaactccatcataggtccacctccagcaaaaggctagcaggggtggtggggacactgaggctggcttgatttcccatcctgccccccatggttggtcgtgggaagaaggtcgggctgccgtggctcctgtgcactttggttgctgagagtggttgtgggcagcaggccggtgagcagtgggggcagggatcttgacaccagcccttgttggactccacacccttctgaccattcatccacctttgggagtggggagcagggtctgttgaaagaggcagccgtgtcatgctcctgttagtaagggaactagacttttttgagcctaaaaccatacaagagaattcaacagaaagagaatttaatgtatatattcattcttgtaaaacaataatattgtagtaaaacttacatctgtgtg

SEQ ID NO: 39507 - DNA, 2528 bp, Homo sapiens
tacctctgggaaaattactagctgggcattttgtggcattctcaacctcaactctagggctagtgcttttaaaatctggtcaactgcgtaattgtgaaacagtactgtgtcagctttatgcacttattattatttttttaagacacaaaaacttacaaattggcaaattgtttttcagtgttttccccttcacagggctttaaaaatatcttgagtatgttggggttagattgggtggttggaaagcaaagctccaagtgctagaatggacggctgccctctgcagcttcaacacagggatccactcagcccccttagctgactactggtgcttaaaacggtttttgacaaacgccagagtttcacaaatatagaagtagcagttatagaggtggttttgcaagtcccttggaacattcatgcaggtctgcagtcactcttaatttgaatgagaaagaagatggtagaaactatttttattttctcctgggagcaagagaaaaggaaggctagaactctgtactatgtaattttaaaaaaagaaaaaaatcggactccattgagattctttcttgtttactttttgttttactctctctgtctcctagtatgtttgactaatgtaagtcttcccccaggaatatgagaatatgtggtaccgtccgcctcataaccttcctggatatttttataatttatcatcagctgacactgcttgggtagaatattcttaccactccctctggctgctggaagtctgaaattacatctttgtctttgaagtcaggcatactgttagcgttgctatggtgacagggtgggtaatggcctccgcagacaggagattggtatttagcgtttaaacactgctgtacacaaggccttgatttttagagtggttactgaactatccccttttagtaaatgtttaaaaattacatttttacatggtcttactagattaatagtcatggtttatttcattttaactgcaaggataaaagcattattccattaaatgggcagcttttttttctcttttggtttatgcattattaacacaggctttcctgttttgcttgtaacattttataggctttttcaaacacgcagtcagatttgctctgttgctcctttattttttggacttagcccattatctgcttgatcttggacaatttcagaggagacaaagttctaaggaactaagcttttaaaatattaaaaatgaagttcttttttttttttaatgtatgagtgataatattgatcaagatgtctctttggtttcaagtttctagttagcccctttcctgaactataccctcacatgagatagtaaaggaaggacagtttatggttctggagaactgttggacattttgaaaatgctttagttgatgtaactttcgaagcaatatgctctgacatagtcagcctgtgtggaatgaggccgtttgcacacacatacatatgatttttttttatctgtgagtattttgtctttagaataaagatgaatcttaatagtttgtatggtatatacaagtccctgtctacctgatacataaactgctactaaaacatcatttttaatgtcttgtgatacagaatttattactttatgaggtattttatttgtggtaatttaaattgtttaggaagtttttccttacattagctcgaactgttttttttgtttgtttttttaaatcctggttctacttctgccttcttaaaccacacaaggtaaatctaaatccttcttctatatgacggctgttcacgtatttgaagatagttttcatttactaggatttcttctgggctattaatagttactttaactatttcccccactgtgtggtctcaagttcccctgcaccctattcttaattccttaatgagcttcatttttgtataagcacctctaaatgtgatatccacaaccaaagggcaggctccaaaggcatggctggcggaggccacctggcccgctttgtgttggaccgtcacgctgccgtgtatcggaggcgtcagggtctgcagggctttgcggcagctgcagcccactcttgccactgtgatgggagctgctctgaaggatacgtctcatccatcctgcacctgagctcaagtgctcatcgacccttcctggctgctgttggactgggtcggggctgttgttcaagcttgctaacgtgtgttaggatcctgaatctggcatctgttgtatttagtgtaattcctacctttgtgtcccctctgaatttgtatctcatgatagctcttaatacagaaagttaaataggctaaatccagagctttctgacattctggttattgccattcaaccaggtgtgataaacctagagctactgtatgttccaggccatacattacatattaaccacaatcctgtcctagagactttatctgaggctaggtggggatccagaacaacgctatagtcctttctgtatatgttatagtgctgtcttccagaatgacttattgtggattatata

SEQ ID NO: 39508 - DNA, 1034 bp, Homo sapiens
cctctgctgggtcaccatggaggcttctttaaccagcctgcagtttcagcttgagtttggggtgaagggtggatgacagcttcttagtccactgatatcttaatgagatttccattcagtgtattttgcatctccctccaaaaggaaaaatatatgagtgaattttgtttatagcatgtgtagcaggcaggatgttgcagggactttgggatattctggatcagcactgtccagtagaactttctgcagtgatgaaaacagtccctatctgtgttgtccagtatgtcagccacttgccatatattgttatataccacctgaaatatggctagcagaaggaattttgcgttttagttaaatttaaacaccctcatgtggctagtgccgaccatactggacagtgcagttctagattatggatcccatatggtcaggatcttattacagactgaatttggtgaaaataacaatgttaggttaagactctcaaattcttggcatgtaagttattgatttgtaatgtattctgagctggcatttaaaattacctcatttttacaaggatacaagagattgaaggaacaaatatattttagatgtagagtttatctgttgcagggtttggcatgtaggccaggaaccaagattccaggagtaagaatggcacacttggtgaaagagtgctgtgcacttggatgctgatttacaagtgacagagccactgtgtcccacgtctttctccttgcctgtttctctgggttttcagttatctatgtttattggaaacagttatcacagagttgagtaccttgaagatctcttgtggacatccccacttccttcccacatactcaccagtaccagggtcagcttcaggtaggaggatggcacagactcaaggtcaagcagaggtgtgagccacagaagcagagtagcaggccaagttccagcatcctggctgccaggaccaccgtgcaggcttaagaagctggagctttaggatatggagtgtccatcacttggcatctttctca

SEQ ID NO: 39509 - DNA, 1032 bp, Homo sapiens
catcttgctgccccttccaagccccccaaacaactggagttctgtattctgctagggaatctgttatgtggtgtagccttcctcttagacttaattcattcacttttttagtgctctacatgtttagaattttcataagaactgcattttacattcagtataatgtagttgggtagttagaataatatgttccaagatctctgattcatttgtcacccgccttgcaaactcagctttggcttgttgtccacatccatcccactgcacacggcagtctaccatttgtagtccaatccatgccttctggctccatttcctgacatcaggaggttaaagactaacttgttttctcctagtcacagctccacacctaggaacagctttttcacttttaaacagtttatctctgttccccctaccccctttaaaaagaaagaaaaacactaggaatgagtaatactgatttctcagtatttgtttgattctgtggcatactgtacacttcagcagcaaaagtagatggttgagttatattgctagttcttactcagtctataaacctaattcgttttatttatgatgggagaaggagaatttatgaattcattttgttaagcaattcttgagcctttgtagtgtgctattatgatggatacactcctggtttgaagaaatacagagtccctgagatcgtgaagcacttttcagcaaatacattttgttgcagtatgcatttacccatcttgttgaagggcatttaaatgttgtccaaatgtcttaagtatttcttttgaataatcattatttttaattatagtctggatttctctttcctcttttgtgaaataatcgtcttcctccttccttttggaaaagtcagtaatctgggtaatttctgctaaaaaaaagctctattaaaaccaaggggtgattgtagtccagttaatgaagcaaagcaaaaaaagatgaggccaggaatcatacggagttagtttactaatgaagcaaggtacttttaaaaggtaaggaaaa

SEQ ID NO: 39510 - DNA, 1104 bp, Homo sapiens
gtaaaatgaaatcaccggtcaggctgttaaggaggtggggaaatgccaactttgcctcttccgggcagtgctgtggtgatgcagccttgggccccgccagcagcggcttgctggctggcgcggggtcctctcccgggtccgctgcgttgcgcgggcaggacagtcaggtgagcacaggtggctccgttcacctgatcttcagccctgtctccactcaagtgtcttcttggtggaagcctggtggtccttagcagtactgggagtatttgaagactaggccagaagggcagggtcgctgtgtgagctgcgcttaccacctgttgaatgtgaaattgatacagaggtgggatgtgctggttgtttcttgaagtacaaataaatgggcacacggggctgggagcaactcgtgtctgatcttgtttatgattagtgttttgtttactgaggaatgtatttttaaaaagaaaatttgtattctttgtatttcaaaataaacataatgttggggtggggagcagcctgccacttctaatctcttctaagtcaatttcaccataacactgaccctatttttactagggtcagtaaatggactgatttctctgatagaataattttacatatacacaaatactcttaaaaatactatagaaaggccgggcgcggtggctcacacctgtaatcctagcactttgggaggccgaggtgggtggatcacgaggtcaggagatcgagaccatcctggctaacacggtgaaacctcgtctctactaaaaatacaaaaaattagccgggcgtggtggcgggcgcctgcagtcccagctactcggaaggctgaggcaggagaatggcgtgaacccggcgggcggagcttgcagtgagctgagatcacgccactgcactccagcctgggcgacagggcgaggctctgtctcaaaaaaaactatagaaaggtaaatgataattcagcaatattttcctcttttgcctgtaatgtctttaaacagttatttctaaaaagctgtgttataaaattttattttttaattttagaaaaagttttccagatgtctgtgcctgtgtctatttcttttctcttttggg

SEQ ID NO: 39511 - DNA, 1046 bp, Homo sapiens
tagtaggcgttaactgaataaactaagtctgcacttaatccgtgaatgtgtattaatagttgtagaaagagtagattaaacacatattaagtttcaaataaaaacctagtggtttcaatttagggaaaaatttgttataatacaaatatgtacaaccattagtagcctctttttccagctcttttatatttaatgtggttttgaaattttggaacctaatggagaattgtagtttgctaattattttggggggcagtttgtgaacaataagatttttttattgttagctcgattgtccaaaagtcgtatttaaatatacacttgtactttattgcagactatgaaaaaatttattaatcattaataaattctgagacttttcagattagacttctgaaattttgtctttaagttgtgggcagtgtatacttgttttaattactaagatgtattatttgtgtatttacatacctgctttgcttttattttcttttaatgaagtaccagcacaaccacatgagatctctggcctcatcacagggaccacaagttctcatagagagctaagatatgtaggatgttttgcctattttcttttcaataagtgggactggcctttatctgtatgtactgctaatttatcattcaacaagacaggcccacagccaaacaaattctgattaaccatttcttgcttaacttgaaatttacattaaattcctataagtgtgcagataatacttcaatggtatatcgcagtcctcatatataagatttaagaaggcatactttaaatttttgtttattttctcgttttggtagtgtaaatgcttagaaccagcatttcaatttaagggaaaatcactacaatacagacataaataacttttcttttcttttcttttttttttttttttttttttttgagacagaggtttacccttgttgcccaggctggagtgcagtggtgcgatcttggctcactgcaacctccgcctcccgggttcaagtgattctcctgcttcagccacccaagtaggtggtat

SEQ ID NO: 39512 - DNA, 1045 bp, Homo sapiens
actcctgacctcaggtgatccacccgcctcgtgctcccaaagtgtagggattacaggcatgagccactgcgcctggccataaataactttgtttttttgctttgagacggagtctcgctctgtcgctaggctggagtgcagtggcgcgatctcggctcactgcatcctccgcctttcgggttcaagcgtttctcctgccttagcctctcgagttgctgggattacaggcatgtgccaccatgcttggctaattttatatttttagtagagatggggtttctccgtgttggtcaggctggtctcgaactcctgacctcaggtgatccacctgcctcagcctcccaaagtgctgggattacaggcatgagccaccatgtcctgctataaataacttttaataggctctttttctggctttttcttttagtaactcagcccattttcttcttctcaatctggtctttgttaatgttgataacgctgtcttacttttaaattgccgtgattagaaattactagagatatataaacctagtcttttgggggattttgaaagggtcatagtattcttactgtctttcaaaatgtaccttatatttgaacattggaagatacgtgttgctgaatacaagttagtttcatacacacacatacacatggccacatacatacacatatccacacatacaaattcacatgcagtcttttcagataaaaatatttagcgatattaagacacaaatcaccataggaaatgtcattaaatagatatgaaaaagtcatgaagataaattagctgtcaccaatgaagttaatgattaatttggaaatgggtttttttcctcctgatgcttttgtcttttgactgattttcaatgctctgtaaatgatgagtgagagaagaggaggagggagagaatgtgtgtatgtttgtacatttggtacgtaagatttgtttcagtgcttttaagacagaagaatattaatttgccctatatattcaatttgaaataaaaatttccaatctgttatggtttaccttata

SEQ ID NO: 39513 - DNA, 1004 bp, Homo sapiens
attgaaattggtgataagatttgcaaggaactttggttcattcagtagggagcccagttttaaattttacttttctttcagttaagtgaatttttgtcattgatatatgcaaagttcagatttgtgtagactttcggggtactgaatttgtttcctgttcattcagtcctaggaaggaatgtccttttctcctcttaggtcacacgtgacctttcccggtccctgtctgcagtctctttcctgcagggagctgtctccccttcatgtagccactgtccttgagctttaaccaagcatctgtaagcacctcacctggactcttaacgcctcacctgggaaatgattattgtaaactgttgttttggtaatactgtttggtagccagcattttaattttagtctattgtaaattgacacaaatatttgaatattttgttcattttgccattttacaaaaaatgagaaaggggaaattgagaggaacaatattagtgatgaaaatatctatatctgaaaaatgtaatgtaaagatatgaaacacttggggaagatgaatgcagaaaatctttagtctgaaattgactattcattaccccttagcaagaaagtaaatccccattgagcattatgttttagaatggaaaatgtaaattaagcctttgttttccatcatcattctcatcgtctttttcatgctctctggtggcagaaccccacccagctcccactgatttcagcttttgctctttggttctgtacatgcttttagaaatacccatatgtgaatggagtatcacccggagtctcgacatgctcatcaccttcagtggttataggattgtagtctgctggggttagttggatctgggtttgaattctggtgccaccacttctagctctgtcacctgagcaattcatttgacttttctgtttgttttgctggaaatgggagtcaaggctccttcctcacagggtcattgtcaggatcaccagagatcatgtac

SEQ ID NO: 39514 - DNA, 2570 bp, Homo sapiens
aaaccatatatagtagtttacagagtatagactatgtataacagactaatagtctcacatcatataagcaaaagcctaagactttgtgccgtgcagtacagtaggcactagctacttgtgggtattgtgcactcaaaaactggctagtaattaagggactgaattgtacatttattttattttaacaaattttagaaatctaaatagctacatgtggcagtcatgttggctcatattggacagcacagattatagaacctttttttttattttttggtaacagcgagttctttagaactgtgctggtgtacgcatacgtagtttataagttcctatcatgaagcagtaactgttaataaatgatctttgacagcccttctgattctcaaattctgtgccatatcgtttgctataaattactttttaatgcattttaatagcatatgtagggttattttacttgtgagtttctaagctgctcatcttctgcatgtcttttactgctatgcaatgaaaaacatttttggttattggtttaaacagaacttagtttttaagcatcacagaatttccatatcagatgggagttggaggcaaatgaaataaataaaagaaaattctatattagtttactttttagccctccaaatccttcctgctctcaggagaactgagacttgatttgtttgtcttgaaagatggaaccacaggcaacgcccccactgtgtccctgcccccacttatttttggttcagtttgacttaccaatttatttcaatatttaccgaatttatttaaaaatttcctcaaagacatttattggcatatatcattctgattgtggtttttccttcttcaaaacctcttgattgttcaggttagattttatgtgacctgaatagaagttctctctttgtctgaaaactttttccttgtggaatggttttctacaacattttgctaggctaatttaggtgtgatttcccaaagggcatctgacttgaaaacattattcattcaggtctgacaatgcccaggattttaggagagagaaagagagagactagggaagaaatgaagtgaaaactgtagtttagttttggattttgagtttttactatttatatttcatttatatctgtgtacattttatttttttaatagcctgaataaagatgtgcaatttaaacaagttcagattgcctacagttcaggatttttaaaacacgtagattattttgggagctttatctttataaaccttgtaataacaaaaccacgtgagtaccagaatcatttctcttacttagtttcttgcaagggaagcattattgactcttctttttgcagcaaaccaacatttaaaacacattgaatgataaataagaaataatcttgtttggttaatgtacctgaaaagccaattgtgtagaggtaaagaggaaactgttgtaattttgtttaagattggagaagaagagaaaggttaaattgttccttgaaaacataacgcagaaccaaaaacccccacatgtactctctgacatcttcttcacacaagacatattttatattaatgaaattcagataattaaaaatccaagtgtaggcatagaaaaatctttactttttcttagatactggcagagttgttttaactcagtgagaagcatcacatggaacaatagaatttattagctgtttgttaaattgttttagctgctactaaaatatatgctttcacttatcagaacttactttcaagttccattacatccttcacatgcagtatatgaactttacagcagcacacactgtctctcccttctctgcctttttgctgttgttgtcatacattcagtatctcaatattttataaacaccactacacatatttattttatctaccatttgatggccatttgggttctttccacttttcagctattttgaatagttctgccaggaacagtcatgtgtaggtctttctgtagacatattttcagttctcttcagtagatacttagaagtggaatctgctgggggtgtgtgatttttgtgtaacatttgaagaaactgccacactgttttccaaatgactgaaccattttacattcttataagcggtgttcctctccacacctcaccagcacttatcttttgtcttttgcatcgtggccatttttgtggatgtgactggggttttaatttgcattttcctagtaatcaatgatgtgcatcttttaatgtgtgcattggccatttatacaccctttttggtgaaatgtctattcaaatattttgcccattttaaaattggaggagttttgtcttgagttttaagggttctttatatatcatggatatgcatcttttatcatatatatgatttgcagatattttctcacaggctgtggtttatcttttcacttgcttaaaaggtgtcttttgaagcaaaaaaatacctttaattttgctgaagtccaactttaccatttttaaaaatcacttgtgcttttggtgcgaaactgcctcattttcaaaagacatttttttccaccggatataga

SEQ ID NO: 39515 - DNA, 1066 bp, Homo sapiens
gagttttgttgaataaacatatggaagtccctttatacagtgtagaatccatctcatcaccatgaaaacctttgttcttgtgtgatataaattattagagactgttttgtgtcgttatacagaagttatttttagtatgttgttttgttaggtgggtctttacttaaaatctcatttagtttcatggtagagtatctttgttagtatgattcaaaagagaatataatttggggttttattagtgtaaaaagaattaccataaactttactttccagtagactatatttaaatgtgatatattactttttctagccacatactcttttagccttcaatatagcagaatcaaagtatgttattccatttgttccaaatttctctccattttctatccagatggctgctgactcaaatgtatatgataatacatttacattttttcagttaaggctgataaatccattttaatgctattgaattgcttaatgaataaaagatttaaatgtgtcgtcagtgcttatgtttctgtaaagtgaagtatcctgaaagcgctagtagtgctgataaagtttccagattgtgatttaagaacttttctgttttgcagttctgttattactgtttctatacttaccaggtgacagagtcatttgaaagttctcagttgacaaggatctcaaccttgcaaagaatatatatattgtgcatgtaatacagtacaaatctaaagtaactgctgagatgcctaggtggaaacttacctttctaggtcaggttccagtgaatcttgttttccttattcagaatatggtgttaggtgaactgactcagctttaaactcttcatatcctgccatggggagaaattacctgccccagtgatgagtttgggaggacaggacaatgctgtttatattccttgctgctgtgggagtattggaaattactacttgatctacctgaatttgagcttggcagtggtccagggacattagtgatttgcatgaaatataaacatgaattatttgaatcagctgttgctgttttttttttttgagacaaagtc

SEQ ID NO: 39516 - DNA, 1035 bp, Homo sapiens
gtcctcccttgtctacttctgagggtgagcagtgctggtgtgactgttagaaagcactgacttagtctcttcctctaagattgctccaggtccacatgacctgtgggcaggatggatgattgatgtctttcttttgaggggtggtagtgaagtagagcataggggattattaaccacctaggtagctggatcaggcaatggagagtctctgccgttcttcacatcgagtatatagaattaagcattcagaaacaaaaaggagttaaggcacatatatccttttctcctaggataaactgtaacccaggtcatctaagttttcaaaaatagacaaaatttaggaatgtatgatgaatttatagatgatgaaaatcaaatgaaattgtcttgttacatgtatatttctttagaaatgtacatatacatgcaatcattgctatatattatcttttaaattcctcagtttggcatcatttactggcttcctattagatgaggattgtagcttgctgtacactgtgtctttcccactcttcaatgtcctacccatctaatcccatcaggttttggttaagactgcattactgtttatgttattatgtcttcttaactcttgttcactaagctaaatattgcattatactatacttatactgtaatactataataacttagttttgcttggagttcattacctcgtttttttttcacatgcttttctttgaacatctgactgggccttcctgtgccctccaacaactgggcagtgcagtcttcatgcggtcatacctgccagagaagtttttcagctccagtattttttcttaagagacatcccttctggatttccatagtcttcaccacaatttggagtggttgttaacgcaggagatagatgtgtacagccatctcctgggatgtctctttttttttttttgtgactcttctgtttgcctcatgtgtggatctcccgtttcctagatcacttaccattttgactgcgcacatctttcagtagcttcttgagaaaatgtg

SEQ ID NO: 39517 - DNA, 1046 bp, Homo sapiens
ggtgagggggaggggaggaacggctagtgcatccatggagtccttctctggcttctcctggccactccttccatagtttaaatgggggcagcacatcctcttgcttctactaggaagtgaaaagtcttactagcaaggagttaaggactgccagaggagctttcttacctgccagctctggacatctcatttcctgtttgtctgaatgcatgtgcaagcttaggaacttgcccactgcagcatccaacacagctggtttgcctgtgtttcaggagagtggggaagtgcgcttcaatcacttccgacacacttcagcatgttgagccatctgatagggagggacattggtgcgttttactgccttcttcctatgcacctggagcttttgttatctcaactgaccagttccttacctgtaacctggattagggaatggcagccagtattcatgacagttgcatatgtgcgttcttacaatcagagaaatgtgccataaaaataatttctcattttttgcctctgtgtattctgctcctgtagcttggacccatggccacattaaggccatgttgtcacagggatctaccatactctattgacttttcttgtgttctgccatcctgctcttacaacacagagagctgagagtgttgtgatctcctactcccattctttgagctcccttttggatttaacttcttggccatgtttatcatattttattcgtattactcctgattatttcactccctggttgctttgcgaaacccctctaagtcaggtcagccacactatgtctctactcccacgtcttccatgaaacactgctgggacaaaatttcacaactttggctgttggcatttttgctacaaaggatcgtcttatgtcctggtggtcaaggtgaagtaggattatatctttttgcggttatgaagattccaagcaaaagagaagataatgatgcatttaacagtcacaagataatacatgttaatcttcaaaaagttttgggaattcgtcatagctgtactatacaaagccagtg

SEQ ID NO: 39518 - DNA, 1063 bp, Homo sapiens
gttatttcctattttgcaagatgtgtgtgtaactttatatattagtttacagatagacgtgatgcttggataacaaaatatattagacctttaaggctatgatattatactattttagattctctgaaatactgatttttcagactggccattgaagttatatacctaaggatagtgccaaacaacaatcccaactttcaaaattttttgaatgtagtaggaataatatttattccattgacaagcatgggtagaaccattgctctttagtaaaagccagaaacaaaacagtcttgtttctttttgaagtagcctgttgacttgttgctgttaactcttaaatttctgttgataaatatggataatatgtccaaaaatttataaaaatcaaatggaaattttaagtttatctcttcgtaaaatatatgtctatcaaacattttgctgaataggtaatataaatatcaagtggcacttattcaaattataaaataaatacttattgaatgtgtcaggctcacagatgccattgtaccataacagaaagcattatgtaggaacgtgaagtttgtcaggtatgtagaaattgagatgcacatttttaaacttttggtcattttttttgttcatgatttctgtgcttgctttttccataagtacattttaagaatacttgatgcagtgagggtagaaatagtgactgatttaaaaagttttttgcccttaatgaagggttagaatgggtcacctatttacagtccctgtagatccttgaactctgtttaccgtgtatgtgggtctgcgttctctttcaataacaagccattttcagtcagatctgactgtatacataggtggcagacagtcttaatgcagaaagcgctaatgggttttaaagcttccagcatactctctcagcagtttagattccagagaacgccctctgattgtttccggatctccatagaagaatttacgaggctccgttattgatttacttcctccaaaaggaggaaatgatacttaaaacaaatatacaaaaaaaaatacctttataaaatgc

SEQ ID NO: 39519 - DNA, 1056 bp, Homo sapiens
atttacaattaccaagaggtaaacatggtaggcatgtttatcctctctatgtaagaagtaacagatgtagagaaattcttatttacaaagttcaggtgggaagtagtagagctgagatttaaacacttgcattttaacttgtttttttttttttttgctgttatttccaccataccatactgttttccacaagaaccatcatttctagaactttatatttaagtttacattagcataaaggaatgcatttgaatatctaaagattctcctattaagaattggcgtgaaactctgtatacatatattatttctgaaagatttactggaagactgcaattacacaaaataaactataagcataaagacatcattatcccagggaattgtttatctgcaaatgtgaatactagaaaagtgtttataaatgttagaagaatgggtgcaaataaattcttatgggacaataatatggggtctattttacctctttccgtttaacgcttaagaggaacctcgtcatcgtgactactccagagcatggattatgggtgctgtgcgggcttgcagtccttgcatctgtgcttcttggtatggatagaaagcaactctgaagatgttcgtgatatgacagtagagtgtgcctagatctagcttttctgttttgctcccctctcccaatcttgatctctctctcttttttttttttttttggtgggcgggggtcagagtttccactctgtcacccaggctggagtgcagtggcgcgatcttggctcactgcaacctctgcctcccaggttcaagcgattctcctgcctcagcctcctgagtagctgggactacaggtgtgtgccaccatgcccggctaattttttcttgtatttttagtagagacagggtttcaccgtgttagccaggatggtctggatctcctgacctcgtgatccacccgcctcggcctcccaaagtgctgggattacaggcgtgagccaccgcgcctggctcttgttctcttttgaaagaagttgagaaaagttccaagaggtggaaggggca

SEQ ID NO: 39520 - DNA, 1043 bp, Homo sapiens
cagtacaacctctgtctcccaggttcaaacgattctcgtgcctcagcctcctaagtagctgggattacaggtgtgcgccaccacggccagctacaattttatattttcagtggagatggggtttcactacgttggccaggctggtctcaaactcctgacctcaagtgatccatctgcctcggcctccaaaagggctggtattacagccatgagccactgtgcccggcctaaacactcatttctaataaagcatgcccaggttagaaatgactgttgtggcaacatttcatggcatcttaaatgctctagaatacattttatagctatcaattccttcagaatttgaaacacatttaatctctaaagctgttctcttaaggcatgcagcaaggaaacggggtaggtgaagatgcctggctgagcacatgctgtattctaggttcattttcgaagatatctttgccacagcacccagattgaaatggtctcattttgaaggtgaaggaactgttgctccgagagggatcgctcacgagtagtggagccgagatcgaatctgtgttaattcggagctcagtctctgtcacgtccccctcagtctacctggataaatatgagaagtgcaggctttcatctgaaccgtcctctgaccagctgcagatgacgtgaggttctggttcactttacacatttcgtccgacgtctcctttctaggggagaggagcctgagaccaaccatcgaagcagctacttcatggtctccctgttttaagttattgaaggtcccaaaagaatgcagcagacatttgttattgagcatttaaaatgccaggggaccttgtttgatatattacgcagtactacatctgagctatatgtgggtttttatttatattgacaaaaacagaaaacaaaatgagaaagtggaagtttttgtattcctgggcttataagcatttaagatgcagttgtccccctccttgcccttggccgattgactcattacttcagcttttagattctgagaaggtggagcctatggc

SEQ ID NO: 39521 - DNA, 1040 bp, Homo sapiens
agacagcacatattcttacctcagggaactaagatctagagaccatctggaaccatctctgagctctgtcattgatgggcagtttcacacaatctgttgattgataatgttatatcagagcttcagtgtattgcaagccattttatggaaatactggtgataagagtaacctgatgtgacatggtgcatgtggaatactgtgttaggtcctcccccacctccctcctggggcaacaaaatggccattctgaagagagaaattatattcaaagaattgtagcataaggttgaaattatattgttttataaaatatcactacagtatagagatgtcattagagagcagtaccagttaagcagccatcatttgcatatgcctaggagaacgtttttaataactaacctagttaccagtaaacacacagttttaatttatttcagttattaaccattaggaaacttctttaggttttttatcattggaatgatgtcaacaagaaatgtgtaatcagaaggaagagatactttactttgctgcagatactcagagcagtatgtagtgttttcatagaccagagaggagcctgcactgttatcattttttgtgaagaagctttcagcacacagctgcaatttctaaattgaatatttttatttcagaatggaaaaaggagactttattcacaagaaagtttacttaccagaaattttttgtcttttttcacgtggaagtaatcctaaattactcttccttaaatggaaatgttatcagtttgctaaagaaaaaatgctgtgtattctaggcacatgtgtgtacacacacacacacagacacgcaaagtttatcaggcaccatgatatggtcccatcctttaactttgtaattctgcttttgagaatctttcctaaggaaataatccaaaatgttggggacatgggagaactgtgtgtataaaggcattccttggtatcttatttaggcaactgaaaaattggaaacacccctgaaggactcatggaagggacgtaatttaatgaat

SEQ ID NO: 39522 - DNA, 1023 bp, Homo sapiens
atgaagtttcgctcttgttgcccaggctggagtgcaatggcatgatctcggctcaccgcaacctctgcctcctgggttgaagcaattctcctgcttcagcctctcgagtagctgggattacaggcatgtgccaccatgcctggctaattttgtatttttagtagggacggggtttctccatgttggtcaggctggtcccgaactcctgacctcaggtggtccgcccgcctcggcctcccaaagtgctgggattacaggcgtgagccacggcgccctgccggcatgaagttttgaacttgccattttgccgctctagtgctgcctaaggcactttgaaggcagtaattgcagaggcatttcgtgccttcaaagctcagtcccaacctaagttccttaccctctgagatgatcccaggagtggcctcctctgttgcatgacatttagatccagggctctctgaagcctatggacttagtaccattcatgtgagatggagtgatggcaggaaaagaattctgtgttgcaactgctgtgccctgaagttgagacctcagttgaaggtaatgataaaaaaagaaatgctaggtgcattattactgcttcatctctacttccttgggttagttaaaaggcatttaccagattagttaacactgaaaacaggatctgtcacgagccaagtatttcagtgtgtgttttgtgttttgctcaaaataaccctggtatccaacactcacattaaacaccacaggaagattttggttgaatgtgtactgaaggttgaggggtgcctgcaacgcaatctcatggacttacctttttttctgtactgactagaaactgattgcactatagccaaattacataccagcacaaagggaattcagcggcaggcctgaacagaatagaagtgacaagcaagaatcaattaaaggagtcagccccctgggtctgttcagtaacacaggctagcactgtgggaatcttatactcggtgctttgctcaagatcagtgccttgac

SEQ ID NO: 39523 - DNA, 1031 bp, Homo sapiens
atcttatagaaacatgcaggctaaagtaaaaaacaaataatcagattattataactcagtattttgaagagcagctggctaatctgactcgagggcatcagactgggaaagacgagatgacatttgatgccacgtgtcttttaatccagcatttttcacacaatgccctgcacgtcgtagctactgagaaaatatttggggagtaagtttgaacggaactgtgacttgaagaataaagagttgatgagagcctgatggagatataaagaaacaccagggatatgatttctgattggagcaatacaaggagaaatggataagtcccggagttttgagcttgggcagattgggaaatagtttgtcaataactgacaatacagaagttagttagggatcagcagaatgatgagagaaaattaatttagtttttgacatgttaaattcaaggtttttgaaggacatcctcatgggactgtttagtgtgcagttggagaggtctggtcagtcctggagcttgggtggaggaaactaagacacagatttgggattcaccacaatatttgatatttgaagccatatctgatattctcctgggtgtgaatgagattgctcaagaaaagtgcgaagactgtctctgatagatccatgaggaagataatacttttaaatttgacacttctagagctgatcagagttattctaaaggggacccactgtagttagaacacttctgtagcctgtttctattgggagcagttggttctcctgacttcagagtttcccaggtgctgacttaccgtataaccctgcgtttgctgtcattctgtcttcacttcactgctttcattcctggcacgatagtaaaattgtagatgttctcctgtcctcattgtgccaatcacagcattactccgaccccactgctacatacatcccccaaccctcagaaagaaacacaaagctgtgatgtgaatcctgcatcttcattgccttcaagacagcaaaaattagaccggttcagagcctcttga

SEQ ID NO: 39524 - DNA, 1045 bp, Homo sapiens
ttttaggggtctttcctgagaccagactgcattcatctgaaaacaaacctgtagttaggacaatccatgagtaaagaaggcctcatatttagaatgtcatagcttctcagaatctgctttgaaattgaaagtcaacatagctccttctgctgtggtgcaaatgtctagagcctaaacatctctaaaatggaaactgggctgggtgtggtggctcatgcctgaaatcccagcactttgggaagctgaggcagacagaaggattgcttgagcccaggagttggagaccagcctgggcaacatgagacaccatctctacaaaaaaaaaaaaaaaaaaattagctgggcatggtgtcatgtgcttgtagtcccagttactcaaggggctaaggtgggaggataggttgagcccaggaggttgaggctgcagtgagtcatgatagtgccatggcattccagcctgggcaacagagcaagaccatgtctctaaataaaagtaaagtaataagtaaaatggaaactgacttgtttttagtaggaaagaatgtctaaacaaaaagtagtatgcttttttttttttttttttttttgagatacagtcttgctctgttgcccaggctggagtgcagtggtacaacctcggctcactgcaacctctgcttcccaggttcaagtgattgttctgcctcagcctcccaacagctgggactacaggcatgtgccactacacccagctaatttttgtatttttagtagagacagagtttcaccatattggccaggcaggtctcgaactcctgacctcatgatccttccgccttgccctccaaaagtgctgggattacaggcgtgagccaccgtgcccggcataactatttcctttttatgataaaactctgcttcctggagatacttgtcaaaaattattacccatctacatgtgagaccttcaggtctcagccttactcttcgtttactaatctgaagttttggatttctggcgtatgagaatttctggtttccagcacatctctttcatttctgctta

SEQ ID NO: 39525 - DNA, 1208 bp, Homo sapiens
gactccagtgttggcaacagagtgagattctgtaaaacaaaacaaaaaagaaaaaaaaacccaaaatctggcttttcatccttgagactacatttcaagctttttgctattgagtagaaaggaacttcatggtgtagttccatacatttctgagctataagaaaaaggtatagtgatgatgtgttaagtgccatgcttcagatctgaaggttgtgtaataattttcatgactgcgcttgtacagacgatttcaccattggctgcagttctgattttaagttcatttgctcgttttcatgttgaagttgacatttatatgtagttgtattaaataacaaagaattttagtaaatgattcctttcttactccaaagcaaaaaactcaaaaactttgacctcctccataagaaaaatgtagcaattcccaaattatgcagaaatgtctagaaattatcaaatgtaaaatttaactctatattctagaacactttctcagaacaaaaagatgtgttacacggtggaaactaaaggaattttaagatgagaaactataggatattgtttgaattcatgtctgaatatttggacaagatgaaagttttctgagcattgtggatggattactatgttgagaaatgcataacaatgatgtgtaaggcagaacagtattctagtaggacggtagaacattcttgttaccttaacaagttcccctctatctttatagttagtccctctctgttaacacccaagtcctggctgccacagatctgttttctttctctgtagattggccttttccagaatgtcatatgaatggaatcatacagtgggtggcctcttgagtcaggcttcttagcacagtgcatttgagagtcatccatttccttgtttgtatcagtagttaattccttttcattggtgagtcgttttccattgtttggctatgatcatagttttgtttatccactcatcagttgaagggtatttggattgttttcagtttttgtcaactatgatgaaagcctccctaaacactctcatataggttttcatgttaatatattttcattgctcttgggtgaatacctagaagtagaggattgctggatcatatagcagactgcatttacctttgtaagaaactaccaggcttcttctccaaagtggctgtaacattgtgctggaatagattttttttttttttt

SEQ ID NO: 39526 - DNA, 1052 bp, Homo sapiens
atgagtgatggtctttttgagattagagcagataaatgcagattataggcaaagaattagtattttagcatcaatgctgtgtcttcccagtacagtatccagtctttccattgagaatttcccaaatttttcagttgtatattcttgttttaatcggattaacacagatctacttctaatttatgtataagaatgatgggtggttttgtcttatgaaatatagttattgacttttctgttattgttgttcaaatttatgacaaaaggaacaaaaaagcttagctgatttcggccggtaagtttaatgactactacctggaaattaagtgtgaaagttgaaatactcctttgctcccactagagggggattccttccaacttaggtaaaaatgctcttagactcagcgtgaaaaccttgtgtgacattgatattccctttgtattaaattgaggataacctcatgtttttaaaatcagctgattttctgtagttgctgatattaaaatcttacagaaatagaggatgtaaaggatacttgaactagggtacatatatatgtaaacaatagtgcttttgaacaaaacataaatacttttgtagagttgctgtaattaaattcgtttaaaggtatattaagagtttcaaaacaattcccccagccctcctggagatagaatctggggtgaagggtgccctggtgggatctgactccctcctcccacccacaaggtctgtcactgtctctgtctgctgaaatagccacagggagagttctaaatttcacacgaaagctttgatttgctctcacctcaagttgtcaaatatattaaagccttatctttaaatagagctctatttgctattgaattttcttgttacattgactttttataatatgataaaatatgcagaactcactgaagattttttcttgcaaagttaaactgtaatatattttaaaaataattctatttgtgttaaaaatagcacatcaagggtgaggtatgcagatatgatctatatgtgtaattcacaagcaaatgtcatacga

SEQ ID NO: 39527 - DNA, 1083 bp, Homo sapiens
tgaaaagtggtctttttaagagagcaaggagttatgctggaagcaagcttatttacttgtataatttagagtttgattgactccatgtatctctggggacattattttggcactagtttttgaggacttaattttctagtaataataaaaatgcatatattctcttatccccaccctcaaacacctgttcatttgggacatgcacatgtaattagaggcgtgtttcaggacttgcctgtaaaattcctttgcatgcagttactgtgatcatattagtaatcatcaagctacttgagattttgttgggaagaagcaaagaaaatatcctagggaagatgggggtgattttgattgcgtgtgttttaggttctctgcactgccaagttttaaagcagattctgtttcttcagatggtgaaagccctcctccttccctcctcctgccttaaatttggcttcttcccaagccatgtcaatttttgcaagtcagttgagaatgtcaacgtggctggtgttgaaagagccaatatgttggaatatgcttaaagccaagtagaacatttatgtgaattaaagaatatatcagggatgatttttaaaaatcagatttggattaagaaacctgttgaattaatacttgcataacagatgtatcactgataaatacttgtaaaagatattcccaaataagcaataaaagtaccattttacaaccgaagtaatgcatcctgtgggtccatttgcaaagatatgccaacagaaatgcatgcagagctctggaagtgataatgcaaataaaacatttcacattataacttaaaataacaagtttggaaggaataaaaagtctgggagactatttgttttgtctaaattctgcttttactctggtcttttaacagttggcttttgataatgtattactgccttagtgtgttcctgtgtattgaaggaatacattgtctgacagaattgtggttgaaaatattacaagttctaaataataagagtaataaatatcatatcttgtttgctttgttgtcatagtcgcctgatctcatgcttccctgaattcggctggtgt

SEQ ID NO: 39528 - DNA, 1030 bp, Homo sapiens
tctgggtattaactggttctgtaccataatcgggatatatcattccatatgtgtatgcctgtgaattcgttaatataaatgatgatgatattgtggtttatacttttattttaaattaaaaaaccgtctctaattgatgaaaggtgcctttatggtacagttactttcaaatacatcaagcactgcttgggttgacccttgacttcatgggcatgttggtctttgacccagaactggtaaatgaaccctgcagggaaatcattagagaattggaacaattgtggtagtgggatcaggggtcaaaccattacctacccatagaaacttccgtttcagttggacttcttgcttttctgagagcaggtcatattttcagggagaataccaaagaagaatttagcgtacattagtgctgacctatcaggagaaataagaccgtaaggatttggatgatggctggtttatattctctaatgccatgacaaatgactatgctgtcattgtgtagaagtccattttttaatgtaagtattgtggaggtgtaacataaatacagggacatgcacaaatttaaatgtacaacttgatacattttctcaaaatgaacacacttgtgtaatcagtacttggttcagaaacaccaccaggaccccaaaagccctcttatgcctcttttgaatcattatccatccatccccaacccctaccacactgtctgaataaaagtcagttaaatttccagtccccgatggtcactaatggtaagccatttgtttagtctccccacagaaaacaatcttatttcttcacatgaaaatgtgagagggtttgtgtgaagaaaacacaaaacttattcaaggagtttctgtcaatatcagtttttactgtttcatatagtaactaaaagaaattttagacaagatggatgtcatggaagagaatattctttgctttcaaaatcagttactcaagagttaccctttaaaaattacagaaaggaagaaaaggtgtagttcaattcttttccatt

SEQ ID NO: 39529 - DNA, 3118 bp, Homo sapiens
gagtagaatatagaattaagagactataatctttaagactgtatgttagtcatagtttttagatactgtcaggctgttttaaggttaaggcatatatctttcaactcatgtttttcattgattctcacatggacctgaaatgagtcagatgactatgtcgatccttaaaattattgcaatctagaaaacatgttgctatttaacccagactagagttactcaggcaattttgttgtcattgtgttatttgtttaattctatataatgctaaaaatatacagattttttaaaaagcactttacagatttattcttaaatagtacctgcaattttaattgtgtttaaagtgttcttagtctcttcgttggcacctattgcaaatttttcctcttctaataatattaagactcactttctggacctctgtggctccctggttcctaaaaatgtaggcccctgttccttggcataagcacgtgaggccatgcgcagcctgcctctgccaggctccggagcctcaccctctctcctgggcatcccaagtgccgcctgtgccgaaatgagcatgccctcccctcactcttcctgccctttgtgcctttgtggattgtcccctctgcttcctgtctctttccctgccaagtgccccttcccaccagctgtcctagagtatcctttactcctggtttggaccccagtccctggacatttacccgtcagtctgtcctcttagcacttactaattcaccctccatcatagaattttctgcacttcattgttgtttgtgtggtttgtctctcttcattgagactcaatgatagaaggacattcaagtgtacaagtccacatatgaatataaaatgtcatccacacgtcaacactgccttctccctttttctccacctcctctcacccatcccacagcaccaactacaaaacttagatagggcttgcttaagggtgactctagtacaaaaatacctttcctcacattattcagtatctcacttttttataaagctttaatttcatcagtacactataatttgttttcaaaacatcattgttcctggaataataaagggccagcagttacgcacacgagtctttttcgtgttttagcactgacatggggcttgacttgtgggtaggaagagtcttaagttcgttggacttaagtatgataaaatcagataaaaagcattttaactggtaggaacaatgaaatgccgctaacaagatgctgttattttctcacgtaagaaaatatgcatagtatctggagcacttagacggcccttgatcagtggtggtatcagttgttgctaaagtcagcattctcgtggccataatcatgagcatttctgaggctggtcctgggagtctaaccaagaagggaaacgttacttccagatgaaggtaaatcccagattctatatacccaaaaaaagcttataaatacattttcgtaccaaattatttttgagttctactgcccatactatgttgagaggtctatttgttgttctttctagtctacgtaactcctgagactgttaatagttgaagagtggagaatctcttcaaaagagcttgaaaactgagactattttaggaaccccttgaggcttgtgcagtggggaagaaagatcccttttatgatgcatatttcatacttgcattgtttaccacttctaagtttaggatggcaacatgttccatatcaggagttttaacccaaggacctttgagaacagcttttattttagatgctgatttttaaataccaaagaaaatgtaaccattacaatgatatttatctaaaatggtatgcctaactcagaattttgcttttgtaaagtgtcaatttagctgattatcctacaaatgtcccccttaaaatgagagttacccataatggaatctttgcctgagaaataacacaaacgtatcaggtgaaagtcatgtcacccaaaagtagttcttggccacccctcttaaagtgaattttggctcattagtttttcttgtgttatctctggcttttgatacggatttttggagcttagaactaattttaaattaacatcaacctttttttccagctgacctcgtacatcttaagggtgtgtactgtacatactgtcacataatgagaaaataaatacatatttggacatgattaaataaaaagcgacacatgtataacttggaaagaggatgctcttaaggcctaacaattagtgcttggcagattttttttccagggattctgtttttctggtgcctttgctttattttttaatgtggtctaagataggaagtctgagcttttaactcatttgctgtctagacaaatgaaagcagcagggactttggtaggtatctggacataaacactattacaacacaggttaatgcaagaaaaagcctttaaacatcatggaaattaaacagtcactgtgagaattttccttttgtgtgtatgtgtctgtcaatttattgactcaattctcatatcaatttcaaggtgtattcatatcacgtgaccaaaaatgatagttgtgaaataagggtggaagatgtgaagtaattttacagtgtgtttctaaagaaccaagaatctaatgacactggatacttgacatccaggatgttaattagaaacagagggctgataattcattgctaagttttaatagctaagtcaatagttttcagtagagcatttatggtaaatatttagaaatatttgcatgtgctggattactttctatagtgtttgcagctgtatttttctgtagagcttataaatttagtgatatttaccgatgaacaatcatatccattttgtctttagcaccgcacttggcacaagaagtcactacccttaagaaggtgagggtgtagttgaagagagaaaaagaaaaagaaaaagtacacggttttatttcattttaatattctaaaaaggagaagagacactacttctgctttttaagataattaagagactttttttgaagaccactgaactggcgttttaacctgtgctttaaacccatgggaagtcacagtgagaaatcattaactgtatcctattaaaatccttaaaca

SEQ ID NO: 39530 - DNA, 1008 bp, Homo sapiens
gattttactatgcttgagagcccatgaagtcattgccttgccaatcaccccatcacaaaaagaggactgatttatggaatgccatggggcaggaggactctcctagccccttaaaagagactgcctgcaattacctcacctgccagctttccagcaagataaatggaagcactgtagcttgaaggtgccttgggtagaatgagatgcagtaaggtctctctgttctttacaggcatcatagatctgatagtacttataaaagaagaatagagttggtgccctgctgactaaattgtcctctagaggagtattagttacagagcttctttgttaactaggctgaatacttaaaccactgttgaacttcttttattagcatgttttaagatagctctacatacagataccctaacaatctgcagggcgggaatatttctgtataatttacatataaaagtcgcgtgagtgtgtaacagtaatataataattatatctttttattactcttctgttacactgaggtctagtcagcactgaaattctgatgacacatgaacacgaagaaagccactgtttttatatttttctcttgatacttccttgatcagcttgttgaataacagaaatgtttttgatgcctttgcaacctgagtaaagccctcttaatgcccatccgtgtcactttttaaaccataatatggaattttaagggagaatggggatgaaacttgtaggctgtgcagagaattacaagaacttcaaagtaaaatttcagattttatgatgagagatttgcataaaattatttaactacaatagatgatttttcaaaaattaaatctgatttgtcctttctacgtttaacttcatatatagtatgggattttatatcttgttatctaccaggtttttttttctttagagaaacatgaaaagcctatttcctgcctgatggctgttctctgactgccgcttgtttattggtcattgccgtgtggtgggtactgt

SEQ ID NO: 39531 - DNA, 1060 bp, Homo sapiens
tgaacctctgctcagctgagtgtcactgcgtctggattctgcgtgtgctgcctctgtggaaatgctgttggcattgacccgctgccttctcccttcgctgagaatgaagattcagaatggaggggtacaaaagcttttatgaactaattttagcctagaagtaaaaagtttcaaaaatcacttgagtacattttggaaaatggtgggtaaatgaatagtacttagagtcaagatgctcctaaagttgatttcacaaacttctggtatatcaccatgtttcctaaaagagaataagtaacaattgtggaaggaacaaaaccattttatagagagtgttaggtttatttcccagtcttctgataaccctggagccaggattattatgatgtgttgattgattatagccgttaagactcttactaatcagtttcatcacttattctcaattcacacacttgcatctttgatttctcttccataacagggtgatatgggttgtcattgactaatgaagaacagaattggtttcggcatgagacaaacggaatgccttcactaatcctaaaatgcattaatctttcataatccacatctgcatgtttataaatgatataactaggaattgttaatgttgatattctcccttccaaacagaaagtgacatgggagtttgtacttgcaaactgcattaaatacataaagctgaatgccaagagtgtgaccttgctgaggatgccaaatatattacttcatttgatggttttagaaaagtagcatgttgcactttgagtgttggatataccaggagatatcctgtggaaagccaactatcctaattgttccgtttccttcctgccttattttatcattctattctgtcattaattcagcaaagcactgagtgtgtattatgctgcaggcgtagtaagtggggtaaaggcgctgaacataaactgcaaagggtcctgtcctcgtgaaacttaaagtctagtgggaaagacaggaaatacataaataactacatactttattgtcaggtagtcaaggaaaaaaatcaggt

SEQ ID NO: 39532 - DNA, 1026 bp, Homo sapiens
tgcccaccaccacgcatttttgtagagacagggttttatcatgttggccaggctagtctcgaactcctgacctcaagcaatctgcctgccttggcttcctgaagtgctgggattacaagcgtgagccattgcgctgggccaactccagtttatctttaatcaaagctgtgctgacttaaatagttaagtctagaagtccgtgcatcaccatgtatcctctgacttaacttgtcctttgccttgccagagacttttcagtttctttgccccaagttctctgtgggaaggtatctccccaaaagggatctcatgggtattagtgatcagactattaaaccaacttgcaagggtctgtcttaccctcgcacctgtcacagagttatgaggaggacccatgcgaaaaacattgtgtagttttagtatgtttaattaataaaagaaaagttctggtttgaatctatgatagcaggctgggtgagtaacgttttataagttggtctttaagggcttttatgaggacataattcacatagaccacatcatactcacttctgttttctacctgttggctgatcgtcctttatagctaatctatcttcaagcctaggagtgaggtttagaaaaagacttggaacactcagaccacagtagggaggagagttgaaaagcttaatccggcaggtttttgacagtgtattagtttgtttagaataaaggtatatggccctgtgaacggtgcgtgggagctgtcttgttctctcaagttcgggaattggaagtatccttattcccttcatggctcgggagtatccaagtcagatagcctctgaagtgcccatttatctgtatttttaggacctaatgacacatgaatagtctgtaatattttggataaggatttaggaaagtctagccccgttttgaatgaactttcgagctgtatgacatgaaaaggtttatctctcaaagcaggggcttaactccttcaaggtgaggacaccaaattgctgtggttctgtgttctca

SEQ ID NO: 39533 - DNA, 1034 bp, Homo sapiens
gaaaaccttctaattgaattcccttttaatttcacagtggtgtctagttaaacattcatgttaatgccggtgattttctgaaggtctgaactagatctggattcccaaaatcaacacaggttatttaaccctttttatctagtaagccagcagggactttcctagtgtaatcccatagtatttgaataattagaaggtcataatgaggatttaattagtccttgagatatgctgaagcagaacccctaggaacttcccctttcggacacagatgcaagcagaatggatgctgctccaggactgtgagccacgaggaaatgtattctgttgctggaggcagttctctggcaccattgtgtggccatcagatcggtgctgaaagcatcttaggtgaaatcttccagaattactgaataacagtccccccaaccttcatttctgcccactttccaacctacacaaggactggcttttcctctccactgttgaaaaagaggagttgtagtcaaagcacgctgtacctgattgaaaattggcttttgctttatcagcgacaccaacattaggtgagctgggcgagttgtgtattttctctatagttctatagagaaaatagataacaaaattttgtgttgttctaagcctctggtattttgtccagccaaacatagagatcttgacagctgtttgtcagcagaatcacaaaaatctcatctttggaatctgatgttcacagaggaatatttatcagtagctacatttttgcaaatacagacagtgccattacccagcaaagtgtgtagcagatggggcatgatcaggcatttcaaggttctttttgcgtactactacaaaaaggtgaatcaaaatttctatacttcaaaagtctgaggtttcaaaattacatattttgtttagactgaatagtcttcattattgaatatttcattattcaatatgtcttcattttttatatgctgcttctgttattaaccccgaatgttaactgccttggtataattttattcctacta

SEQ ID NO: 39534 - DNA, 1084 bp, Homo sapiens
aaaggaagacaataattgttgtaacataaatggaaaaaaactaccaaaagtgaaacattgaagtgacactgtaaggtaagataataggtctttctccttcttttacacactttgtgtaatattgtaagttttacattttaaagaattttaaaatgcatattgacctaagagaaatatggtaccttatgtatagttcagaaaacaaattctctctatttattcccacaaataggatttaatgcaacttgcggtaagtcagctttcattttgatgaacctgtatttgtgatcatctacttgatgcatttctctggctgaaagagcagcattgtgtgatagatctaagtagaaagatagaattgaaagaagctgtattgaaatagaactttatttttcacagaaaagatcttacttaaatatgataaccagcaaataaacacatggaaaatcctcaaaatttttttcattagggaaatgaaaactaaagccacgttgatttctattacatactgattcgaatggctaatttttttaagttggaatatcaagtgctggcagttagaactctcacacagtatttgatgggaatatatacaaaatagtacagccacagtttggcagtttcttataaacacgtacttaccatacagccagcaatctaatttctagggttttaccaagaaagatgaaacatattcctaccacacaaagacctgtatacaaatttttagcagctctactcgtaattgccaaaaactggaaaccatatccaagaatggactactactcagcactgaaagggaatgtacagatgcatgcaacggtgtggatggatgtcaaaggcataatgctaagaagccagccacgaaagcctatactgtgtgactccatgtgacgttgtagagaaataaaatgacatgaacggaaatcagatcagtggttgccagggggtggcatggggataaggttgacttatagaaggggaagagggaacttttccctcctttcatttcttgtgagagaaatattctgtaccttgattgtgctgtcgattacaggattatagaattttttatatctcaata

SEQ ID NO: 39535 - DNA, 1052 bp, Homo sapiens
cttcaacttactgcccattttagctcaccaggagtttaaatgggggctgtatatcttcttgtttgcttttaccaaagtcaaagctatactttaaaatggtaaatggagattagaattgagaatattacttttctctgcctgtccccaccctttcgttggaggcattttctgtaccccccacccctcaggcagcggcaggatgcagggtattcaacttgcctccatggtctgtaagccccgcacctatgtgtgggggtgacagatatacagggctcatgcttgtgcatcagaacaaatcccaagaagctgttcttctgttccactttaggccaccatacattaggtcgcctgcttatcccagccagtctggggctggcggacgccccatgttttcttcccagcaccccaactatggcaactctcaggctcccatggtgcaccagcctgaccagtacgggtaggtagcaacacaccccgacttgctgcgggacctgggcgttttctctgaaactgttaacgatcgtgccgtctggccgcgaaaggaacacccaaaccaagaaagcgaaacacctaacagaaaatccatctccaagggggttgtccttctgtccatttttgttggtgtgtttgtttcgttttcctttcgtattaacagtactgtggccgttcggtggaaacccgcatgcgtcctcaggccctgtctgtgcatggctttcggcatggctgctttccttcatgcctgagagggaaatagaaactttgatctgtgtcgaagacatgatgtcaccacctctggcgtcatttcccccattgttgtcattgttttgtctaggaacctgtgttgtgcagcgctgttctcatgactatattatcactcctgctgctacagtgagcggctgccatacccacccccaaattaagagcacagcatctcatttgacaagagactcactgcagttgagctgacaggctattcataggacttaggaggagtttcattatatcaccaccaagcaaatgtctgtgccaaaaacttctattattttttctcc

SEQ ID NO: 39536 - DNA, 1034 bp, Homo sapiens
ttgttactcttgactagaagggaagttttaatactgaatatcacaaatataattctgtagacctgcattttaatactacatcataccaaaaactagggtcactgaaattagctttcaaatgttttgtgttgagtccattaggaaattgggaactttagttaagattattaaatcttagccactcattaacagggtgaataaattccatagggtagctagatcagtggtaaccccaccgtattgctgttggaggagctgaatattttgggagagaatgtgactagctgccttcctctgcttggaagaagctgggtctatttacaaatgcaaatgaattggactggcttgttgggtatacagtggcttgtactgtggctcatgtgcaccccacatagacacatcttccagccactgttctttattgaggtgtatctataattcatatcctgtgttgccatttgccagcaaggcactttttctgtgttattttcctctgaagccagtatgatgcaattctgctgatggacgaagagctgctgatgtggaaatacgttaatggagatagtgcattaaaatgtcaaagagaaggggcaaaaaacttcgaaatgtgtcaagccccagttgtagtggggtccatgtgctaaagagcaggaagtgatttgtattaaccaagaatccagccctttggattttggacaattaggttttaacataatagctatgatttgaaaagtcatgttattgaaagacaaagagaaaagatttcaaagccttaaacagattttttatttctgcaattaaatgtaagcctttgcattatcatctaaatactacgctttaatttttagccccttttttctcttcaaaatttagaatttgaatgaatgttattatgttagtatttaaagattatgatttcaattaaaacttttagaattacagaactattatggaagccataaagtgcatttataaatcatcaaatcaaaaagtagtaaaacactaattctaaaaggatcagagatttatttttt

SEQ ID NO: 39537 - DNA, 1565 bp, Homo sapiens
tattttgcatgttctatctatttcaaaactgcctacctgaaagaagtaaatactcaatttgggtatggtttagtgtaacatcagccctgctttatttttaacccatttgtctgaaattaataaaaacgtacaagttgttagtatgtgaatgaatttttagtttaataatgtgtacctatgttagaatcagttgagatagaacaattgtattctgcacaagactgctgataatcttgaaattaagtgttgatttttgtatgatatataaattataacaaaaatgtcacggatgtatcagggaattttgtaagcctcaatgttcttctgaccctagaagtgggcctttagtttcctactaaagaaattctgtaccattagagagaaaaaaaaaatggtgctgaagcaacctttattttacattcatataaagaatcaaaagatcttaaaaaaaaaaaaacaacatgcaattacttgccaagaaggcttaattaacatgctcatttctgtaaggcgatgtattgacgagcacggctcaggaaggcaagttggaggcaagaagaccctagctgtgcagaatctggcaatctagtcaaaaccccaaaaggaggctgctattaattatccattcactggtttaaacagatagagcctgaaggcttgaagagttggttgttctagtaaatgtttgtaaaattcacatgcagctctaggataaccagcattttccctttcagaggaggaaagggcgatattcgctcttaccttctctgtagctacgtttcgattttgcagcacccgtgatgaaagagaaagcgcttctaggatgggtatagcagacagtgcgcttctaggaggggtgcatccgaactcgcaggaaggggcgcaactcctgcattttgatgtctttgtgttatttgctttgagtctcagaaggcagccgacattgtgtttttccctcatagtctgccctggttttttgttttgttttctttttttaataggaaaagcattcctgaatcagtaatgctctcaagttaacaggtagaattcagataacttctcaaaagtatttgtgtgttggcccagagggagaatttcagaggttaaaaataataatctttaaaacttaagataataattaagggccgggtgcggtggctcacgcctataatcccagcactttgggaggacgaggcgagtggatcacctgagctcaggagttcaagaccagcctggccaacatggtgaaaccttgtctctactaaaaatacaaaaatgagccaggcatggtgatgggtgcctgtaatcccagctactcgggaggctgaggcaggaaaatcacttgaacccgagaggcggaggttgcagtgagccgagatcgcgccactgcactccagcctgggcgacagagtgagactccatttcaaaaaaaagataataagaatgagcacttattaaaaagaaagactaacaatagaccatattatattgtttaaaacttttcatcttgctaatttcattgacttataaagaaggcttgagatagtcacaatattttaattcac

SEQ ID NO: 39538 - DNA, 1030 bp, Homo sapiens
ctccgcgggcttataatgagggttgctggaatgtagctgggttgcatctttgtccccaccccatcatgctgtgtaccttgtgggcatcagatgtggttgggagcaggtgctgccaccacacaaagctcagctcccagccttccttcttaggtcacactgagcagcgcccagcttgccatttctgaagtaacctgaagacccacagtttgcagccctgcattcagtgccaaaagagggcggtgggcatctccgggagcatccacaatttattatacaccaccgagtactaagtaaatggacagaagagccgtgtgagaaagtttgaacccagaaatttaatatttcattaaaaaccactgtccccttacctcctcccttgccacacaacgcaggagacatcaaaaggcaaaaccttccccaagttatttgcaaatcctcatgtttcatccatgtgtttaaccgtttaacctttcataacctgttcccaagtgggaatcaaaaggttaaaataatgcctcggatcttgacgtcacatttcaggagttctctttctttctcctccttttgcgactgtgttgtctccagccctttaagcctccttgagtaagagcaccgcacaggaaggtgtgcacctgccccgtcagcagggctggtggccagtggcatcgcatcatgctttttaagttgggggccgttggtccaggggctcatttgcctttgcacgaggtgctgcttttgcttttgcctgacaccccaagcagtcttggggtgaggggatgggtacggcccagaatcacaggcccacttctgagggcttgcagctgctggaatgagcactttcacatcagtgcccaaaaacctaacttggaaaatagtgccgttgttgctttttaaatgttttgagatgccctttttccttaattggaggtgcagtgggatgagcgtgaggcgttgggagatgtggcgggcagaaggacctccgagcagtgctttttctgttgccatcagcaggttccctaatggttttata

SEQ ID NO: 39539 - DNA, 1050 bp, Homo sapiens
ttcagcaaatggaccttcggaagattgctgagagttacagaaaactgagaaactaatcaaaattgtgttctttgatgacttagtattcaccaggtactattctaaaggctttataagtgataatgccattcaatccctgcaggaaggtattattagccagattttagagatgattaaaccagtcatcagagagggtaagtgacttgcctaaggtcacacagctagttggcggtagagctgggattcaaatccaggtttgtgtgatatcagtgactgacttttccatcccatcattgccattaccagtaagcaaataaacagtcctacctgggcaggtttgcgtcctgtctctatcctatgtgtcctttatgtttacatagtggtaccagatgtgcatccacggctctgtaatttccaaggacctgcctgtcctccccctcccaatctgctggcagtttacaaatgcttcccaggcaccacacaggggcgttatctctcctctctcgctgcgactgcaccttggcctgtgccctgactctagacagaagcctaataaatggttagtaatgactccagccccacacaaggaaagctgccctggcccaagccccctaaaggcctaagcggattaataccacctcggaaaacctgcagaccgcccaggattgggggcacgcgtgtgcttcaaaatttcttctcgatcgtctgtgaaaatgagtccgtgtccaacaaacagcattgttccatgtgagcagccatcaatgcacttggcaagaataaggacttggaacacgctggtgattatttttaattggatgggcctcgtggctgtaacaaaaatcgatgtatttctgacgcggctgcggatacactgatccatcttggccctgcggcgctccggcggccaaaggaggccagcactccagagagcagcccccttttggctttggggccctgaggaccagaggctcagggcttccccgcaacaaggccacaggaccccgctggtgggagggccggggccccgcgctgaccagacccaatagaggc

SEQ ID NO: 39540 - DNA, 1067 bp, Homo sapiens
aattaaataaccaatttgaccaaattaatttgctagagaccaaagaacaagttaaccccatacagaggaagaaaataccaacaggccaatccctaagcgagatccagaggaaatgccagtactgcctgcccctggcctgcctttctcctgccttcctctagttatgtggtcctctattttgattgtttaatttcatgtctagatagcttttttaaaaatttatttttaattttttatagagatggagtctgcctatgttccccaggctggtcttgaacttctggcctcaagtgatcctcccgccttggcctcccaaagtgctgggattataggtgtgagccactgcacctggccatcatgtctagatagctttttattggagacagagtctcactgtgttgtccaggctggagtgcagtggcacaatcatggctcactgtagccttgaccgccgaggctcaagcaatcctcccttctcagtctccttagtaactggaactgtaggcatgcaccaccacacccagccaagttttgtattttttgtagagacataggggtctcactatgttgctcactatgatcctgggctcaagcgatctcctgctttggcctcccaaagtgctgagattataggcatgagccaccgcacctggctatcatgtctagatagcttttaatattagtaaacttcattgtcaaacattagaattgcgtttccccagttacacaaaagcaaataaaatgtgtgacaaaaagagtgaataacttagtcatttagttttagccctcccctgtctgcaattcttctctcatcccagctctcattcctgaccttgaacagatggacaagaaagtttgtccaagagaaatgaacttactagaactcagcaacaggtgttgatacagtctttagcccctggagaaaggcagggtagaaatgattattcccacatcaaagacgaagtgacagaggcttggtgaggttagtcacctagggttgcacagctaattagtgggaaggcttctggctgcaaagccagtgctctttctgactaattgtgctgctc

SEQ ID NO: 39541 - DNA, 1032 bp, Homo sapiens
tctatgcgatgtcgtcattctcacattcccagaagtagaatttgaaaagatcagtgaacattaacaatttcttcttctccctgacatatgcacacatacagcctgcttttgtttacagttgtaatttttaaaataaaaaatctttggtcctgaaatattaaactttcatagtcttgctcactggggcagaatgaaggaaacaaactgagaggctgggtgaggtttgtgttttcagcagcatcatatgaggtgaggaatgtctgcttagatctggggcttgactgggtctccgcattctacactgccaccacagacaagtttggaggtgttcctggggctcagacacttgaaaacgtggggacattctcaaatttctcatcactataagtccattgaagggtttttaaaaaatctttctttctctcttttcctccctccttccttcccttcttctttttacatttagctaattcctctgaaaaaaaaaaacagtgaataattggaagtcagtagaactgggatcatgtttgccttgaagatggaacttggggctatcccctgcaaataaaagtgtcatttccaagaacgacgtctctgttatagatgggtaacttattttctagtagagggtgctgcctttataatatataataaccccatattttcttaccaccccctggccatgcagaactgcatcaacctctccaccatctcagaaaatatctgcatagggtctcatcggtttttttctaagtgctgtgcctcatagaacaccatggggttgatacagacaatacgtgaccctcaggaccttaccagaggacagtgcctaggaacatagtacatggagccaaggatgtttataacccactgtggttccacaagaactttaggtgacttgaaaaccttatgatccattgacatgaaagcactaacccattcatttgtgtacatgatcaacacatgtcagttccttgaggatggggactcgccttgttcactgctgtatccccagggcttagaatagtacct

SEQ ID NO: 39542 - DNA, 1034 bp, Homo sapiens
tcggattcatttatgtttttgcatatatatgtaattcatttttactgctgtaggatttgatttgtgtaaatatgcccagtttattcgtctctttttaatctttctttctttgacttcttactgattcttggcatttgctgtcattttgtatgtaatgcggaatctgcaagacttccattttacagattttgatcctcttaaatctgtcctgccaatgactatgacatctagacccaaatgcttaggtctggataagtgagagagaatttagcatgggattcattggcttttatgtgatattaaaatatttattacaatgataaatcctagctatcaactaatcattgaagttatatacaattaagagcatggtttatagaaacatatatccttatgatgagtgaggtactttatcatagatcttcatctcctagcttaatttgatgctgatttttcttgattttaaaagaaagttaattttttttctttttctttatcctttgtaatactttgtgctttgaagctcttctctgatctcatacctaatgtgtatacagccccccgtgtgttggggggttgtctcttagaccgtattcttcctctctgtgtcatgtggccagctttctttggaagccttgatagcaagggtttctgattgaaccagccaggcctctgctcttgtagactttctagtcttcggtgcttacctgagagaaaaaattgtttcctctgccatgactggatccataattaagagaaagatgtgtgtgtgtgtgtgtgtgtgtgtgtgttcatcccccttgactccaatccttctatctgtagaagttagctgatctttaatttaggtctgtttttgcctttacctccttgtcacttcatagctggagctaacataccattacagtagacctccctgtctccctctagagactttggaggtagacttgctttcaactgcaatggcactttttttattttataacaattttttttaattattttttttgagatggagttgcccaggctgttgt

SEQ ID NO: 39543 - DNA, 1412 bp, Homo sapiens
ttagtagagacagggtttctccatgttggtcaggctggtcttgaactcccaccctcaggtgattcgcctgcctcggcctctcaaagtgctggaattacaggcgtgagccaccgcacccagcctattttagaacaacttaagcacactttagcacactatttaaaaacagcagtataatcatttctgtacatcttcaaactagattttaaaaactgctgacttccatgctgttgagagccatgggaatgaggtggggcccagcaaggcagctgatagaggagggtgtagccaacggccctgcctgtgacttgccctgagataatcttatcagcggaggaatggcgatctaacccacttgggaaggaatttgagctcaataagtctgctatcttttggtggttttcaggcgtggctcatgaatacaaggcaacagcttattttaacactaaataccagcgtctattggagatgttacttctacttgctgagaaatgattgcccttcttgtactgatcatagaaataagtctctaaaatgtgtgttcctggcaacttccttgacataatctggtatttttctcagtcttcacttttccctttctctcataagatctctcctaagtgcaccatctctggtggtataagatactgtgtctactttttcttgttttgaaactttttcttcctttaacttctaggatgttcctctcccacttacctttaattatttcctattctcctgcatcttgtatctcttctttctttcttgcctttaagtaactttgttcctctctctcctgcctgtcttaactttcctaagcaagattgcacggtcatggtggttgctctggcctttgcaaatgtgaccttcatctctgtgtctctgtcccctgcttagagcacctgccccctgacctggcatttcctcttgcctgtagagatctctgccgaggtgtcctctgactcccagaaagcaagtcattgaaagctgaatggcctgcagtttcttctcaatagacagtctcagggccccaccactctcaggaaagaacatttcctgggttgcagaactgtggcctgggaacattctcacttccacccttcccgcctacccaccgccatcaggctgtacgcctcctttccttccttgtctcttagactgcattcttcctctctgtgtctgtactgaaggttctggttcacagtcatttcacggattctttgacacttttcccatgaaaaggtggagtctgattcctctcctctggaatatgggccagcccacatatgaaggacagaatgtgtcagaaatgatgctgtgtgatttccaaggtgaggttagaaaacatggcaaggtttccacctgcttctctctctctctctcacttgggacgtgcacctttggagccctga

SEQ ID NO: 39544 - DNA, 1041 bp, Homo sapiens
atttgtctttttaagcaggaagaagaattcttgacttaaattatctcacacttacaaacttgatgcagattttcctgcctctctttaagattgaaacctatgcaagttaaatttcagcgtggtcctaacacacacagtcaaatggtgattatggctctatttgggaaacacactgagtttgtgtttgtgttcttattccattagctataagcaaattttgcacagatatttcaagaggtatgctcttgtcttcttaaaagtagatagatactaaatgttggagaagcctactcttcccatcataacattattacttaggattaacagtgttttatatagaaactgtatttcttctttggctagaaaaaaataaagataggaagtattgcttttaaactgtatgcctttattgagctgggaaactactaacattctattttttaatttagaagttgaagtggcaatgaagtagagttccacttatttctatctaagttctctgcctcttggcttcggatggtgagacaagaatgatctatcaggacaatgtcatcaccttgaacctgagataaagattattcttgactcttatgtgaaattgttgattttggaaggttgtatgggtttgtggaccatagctggtattgtcaagacagatctcaagcttccctgaatgggagccccagtcaagcgtaaagggggagacttaagtatggaaataaatggagagttgttctccttacttcccattctctcttccctcagatttagttttcttttgctgctgtaatgaattgttacaaacggagtgacttgaaacaacacagattgattatcttacagtctgtacatcagaagtctagtctaatcctgctctccctgggctacaatcagggtgtcagcagggctgtgttccttctggcagctgtaggggaaattctctttccttgcctttttcggcttctggagctatcttgcagtcccctccctccatcctcaaagccagcgaggctccgtgtcttccttccatcatcacacctc

SEQ ID NO: 39545 - DNA, 1073 bp, Homo sapiens
tgtctgacagtaaacattaagtggggatttagcttgctcatttccacgacatccacagttaggttaattcagtctccaaagaaaaatgattttacttgaaatgtctggtcgtatacatggatcaaaataattaagacgtttatgaagctctgcaattttctggaggggacctgcatgactgttttccagaaagttatcagatcttgctttcctgattagcagcagttagcggggtggataaaagcaccccttcagagcaatctcatttccatttctttcaggccacttattttttccaactttttttccgtatcttcataaatgtttcactcttcttttgttagtatttcttagtctcttgagtcaagaaatatttactgagtatgattgcatgcataagtagtgtgcgttagagatacgatacctgtaagacaccacagtgctgggtagatccgggtgccattgtctgttgccagggccgaagttggcattttgtaagtgttcgaataagcaccatgccgtgggataagaaataaaagtgtgtgcctcatctgtcatctgtagttgtgtatatatgccctgtcttcgggcgggcttaggtctcttctcataatttgtgcctttttgctcataacagtctggtttcaaagacacaaaaacagttgttgttattgtacttagatgaagaatacagagctcctagaaggttgatgagttcatgaagaagaaggctctggaaccaggatccctcaccttggtggacttcccaccactggagcggcttccctgccggaccagggttgaccccggcaagggctctcccaggcgcacattcctttgcacattgcagctgttgggagaccgtacgtgatctcaccattctccatggcccctttccatagaccaggctggctgggtggctctgatcctgatgccccacatggcactttctgcaggtgcaggtccaaggtgggcctgcagcaaggactggtcagattactttgaaaggggacagggaggatgacatttggggcaaggagagttttactcagaaccatttgtgttgtcaccat

SEQ ID NO: 39546 - DNA, 1136 bp, Homo sapiens
acaactgcagtagtgaaatgcgcacctgctgaggtctcagctgcagtagtgagatgcacacctgctgattgctagtctggggcttcctccacttcatcctcccttcttaatggggtgaagatgaagtgggatatgatggtccctatcatcgtgtcaacaaaatatctcttcagtgtgagattttttggacaatttcttgttttacactttaattccttttttgagaaaagtgatgggcaggccactacttcagccctcatttgaagatattaatattctcagactggcgatgtacctcctccttttctttttccagacaaaagtctcactctattgcccaggctggagtgcagtgggatgatctcggctcattccaacctccgcctcctgggttcaagcaattctcctgcctcagcctcccaagtagctgagattacaggtgtgcaccagcacacctggctagtttttaaatttttttatttttagtatagatggcatttcaccattctggccaggctggtctcgaactggccacctcaggtgatccgcccgcatctgcctcccaaagtgctgggattacaggcatgagccaccatgcccagcctggcgatataccttctgttgccttctgaactggacttgttgcattgtacaataaaaaaattatgctaattttcaccagagttcatggatttggctttattttagagcacctgctctcattaaagatgttagcacatcagagaaaatgtaaattgaatttctaacaagcactcttggatgggaaaggggttttaaacagaatttctttgttttgtccctttcagcaaatactattgtcatgctccacaagctggaacaataacctacgaaataacctgctaggttatgaatgaaagcatatattttgtgaaatttgtggtcatttagttgggttgaaatgaaatagtcactgatgtttattttctttattattttcttcaatgttttacccttactcaacctatgcacctgggaaaggggaaggctgccagttgctttcttcctgtaccctaccatggacccacagcccctaaactccagtacaattattccctgcactattgttctctgccttaagcattagaaaagggttt

SEQ ID NO: 39547 - DNA, 1081 bp, Homo sapiens
ggaaaaatttcaaactaaggatctaattccatgaggtctacagtgtaaatggtgccgttacttgtaaagcccttgttcagtgaacaaaccgcgcagctgaacatgcagccttgcttcctttttctccagtcctctcttctccatttcttcagcaatgctgagtcctcactgagctaattgcctgacatgcagaagagcctctctttgtctgcgggtcagagaggcagtgagaagggggatagagtcttgcttgtcaggctccagctacgaggcattaagacatgcaccggcttttattttagcattgccgttctcaaccttggattagaagtgccctggatgtataaaagaatttctataaatgtaatggacacacattatgggctaggaattttatacgtctcactagtccttacaacaaatgaccctataatgtaggtggtttcgtggctcaaagagggtgggtgaccagtccacagccgcccacctagtaagcagcagaactgagatacggacttgggctgctgggttgcagagctgctggcgtccctggtgggtttccacaccaggccaccctgtagccccgcccctgggaagggagtgagtgggaccctgccgtcccctttcctacatggccgctgtgtataggcagcagcgcagaggtggtctctgggtagggaaccctctgcctcctaggattcattggggatgaaagtcgcagctgttttatactcttcttaaattttgctttcctgttaagccaagatttactggacacaagaaaacttcccagcagtcccctagaaggaaaactaactcttggtagtcttcccattagcaaataaaagtccccaaatcatttttgtagactgcccaaaccaaggcacttttcatctgagaagacacagcaattgtctcagctgtaaagtaaaagagaattaaaaaaaggtggtctcttttgaaaattcctgttggtgctttggccatgtgattacaatgaaattggtgtgccttcatcttcaaagggcagaactcggtgcttatatgttcatttcattgtagtctgatgggacagacactt

SEQ ID NO: 39548 - DNA, 1034 bp, Homo sapiens
ctctccaaatgcttattgaggaaagaatagaaattgggtaatattagggcttttatagaacaggtgggatgtgctccatgagagcaaagcttttcagcaaagaacttgtcagaaataagatgatgtccattttttttctatcctgaatgctttagaagggtggattaaaagttggtggcaaggccaggtacggtgacttacacctgtaatcccagcacttggggaggccaaggtgggcggatcacttgaggtcaggagtttgagaccagcctggccaacatggtgaaaccccgtctctactaaaaatacaaaaattagccttcatggtagcatgtgcctgtaatcccagccacttgggaggctgaggcaggagaatggcttgaacctgggaggcagagattgccgtgagccgagatggtgccattgcactccagcatgggtgacagagtaagactttgtctcaaaaaaaaaaaaaagaaaaagttgttggcaaaaataactccaagggaggtataattttcgaacttgaagaaataccaaagacagcatattcactcagtaattctgatgaagtgccccacatgcaagctgggctttaaaagtaaacctgggaggccaagcagaacctggatcttcccaaagttattctccaagcatcacgggcaactctcatccctggcaggtaacagccatgtggatcactggaaaaagctatttggctttggagagcacatgtgtgcatttggattgtatcttttaaaatttattttacttaggctatattaatattaatgtgtagtcccctaattcatatcactatcagtagctagaaagattgtagatgatttgaatgaatttctaggcagtgatttttctatatatatttgccatttgaatttctgtgaagtgttataattgaatcctttgaacattttgaaagtatttttcatcttgatttaagaaattataggctggatgcagtgtctcacgcctgtaatcccagcacattaggaggccaagtcaagaggattgct

SEQ ID NO: 39549 - DNA, 1131 bp, Homo sapiens
attattaactaaagtctacagtttagggtttactctttgtgttgtatattctatggatttatgtcatgcctaatgtcatgtgcccatcattacagtttcatacaaaatagttttttcatatcagaaaggctattttgtatgatactgtatcaaacaaaaaagccttctaaattccctgtatggtacagtatcatacaaaatagccttgtaaattccccatacaccctccccatcctctgcccgaagtctggcaaccactagtctttttactgtttctatagttttgtcttttcccgactgtcgtagagttgggatcatgcaagatgttgccttttcatttggcttctttcacttaaccatgtgcatccaaggttcctttgtatctttttgtggcttgatagctcatttctttgtattgctgagtaatattccattgtatggatataccaccatttgtttttctatacctaacgaaggacatcttggttgcttacaatttttggcaattatgaatgaagtttccataaacattcctgggtaggtttgtgtgtggacataagttttcaggggacgtgattgctggatatatggtaagactgtgtttagctgtgtaggaaaccactacattgtgttctaaagtggctacaccatttttcatttccataggcagtgaatgagagttcctgctgctccacatccttgtcagcatttggtgttgtcagtgttgtggattttagccatgctagtaaatgtgtagtagtatcttactgttgttttaatttgcaatttcctaatgacgtgagacatggagcatcttttcatgtgcttatttgccatctccccaggttattttaaggtctctagcatggaatgaaaaccctcacagtgggaaagcagaatcgaggcactgatgagagagaaggtatagtcattgaaggggtgggctgaatcaaggcactgatgagaggagagaaggtatagtcattgaaggggtgggctgaatcgaggcactgatgagaggagagaaggtatagtcattgaaggggtgggctgaatcaaggcactgatgagaggagagaaggtatagtcattgaaggggtgggctgagtcaaggcactgatgagaggagag

SEQ ID NO: 39550 - DNA, 1035 bp, Homo sapiens
cccaaagtgctgggattacaggtatgagccatcatgcctggcctcctcatctctttcttcactgtatcccaagggcctggcagcgtggcagaaagcctggcacatagcaggcaagtgcttgctgtatgctgtttggatagagggctggggtgggtaggggcatggaggatatttcaggcagagagagcagcatgggtgtgaagaattagggcaggttgtagtttattttgactggtgacttgggcaaggagagggcactgagtagctgatgagggaaggcaagtaggtggaggtcacactgtgggggattttggaggccaggctagagagtccatagagaggccagttcccagagtcctgccaggtgtcagtttcagaaccttggataacttaatgtttccgatcctcctttttttccttatttgtaaaatggagataatgaagatgcaaatggagataatgaaggtgcaaatggagatacgaggttgtttggaagattaaataacataagatctgtcaaatgcttgccactgagtccacacgcagtgaagcatgtgcttggtaacagttggctattgttgttatcctgaattcaccagacaatgggagagcatgactttcctgtagggaagcgatacgattgggtctgggcttttaggtcagtgaatctggcagcagtaggatggattggagcagaggcaatgaccctgaaggagatgcagtagtgagttaataagcatgagagtcgcccaggtgagaagtcatgaggacttgaactgctgggggagggggggcgggtaaaggggggttgcaggaataatgtgatgatgggcacaggcgtcagagccctcagagaggtctgcgggacttggcagtgaactaacggagagggacgaaggcttgaatctgagcccctagaggcatagtggtgctattcatgggaagagggaagccaggcacgtttgcttcaggaagatgatgagttcagtttgggtcatgttggctgcatagtgcctgtggaatttccagatgtgg

SEQ ID NO: 39551 - DNA, 1631 bp, Homo sapiens
gatgcttccttccataaggaggccactttccctccagaggacacctagattctctttatagtagtgtcgtgaagatgaatggcggtgctgagctgtgctcccgagtgtcccgggcaggctgtcgccctgttctgtctccagccttgaacaggtttgtctctgtagtgatactggagttcttaatccttttagaaggaagcagtgagtgctcttcccagaagaattcctgcatatgcctgtatacaatacttggatcaattcactgggctcacaggtccctggaagaccccaattaaagaatccttctctcacaggctcagtctctgcatttcttactcgtaaaacgacctttcctgtcagggtaaaatagattcaaataggtatgactaaaggctactaactcttctctgcaacagtgttagttgattgctacgggataataaattcatatatttaaaaccaaaaaatatagctctatgtgtgctgtgattcattcttccccatattaaattaggtgattatataggtcagatttttacagaagaaggacaagtacaagttggttaaatttatgaccttagtatttacatgggatggtagagttaaaaaaaaaaatccaggtttactttctttttattttataatttacttggttttctaaataggtataaagctaattaaaagttaggtgtactgaactatcatgttttttttattgaggtaaaatatacataacataaaatttacaattttaatcattttaactgtacagttcagtagcatttattatatcatgtagttttaattaatcctattgtgaataatttctaaatcttcaaaaaaaatgagaaagtagaaaagagtgtaatttacccagaaaaaaatatacttcttgaacaggttgctaaggtgtcacaaatttgggctttcctggcaagaagaatgcaagcatttaaggtaagaatgctttatggaaagttcttgtagattctagaaataggattgtttttcaaatggagtgattaattttattttgcagggagaggaaggaaatctctaaggtagccatattaagataattttaaagattgtaaggttaaaatctggactttgagttgcatttggaagtacagaaaatcagcaagactcttgaagacaaatgccacgtgcagacatctctagttttcatcagctgaagttcacaaattaccttcacagttatctcaaagtacagcacaatgctgaaacccccctgtgaatttgcaaatgtgaggatcaccatagtaacaaccatattaaactttacattttaacattgttcgtacaagacgcttgtgtctttgtaagactttctcagggaataaaaagtttttccttccactgtaccacaagatatttcctgcttatctcaggcattgtttttgaaatccgaaagtctggatgtcatattaaaagcagccaaaatattcgtgttggtgtcaggatgttagagtactatttccaatagcagttggagctagagctgtggaatttatggatgtgtttggctgtggaggattgcagagaaagctgtggacaaatatattttataagtgataaattcagagtattgtctgggcggtagagagtgc

SEQ ID NO: 39552 - DNA, 2109 bp, Homo sapiens
ccaggaaaccactagacctgttctttgaatgactcacagtggctgccatcactggtggtgaaaccaatctatgtggtgaggtttagcacatgtccagctttaaaatgaatggccaagggtattttcccacccaaagctaagatgaactagctgcacatggatattcatggctcttattgatctgatacactctggcccaattgatcgactcatgtttgaatcccagttctgcctcttactagctgcatgactttgggtagtgccttaccttctctggaactcagttttcctcctctgtagagtggagatgtctgccttctagggttctgcttcagattaaatgccataacccagataacacacttcagaacagagcctagtgtaccgtaagcactagtaaatgaatatggtattgttatcttattatttttcagagtcagctagcatttaataaatgttctatgtgtgctcagcattgcactaagtctttatgtaatattttgtttattcctcacaatgatctcatgagcaggaggttaaggaacttgcccaaagtcaaacagtaatcgtgatagagctaacaatcttaatataaattaaactgactccaaattattatacagccttctgcaatattattagatggtctctacacccgcaatgaagcctacagttagtgagcatatcatacttaatgacagaatcccagggtacacattgcagtctctgccttttgtgattggatgggctgtttggtagcggacaccacggaatacacattgaggcagggagctctgagactggggagaggctccaagagaacactcagtaagaggatatactaggctgggcatggtggctcacgcctgtaatccaagcaatttgggaaggtgaggcgggtggatcacctgaggtcaggagtttgagaccagcctgacgaacatggtgaaaccctatctctactaaaaatagaaaatttagccgggcatggtggtgcacacctgtaatctcatctactcaggagactgagggaggagaatcacttgaacccaggaggtggaagttgcagtgagccaagattgcaccattgcaccccagcctgggcgaccgagagagactccgtcaaaaaaaaaaaaaaagggatatactttgcccctacatccaggaaagtcagtaacacttttcccacctcagttgcagaagacattctgtgggcatctttggtagaaacagcattcacattccccactgagggccgagtggaggggccttccatggtctagtcagctgctcaaggatgagaccaaagtgggtacgggaggggtcactagtcattgaaaggtcaggcaggagcatcaatgtactgatcaaggcaaagcccagaagtgggcatgtggccagaagctgggctcaaaacataacagggatcccagtgtgaggaggccagagttgagggcagcaattctgaccatgtagacagagtccaggctggggaagggaccacaagggaaacacctggtgactctggcatgggtcttagcactgccagatattacacacacacacacacacacacacacacacacacacacactcttcatatctatctatctatcatcatcatcatcatcatcatcattttatatatataaaaacctgttgaaaataatagctctgaattattggagataaatgaatgtttccaaaagagatggaaagattcaaagagttaatttcacctctgtcttctgccagcttcttatagcagttttgattagacaagagccatcacggtttattaaaaataaacaaagccaagatgcgccagaaatagatgaaaacctggttcatttgtcttgcctccgtctcattcctgttacatctccatgtcatgcagttagttgtctgtccaaaacagtttctatttttaaagcaacagaggatacttttcaggcttgggttagagaggcctctctttggaccaatggtccctcacggtgtgtggcaagccccctctgcccccttgggttggtgagcggagagttcttttaagcctaatgtcctgcagaaattatctgggaaatctgttaaaacagagtctggtctgaa

SEQ ID NO: 39553 - DNA, 1049 bp, Homo sapiens
cattcccagaggcaaaggcatttggattagtgaaatgcagcctccctagtcctgcccctgagttcctagttatctctgtaacagcagctacaccttgggttagggtcttgaagttagcagcctccgccccaccctgatagacagacatattctccttctagataggaaataaaaagcagaggatgcctgttggagaacagagctgggcagcagagggtgggcaggtggcaatgtggtgataccctctccaccctgtgggggacgccagttcctgcacttcccatccagccgctgggtgcactgccacagtcacggcttgcagaatgaaggatttattagtcatggaaactggcctcggagcaccgtgcccccactagaggcacagcggttctgggtcttgagatcctcatacactaaaggtctgccacaaatttaggatcatcttcatgctttgtaaaaaaattttttaaacccctgttgggtcagatcctggtctatcatgcgacggtggcaccagagggggctctgcagggggcatcagacaacctcatttcccttaatacaactcactatagatctgtgagttcacatagtttctgagcttatttatagtttcagcctcttcagtgtcctctgtgttgtcatgaattttccaccatcgtgtaaagttagctctttttcttacttaccctgaatctgcctccttcagttcaaagtggtctccttagctctggggtttcagagttgacggacatgcctgttcaccctttctattcttttccagtatattttctagtgagattcactgtaggtttccacaagatgaacactaactggagcgatgagtgccttgtggatccttcaaggatttcaacagcaaagttacctcgagccataagcctgcattatgttctgacttataagaaaagcgatttttctttctctttgttgtcatggggctgtcttccaccacattaggcaaaaaaagtagtgcagtgccttgttttcagagcttctgctgacaaatgaagattccgaggacttttggg

SEQ ID NO: 39554 - DNA, 1046 bp, Homo sapiens
ttcccatctctaatttggaaacaccatccgagtttttaaatttattttgaaggaggtcataaaattctcgcattgcaagatttttttacagcacctttattgagatgtaactcacatgccgtgagatttgcccttttaaggtacacaattcagtggcttttagtatactcagagttgtacaactatcactcttctctagttttagaaccttttcattgccctaaaaagaaacccatacccaccaacagttgctccccctgtcctaccccaccacccctgcctggcctaggcaaccactaatctattttctgtctctatagatttgtctattctggacgtttcagataaatggagtcatgtattatgtggccttttgtgcctggcttctctcactcagcatagtgtgttcagggtttatccatgttgtagtatctatgagttcttcattcctcattttatttatttatttatttatttatttatttatttatttatttatttattttgagatggagcctcactctattgcctaggctggagtacagtgacatgatcttggctcactgcaacctccatctcccgggttcaagcgattctcctgcctcagactcgcaagtagctggaattacaggcgcctgccaacacgtctggctaatttttgtgtttttagtagagatggtgtttcaccattttggccaggctgatctggaaatcctgacctcaggtaatccgcccatcccggcctcccaaagtgctgggattacaggtgtgattcatccctcattatggcggtataatattctgttgtatgagtagaccgcatcatatttatacatatatcggtcgatggatatttgagttggttccactttggggttcctatgaatacttcctggaagactttaaatcctattaaataattgtgtgtgttatgtagcactttaggcataagagaaaaagcatcacatcagaaaaacaaggataggttgtcaacattccaaaaagtttggaaaaatcactactataagaagaaaactataacctaa

SEQ ID NO: 39555 - DNA, 1016 bp, Homo sapiens
gactaccatgagcaattggataaactagaagatatgggtcaattcctagacacatacaacctatcaagacaatcatgaagacttagaaaacctgaacaaaccaataatgagtaaaaacattgaatcagtattaaaaagtctgccatcaaagaaaagcccggaacttgatagcttcactgctgaattctacctaacatttaaagacaacccaatactaatccttctaaaactcttccaaacaactgaagaggaaggaatacttccaaactcattttatgaggccagcatgtcctgagagcaaagccagacaaagcccctacaagaaaagaaaattacagaccaatattcttgatgaacatagatgcaaaaattatcaacaaaatattagcaaactgaatttaacaacacatcaaaaggatcattcaccatgatcaagtgggatttatccctgggatccaaggatggttcaacatatgcaagtcaataaatataatacaccacattaacagaataaaggacaaaaatcatcatcgcaatagatgtagaagaggtatttgacaaacctcaacatcctttcatgataaaaactctcaacaaattaggtgtagaaggaatgtacctcaacacagtaaaggtcatatataacaaacccacactgacatcatactcagtggagaaaggttgaaagcttttcctctaatatcaggaacaagacaaagatgcccactctcagccacttcttttcaacatagtactggaagtcctagccaaaataactaggtgagagagagaaataacaggcatccaaataggaaaataaggctgggcgcagtgactcatgccttaatcccagcactttggtaggctgaggggggtggtcacctgaggtcaggagttcgaggccagcctgaccaacatggtgaaaccccgtctctactaaaaatacaaaaattagctgggcgtggtggtgtgcacctgtaatcgcagctactcgagaggcagaggcaggagaattg

SEQ ID NO: 39556 - DNA, 1068 bp, Homo sapiens
attaacaactattcctgaaaactcacagggaatctcagcttgctcatttgagttttattcccacttttctcacataggaatatttagaattgaaatttttagaaaatgaaaacattactggaggcttaaattgtaatgtgaacccgatacatagaacaaactcatgcgcaatcacttccttcgtaaacgttgtagtagcatttatgctgcaccagagaaaatcccgacaagaagtgttggttttgaaatctgcaagaaaaatggacaggttttttaaaacacctttttattctttcagttgtttttttttttgaatgtttttattgttgtttttattgaatgtttaaaaaacgttgttctcatttcttagaagttttaaattttagaatgctctttgttgaggcactgggtgtaggtgcagtctcgattctgaattggagggtggtggttattcatagggagaggctgaattagatatgtttagaacccaagatgtgacccagccgctctccaccaggcacaccgtgtggcagatctgcagatgtctgagataagaaccgcaatgcgtggcctcttacagcagtggggaggggagaaacctgggttttcctcccaggatgcggggaagctactgcagggtttgtgtttgtttgagacagggtctcactctgtcacccaggctggagtgcagtggcgtgatcatggctcactgctatgggagtggggaagattgggtgtgtggcattagaagctcgctctggctgctgagagaagaaaggattagctgggaagagtggcagaaggagacaagttagggactgctaccgtaactggagagagaggacagtcatggggaaatgagggatgtggacagacctgggaggtggaatcttctgatgttggtgggatgggatggtggagtgggagaaagggagagatcaagggtgacccccctcagtttctagatagagaaacacggtggacgctcatgccatttaccggaatggggaagctggttgggcgaggggggaacaggtcttttatgggcagaggaagagaatgcgtgaa

SEQ ID NO: 39557 - DNA, 1321 bp, Homo sapiens
gccctgcagggccctggcttggctctggcttttgagcaaccttagccattttgcttcctcagcttaagcctttattgcttcaactctaaaatgagcgggttggacttgatcacctctgagttccctttaaagtccctacattctgaaatgctgaggccagagcccctgggatgtcactaacatgcagttgactgtgaagtgctgggccctccctgggaactgtttgacacaaagatgggagatcagccgtccttggatgcctgtccctcctccgaccttcccctgcaccctctgacactcttctctgccaccaccctccctgcgggctctgcatgctttctgcctagacatccaaatggcgggatagtaatgatctctggtctggagaggtagacagggcatttgttctgatttccacttgaaagatggtgaatctgaggtttagaaagggcagccaggaaacaacatgtggcctggactgcagggctctggaagctctttccaaattatgcaagatgccgaggactgtgagcagatttttataaagggggacatgacttactttccttgtagatcatggccactttgagagcacccattcttttaaaatcttttgttccagtgcaggtcactttgtttcattaaggaagcttacaaggaaataagtttttaaaaatccaataaatacaaagggagacaatgataaattgcattttatgggctctaaggtctcaaaaccatttcatttcctgaatgcataattccaaatccgtttcatatcctgaattcatagtctacatttaaaaagtgccagggacagtcaaaccaacaggcaaataatgctcatcgataccttgaaagtctcttcttgtctcaacccctaaagactgcgttttcctctcccatggttccctagaaatcatgtagcttagatttggtatctcagcttttcttgacagctgtgttatgccactacatgggactacagcctcccatggtgcctttttgggatttttttttttattttttcatttcaaaatggatgcagaaaagtataccccaaggagatttatagtgtttttttgcaaactccttcccctcaaagcttccatctgtagattcctcactaagcactgatgagatgcaaacttctattttttggagaatttaaataagctataattttgttgtcctatgtaactatgagatttttttttaaagcagtctaaaatgggagtttctagaatacaagccttctgcctttcctgtttcattcatttaacaaatatttctgctgtacgtgcactgggtgagcactatg

SEQ ID NO: 39558 - DNA, 1045 bp, Homo sapiens
gagggagccagccccaggctcttcctcttcttctaaggacactaatcccatcatggggccccacacttatgatctcatttaacttgtgtcacctctcaaagccccccaccccgatatcatcccattggaagttagggtttcaacatatatatgaattttggggaacccattcgctccatagcaaacagcatttggtttgagaccgtcagtccagaacctgcctcaccaaaagggttttgttactgccattccccatggacttctttacaagggatgctcctgggatgacagcaacatgacgatggtgttccatgtcacaggatgagcaagtttttgctacttggatcaccctatgcatataagcaaccacctgcttatcataatggtctaaaatatttcacttgaagaagtagggatgtgtttgaattttataactcttaggtcttcagctcacaggagacaaatcgattgattgattcattcattcattcaacgaatatttgctgaggactgaggaatattctaggtgctaaataatttagccatgaatgagacaaaatccctgccttcaaggggcttatgttctagtagggatgtctgacaatgaggaagtccacaaatatatgtataacataatatcagattattatgactgatagaagaaaattaagaagggtgaagcagtagaccatgacttgaggagatgaggctgtgttagattagttagtcagggaaggcatatatttgaagaggtgacactgagcagaaatctgaaagaagggattgagacttgaatatatgagggaagagcattccagggagagggaacagctagtgcaaaggccctgaggtggggatgaactttgcatgtttgaggcatgggaagaagatcaacgtcactggagtgcagtggagaacaagagagtgagtgggaggaagaggatgccactgagagagctaggggccagatcaggtagggccttaaagaccatggtggggacattaggttttgttcttagtataactggaagtcatttttaaaaga

SEQ ID NO: 39559 - DNA, 1040 bp, Homo sapiens
tttcatttcatttcatttcatttcatgtttttgagacagggtctggctctgttgcccaggctggagtgcggtggcatgatcttggctcactgcagcctcagcctcccagggtcaagccagcctcccacctcagcctcccaagtggttgggactacagtcacacactaccacagccagctggtttttgtattttttttgtagagacggggtttcgccatgttgcccaggctggtctcaaactcctgagctcaagcaatctgcccacctcagcctcccaaagtgttgggattataggcactcccggcctcttcctggaattttaaatgcaactcagaatcacttggcaaaaatgttgatgcaccacaatattcactagtaagctcttgtacattctcaatagtagatgagtaaattgggctgtttacacactatgatttgaagcctgtattataaagctacagattcccaggtcctgtatcttaagtagacctctctgggtggtctgggaggccctgagttaagagtaaggacactaactctgtcttgcatgcttggagggtgtttgggccccacgggcagaagagagcactctccttgtctcccctcctccgctctctgttcacgcaagtgcttgaagcctggagcccctctcctcactcatgaactctgcaggttcaaggcaagactgtgctgtgtttggagacatccctgtttaactctgcatctagccagaagtcctgtagggaaaaaccagatttcctaagtgacattcctcgactcggtagggtgaccttcaccttcctcctcccttagcaagcctgaaagctacagttctcacccgacaaaggtagacagagagacgcgtgtgaaaaagagctgttgagctttgatgaaactgaacatcaagtttgtagtctacaaatgggtatgtggagttctactgtcacctccatgctctctgggtttgagcttttccttccagcttgctttgctcatattttccacgttagtccctgggctcattgatttaaattccctcc

SEQ ID NO: 39560 - DNA, 1027 bp, Homo sapiens
ttaaagttcttatcctacaaatgccttcttcttgacaaagttctctcctcaagagatcatcccacatgccctttgatgaccaagtctgggaaaagcccaaatcctttgtgttttctaacgaaattaccccctacaactcaaaaccagcttcctgttccgagaaaggcaaggattgtctgcactcgccatccccctttctttcggccccactcccctttcatctttcccaccacttacaccctcttgccagctgttgaggagctctggggactcctctgcaagtcagagcgcggtcagggctctccaacccttgcaccgggtgcaccctgtgctccctcccagagctggaaagcatccacgccggttccatctcattccatgggaccagcatgtacccagtggcaggcctttcatgtcctgctcacctcacgagggcaagcccgacagaatggtttgagcctaagtagaaaaaaatttgcccagcctcctggccctgcatgcctccagcaagggcagagagacgaaccatctctatgcgggacatgccccagggccccttctagatccccatccctgtcatgtggggtaggccccctgctgcccaccctggctccctcctacgcccttcatgaaggatccctctccaagcccatgcagccttaaattattccagctttggtctctcacagtgcttaaccccatgcccttcccatctttgtgcacgtggtccaagcattctgggcatgatgggttaatccttcctgccagctgcgcatcctggctgagctttgtttccagtactctccatccagcccagaggaagcgcagctcagccatggtgctctactcccaaggaagccccaggatgtccctgccagggtccaccctcccacatcagcattccccgtgcccatgggccttggtggggagatgcacggatgctatggggtctgtgctcaagcatgctggggaacgctactctgtgagaaacctcggggtcgggggggaagttctttgctcttaggtt

SEQ ID NO: 39561 - DNA, 1040 bp, Homo sapiens
gggccagggagccacctcttctctctcggatcctcatatccctcaaatcattaaagcgagagaaactgaaggagctgaagaggcaaagcatgggcctgtgagaccctctcgggctcactatgtatgttttaaagccccaggtgcatgctgccctcgtttttctgatggggtaggccctatgagggatgtctgtcgtttggtgggccctagtccagcgtcggaattgccagcagctttcgctggaatgcgtatttttagtacagcctaaacctgtaataaaaagggatttacatgtactagattttaatcacatactgtggacaaactaataagaaagtttgctagacagtaagatgaaacactgccagcatttttgcaaaccggttatacaagagtctgcctaactctggccagacccaggcagcttagtctagaggttcagaggtggcctctggaggcagctgcagcctgggtcccagccctgctgtcctgtgtgggcactgggactgtctctgcacctgagatgccacatctggaagggctgtgaagacgaaggaagtagtacatggagccctcaggccatgccagcccctggggggcaccgagcagaccagcctcctcccacatccaggacatggcctggtcccttgttttctgtcctgtcatttttggtgtgggtgccacaaagaacctccaggcgccctctgcagggactcagtgtccagtcgcttttatttctggcagggctttcccctgcctcttttaaatccttacaggctctctttctcattccctcgcctctttttggctgtgctcttcctctcccgggcacttgactgcatcttactgcacactctgccttctgtcccacagtgtctgccccttgttgctctcactgcttcctctgtgtgtgagtctgaactcagactgcagataccttgtgtgttgcatacactctgctgtgcgctgccctcaggaacccagccactgcttcacagttgtacattaagagtttggacatggcagagattcggccctgc

SEQ ID NO: 39562 - DNA, 1125 bp, Homo sapiens
cagtgagccgagatcaggccactgcactccagcctgggtgacagagcaagactccgtctcaaaaaaataaaaataaaaaagaatctacacctgaagtagaaactaactacccttctgccatgaagttctgcagagcctccttttatctcaacaggctccacatttcaggttcctgtcggtcactcctgagagtctcaacagcccctggaggtcaggatggagggaggggctacacattccaagaaggagaggcagcgttggcccacagagcggccttggtctcaatgttggacttggaggactggagcttgtggacagacccatgttgtccgagctctcatcctgaatgcagaaagccagaatgcagatttgttcattttcaacagatgactgcaggaccaacgttgtcacaggggccagcattctctcaccaggcaaagccagccgcttctctgcctggtatcaagctgcctgggcagccaattcgtaatcagagtgccaatttataagtgtagaatgagaaatagaactgccacaggaagcagaatcactgcctggtcggccctgtgggactttctggagacttctgtcaaatatgctcgtgtaagactgggagccatgaataaatgcacatttttgtttgtttttgtttttgttttgttttttgagacagggtcctgctctgtctgctggagtgctgtgatgcaatctccacctcccgggttcaagccatccttctgcctcagcctccccgagtagctggggctataggcacgcgccaccatgcccagctaatttttgtatttttagtagagacagggtttcaccatattggccaggttggtctcaaactcctgacctcaggtgatctgcccacctcggcctcccaaagtgctgggattacagtcatgagcccccgcgcctggccaatatgtgtacttttaaaaagtgctttgatagaggattctgatgtaaaataatgcgtctaacgtaaattttttaaggtatcacgtcttttttattctgtgcatttatttagaaactgtttatgacaaaagagtgagattacatgtctaatacagttttttggagagagcatccctggccaataggaaagcttcaaca

SEQ ID NO: 39563 - DNA, 1035 bp, Homo sapiens
ctcttcatgttttttttttgttttttttttgagacagagtctcactgtgtcacccacgctggagtgcaatggtgcaatcttggctcactgtaacctctgcttcccaggttcaagcgattctcatgcctcagcctcccagctagctgggattacaggtgcccgccaccacacctggctaatttttgtaattttagtaggtgggatttcactatgttgaccaagctcgtctcaaactcctgacctcaggggatccacccacctccgcctcccaaagtgctggaattacaggcatgagccactgtgcccggccaattcttaatgatttttaagcagctgccccaaattttcattttgccacgggcccccgacattccatagccggtcctaactggtagaactttgcctgttcttttgagtgcctttgttgagaaaagtaattaaggacctgctgactggactgcagtgactcagtgaagtgcttgcagctttatgtgaacaacaagaaacaaaaacagcacactgtatttagagctccagacgtctgtgcggacccaagtctgctggcaggggtattgatgtcgtacttcgtcatttctgagtgccattagagccaccaacctgttctgggcctaggctgggtctgtaagcgcccctgttctcgtaaatactttatttgtagagttcctgctgctgggctggccagcacttcctcattgtgtgaaatgtgtagacacaattgacttcagttcttgaaaagttttatttagctatggaatcgtagtatttgagttggaaataaccttttatagcatatccgacttgctgaggcccagaaactgtgcacatcatatcactaggcaaaaggccaggacccaagttcaagtcctctgccgtagagtcctacatcctgccagcagtgcccatcatgtggtgtttcataagggggcagcatcgcaccctaggaacttcactcagagctgctcacaataattacagtcaacatttgccacatttactagctgactgcatttttgt

SEQ ID NO: 39564 - DNA, 1050 bp, Homo sapiens
acattgggcagggtgcccgctttggctgagcatcaaaaggaggcagggctccccatcaacatgtggtctgccctgcatcgtgtgagcacacaggtgcacttacacacccaagtgtgcgacagaaaactgggaggggctgtgatagctaaaccccgatggggtgggggcaggcttgacaatgttgaagactaagggggtgaggtcccttcatcccctgcatgctggcaggtaaatgacatcatcagtgctgggttttgatgcttgttttaaagaacatttttttcttttgttgttgttgttgagatggcgtctcactcttttgcccaggctggaatgcagtggcgagacctcggctcactgcaacctccgcctcccaggtgcaagctattctcctgcctctgcctcccaagtaactgggattacaggcgctcgccaccaagcccggctaattttttatatttttagtagagatggggtttcaccatgttggccaggctagtcttgaactcctgacctcaagtgatccacctcggcctcccaaagtgctgggattacaggcgtgagccactgcacccggcaagaacatttatcttgcatcaggggacacaacagagtggaacagatgtttgcagaggaaaggcccccacgggggaaatcggtggcagagggacagctcagtagggagaagcagggcagtgggatccgtgcctggggaggggtgagggcggaggagtaggagcgttctgccaagagtgcctgggggaaagggttgcgctggaagggggatacagctagtgccaatttggggagccgtggtgagttctgtctaagatatgtttacaaaaagaatctaaaagataacacacatgagtctccccattggcctagagtgacctgaaggtcctttctttagttgcctgcatgtaatgtggaaggagggaaaaatcagctgcttatcaatgagaatgtcgcagcctcataggaaatgttacctgtcaggtgcctgtccgggaagccatgtggtgatgccgccttggcttctccgattcg

SEQ ID NO: 39565 - DNA, 1053 bp, Homo sapiens
cagatggtcttagagtttgaatacatccgtgtgcatcatacacatatgctgatacgggggtgggaggactttacctaaaaaggactcttttttttgcatggttccacaatttgactttttaaaatatttcctggagatgtttccatgatgatacatagatctacctcatttttttaactatttcgtagaattccacagtgtagatgaactatagtttagtcttctgttgatggatattagatttaattttttttactgttcaagaaatgaagtagtgaattttcttctgtgtatctctatgtgcacatattactgtgtctctagggttgacaatgggtgtgccatctctgagttgaagggaagcacatttaaatgtcgatagggatgccaaatgctcctcttaagacactggacaagtctgtgctcctgtgtccccacacctttatggcactggctgtgaacagtcttgtcattttggccaattcgatgaaaagaaaaatattacactgttttaatttccattttctggataatagattgtacctctctttatgttcatgggccttattttttcttatcacaatgtatgccagtacatgtccatgtatcagttgagttatttgttctttttctacgaacatgtaggggttctttatgtttctcaaaaataataataataataatctcttaagcatcctttgccaatctccaaatccaacatttaccttttaactttacttttttacacggaagtgtttattaatgaacacaatctgtcaatctcatactacgtggctcctcggtttgtgtcttatatccttaccccaaagttacatgaatgttgccttaatcttcctcaaatacctttatattgtgtttcttacgtttggtgcagtaatttatctatcagataattttgtggatgtggtgcaagctgaagttctagctttatttttttctaaatgtttaatgaagtgtcccaactccacttactatttcattattctgttccagcaagtctcaaactttttggtctcaagactcctttacaca

SEQ ID NO: 39566 - DNA, 1047 bp, Homo sapiens
tcaggcaatggcttgatttgtcacagcgtccatggtgcttcccgctggcttgtttgtgactagcagggcaggtcaggaaacagtaagagccagggagagctggcctctttcccccacctgcagtgcgtgtgtgggtctaagagaggatgccgaggcctcagttctgtccaaatctcccttcttgttcctgagtccttcatctgcatatggcacggctttatgttgtttagagaccacaaactgtcacaaccaaaattatttccaccactgggttaaatgtgctgttttggctggattggggctgtatcttttccaaaatccatgttcctttgggtggggcatttcttgaggatggtcctaccctgagaagtgtttgaatcgtttgttaaaaggtaaactgaaggacattaaaatagtgaagagtgtatttgaacagacggcgattcatgaatctggcagctccagacttgaagcggtgtggggcagcactgaaggggctccgggggaggcttttattgggtgaaggcagagcaagacaaataagacatttgctttgttaaagtggggccgtagctttccttgggtcattctggagcttgggcagggacataggccactcataggcttccgggctggccccaggcagatgtgagggggtgatgcctacctttgcccctccctctcgtcccctcttgccttgcccttccgctgtgccacctcgacccagcccctgtgcccttaagtgggccagggccttcccgggcatcccggccaggcctacccactgagagtgtccccttcctcggacccctgggcccagacccctgtgcttgagttgcccctcctgggttcttaaatggtgctgtgccatgcaaataaggcagagagagttcttgtgttcccctctgggagtctgcttaccaagagttcagagacccacattcggttcctgcagtgttcccagaggcagggatggcagctggctgggtatggccaggtttggaggaaggagtcctcatataagcctggcgggaggaatggaaaatt

SEQ ID NO: 39567 - DNA, 1117 bp, Homo sapiens
ttcatttgcctattcctttaggagtcaccttccaaataactagtaccgctgaaggcaccgggctgtgatggaagggttgttggaagaggacactgcaaaggttaagaagcctgtcgcagtgcagcagctgcctgttggtcaccccttgtcactcaattcagtgtaaggctacttttcttttcttttttttgaaacagtgtctcgctctgccacccaggctggaatgcagtggcatgatctccactcactgtaacctccgtctcccaggttcaagccattctcctgcctcagcttcccgagtagatgggattacaggcgcccgccaccacacccagctaatttttgtattttttagtagagagggggtttcaccatgttggccaggctggtctgaagctcctggcctcaagtgatccaccagcctctgcctcccaaagtgataggattacaggcatgagtcaccgcgcccagcctggaaagctacttattaaggcatctgttaatctgtgggcttgagcactgtgtcaggaagcttgaagataccaaaaaaaaaaaacaaaaaaaaaaaaaacaagactccttgccctcctgttctctgctgtgactgaggatgagacagtctgaacaccccaggaaagagctgcatgcgacatcaccatgccactgagcaccaggcagatcaggaggagctctggacctggaagcagagcctcttcactgctggcctcaggctgatggcatacagaatcatggtgggattgagtaaggacctgcggccctggtcacctgcccagggtgacagtgcactctctgccatgcatacctgagtgtaggtggcttcacatctcctgtagcatcttcttgccatccgtacacacaaagggtatttgtattttttttttttaagacagggtctcactctgtcgcccaggctgaagtgcagtggtgaaatctcagctcactgcaaccttcacctcctggtctcaaggtgatcctcctacctcagcctcctgagtagctgggaccacaggcatgtgccaccatgcccagctaatttttgcattttttgtagagacagttttgccatgttgcccaggctggtctcgaactcctgacc

SEQ ID NO: 39568 - DNA, 1050 bp, Homo sapiens
gacaggagtccccacccagagatgtcagacttgggacagggagcatctcctagcaatgctggacagaggacttcagcattggtggcaagggccgaacatcgaccttcagggtcctgcccagtggaggtcccctccagcagactcttctctgtcatcagggctttgagcccattgtgtctcatcaacaggccaatatcaccagcagataatgttccactggactgtacatttaccggccattcaggcacctggcgaacaggcctttctgttgctttggttctttatgggcttctgtggtttagggaccgtgctcacaggactgtggaaagcacgcaagcagagctggcgctaaacggaacatgaggcccgatgctctttcccgactctcctctttgcagttcatccaccttcacaccgacacggggctcaccacttcccagactataccacatggacataccacatgctgttccaagccttccacgtacataacttctgctaacccctcacagcacccctctgagcctgctactaatattatctccattttatagattaacaaaaccggaggagggagagcttaagtacaattttctaacagaaacgtcctaatttgaccccagagcccatgcttttaaccctatgctatgcacatcaataaagaaacatctacaggggtgactgtgtgtaaagtgattttcagccacaccctttcagtccccacaacccattatccttacccacgctcccctgtgaaaatctgcccagaggataggtccctgaggctctgtgctttttccttcaatatctctctctcagctcttcagactggataatttctttggatctctcttcatgttcactgattcttctgccatatccaatctactgctaacttcatccagataatttttcattttgcttattgtgctttttagttgtaaaattttgatttggttctatcatattttcccatttctttgtatgtctattaatattttattgactacaggacattttagatatgtggtatagagactctggattttg

SEQ ID NO: 39569 - DNA, 1027 bp, Homo sapiens
agaaggttctcgtgggtgtgcaggagctctttgcaggcttaggtggcagagaggtgatcaggggagaggaaaagggccagcagctgatggagtagtgcaaagtagaagaatgcacaagagaggggtggtggggggggaagacagagagtggaggagagcccacctctccccagagaggaaagttgaaagaaacagagggttgaggcgagcccacctcttcccacagggaaggtgaaagagacagagagggttggaaggagaggagcccgcctctgccctcaggctcctactgtgtgaccttgactgtctcctccagctccaccctcgaacatatttttctgtgagtctgtgagagtcagtcagaagtacttgggctgaaccctaaaacagaatttgccaattagtcttcagtagagaaggctttcttcaggtcaacagagacaagcaaatctaatttgccatttccttgttccttagagccagggggtattgtgtggacagaaagcattaggatgagtgagggctccagaggggaagcttgaaaacaagatgccttggtccagcaagggcgctggcttgccagctgagctctctgaagcggcagctccgccctgggctcattcccaggcccggcctgctggaggctgtgcggagttacaggaaatgggagtgccgctgcggctcagctgcctctgtcagtaagaatacgaaacggtgatgttcataaaacattctttgcaaagcacagtccgtccaaaccctggtatagtttccagaagacgaatgtttaatcaatgaggctgctctgcctctgcctctgccctgtcaagactgagcccatgtcctgagcagagctgacagcatgggagagcgcccgcagcctacacaggccacagctgtctgcagcctgctcagtagcccccaccggaagggacctgcaccctgagctgaaattccctgcaagagcagagaaagctactctgttgcccacctgacagcttggagaagcaccgccgtggcacaaatg

SEQ ID NO: 39570 - DNA, 1023 bp, Homo sapiens
gcgggtccgcggcccagccagtcccttctgggcatgggtgcggcgggcagtgcagacagaccaccaggatcgcaccgggggacggcgtcgggtctgggcgcgggttgggaccccgggcgcagcgaggtttgggaagtttgcacctgagcgtgggctgcggcgggctcgccgggaggggccgcgggacggaaacttcccgcagcccggggaggcccccgaggcgactggcgctctgtggcgtccggcgtccccgccgcccccacgtcccctcccgctgccgcctgggggaccctcgcccccgcggggcgggtgggggtcgagacctcggcggagaggacgcggcgcttcccgtcccggcctgcgggggctcgcggccggggagggaccgaggctgggacgccccgcgcccctttgccttcgctgctgttatttttttcttttgttttgctaccttttcattgtgaatggcattgccggcatgaataaaatatcaagagggaaatgactgtgctttcgattacgtgtttgcctgaaaaaaggcccaggcccgaattacgtggtggaactttgactcctgcttcgtcattggctaggagcggtggtttgcttgttttacgttattgtttatgaaattagcagtcactcttggctacctgaattttcaaaagccaccctcccccgctccttttccttgggcgttttcagtagttacttgatgtagaatagccactggggaagtcacggtcacggaagggaggacctgggggaggaggctctatacctgagccattaactgatctgtgatacactgtgaggagtgggtttacttttgcacttagtttttgtaatgtcactttgttagcatcagcacccctttgtctatttgtttttgagatctctgagctacttttgggttgctagaaacgttattttttatttttcgataggtgtttgctttttttgtggagtgttaaggtagaaaatggtaagaaatgtgaaatctctttgaaagatcagcattgc

SEQ ID NO: 39571 - DNA, 1026 bp, Homo sapiens
tgttattgttttaaaagtcagttatcttcttagttttctttcagaaaaattaaatggtgagtttttttgtttgtttgtttgtttgttttgcatggcccatgtatttaccattcctggtgctcttccttcttttgtgtggattcagttttccatctagtatcattttcgttctggtaaaagcatgtttgacatttcctgtagtattgctttgctggtgacacattcttcctcagcttttgtctgaaatgcctttatttcaccatcatttttgaaggatgtttttgctgggtatagaattctaggttggtagtttttgttatttttcagcatttttaaggtgacatttggcttgtacatgttgttcttgagaattctgcagttattctttgttccactgtatgtaataatatatgtttttctcctttctctgattttaaggtttttctctttgttgctgatattctgaaacttgactatgatgtgtctttgtgtggttttctttgtggtttttttcctgtggaatttattcaacttctgggatctgtaggttatagttttcacaaattggaaatttttgacattacttcttcagacactttttctgtcttcccctccatcattctgggatttgaattacatgtatacagtaactgttgttgtttcataggtgactaactgggtaggggaatgtctggttcccttactatccggtgaagtagcagaaccaccttttgtaggaatcagttatcaggccctttactttcccttgaactctaggctagttccagaacctttggtggactggaaagaggaaatagttatgccacaatttttagtacatgcaaatgtacatgtaatgtttaaaaaaaaaaaacaacaaaggtggtgatagcctgcatttactgggccatatgtgccggtccctattctatgggctttatttttattacttcatttctcctttgtgtcacaaggcacaggcagtttgagaccaagactttaaggaattggtccaagttttcaaga

SEQ ID NO: 39572 - DNA, 1022 bp, Homo sapiens
tacactcatcttcagatgtgtgtctctgcttatataactgggtttattatgccctcccagagaagcatctatgtgatctcttatctcaggttctttctcctggagattgggtacattttgtttcataaagtcaaatctttgtagactattggatttctgttatggtctgtgttgtcaggaagcttagaggcaaacataatattcatttgtgtccaatcttctttgcccaagattctgttacagttttttccattatttctgtgtgatacttgtctcattacatttaattgtcctttttacatgtaactttattgtaactgttcttaaaatatgtagcaaaattatgagatgaacatcatttgaaataatgtaacaaaaattgtatcaattaatagtatttcattgcaggcttatatagatggagaaggaacaaaagcagatagggagaatttgtctttgtaaactgagtaaaacttgaacccatcgttacctgctttcttcacctggctgatttcgtgacactgccctgtgcatgcctgtccttggtccacgcctccgcctctgggccccacactgcaacgtgtctcttctgtgtcctctccctcgtgaccgtcactcatacttaatgtgtgtgcagtcttgggagaggtaccctggagatacaaagacaggaaacctggcccttgccctgtgctccttgttttccagagaggtctgcatgccagtgtttcttactgaatgtttccagaagggaacttgttgtgtctgtgctgtagaacatgttggatcccacacacctctccccggcctcactggctgtcctcttgtgtccctcccctctctgcctcacgagtgttggggttcccacgtcattccaccttcagcccatttctttacactatgcggtctcagatttttgtattgccgtctctgtggtgatgactttaaacctgtatctgcagcttcctcctgtggctccagcctcagaggaggccagacaccttcacctagttttttcacaa

SEQ ID NO: 39573 - DNA, 1118 bp, Homo sapiens
gtgtctctttactcatcttagcatcagtaagtttaaatttgactctcctcccacacaagcaagttgaagccccacattcagttggttatccaacttcctgagtgtcgtatttttctttaagtatatctttttaaagatctctttgaataacttatttcgagcctgctactctttccttgactttgtattcttaatctgtgctgcatttcagagtaactagttcataaatgtataacctactatgtaagatagcactttcttttggtttttcttaaaactcctaatttcaggttgcttgggggaccctttggttctagattcttactgagtagtctcaggtgagcagagttgctggtgtcaaggcagtgttgctgcatccaggtccctggcccactgtgattgctttcctcttttggtggtgagaaaacgctttatcagccaaaacgcagttcagcttggctgcagtttagactagaattgtcagtgtgaaaggaatatgatgagttgttctttaaatggactgaaacagtttgatttggaaaattataaagctgtttattaaactacttggagaaaataatagacagcattttttttatgatcttggaatatggaagcccaccattttttttttttttttgagacggagtctcgctcagtcgctcaggctggagtgcagtggcgtgatgtcagctcactgcaacctctgcctcctcctgggttcaaatgattctcctgcgtcaatctcctgagtagctgggactacaggtgcccgccactacgcccaggtaatttttgtatttttggtagagatggggtttcaccatattggccaggctggtctcaaactcctgaccttgtgatccgcccacttcagcctcccaattgcatccggcctatggaagccctttctgagactgacagcacaaagtctagtggccattaaggatataattgatacatttaagtaaacaagtaatattaaattagcaaaaatacttctgacttatgacggatacaggctaattccattcatatacatacactcttgctaatctgtaagaaaaagatgaagaattcagaaaaataggtaaagtgtataaacaggctgtcctttg

SEQ ID NO: 39574 - DNA, 1053 bp, Homo sapiens
gtctaactggaaacaaactattaaagcaaagtctttttttttaaccttaaaactgcagtgatgaaggaccagccagcattgttatacgtacatcctgtcatcagcacagtgtaaaagcttatttcacatggacttctcttaggtctgtctggaagcaaattatttgctgattgtagcgccatcctattctgtactcaaagctacctattttaggactttgagctatctgagtaagtagactctctaagctaatacaaacattatccatttaccttaagtaaatttttagtgttttaattatctttatttaaaaaataaacacctgaaattgacatctgtaggttcagaatatgacttaacaaaggatttgttaaataatttcacctcttttggtaattcccaatcagtaatgttgatatgactggctataaatagattgagtctgctgtgatctaccttcatttttagaagaatgtacaagttttatgttccaccagtggttttctaacgtcagtacagattcatctgtagaattaggtcatgtcctttgagccaaagatctgtaaagaacaaaacaggaaacttgtcaaattcttccgtattttgagctaaagtggttagatttttttatataagagaatattataacctcttcagtcccttttgaggaaaagagttaaatttttgtcagaaattctggtttagatgttctctggtttaagaatcagatattatttgctttctattcctacttcctaacacagttgcacgtggtatagtcgtaagatgggccgtggcatgataggccagatgacatcatcacaggtggtgtggaaggatgtgacaggcacagtgaggagttccttatgtggtgataggcggacccctgaatgcctacagggccccatcccaagataataacatagaaagtagttagcctgcgattgggaactcctcttaactggtggacttaccagatgggatgatctgtactgacctgaagtggacgtttggtgtctgctggaaggaattaggtggcccataagagctgcg

SEQ ID NO: 39575 - DNA, 1032 bp, Homo sapiens
ttaattaaatatgttaccattttcattaattcttaaacctagccctccttcgaggcctgatgtagttacgatggagacagacagacgtcgtggtgccattgctcatctctgccacgccacagttgctgttctcatggtctgtgcagtgagaactcttcctcttgggccatgtcttagctgcttactaggaaaccagtgaactgagtcaggtctaaccatgtcatccaaacaagcgcttgccctgcttactgcatttttttgttgtcagaagtaggggtttatttcttactggtcccagttccccaaggatgtcatatgaggagcaagaatacaacataaaaaaaaaataacaaaaccagaaactactatttttgtggtcagcagttgctaattagcattattactgtctttaaaaacaattagtaaagtaaccttttattttattgttacagaagcagtacatatgcattgtagaaaattcagactagaaaaagaaaagtatcccatttccacaatcactactctttacactaggtgtcttattttctctctgtgaacgtgggtatacacacaaacatacagatataaattgtatataaatggtaatggtttaccaccagttggtaatccttgccagaatcagaaatgttattccttccacgcttagctggtttcatctagaaagcagcactttcctgtatcagctggagctagttaattatgtcgaattccaatttggaattcaggatagatggctaattccacctctccttaattgccatgtttcaaagtaagaagttattttatagctactacaaatagtgaccaatgaagaaagcattcctgtctttttttctgacagtagcatggatgtatggatttacattgatttcataatgtgttttgttttttttttctttgtgcttaaagttatcaccttttggaagcccattcaagctgagtcttctacctcattaatatttgaaacctctcttgctcttaaatagtgctaagtctttcatctctgtcagt

SEQ ID NO: 39576 - DNA, 1027 bp, Homo sapiens
tgtctttccctgaccttgggtagacccctcacgtgatgggctgatcagtgcagatctgcagtgtcctctgcagtctccagagctctctctctgcgtctctgtcttccccagactctgtatcctcccaccacagagaccgccgagctttgtgtgggttttccatgcctgctccgtgtcctggagagtctctccacgcagtgaatgggcacttgtgggcttactctgtctgtctcccgtatctcaggatcacttcttcactgtctggtgtccagtgatttgaacacggtttcctatatttcatcatattttttgttttcattgggagcataaactgggtccctgttactccatctttgttgtctgctttgcgtattaactgattttcaactccaagtttattttcatctctcaggtgagaataataccaccgcttatttcacaggagagttgcgcctgaaaaggatgctgtcgtccactatataaatgtttgtagtactgacttccctacaggacagttgtggaaccgggatttgaagcctggaagctgggctccagaatggtcctcttaacacatctgctgcagtttacccatcaattggcttcttggaagcgcatcagtcagttacctcttctcacaagatgctgtattgtaggccagttagaccctaagagcacacaccgggagacattgtgttcacagaccagctgggctgttgtgtcattcacagctgcgattggtaggactcactgtggctctgtggttagcttcaagttgaccaggtggctttgctgattttgtctggactctctcacatacatgtctaatgcctctgaaagcaaaaggttcagaatattaacattttttttaacttggctatttctgttttttcctctggagtttgtttctctggctgtatgacttgcatgatacttaatccattctttctgtgctgcttatagttatttttagggtttcattaatactgtatcatgatgccaaacaacagactttagaaaatataatgca

SEQ ID NO: 39577 - DNA, 1066 bp, Homo sapiens
agcaaaaataatacaatttaggccaacttagtgtttaaaaacaaaaaggatctatctctgtccatgggatgtttgagtaagtatatacaaggaatttgttagtagcatgaaacaaaaattatagtaggccattgtttcagagttcctgcactaggccccagcagaccaggccaaaccagaatggagttccttgtgctagatgctccatagtcaaactgaaacttgaaggaagcagataggtcccaaaacaaactgattttttctcgagaacaggagatcccagtctacctgagttagcataataaggagtcccctctgctttaacccttacgaaaaagtaacctgaagtaaactgatgttaaccatcaactttttttctgttgttctatttccttattaacccatccttaaaaaccaagtgttctgttaatgcccagtgggagtgctcgttctagattgtaggaaggaggctgcccagattcatgaatctcaagtaaaggccaagtcgatctgtaactgaatttgttgtaattttgtgtcttttgacagtagtagttccttagaatgactagcatctcaggatgttaggcgtatttctcaaattgcatatacttttattgtttgaattttttttattatacatgtattccatttcaaattaaaaagcctacttaaaaatacaacagatcgctataaagcagttagaaataggtcctcatgttgagtgggaaaaagaaaacttgcaaagagatacatacagtatgacatcctttaggtcaattttaaaaatataaagcagttgtttgtgaatgtgtacatgtgcagctgaagtatgaaaacacacataggaatggatacaggttcagaaaagtagtggttacttctggagagaaagaaagagagggctgtagctgcatctaatagtttctttgttgctgttttcaaagttcctaagcaaatacggtaaaatgtgttcacatcagtaaaattagattgatgctaccttttgtgctttcctacatgtttggaaattaaaatattatgtatgtaaaattgttttgaatac

SEQ ID NO: 39578 - DNA, 1034 bp, Homo sapiens
gagttctcttttgactgcacacttttgctgcctcttacccagtttcttccattatatattttcctgctcaattgcatgcataataaagtgaataattctctgtcttgttagtcaactgtgtcttgtttcagagtcaaatttgaagttttcagtcatggtcagtagtgatgtgcatcattgtcagctgttctttaaatgtgaatataaagtatattgaaaattcatataaattagccccattttgaaaacgaaggaagcagagactgagaaaaatgagtggccacgttttcatggctgatgagtgaggttccagctcatgcctgggggtctctgactctggtttttggtgctctcctctgctccacacttgctctctgatttgcttataaccttaaggcaagtttcgtgacctgttggaacctcagtttcttcatctcgaaagcaaggaggttggctttaagaattctttctgctctaaaatatcattccaggctgaaaccacattaaagcagtcctaacttgaacctgtgcctctgaggcatctctgtctctctgtagtgctgtgaacgatttaacaccctgtgtatttgtatttaactaaactgtataaatgagtcacttaaacttaaaacaattataaaaaatgtttttaagtattaacactttttcagcaattaatccattttatatgacagctgtattctagtcatggaacataaatcttatactagaaaaagagatctgaaattaaatatacttgagcactataagaattcaccttgggccaggtgcagtgcctcatgtctgtaatcctagcactttgggaggccgaggcaggcagatcacgaggtcaggaattcgagaccagcctggccaacatggtgaaacctcaatctgtaccaaaaatataaaaaagtagctgggcgtggtggcacgcctgtaatcctagctacttggaaggctcaggcaggagaatcgcttgaacccgggagacggaggttgcagtgagccgagatggcaccactgcactccag

SEQ ID NO: 39579 - DNA, 1119 bp, Homo sapiens
caaactattagtctgtgatagattcgaaatttttaaaaactagtccttcatcacgtgtagcttgagacagctagactagaaagaaacattgtcttgtaaccagcactgtccttgggagagggaagctggtgtctcctctccatgggctgagctactcacgtgggagcagaagggtttcccacaggtgtgttctttaaacataatatctaacaggaacagaaaccattgaaccatttatgtacctttcaaagaggaacaagaatgaccctccaaaggacttctcattctgaaaagaattacttgctgattcacatcaattgtatttattatttttccatgtaacaaaattacttctttctggaacattggcataggttggagattatggcccaatgtgggtttatcctacctctacttttgactgtgtggtagcagatcccaggaaaggctccaaaatgtatggtctaaagagctacatcgaatatcagctaacacctactgtaagtatccacgttatcaaaagcagaatcatgtttggatcactgattgcagcttgcttttttcttcattttctagagttggcattggtaaccttttctctttcccttattttgtagaacactaatcgatctgtaaaccacaggtataagcactttgactggttatatgagcgtctcctggttaagtttgggtcagccattccaatcccttctcttccagacaaacaagtcacaggtgagtgtgtgtaatgctaaacccaggatgacaaatagaaagactccagtcagattatcttcctgtaagtcagtgatggcattttccatcctgtagagcagcaggatgcaggagttggaaacagtaattaaatacagctatgaagagagaaccattgcatgttgtacatctatctggaagttgcctaaacgtctcacaagaacgtttaatgtgcaaatcacaggttttggtatgtgtctggaattccagcagtcattgtcttcattgctgtaccttttctacaaaagaaatgtgtacatttaaaatatgtgaaaaatgacacctgaaaaaatagaaataattcaaatagcctaaaatggaaataaaaatgtatgacccacatga

SEQ ID NO: 39580 - DNA, 1052 bp, Homo sapiens
aactcataactgtttcagcttatcctataaatgtgtatcttacccagggatccctttgtggtttacattggcagcacttatgagagcaagttagctctttttctttattaaaagggaaaggaacccaggcaacataaggagaccccatctctacaaaaaaataataaaataaaaattagccaggcatggtgtcacacacctgtagtctcagctgttctggaggctgaagcagaaggatcgcttgagcccaggaggtcgaggctatagtgtgccatgatcacaccactgcactccaatatgggcaacagagtgagaccccatctcaagaaaaaaagaagaaaaagcatttgtcagctaggtggcacctattaaatctgttatctcctgtcacttatagaagtggtagaattggtacaggtgttgatcctgatactcaaggcagacagtgctttggatgtcggtttctgaatattttaataataaactaataagaagtttctcaccaaaatgtaagatttagggctcccacatggcaatagttctcattgccctggccttaccatgtcttacagttgacacttttagaccagaagcgggctttgaggtctagactgggaactcaaggccagaacagagaagcatcttggcccaggtaacaagtgggtgatggaagagctgagagcaagccacgcccattgcttagggaggaggcagaggtcttggagcccttttagcatggtggctctgtgatgtctcaacagggtgagaagatttgtcctagagatgctggaattttggccatcatgatggcccggctccacaggcatccatgggttccccactgggagctgcttcgtgattctttaacattttctggactgtgattatcaatacataattaaatgttccatattgcaaatagcactttttcaagtattaaaaatactcagtgtatgttttatgttgaatatcattctacttaagataatattttaaggaagcattcaagttcctgttgactggcttttctcccattacaaaggacagtgaag

SEQ ID NO: 39581 - DNA, 1050 bp, Homo sapiens
aaagaaagtgacaaactagttgcaacaagtaaaatcaccctacaagacaaacagaacatggtgaagagagtcagcatcatgtcttacgcgttgcaaggtaagatgaaagggtccttatgaggtgctggtggaagtttttttttccccagcaaagtttcccttgatagagagaaatccagatgtgagcagcagttaagtaagtgagaccttttaagcccctcgtttgcaggatcccggtgctgatgaaaatctgtaatatttatttaatttttcacctgtccaccttatctggctatagatgacagcttgattaaaactgtacattttattatttctgagagacatttaagattccttttgtaatctgtggtatcataatgctctattaaatgccagagcccagcttttagcagtctgtaacctgcgtgccttgggatcatggaatgtgaaggggtttgggtgtgtcattttaggcacaatttttttgtgtcaagaaaaaaaaaagatgaatttctataggtttgagtgtttttgagcagatgagggcagcaagtggatttttcctgttggcggatgggtggatggcacttggatgggcagagaatggagagcgtgttctgttaggaacaaaagccacaaaattgtggtgctagattgtgtcatgggcatgaaagagtaaaacatacttagaggttattgggaaataaattttgattgtgaaggaacttgaaagctctagacttgatgcaggcattaagaagccattaaaagggagtaaaaaaaaatcaatcctcaagggagaaggatttgctggttatggaggggagattggaagatgcagacactgtccaagagcccagccagaagaccatctcactgttgtagtctgagctttgagggcctaaagatgtggtactggggagaagagaatgaagcacatttgcaggcttttccaaggaacagctttcaagactggggcattcatgggagaaagagaaggatgagggaggtgtccagagccaggccactacggcaaaaacgaggaaccct

SEQ ID NO: 39582 - DNA, 1035 bp, Homo sapiens
taatgggagtgatatctcaacgttgttttgttttgctttcttgtcagattgcagaaaagctgaggcaggccctcagccgctttccagtgatgtaggacagaacgggccttgaagagaatgccgcgtgctttctcctgacttggggcaatgcaattcaaaactttttttcccctattattcagaaaaaaaaggaaacaaaaccaaaaagaaagagttgcaaaaaactgcatttattttattagccaccctaaatgcgtcagttatttagggatggtcttttgttcatttccgcatccattatttaaaccagtggaaattgtctctatttttggaaagtacttaaaagttaccagaattttcaatggaaaatgaggggtttctccccactgatattttacatagagtcataatttatatgtcttataaattataagtcttatataatttataagtctcccacaatcttccagttcttacccagtgtcagataattaattactaattactttcttaaaaacatgaactatgccagaataaaaaatatctatgtttgtatatttttataactcctttcagtcctctggggctcctgtcattgagggaagtcgttacgcctttcactgccacagttacagctcaagtgcttacacttcaagagggaggacgctgggggcccctggggctgctagtgccatcgtggtgtgtggcaggtgggccatcccatgtccctccagggggaccccacagcctggcagatgagcagatacccctggccacccatgtcctcagcgacatttctgatgtgctgctcttatgtgaggaccagtgctttctctctttgcacttccttcctaatcttggttaaggcatgttttatgccatgaagaatacattagaagaattgagggactttgtagagaattttgtggctttggtccaacgggtgagtggctgtgcggaggcctgtgttcgggagggcctgggagaaggagggcacccagcaccccggcgtctctggccctttcttattctttg

SEQ ID NO: 39583 - DNA, 1058 bp, Homo sapiens
aggcttctcaaggaacatgaggcctggcaaacccagaacgttagactgggtcggctccaagatgcccctgggtttgagctggagaagtgtctgcgggagggtgctggggctcctgcagagcgtgtcttcctgaccctgtgggcttttctggggggggctaggaggctctgccaagttggtggatggaactgtgccttgccctggggggcactgggcaggagccagcctcggagcgtgagtctggtgctgcgccaggaggctagatgccccggccaggtcctgtgggctgcgccgtctgtgcccttggcccgcgaggctggcaggctgccactgcttgtaaagcctcctggttgaaaaggtgactcggagcagcggattcactgggagcctgtcagccacagaggcagcttgtgcttgtgccccaggcccaggccgcaggaggtgggatcaagttccacggctccagtgtgaaggtctgagcttcattctaaggcaggtttttgaggacatggggctctcgggcacctggttgtattcctgcatcctgcattcctgcccactctctcatgccttcttctccttctccttggcgtgccccaagccagccttccatctcagatggagttgtatgtttctagtgagcccacacaccccctgaggacagggcctcacccccgcacgcctgcttcttcatcacagctgctaggaaatgaagatgcatgtccccaggggcctttgaagtaggatgtggtctccctgagcagaactctgactctaaattctctcctggctctggcgttggtgtgggacttgggttgcgggagggggcaggttgttagcggctgctgctcagacccagcggaggaccgggctgctccaggctcccggcaagatgtagcaaaatggccaaatttaaggtgagcacgggctcccgtgcagtttctcacccctgctgctggctgcctgtctgtgaatgctaaggcgaggggtggttctacattgacttcttactgactggtgggagtaacccggaagaggcaaatgacttccttcccttt

SEQ ID NO: 39584 - DNA, 1037 bp, Homo sapiens
ttcccaccaactgtgtacaagggtttccttttctccacatccttgccagcatttgttattgcctgacttttggatgtaagccattgtaattggggtaagatgatctctcagtgtagttttgatttgcctttttctgacgatcagtgatgttgggcaccttttcatatgcctgtttaccatttgtatttcttcttttgagaaatgtacattcaaatcttttgctcattttttggatcggattattagatttttttcctgtagaattgtttgagctccttatatattctggttattagtcccttgtcagatgagtagtttgcaaatatttcctcccattctgtgggctgtctcttcactttgttgattgtttcctttgctgtgcaaaagctttttaacttaatatgatctcttttgttcatttttgctttggttgcctgtgcttgtggggtattgctcaatacatttttgcccaggtcaatgtcctggaggtctttcccaatgttttactgtagtagcttcatagtttgagggccatggcattcttaaaaacataactttcattcttgcatagctttttttttttttttttttttttttaagtaacctggactgtcatttggctagggaggcgggagtttgtgtgtctggaaatgtgtgggtttttttttttttttttttttttttttttttttttgggacggagtctcgctctgtctcccaggctagagggcagtgcagctacctcggctcactgcaagctccgcctccctggttcacaccattctcctgcctcagcctcccgagtagctgggactacaggcgcccgccaccacccctggctaattttttgtattttttagtagagacggggtttcaccatgttagtcaggatggtctcgatctcctgacctcttgatccacctgcctcggacttcaaaagtgctgggattacattacaggtgtgagccaccacacccagccagtgtgtggtcttttttatctgtctgtttaaactgtctgttttatatgttgcatga

SEQ ID NO: 39585 - DNA, 1051 bp, Homo sapiens
cttcatctttcttggaccacatgtcctggtgttcagaggctcctgagagcctggggctcagtaggccgtctcatagcccctctaacccaggtgagaaaacaggtcccagtgggtccctaacccatgctcattttctcaccaaacaacaacaaataaatcagaaagtcctgaaaaatgaattctggcctgttttctggattctggattgaaatatggagtaggagctgacttttagtaagttgatcaactctccccgccgaccccctagccttctggaactgtcttcagtaaacacaacccccgccacccctgacctacccgcaccgcactgtggtcggcctcttctttgaacacttcccttacagcacgcactccccccaagctgggccttctcttgagaccactctgctgtccttgggagtgatggtggaggcggggtagacaccctgtccctgtctcgtggtgctcctttgggccacagctcctcttccctccgtaggaggaaccatctggaatccatcttcctccttgaccacacctctccattcattaaggagcagagttccctgctcactgggtctctctacccctcctctgtccctgtctgggtgaggtcacagagagcctcacccgcctgctctgttggcctctcacttgccgtcctctctgccccgttccctctcctgcacacctgtccgcggtatccccagctcttagtgactctagccctctcccgccctcctctgcaccctgcatgcacttgtgttgctgaatgtggccggagaaaaacacagccatcttgactgttctgtgagacttcatagatttccagggctgtgtggaatcaaaaaatcttcctgcatttccccagccatctggcctccaggatgactatttcacatctcctcaagcctttcacatctcatccccctcacacctgatgattttgcttcctatttcactgggaaaatgaaggtaactgagaactttcttttttttttttttttttttttgagatggagcctggctcttgttccccaggctggagtgc

SEQ ID NO: 39586 - DNA, 1072 bp, Homo sapiens
ttctccactttcaccttgtcactcatcctgcaattcccagtcccagtgactattttttttttttttttttgagacagtcttgctctgtcgcccaggctggagtgcagtggcgcgatctcggctcactgcaagctccgcctcccaggttcacgccattctcctgcctcagcctccctagtagctgggactacaggtgcccgcaacgacgcccggctaattttttgtatttttaatagagatggggtttcaccatgttagccaggatggtctcaatctcctgacctcgtgatccacccaccttggccttccaaagtgctgggattagaggcgtgagccaccacgcccggcccccagtgatctttgaccccactgggatggcgacccttagaacccatggccttctcatagcccctcgtctgtctcacaccttccctctttgccatgtcagtgaccagccctgccttgcactcaccctccccacccgcccttctcttgctgggtcctccccacctggtgaaacctcagccctggttacatcctgcactccacgcctgcaccagccgctgtgcagtagaagtttctggagatgccccactaccacacgggcagagcgtaccatcaggtcacaacccctgagccaaggtgggcctttcacttgcgtttctgtgctctgtccactcccccaccctcccagatggcaactccaccctcccctttcctcagctctgctgtgcctcctccccatcctcactttcagctgatggcctcgtcctctcattccaccccaaaatttgaagccactggaagagaattcccgctggctccctgcaccaccactacccgcccaccatgtctgtcccccttcccacctgctccccgcagtgcactgtctacgtttcaggccagtgctacctgtgtgcagatgcccatggcctgctccagggcatggctttcggagctccctgctcctgccacatccgtcctgacctctctcttggctgcattggtcctgacctctctctcagctgcatcaatcctcgcctctctcctggctcatttctgccagcacaaa

SEQ ID NO: 39587 - DNA, 1687 bp, Homo sapiens
ccacagaagggaatgaggcttcttgtggaccatgcgagaccagccctgctccgaggctttgggtgcccccaacccctgcccacctgtgagagtcaccccccggagtgggttggagtttctctgagtgtggtgtgtatgagtttgactttggcgatgtcaggataatttggtctgttttcaacacattctggaaagcaccctgagcatctgaaggatggaaggattgggctttaaatcaagttttttcagtccccattggttatcttaaggggcgtttgactttaacttgattttctttttcccctgtaagtccctgacccagaactgtgatctattttcttttgtgttttcagctgttgagcatgttgggcagcacggagtgtagctacaactgtgtgaccccacctgtgtgactgactccacctgtgtgactccagtcgtgtgaccaactacaactgtgtaactgactccaattgtgtgactaactccacctgtgtgactctgcgtgactccaactgtgactccatctgtatgactccaattgtgtgacccccacctgtgtgactctgactgtgtgacccccacctgcgtgactctgactgtgtgacccccacctgcgtgactctgactgtgtgacccccacctgcgtgactccgactgtgtgacccccacctgtgtgactccaactgtggactgactctaactatgtgactgactccaactgtgtgactaactccacctgtatgactccaactatatgattgacttcaaccgtgtgaccccacctgtgtgactccaattgtatgactgactctaactgtgtgactccaactgtgactccatctgtatgactgacctcaactgtgtgaccccacctgtgtgactccaactgtgtactgactctgtgtgactgactccacctgtatgactccaactatatgactgacttcaaccgtgtgaccccacctgtgtgactccagttgtgtgactgatttcactgcgtggctaactccactgttgcctgactccagctgcgtgacttcagctgtgtgactccatgtatgtgaccctagctgtgtgactccaactttcagttgccacgaagacaaccagctgagtcaggagtgggcctccctttcaatgtttttagctaagcatctctgcgcaaagaaagaggcttccccacaggctcttaatttgggacaagttttcccttagtttgggaaaaatttcaatctacctaaattagccttttacattagaaatcgagaaatatgcacaaaaattcataaaagcctttttccaggttccaaggtttttgtagaaagcccaaagttcccctttccttcctgaaatgccagcaggaaggggttggagctcccgtgattagccagggagtcaggcttcctgaagtttacacaatacaaagcatattaagtgagaatgtagcagaaaaaagaacttatcccaatgattatagcaatttaaattctcttgaacccaagctctcaaggcctacctgttttatagcctcaagggactctactcctatcccagactataatgaattgtgtctcctggagttgtgcagtacgcaacctgtgaagctgtacacgacagccctataaattctctagcagacagccctcctagattctagttcccacttcacagctgaactgcattt

SEQ ID NO: 39588 - DNA, 1056 bp, Homo sapiens
tttataataattatgcggaggctctgttaccccattttacaggtagagagactgaggcacgaatagtcgagggaattttgccaaactccacacacttactaagtggcagagccaggatttgaacccaggctttctgggtccaggtcccaagctggtaatcacagtgctaaaccagtcccatcaatggggaagctgagtcaccctgcccaaagggacttgtagcaatgcactaagactagtcccggagcccaggcagaggcggctggatttctgtatgtttaagatctcctggtgctttttcactccacagcaggacagagacaagagtggacaaccctgtaaatacataaattatctattgccctttctggacataatgctgtttctgtcagattcgcactgatgcctagagatgccaggtagaagcaaaagtgaggaaagtcctgccatgggagtcgttccaatgaacctcatctaatgtaatgttttagaatccagtgtctgccttttgaagctatatcagttttcccagctctgagacgggactcgtgaggtttatttctgacctgtttgtgcctctctccctttgccagaggcagccacaggttttcatctggccttggtgctttggattccccagaagtgaattcctgatttctgccggaagaaggggaccctccccacatccctgtgtccatcccaacgctccccacccccacatcctctttggttctctggtattgtggatatttgggggcagtaatgtgcccagacttcaaaatgcacgtgaatcaaggctgggcatggtagctcacgcctgcaatcccagcactttgggaggccaaggcaggcggatcacctgaggtcagcagtttgagaccagcctggccaacatggtgaaaccctgtctctactaaagatacaaagaaaattagccaggtgtggtggcgcacacctgtaatcccagctacatgggaggctgaggcagaagaatcgtttgaacccaggaggctgagattgcagtgagccgagatcgcaccattgcactccagcctg

SEQ ID NO: 39589 - DNA, 1118 bp, Homo sapiens
gctggcccatccatcggagaccccggacagcctggctacccaggaaggggagctgtcacttcccagcgctgagtccagggctgtccacgtgggccttcagcaaagcctgactgagcctgccaggtcccaggctctgctcccaggtgggtgggcatggggggcagtggtggtgtgatgggggcgcagcaggagtggggcaggtgaagctggtcctgccaggtgctgccgcccttccaggtggtacttccgataggtggtgttcggctggtgacccctgcctggaggtcgaggggaagcacagcagagccagggcagggagaagcgtgtgctgcgcgcagcccaggaaggaggggcatggagcagaaagaaacacaggtgaactggaagagcagagagggttcatgcttcctgcacacatgggaccagggcatgggcctggtggggggtcagcattcctccaagccaaaaaacacaggtgtgacagccctttttctaaaacattacagaggcagcaggagcagagatggctgcagggaagtgactgttccccaaaagcaagaaactcctgttgcctcacttgtataagccaagggaacccctcgctttctgtctctggagtcactgaatatttttgtttatgtcactttatagcagtactgatgcttaggttgatctaagttcgtttttaaaacacaaaacacgtctttaagtggaatgcacagttagtatgctcctgcgaagcggcagccccgctgccctccctggctctgcggccacctgctgaggatggttcttctaggatgagtcaggagagtggagcaaggctcagcctgcaggtccttgctgagctcagggaagcagccccgtgaggatcgggctgcgtggtctgcaggggaacctgcctgggaccctgtgagatttacctgtttcaggtgccagtgatctgctgggattctggagaggtccctcaggggagcctggcacttcctacccccttgagtttgcaaagtcacaactgagggcctgggttgggacggtgtcatgagctctccataagctttgcttatggtacaggagcagactgtctggcgcttctggagacctttaacgtgctcctg

SEQ ID NO: 39590 - DNA, 1065 bp, Homo sapiens
acctctgtaacaaacacaagaaataaacagaatggtccttaacagagtttgggggagagagcaagatgggttccttggagaagctgatttgccaagatgcacatcgctattaacagccagagtcataaatgaaatgaaattgaagaattcattcaaatgctcttttccctataacctcttttctcaccaaaaaggagataaatttgaaaacagataaatgtaacaaccagtcaaagaagcaggggaaaagtaagctcctccaaagttgcttgcagtgctggaaatagatctcatttttaggttttctcttcgttccagataccaaataaatgggacagagaataaaatttttgttaaaatatgtgctcatctcctaagtagctcttcagagtctgaccgtaagtaaaaacacacagaattgtgttgactgggggaggtgaatcacaaaaaagttacgaggagtttaagagttaaatattatttgatcgtggctgtcaaatttagtgaacaacatagattggatttggagttggtagtaggtatggttctcataccagaattctcttaaaaaaaaaaaaaaggacaattggaattgccttatttatttttaaaatcaatgcttactagttggtaggattcccaggtcagcagcagggttgattaaataatcttgacaatgagcagctgccatcttgggggatttcattctgtggttttttaaatgtttcgtctttgatgctaccatccagggcttcttattgtgaccttgtagcctattttgttcctgctgttctctaacatggtgcagttcacgcagactggtttaggtacttcacaactcaccattgtctctctgaccccaagcctagtcccttttacatcaccatcttctcagacttcttgcctattcttaaaatatgttttggttaatgattgaattaggacatcagcttaagcaattcctgtaacggtttaacgttgttgaagttcaaggcacataataaaattctccctgatgtgtgtgtaagtataaacaaagtaatgtatcaaagcgttcactttata

SEQ ID NO: 39591 - DNA, 1049 bp, Homo sapiens
caccgcacccggcctatcatggaaattttaaaacattgctaacagtggagactggtgtaataaagcactgtatcttgcccagctttggcaattttaaaacgttaccagttttgtttgagcaatacctctcacgtccctccacttggattattttaaagcaaatcaagctgtcatataattttgtctgtaaatattttagtacatgtctccaaaagaaaaagaccccttaaaataattacaatactattatcttaccttaaaaattttttcttagtatcatcagatatccaatcaatactccttgactgcagtatatatttgtgtgtatgtatgtgtgtgtatgggcgtgtacgtgtgtgtgtgtgtgtttatatcatatcatatatatatatatgattgtttgaattaagatgcaaataaggtccatacattgcagttggatggtttaaagtctcttttaacctataggttctctatctttttttttctttgcaactctttattgaagaaactgaattttattctttgcatccttgtaatgtaaaatatgttattttatttcttgtgtttcctgtacattggtagttcattgtagaggctaaatcaaaagaatccaattttatttttttgtgagggcaggattattttcatcaggaagtcttctttctttctttttgtgatactagcaaccattcttgaatgttaacttggtctatgagttcaggagggattacaatatggttacatcctgtcatttagttattagctgaaataggtgtgtgtgtgtgtgtgtgtgtgtgtgtgtgtgtgtgtgtagaaattctcctttgtcaattatttggttaccttgaggtatagagtgtataggaagggtttgaaaagtgtctgattatttcccttgatttaccagttttcaaagttatgatttggtcccctagcatcctccagtggtgatggttgagggttttaaattttttcgcataacattatgaacgcctattttagcatacgtggtgtgtttcagtccattgcagttactgtcctttcga

SEQ ID NO: 39592 - DNA, 1036 bp, Homo sapiens
agtttgtaatgggcatattagatcccctgggataaagtgcttgtagagtctaatctattaatgtctggttaagtctaagaatttgatcctttaagtcaatcatggtttatgaaacattttttaagatttttatgaaagaaagctatgaagtcttacagcttttatttgtatgtttcagctattgatccagctagttactagttggaacactacattctaaagactcattcgtatctgctttccaaaactgttgctcagcaattttgaattctacttaaatgttatagagtgttgtcactaggttcagaattttttcatcctactggatgtttcttttattagtttcttgtcaaggacaaaaggaagattagtttaaacttcttgagtcagttatacctctgatttgtgtgtgtgaatgtttttcagtcccagttagggaagtcaagagttttgtgtaggaagctcttacaggaccatgttgttctcccctgcaactgtgcctttccactatctttggctattaagagtgtgtttacctccatggggaaatgcacatcattgttacgaacagctatggcaaaatggtagtgtcagagatcctcagacaacaaaccgagctgttagtgccggggcagttttaatattcatgaaaagttgatcagcagtgatgttaccataggctgagaaaatatacaggattatctttacacgtaatcagtttcttaagcttcaaatgaccctcttagccacaaaaccggaggcacaaattcagctccagtggttagaatatcaagacctatatcataagaagttaggcttctgctgtgcgcacaaaacccatcagccaaagctgacattttcggcagagttactgtttagagttgttaaataatcagagaatttaactgttaactgtatgttaacagattagagaatgccattaaaatgtgatgcctggccgtgcatggtggctcatgcctgtaatcccagcattttgggaggctgagttgggtggatcatttgaatgcaggagttg

SEQ ID NO: 39593 - DNA, 1032 bp, Homo sapiens
gagttcaagcgattattctgtctcagcctcccgagcagctgggactacaggcgcctgccaccacacccagctaatttttgtagttttagtagagactggatttcaccatgttggccaggatgatctcgatctcttgacctcgtgatctgcctgccttggcctcccaaagtgctgggattacaggcatgagccactatacctggcgccaaaatgcttttctttagagagagatatagaagcaataatgtttatgaggtgctttggaatcagctttctataaatttattgtaaaatagagaagtctcaaggttgaccatatggttcagaaatggtaggagtattgttcttaattctgagagccttgggataccacattttttcttccctttcttagctttgttttctgtgtttcgcaaatacctcttgtctccttggctgactgatggtcatataaatggaatctccttggctgtccttcacccatgtttagttggtgaagttctttctcccccacatgactgagaaaaatggcatgtgattttactaatagggaattgatctgttactctgatgtatacaagacagccaaaacttgatgtatacaaggaagcactatcaggtgagtgataccagtgatctatggaggtcagtttaagccaatgacttcccccttttaattttcatcacttattcattatttattaccaaacctttcactagattgttaatgactagcagaattggtttcgctcctttggtgttgagtggtagagtggaccccagatgagatgtcccaagaaggaggcagacaggggaggctgggcgcattcacaaattagatcacaaaagagccctgagaagttaagatttggttaattcctttctcttcattttgtgtccgcctggccttaagtactgtctgttaccacataatattattttgagaagcagattattaatattttatagcatgggtttatctaatgttattgaaagattgttaatcagctgggatgcataccttcagctact

SEQ ID NO: 39594 - DNA, 1053 bp, Homo sapiens
cctcacccccaccctgtggcctccctctgcatggatcctgtcatgtttatgaatccccctgcaggtgttgctggagggggctttctcttggcagttgtagacactgttggggaccagagcatgtaccctaaattgataaccggcagaccctgtcgagtgcatatctaatgttctttcttcccttctttctaagtagaattggaattttgtttagagagcctcttgtctcctgtgtgactctggggaaggtgatcttatccctagcactggggtaaatcctgactggtttcagctagtcacatgggtcccattctccgtaggtgatgactgtaggggtgagccagagacctagttctggtcagtgagattagtgggaggtctgtccagaggttctggaaaactcagccttacagcaacaactctaagaatggtggccttttcttcctctgaaagttgtcatgtctgggtgtggtgcctggaactgttacaattgttttgctactggtctgagcatgaagccaacatcaggttaaggactgagccaagccaacagcagagagaactctgcagagccccagtgcaccatgcttggcacccactaaccttggacttgttctgtgaaataaattttcttattgtttacaccaatttaagttagggttatctgttatttgcaaccgaagatgtgctaactgatgcaatagctgtcattctttccctcattgcatgaagaagtacagggtataaaggcagaattgatctagtcagaaggtcagaggtggcttccctggggaaatgcagaggccttggtgggagagatcccttttcttgctgggcctcgtgtgccacatttaaggattttggtctttatcgcaagagcagagcctgttataggtttaagtactgggctatggcatgaatgcagtgaactcttactatttaaagtaactctctagttacttaagctactcctcctgaagaacaccttggcttaacattccagagttgagtttgatttgctgagcaggcaaggagcagtcagtggttaaggct

SEQ ID NO: 39595 - DNA, 1031 bp, Homo sapiens
ccacgggagcaggttccaaggggtggctgatctctttttggctctaggactctgctgggttcagtcaaccacctgtaggtttctatcttgcctctttcaaaacaatcagcggaaaggactgtagaaccctctattagtcaggggattcttggttactggtgaaagagacctaactcaactaacacaaaaaaagggaattcgttggaaggattctgggctgtctacggaatccaggtcaggagccagggattgggctaggatgctgcatggatggggccaggaggacactctttctttctctcttttgtcttctgcctcttttccagctgtccactccctcagtgtttctgagttattccttttctgtcatggaccagcagtctctgctgtttggtccaggtggcacaacatggctgccagccccatgtttttcatattatgacccaggtgtccagagagagactattttctttgtgttccagaatttccagggaagagctgatgagttggtgtagaaaatagtgacttccatggtaatggtgggaggatggaagccattaaggaagtcgttgaggttcagcagaaggtccgtccttgctgcagtttataaaaatgttagagacaccactccaacagttaacaaataggaaaggacctgggctgtgaaagctctgaagccttgcattaaaatttaaagcaaaacaaaacaatcaaataaaaaactaaattaaaacaaaatgccgccatcaccagtgctaacaaaaaatccttcaagattgaaaatttgaacctgctgaacaaattcggaagctgctttttgtaaaatcaaatttcttttttagtaaaataaattatagcttattttcacgtcagcattatttgagcttagagaaattgtggccaaagtttaaccaagcagggtagcttgacatgggatatatatacctgaaaaaacaggataaatataaatattctaaatttgccaggtatagtggctcatgcctgtaatcccagcactttgggaggctgag

SEQ ID NO: 39596 - DNA, 1049 bp, Homo sapiens
agggagaccctgtctcaacaacaacaacaacagcaacaacaggctgggcgcggtggctcatgcctgtaatcacagcactttgggaggcctaggcgggcggatcacctgaggtcaggagttagagaccagcctggccaacatggtgaaatctcgtctctactaaaaatacaaaaattacctgggcgtggtggcaggtgcctgtattcccagctactggggaggctgagacaggagaattgtttgaatccaggaggcagagcttgcagtgagccaagattgcaccactgcactccagcctgggggatagagtgagactctgtctcaaaaacaaaaaaacaaaacaaaaagccagaataaagaaaaaacttaacaaaattttactcatgaagtaaaagacaaaaacttcagtgaaatttatgcagcctgtggggttgggcaggcgcagaggaagtgcggccttaacagaatcacgttcaggaaaagcgcaggagcccattcagaggtttttacgggctctgaggtggtgagggcagtggcgtgtgtcgttgcttaaatgaacttcaatttgaagaaagattgctctgatatttctgggaattagtgccatttgagaatttcggaatttatacgtatgttggtttgtcatcttcataccaaaatctactttatttgcacatcagtcataaaggtgttttacccatttggcttatttgtgtgtttaaaattaaaactcaagccattttccctctccagaaaatgtgacttgtgtagtatgacatcttactggagttgggggaaggcttggtgggcacctgaataaacatcgatctggggaagatgcacctggagggctgcctggacaagtccctgacgctactagattgcctactttcaaaggactaggaaacattttttcagctttaaaagatttaaaagccggtgatatttcagaatagtgctgaaagagccctgctgttgaatgaacattgggagcaccgcatgtgggttgtggcaaaccctttatcccatgaggccctctcttctccatg

SEQ ID NO: 39597 - DNA, 2043 bp, Homo sapiens
agcattctcttgaattctttcctcataggcacttttttccaaaaagttctaagcaacattttaaacactgttggaagcttttaaaatttaacatagcataagcatttttcatgttttaaagtggttttcataattatacttctttttgaaaaattttttattgtgataaaatttactttttttatggagacagggtctcactcttatccaggccggagggcggtgatgcagtcacgactcactgcagccttgacgtcccgggttccagcgaatctcatgcctcagccttcccagtagctgggactacaggcacgtgccaccacgcccagctaatttttgtattttttgtagagacatggtttcaccttgttcccaggctggtttcgaactcctgggctctagcaatctgcccatcttggcctcccaaaatgctgggattataggtgtgagccactgtgcccagctaaaatgtaccattttaaccattttaaagtatatagttggctctacatatccgcaggttctgcatgtgaggactgaaaacgttcaaagaaaaaaaatacaacaaaaatatagtagaacaatagcatttacgttgtattaggtaatataaataatctagagatgatgtatatgagggatgcatatgggttatgtgcaaataatatgccattttatatgagagacttgaacatttaaggatttttttatctacatgggtcctagaaccaacccccatcgatattgagggacaacggtataattcagtggcattaagtacgttcctgttggtgtacagccatcatcgctatccatctccagaacttttgttcatcttcccaaactgaaactctgtgcccatcaaacacttcccttttaccccttccccagcctctgataaccaccattctatttctgtgtctataaatttgactactctagatacctcatattagtggaatcataaaatatttgtctttttatatctggcttatttcacttagcatgatgttctgaaggttcatccatgttgtagcatgtgtcagaatgtccttccctttcaaggctgaatgatatttcattgtatgtcaatacacattttgttaacccattcatctgggtttttttctttctataatccaggacagtgctgaaacccattcatctgttgatggacaccgggtaattaaactttttgaagacataataggccatcaagtagataaatcatactagaagatgcaatttttgccctcaaagaatactgaagttgatatgccaacatgtcaaacacagaagatgaaagcaactaagtgatgtgagaagtcagtgtgggttcatacagagtaaccaaaggaggttgtccttgcctttcatctagttgttagactgagggagggtaggacctgggaggattccagaagaaggtcttcagtttgatttctgaccctcccacttctgttgctctgttaggcctctgtgtacagttagcagccatctcatagtaaatcttccaaataattaggagggtcactgctttgtcaggacaatttataccctttctcaattagcaaattgtgtggcaatccaaagttaactggagtgttgctccccttttctattttgctcccgtgtggatgtggtgcaagaaggcctgccaaggtcagcctcccgttttcctccgtgggttggtatagacatgtttgttggccagacattgcctaaagccctgtagtcaagggtggtgtgcttgcatttgcctggctgaattaaggctcttggtgcttttctatcagtcgaatcccttctcctccatgtcttctagaaattgagaagggtttatcagtggtacctcactctgttttccacaggtttttaaaatttttttttgttcttttacatttgtttgatcttttcttttcttttcttttctttttcttttttctttttttttttttttttgagacgtacttttgctcttgttgcccaggctggattgcagtggtgcgatcctggctcaccacaacctctgcctcctgggtt

SEQ ID NO: 39598 - DNA, 1026 bp, Homo sapiens
tctttcttcctcccttcctgccccaatggctatgatcttattactagccaagaattgttgttcagtacaagataatggtattaatagctcgtatttgttttttatgcttaatgtgagctgaatgagggagaggctggagctgaagaagaggatctggcagtgagtgctgtggaacctcagcatcccaggccagccaaggcagaggaacaagcagaggagacagaaagaatcacaagggaggaggaaactatcaggaagttcctttagagagcttacaattaactcactgaaatccctccacagctgcctgagataggttttgtcatacctccattttacagttggggaaactgagaccttgagtagttaagtagcatagctctaatgcaggaagtagtcattgacagacccaagatttgaagtgaggctgtcagcctcctgagttccccttcttaatcactactgctttccaagtttctagagtgtttcagtcaaaaacaaatgtgacagttaggtttgtgtaactttactatagtagatgtgtagttctcaatacatactttatcttagctagaaggctaaggaaacgatcaatatgtgttttaaatattgaaaaagagcttatggactttgattattgggtttgtagatgcatagagatctcatgacctggctttgggaatctggtccgatcttgtcattttgcctttggcgaaagtgaaggcccttgttgagggacctacccgacacttcactggagcttgagcctgggtctcttgagtccaaggacagagtttttcccattgtactatgatgtccttggaatgtgtgttcttcacacagacagtgttgccagtgaaagttagggaaagtcaaaatgggtaagatgctaaaagaacagataagcttcaggagccacatccaatgtcttcattgaactggacctttctgcaggccctctctttgctcaggtgttgagactcccctctctgttggtttcctcctccctgttcattcttccttctc

SEQ ID NO: 39599 - DNA, 1024 bp, Homo sapiens
caagtgctgggattacaggcctgagccaccatgcccggctaacaggatttttttgacttgagaataagcaggcagctatgtgtagttgctggaattcgttttgttataaggacacgactactgtagcaatggtctcacctgatttcttggattgggtacatcttctccgatatgctttctctgaccctgccccttgtccctgttgtacacttaacagacttctctggttgcgctgatcatgctttattatagttatctgcttgcctcgtttggtaaaacttattggaagatcaatgtaccctgtcattcttaacttcctcacctctcattgtttagaatatcaattatttatttattttttaaaaaaattttctttaactttttggcccacttcagtgtgctttctttccttattctactgaaatgaactcctcaatgaccacacattgctaaactcataggtttttggtgttttgtttttgtttttaaactgcacttgatgtctcagtagcatcagtagaattgaaatgttgtccaggacaccaggctctcctggttttcctgttactgttctggcctctgctttccgcctttctttgctggctctgccttttttttgcctcatctttaaatgttaacgggcaccaggcatgcatatttttctgtatttcctctctatgttggctttaaatctccctacatgctatgactccagatacctctctctgtctgccatctccttctagttccagacttcattctccaacttgatatatgagatacaaaagtggacaccagtcaggcctcgcagactatcggtcacccagacagaactcatttccccccgccccttgaacctcagatcagttccatgcactgtttccccattttagtagatggcccaagaccagccagtcagttcagctctcaactcaggaatctccctgcgcttcccttgtccccaagtcttgttattagcaagacctcccactgtatctgacttccagataatatctgaaacgtg

SEQ ID NO: 39600 - DNA, 1139 bp, Homo sapiens
ggtatataagtgatgaaatagtaaagtactctataccctttgtacttaaagtaatatacttaagtatattactttccagtccttacaataccacttagtacctggaaattcagttactgttctgactcatgaggttagaaacagtgtttgttgatttttgttcctcagtttagatttgaaaacacatgcattaatttttagcaggtatttactgcatctctgttgtgtgccaggtgctgcgtgtatttgccactgtcggggggcaagagaagtcccagcttatacctcatggaatctacagtctagcatgagggtgaaacgtggacttcgccttcctctatttgcatttccattaggaagagaaagcaagctttcaattgttcaaagaatgaagaatgaggcttcctagagattgtgtggtgaagatgatctttgagcagggccttgagaaatacttaggatttagcacgtttagcgcgtgcttttctcagtggtgcaagaagattaagccacattctggctttagagaggcatttctgagagagatgaaggacacttcgttccccagccccaacctaagcatgtgactgtactcaccttgtcagatgctgttggaacctggctgacaaggacaaggacctatgcattttttcctgccctggaacaaaattgcccttgttggacaggcagtgatgttctgtgcgccttttgactatactgtgaaatgtttgtggtttgtaatggggattttatccatctgagcatgctacactttttattagtttccatggcagatggttaaactagggtgctgccttaataatttgacttatgcaggtgctcagatatgactgtttctgtgcttaatgtattcagcatgtggttgtagtcgtttgaaaagttacataatcatgtgttcatgacctgagttagagataatttattagtgactcagcattaatgactcattttatgcaactcttctggtaaagcaacgtttctgttcatgtgagcatattgtagcatgctaggtgaccacatctaccttgtttccttcctaggtagtacctttaggtattccattacaggagggctgccccactcccggaggtgcattgaatacagagagggcatagttg

SEQ ID NO: 39601 - DNA, 1648 bp, Homo sapiens
ccacgcctggctaattttttgtatttttagtagagacgggatttcaccgtgttagccaggatggtctcaatctcctgacctcgtgatccgcccgcctcggcctcccaaagtactggggttcaggcgtgagccaccgcgcccagccgaggaacagctcttcttttaaatgtcttaggaattcttattttgaataaggaacctttctagcaaagaggcagaaatgaaacttttgttttatatttaggtcagaatttcatttcacctaaactggcttatctatttttataccaaagctcagtagtgtgagttaattttttatcactgtaatagttatacatattggtaaatgctaagaatgaaaaatagcaatgttctaactcctgtctccccccctccccccacctgttgtcctggccacttaacaaaggctcatactattatttttttgatgaatcaattttaggattttgtctattgacttcattcccatctcgttaggctgagatttagcactcttctctttctttcatagtcactcaacccagctttgccctatcatctaatcattccagtattactgtatcacaaatattggttattattcagtgtttacactgtttaaactatgtcactgttattcccagatgagccaagtagggtactatgattgtattccttcattatttaactcttttctcctcatgataaaaatttcccccccagtggtttagtttatctattgcaaaaccttcctacatcttcagcataatttcatacattcaaaccaattagatggtttatcagttcatttttttgttttgttttgtttttgtttttttcctgaacacctccatctgagagtcctttgtcatccttctgctctctggattggttgctcagtgggcctgctgcccaggtgatttcctgaacttccttttaatcatcatcttgggaattctctttgccccctatttattccacgtgtcgtttatggaatcttgtatttttttggttaaactcctttttgttggaacataatctccagtatcttcctaagaaagtatttgtaagtcataaagtataagacttttaatctctgtaaatgtcttaattgctttcacacttgatagtttggctgggtacagatttctaggtagttttcttcagaattttgtcttcacatttccagagtttttagaagcatagtagttaagagctcaggccccggagctagactcagtttacgttctagctccatcacttagtaatgccatgactttaaatatattatctaatttatctttatagttgtcccttgactatcatggtttgaactttgtggatccacttatatgtggaattttttcaatcaaatacggatcaaaaatacagtatttctgggatgcaaaatccatgtttatatggagaggattatacacaaaatcaacgtttgtatgcttaagttcttgtgggctgactgcgggatttgagtatgtgagaatttgggtatacgtgcacagtcctgcaaccatcccccttgtgtaccagactgtactatgattttctcatttgtgaaatggatttataaataatactttcctcatatgggatttgttgtaaggattcagtggttactatagccatttag

SEQ ID NO: 39602 - DNA, 1722 bp, Homo sapiens
gcttttgagataggtcttgattgacaaatattctctctggctctgggaaatgttgcctcactttgttttcagaactcccttcctgtgagtctctgatgacagctcttctcatgcaggtataagccctcctgagcgggcaggcattccctgtgcttgcatgtaagactgagtcttacacttgggaaaaagtcttgcacttgggaaaaagaaaaaaacacattggtgtgccagatatcaggggaacctgcccccagtaattcaacgtgagtccttttctattttccctaagtgtcggccagtctgagaaataaaggaaaagagtacaaaagagagaaattttaaagctggtgtcctgggggagacatcacatgtcggcaggttctgtgatgcccccgagccgtaaaaccagcaagtttttattagcagttttcaaaggggagggtgttacgaatagggtgtgggtcacagagatcacatgcttcaagggcgacaaaagatcacaaggcagaaggtcagggcgggatcacaaggtcagggcgaaactagaaccactaaagaacttctgtgtcccgctgtgcacacattgtcagcgttcaagagcagagaaccggtctgactagaattcgccaggctggaatttcctaatcctagcaagcctgggggtgctgcaggagactaggatgtgcttcatccctatctacatctgcataaggcagacactcctagggtggccattttagaggccccaccctgggaatgcattcttttcccagggctgttaattattaatattccttactggggaaagaattcagcaatatttctcttacccatttttggtaataagagaaatatggctctgtcctgtgcggcccacaggcagccaaactttaaggttatctcccttgttccctgaaaatcactgttatcctgttcttaaggtgcccagatttcatattgttcaaacacacatgctctacaaacaatttgtgcagttaacacaatcatcacagggccctgaagctacatacatcctcagcttacaaagatgacaggattaagagattaaagacaggcataggaaatcacaagaatattgattggagaagtgataaatgtccatgaaatcttcacaatttatattcttctgccatggcttcagctggtccctctgttcggggtccctgagttcccgcaacaggccgtggagctcaggataccttaattgtattggccaggtgagcttagttgatgtggatctgctcgtgcaaggtgagttgaccttactgtaggcagtaggacatgttcagagatctgtaatttcatttggtggaatgtacagtaaccttgataatttggtgactagagaaaaatgggttttttggggggaaagaagtgtatcagaattgttttataactaattagccattaaaatgaacctgaaatagtagtatagacatgcaaattgtaggaccactcctaagtgttgagtataatcatatttattgaattaagtcctcattaatttagctttattttcttatgtttgttcctgagtgtgcctaagtgagtctttccctcctgccctgacgctgcttgggccctcctctgtgtgcacacagggtgagcgtgtgtgggtgtgcatatctcgtcagctgatattatccctctggaggaaaggggtggttccacagagttgaccgtactgctcccaaaccaggc

SEQ ID NO: 39603 - DNA, 1034 bp, Homo sapiens
aacataatgtcctccagttccatccatgttgttgtaaatgacaggagttcacttttttttatggctgaataatattcccatgtgtgtatatgccacacttttctttatccatttaactcttgatggacacaggttaattccatatcttggttatttgactggtgctacagtaaacatgggagtacagataactctttgacaaactgatttcctttgttttggatatttacctagcaatagggttgctggattgtatggtagttctatttttagttttatgaagattctccatactaaacgttccgtccaacaatatatgagggttcccttttctccacattcttgccagcatctgttattgcctttcttcttggaaaaagctgttttaactggggtgagatggtatcccattgtagttttgatttgcatgtctctgattagtgatgttgggcatttttttttcatatacctgatggccatttgtatgtcttcttccaataaatgtctgttcagatcttttgccaatattttaattgtattatttattttttcctattgagttgtttgaatttcttatatattctgtttattaatcccttgtcagatgggtggtttgcaaatactttctcccattctgtgagttgtcttttccctttgtttattgtgtcctttgcagtgcagaagctttttagcttgatgtgattccccgccgcctctgagctggagtcttgctctgtcgcccaggctggagtgcagtggtgcaatctcagctcactgcaacctctgtctcctgggtttaagcaattctcctgcctcagcctcctgagtagctaggattacaaggatgtgccaccacacctactaatttttgtattcttagtagaaacagtgtttcaccatgttggccaggctggtcttgaactcttgacctcatgatccgcccatgtcggcctcccaaagtgctgggattacaggcgtgagccactgcgcccagcccagcttggtgtgatcttatttgtccacttttgctttgg

SEQ ID NO: 39604 - DNA, 1482 bp, Homo sapiens
accagcaagttttattaaggatttcaaaaggggagtgggtgtaagaacagggagtaggtcacaaagatcacatacttcaaagggcaaaaaacagaactactgataagagtccaacaaagatggcaaggcaaagggcaaaagcagaattactgataagaatgtattttcagcggtgcacgtattgtcttgataaacatcttaacagaaagcagggttcaagagcagagaagtggtctgacctcaaatttaccagggcagggtttttccctaccctagtaagcctgagggtactgcaggagaccagggcttatttcagtccttatgtcaaccgcgtaagacagacactcccaaagcagacgtttatagatctgcccccaggaatgcaatccttttcccagagtattaataacaatattccttgctaggaaaagaatttagtgatatcttccctactggcacgtccgtttataggctctcttcaagaagaaaaatatggctccttttgcccgaccccacaggcagtcagatcttatggttgtcttcccttgttccctaaaaattgctgttattctgttctttttcaaggtgcactgatttcatattgttcaaacacatatgttttacaatcaatttgtacagttaacacagttatcacagggtcctgaggtgacgtacatcctcagcttacgaagataacaggattaagagattaaagtaagacaggcataagaaattatgaaagtattatttgggaagtgataaatgtccatgaagtcttcacaatttatgttcctctgccacagctccagccggtccctccctttggggtccctgacttcctgcaatagactaccaaagtgttaggattacaggcatgagccactgcacctcatctgaacataactctcgtatgcactaggaaaccaaaaaatggtgtgactcgatttattttgatctttgctttattatagtgatctagaaccaaacctgcagtatctacaagttatgctgatatatggattattcctatcacttttgtttggcttatcaaataaaaaaagcatctgtaactttatacttgggtttcttttagcaccaaaaagttcagtgttttgggttctaaagattcatttaggcagagtatttaatgatttaagactggtgtagattgaagcttttgctgaaatgaaacccctttagccactcttcctttcctttcttccttcttgaaggtttacatttttctcctttcctcatgacttgatgatgattctgtaattgtctgatctgctacttgctaatttggcattaaatttcaagttaatatgtgtgtgcatcttttttgcccctcaaaatttggatgaaagatgtgaccatagctgcagcagacatgaaaggtgaagttcctcctgcaatcccagaatgtggaaatggtagggagggttttttccctggcaaatcacttttgttgtgcttttttct

SEQ ID NO: 39605 - DNA, 1023 bp, Homo sapiens
actgctaagcctggtctaagctcatcccttgtttggattagtgcactgacatacttggttaccaggcttctcttctggacttttcttttagtccacataacggccaaaatagtatttacaagcatccagagaccaatctaccctctgacttgcttagccctctactggccccttgactcattactgtgctgtcaggccctcttcatcgcttgtgcctctgacttcatctcctgccatctctttgaggtaaagtcttcctgcctgctgaccttcctgaagtgagccaagcttgctcctaggggcctaggcccttagtgccagctgtctcccctgcctgggtggtgccttcttgacacttagattctactgtgtttaaggtgacttcctccggccttccctgactgcatcacaagttatcccttctccaccttttttatcactattagatttttttttctgaaataacacttggattattttacttctttgatttaagaatctataaggtagaatgtttttggatgagaaaaaaaaagaatctgtaagtgttttctaaattgcatatttcatcaaatgaaaactctccaacctgggttttttttttcttgatctttatttctcatttgaacatttatgttttagagaaaatacttagagtccctttccttgctgagattctgtatttctagcaattgatcacttaaacaacgtaaaccttaatagataaatgccataaatccactggccctgtgcattattttatgttttggtcttttttttttttttaaggtttttttttttttttagtatttattgatcattcttgggtgtttctcggagagggggatgtggcagggtcataggataatagtggagagaaggtcagcagataaacacgtgaacaaaagtctctggttttcctaggcagaggtccctgcggccttccacagtgtttgtgtccctgggtacttgagattagggagtggtgatgactcttaatgagcatgctgccttcaagcatct

SEQ ID NO: 39606 - DNA, 1043 bp, Homo sapiens
cagtggttgctgtggtcatcggccccagagtcttcggggagcaattttgttgacacaggagatgttctcatctagcatgtgtcctcacctgaaggcccatcaggattcttagctggcaccgtttcctgaggagtgcctttggaaggaatcttcagagtaattgtgtgaccactggtaaccttagggaattttactagaggattgtgtctttattttccctagtatttgtacttctccttggaggaaggtatttaataattttggttgacggaaaaacaaaggagtgaactaataaggatagaagctaatatatgaatagcctttatgtgttttatgtttttttaagttgatctctaaggcatttggagagcatccagctacatgatgtcattaccgaacaagtgaagccatggggcatacattctgtcgtactcacaggctggcattttccattatgttaccacatttgtcgactggtgtcaccaagaacaaatgcaaacatctgtcttcttgtagatgtggaatatttgtaataggcatacttaacacggtatcagctttttcttgtttcattgctttagggaaaaaaatgtattgagatggcttgctgacagatgtgaataaagaataaaatgtttgcccttggctgggcatggtggctcatgcctgtagtcccagcactttaggaggccaaggcgggaggatcacttaaggtcagggatttgagtctagtctgggcaacgtagcaagaccccatctctaaaaaacaacattggctgggtacagtggtgcacacctatagtcctggctgctcaggaagctgaggcgggatgattgcttgggcccaggagttctaggttacagtgagctataactgcgccactgtactccagtctaggtgacagagcaagaccccatctcaaaaaaaaaaaaaaaaccagaaagccctcaagatgctcatttgctcattgtcaagtataaataattgccatacaggaaaataatagttgggtacagttgtgtacgtggtgtgagaaattctg

SEQ ID NO: 39607 - DNA, 1034 bp, Homo sapiens
ctcgagtgcacatgtcagtgtctgcccaagaggctgtattcttatatgtcatatgctttaagaatcagtcttcaagttgatactatttttctaagtgatttggaagattgaattgaaagaccattgttggaaggcaatggcagcaagtagaatgtggcatttatgaagaattgggttccgttaaaaaatgagtgtagcaaaaaccagacagtcaggtaaaaggggaagaaaaatctgttaatgtttatttggcaggtaattgttgctgagatgtttacttaatgttggaagacatggaagatggtaagaataatcccacaggctctgagcaggtggaataggctgtatgcaagtaagaagccctgagcaagtgaaaccctacccaataaagaggtctagcaaaaagtacagttcatgctctgtcatgtataatgcatgtgcctatcagaaaatagcctgttactacagttatgccaccattagcataaatgccaccattagcagaattacattttaatgtaattattgatatagttgaacttaggtctccaattttgctatttgttttctgtttatctccttattttgttattcctgatcctcctttcctgccttctttagtgctaaccaatttttttccatgtatctttctgtttttagttttatttcttttttaaagtgattgctctaaagattgtaacattcatcttggatttatcacaatatacttaaagttgatgtagaattgcttctgtggtgatacaggaagcttgcaacagtgtacttccatctgtccagtcctttgagctgtccttgtcaggttcagcctctgcctgtgattgggacccctggtgggttttgagcagagtgatatcaggagcagctattgctgttagctgttcctgttagcagtacctccagacccactgattattctaatagagcagtattcaattctagtttttagcaagtttttaaaaactttgagtgcatggttttcactgtttaaaaatagcaatgtgttgtcccttata

SEQ ID NO: 39608 - DNA, 1050 bp, Homo sapiens
ccaagtggataatgagctgtgtcctctttgcttttttgccatttgccatgctcctccaagcagcagcgagggtgagaaaactttggagtccagcagactggggattgaatccttggcttgcctatttgctagttcattttggtgaaattaccttcaatcactgagtcaggttctcacctttgaaaggatggtgattaatagataaggttgacctcacaggtgtgtagtaaggatgaaatgagataccttaaatcatgtgtctttaaatgaggtactttaaataactcaggggatgagccacttagtaagcctggagaaatggtaatttcctgtctcagctttggtaatctctttgtaagccatgagacttgtagatagttaactctggcatttatttgagaaatttagttgtcattacagcaagggttgacatattaattagagcaatgcccttttcacataactgagtcaaatatcataataaatgccattaatcttggaaagtcgaaaaggagatcctgagaggcgaattagtgctgtgccaaaaatggaatgagaactcaggttcaaggatcaaggtcgcagccaatttagccgtgggtcataagaagcatttgctggagcagtctgacaaattttgttgaacctggcaccagaatgcaacccctcttgccttagaccattctgctgtgcatcctcctcaaagtcccatggccattaagatgcggggcctggacttgaaattcagccttttgacttcagactggggtgcttctcactactgtatgcctccctgctctcacaaagctccacctgcccagtacacattcctagaggtgtcaaggggtgaggagagtaatagttggtaaatgttatgaaatcttacattcagtttctctgctgtaacatgggatgattatatctacttctatggtactgttgtgagaattataatgcaatgataaaagtaaaagtggcacacacaacaattagtgtcacccattttttagctaatactatcaaggtatggatttacatcattcgagttga

SEQ ID NO: 39609 - DNA, 1060 bp, Homo sapiens
actccagcctgggtgacagagtgagactctgtctgtatttaaaaaaaaaaaaaaaatcaacaacaagtgagttacttccaagatacagtgggggtacatttattgggtaaatgctcttgatccaaatgggaaaaattggccaaaacaaaggggctacaggccccatgcaagactgaaacccagcagaacagccattaaatcttaaagctccaaaataatctcctttgactccatgtctcatatccagggcatgctgatgcaagaggtgggctcccaaggctttgggcaggtctgcccctgtggctctgtagggtacagcccccatggctgctttcatggactggtgttgagtgtctgtggctttttcaggtacatggtacaagctgtcggtggacctaccattctggggtctagaggatggtggccctcttctcacagcttcaccaggcagtgccccagtggggactctgtgtgggctccaaccccacatttcccctcacattgccttagtaaaggttctccataagggctccactcctgcagcagacttctccctggacatccaggcatttccatacatcctctgaaatctaggcagaggtttccagacctcaactattgccttctgtgcacccataggcccaacatcatatagaagctactgaggctttgggcttgttccctctgaagcaacagcctgagctgtaccttggccccttttagctacaactggagctagagcggctgggacacagggtgccatgtcgtaaggctgcacagagcagcagggaccctgggcccagcccactaattcattttttcttcctaggcctccagagctgtgataggacgggctgcagggaaaatatctgaaatgacctggagacattttccccatcgtcttggcgattaacattcagctcctctttacttatgcaaatttctatagctggcagcttgaatttctccccagaaaatgggtttttcctttctaccacatggccagactgcaatttttccaaacttttatgctctgcttcccttttaaacataagttcca

SEQ ID NO: 39610 - DNA, 1023 bp, Homo sapiens
gccccactcctggtaccgattttctgtattacttccattgttatactgctataaagaactacctgcatggctgggcgcggtggctcacacctgtaatcccagcactttggaaggctgaggcgggcagatcacgaagtcaggagatcgagaccatcctggctaacatggtgaaaccctgtctctactaaaaatacaaaaaaaaaattagccggacgtggtggcgggcgcctgtagtcccagctgcttgggaggctgaggcaggagaatggcgtgaacccgggaggcggagcttgcagtgaacccagattgtgctactgcactccagcctgggcaactgagcaaggctctgtctcaaaaaaaaaaaaaaaaaaaaaaaaaaaaggaactacctgaggcagggtaatttatgaagaaaagagatttaattgcctcacaattccacaggcttaataggaaggatgactgggaggcctcaggatacttgaaatcatgcagttggaaggcaaaggggaaggaaggttcttcacatggtggtagaagagagagacccaagcaggaagtgccacacacttttaaatcatcagatctcgtgagaactcactgtcatgggaacagcaagagggaaatccgcccccatgatccagtcacctcccaccaggtccctcctccaatttgacatgagatttgggcggggacacaaatccaaatcatatcaggggattacatttcatcatgagttttggaggggacaaatattcaaaccataccatcccatgtttccctgggttgatctgtaaaatttcagcagtgattccagtggctcactccttggaacagtcactgtcagtagaagtatggaagacctggccgggcacggtggctcatgcctgtaatcccagcactttgggaggctgaggcaggcggatcacctaaggtcgggagtttgagaccagcctgaccagcatggagaaaccccatctctactaaaaatacaaaaattagctgggcatggtggtacttgcc

SEQ ID NO: 39611 - DNA, 1032 bp, Homo sapiens
atccaggcacaggataccatcacacttctcctttcctgtcaggttagatgtttttagctaattggccttgtccaatagagtatgcgtggagaccttgtaaatctctgcctgagtgtccattctccctcttcctggtactgcagaagaggtactagagcaagtctgtccaacctgtgggcctcatgcagcccaacacaaattcgtaaactttcttaaaacattgagttttttttgcaattttttttttttaggtcatcagctattgttaggtgttttgtttgtttgtttgtttgttttttgtcatcagctattgtttttgatgtgtggcccaagacaattcttcttccagtgtggcccagggaaaccaaaagattggacacccctgtactaaaggctctcccactcatgtgcctgagtgaagatagtgtagaacagagcctcagccggcccacgtggccgtgaagcatgattaaaaaataagccttggctattttaagccagtgagatctggggcattgtttgtcattgcagcaaaacatagcctcttcgtgattgatagtggtgtcatcctttagcctcaaccctgcaaaaccaatttacctgttcctggggctggtatgagttacaggtgagctgggccaaggtgaaattctgatgtagcttctgtagattggcaatcttaagctcctacctaattgaaaatagtaggtttattttggtatataaaatatattaatggcctcctattttttcatatattatggaaatttgaaagtaaaaaggctgaaaacaggatagatacagatgttttgtaaggcagtgaggacagcaccataaaacaataggtctgtgctgggcctttctcccatagacactagcagtgcagggctgatgcctcaggtacctggtgcccccagcataccagccataggccttttgcctctttcagcgggtactgtggctgatacttttggaacccacagtcattagtctatctgtgtactataaatcccctagtacatacaaggtgtg

SEQ ID NO: 39612 - DNA, 1122 bp, Homo sapiens
agaatccattctgggagtagaaaaaatgtcacctctgccattttcttgtttttgcttatgcttaatttgttttattttcactctttggttttttggcagtgatgttttaaaactacttgttcatttcctgcagttagttgagctagattcacaactcagacgcacacctacctgggtggatgtgtgcaacagagctcagtaagctagccgaggtgtgtgttatagatggtgcctggcccctgtgtacctgcctgaggtagggaaaccaaacattatacagtacaatgtactgtataatgtgaaagaatgatatttcagttcttagcagagaaccgttgatacaggtgttctaggctatgtactcaagtaagtaagcagaaaatagcttttctggattaagaagataaaacctgcaggtatttccaggttggccgccttttatgtttgtttgggttttttgttgttgttgttgttgttgttgttgttgttgttttgttgttttgagacaggttctcttgtacctgggctgtagtgaagtggcatgatcacggctcactgcagcctggacatcatgagctcaagtcatcctcccacctcagcctcccaagtagctgggattacaggcacgcaccaccatgcccaactaattttggtattttttgtagagacggggtttcaccgtgttgcccaggctggtctcgaactcctgggctcaagcgagctgtcagcctcggcctcccaaagtggtagaattacaggcatgagccaccgcacctggccagccctcttttatgaagctgtttttccctggcaactaacaagaactgtataaaacatagtgcatatgtgtgcacgcagtttgcttttatctgtggaacatattgtgtgtcagaagtgtgaagtgacccacaactcaagaagtaaaatgtgaatgttagacaatagttagtgatgaaaaatggagttgtgccgagcctctttcatctggaagcactgcagaaaacccgtgcagagtcaagctgtgggcccagggtgtggtcaagccgttctaagcatgtggcaggtagagtcagctctggacatgaaggagctcatctccgtctgtagtgcatctgagcactg

SEQ ID NO: 39613 - DNA, 1058 bp, Homo sapiens
gaggcacggcggtccccagattccagggctttgaccacagatctgttttctgagttcctgtattatctctaggccatttcattcacagattcttgccaaccaactgagattaactgaattgtgtttgaatgagaactggatttgtgaacattcaaatgacagaaataaatttggctatctgaaagtaaaatctaaagttttcttcacatgtagttagtgtttcagagggcttaagagaaactcagtaatagtaaagactacccaactaaaaatgggcaaagaatctgaatagacatttctcaaaaaacacacaaatggccaccaagcacatgagaagatgctccgcatcattaaccatcagggaaacacaaatcaaactgctgcacactcaccagggtggctgtcattttttagaagacaggcaatagcaagtattagaatttggagaaactgggaacctcagccattgctagtggggatgtaagttggtgcatcattttggaaaccagtcctgtagttcctcaaaaagttgaacatagaattatcatttgacccagcaactccactcctaggtatagacccaagaaaaatgaaacatgtttatacaaaaaaaaaacttgcacacaaaagttcatagcagtattcataatagctaaaagttgatgaacagatcaacaaaatgtggtctctcaatacaatggaatgttactgggctatatttaaaaggtaaacactgatacatggtacaacatggataaaccctgaaaacatgctaagagaaggaagccggtcacaaaagagaacatatcgtatgattccttttatatgaaatgtccagagtaggcaaatctgtaacaacagagaattggttgcttagggctggagggaaatattgtggggttggttggtggtagctaaaaagtacagggctttgagggttgaggtagatgttctaaaacatattgtaaaggttgtacaactctgtgaatatactaataaccattgcattgtacactgacaatgggtgaattacatatgtgaattttgtcccaataaag

SEQ ID NO: 39614 - DNA, 1055 bp, Homo sapiens
accatgccattgtcatgatagagacattgctgataacacaacataaacccataacccctacttgaaaaacagcaagaagttcatgttcttttggtgtttgttcatttattttctcattacctgaaatgtaatatatccattaataccatagattttttaaaaagctaaatgtttgtagctataagcaacattgaagattatagatagcatttgttttgttagataagattaaaaagaaacacaatgtaggacaaattgaaaaagtaaaccaaggtggtagaaaacaggaacaaatataatgctaattagaataaatgtaaatggattaaatttaccaatcaaaagatacagcttagcagattacatttgtaaaaatctagataacagtatatcttgtttagagccacacctcaaacttaaggacataaacacatttaaaggatgagaaagatgtatcttgcaaataccaagaaaaaaaataaagctgatgtagctgtatgttagtatcagataaagtagatttgaagacaaagtattatttggttcgtagaagacagaaaggattatttggtaagctgtagtttaccaagagcatattttaaatatgtatacacttattaatagcatcacaataagtgaaggaaactaatagaactgaaaggaaaaattgataaatccattgacatactcagacattttaacgacagtcagcaaagatgtagatgatctgagcaacacaattaacaagcttgacctaaaggacatttataggttcttaattcaccaattagacaacatacttttttctcaaacacagaagggttataaaaattgatcatattctagggcaggattctgcaaaccttttctgtgaagggtcagatagtaaatattttaggttttgtggacaaggagccaaaattgaggatattatataggtatcatataacaagaggaaaatcagatttccaaaagatttttattgacaaaatttaaaatttgatttatgaacactgaaatttgaattttatgtaatttcaaataacaaaatatca

SEQ ID NO: 39615 - DNA, 1162 bp, Homo sapiens
ttgggctcttttttggttccatatgaatttaaaaatagtttttttctggttctatgaagaatgtcattggtagtttgataggaatagcattacatctgtaaactgttttgggtagtatggcccttttagtgatattgattcttcctatccgtgagcatgtagtatgtttccatttgtttgtgtcatctctgatttctttgagcagtgttttgtagttctctttgtagagatccttcacctcactggttatctgtattcctaggcattttattctttttgtttcagttgtgaatgagagtttgttcctgatttggctcttggtttggctgttgtttgtgtgtaggaatgctagtgatttttgtatgttgatttcgtatcctgagactttgctgaatagcaatttggatagacaaattatggtatattcatacaacggaataatatgtataaaaaggaatgaactactgacacacggaattcagatgacactcaacatctttatactgagtaaaagtagtcagacagagaagttgaacatactatatggtaccattcgtgcaaaattctagaatgaacaaccagtgacagaaagcagatcactgtttgcctaggactagggttggggattgacttctggggcgaggagggactttactgcatgtaaattataccttaataaagttgatttttaaaaggaaaatattaacaactacttgccagcagttttgaaaacttacatgaaatggacaaattccttttcaaaattatcagacctttttttttttttttttttttttttttttttttttttttttgagacggagtctcgctctgtcgccaggctggagtgcagtggcatgatctcgtctcactgcaacctccacctcccaggttcaagcgattctcctgcctcagtttcctgagtagctgggactacaggcgcgtgccaccatgcccagctaatttttgtatttttagtagaaacagggtttcaccatgttggccagatggtctcgatctcttgacctcgtgatctgcctgcctcagcctcccaaagtgctgggattacaggcgtgagccaccacacccagccctaaaattaccagaactgactcaagaagtaaaaaggttgaaagtttagactgggcacagtggctcatgc

SEQ ID NO: 39616 - DNA, 1007 bp, Homo sapiens
gattggtactggttcgtttttagttatttctttttgcgtgtatttgagaaattctgttgagcactttgtggaataaaatatgtttctttagcagaaacaggtgcagctactatgtttgtactttttcattttgtcagtgttttggttgattgacatgacagttaagatgtctagaaattaaatcgccctttgttatctctggactcaggcgatgaatcaccaaatagagcactcagtattgatgaattataaaatacgctaaataaaaatctttcttgagatttgccttgaataagcaaggcgcagtggctcatgcctgtaatctcagcactttgggaggctgagggggtggatcacctgaggtcaggagttcaagaccagcccagccaacgtggtgaaaccccgtatctattaaaatacaaaattacccaggcacgatggtgcacggctgtaatcccagctagtcgggaggctgaggtaggagaattgcttgaacccgaaggcagaggttacagtgagccgagatcacaccactgcactccagcccaggtgacaagagtgaaactctatctaaaaaaaatattaggttaagaataaaagatgagaggaatttattaatatacactggctcttgtcacatataccttcttaaagtcagttttttgttaatgcaacgttagattttcttcatatatctttatcaataccacagcatgatgatggccttggttttgacacagggatcttgcctaaatgccagcgtttagccagatggtgaactacaaaattgatcttcctggggttccacatggcactgctgctctacagcccctgaccttggcattgaatatgtccttatatgtgttaggaggggtgagatgtattgtttcacatgtgttcaccaccaggacaaaggctcgctccttctggtcaggcctctctgggccctcttctcagctggacctcaatcttggcctctaaatactgcagactctcggacataaatt

SEQ ID NO: 39617 - DNA, 1054 bp, Homo sapiens
gggcgggcttgtgcccatcctcaaagggcggcgcatcagcaagctgcggccagagttcgtcatcatggacccgcggacagatagcaaaccaggtgggcccctcacccgagggactgggaccttgttctcctgtggtcatgggctgttaacgccttacaccccatgcaaagagaatgtctgctaatgaaacgtgagcctgtgggggctagtgtggaacatccttgaagctacgacatttccagaatcccattgaaatgaacagttctctaaatgtactttttgacaggtttttaatcatattccatgggcagtggatagctgggcggtggatagatgaaccaggcaaggggaagttggcgcagtcctcctgggagtgagggtttcctcttcacagttaccgagtattcatcgagtgccttcatgtaatattgagacaacttgaaaataataacaagatacagtccctaccctcccagagtggatgataaaattgaaatcaaaccttcagcctcctacccctccctagtctactgttaactgctttttacctgattgctaatgacaatgttttgctcatccataaagatgttggtatgagtcacccttttcttctaaaaacctttccctgcagtgattttcattgctcagttaatgtattcaagatgctccctgcacatctctctgggatcctagattgtaagcttcagagggaagggactttgttctttttttgtgccacttggtactaggctagtgtccgtgcacccatcagtcactgccagctcagtctgccacctccctctgaaactttgcccatcacctatggcagaacgaacagcacgcttagtcattgtgctccagacgctgccccgctgaatcctgtgggcctggggggagagaactgagtcatctttgtgccctcagtggatttggatttgttttcattagttcatgcttcctctcgccacttcctcgctccagtttactctcctgcccattagtctggtccctgcctctcattacgacctggagctagcatgacctgtggcctgac

SEQ ID NO: 39618 - DNA, 1028 bp, Homo sapiens
gagatctctcaccacgcacgtgcaccaaggagaggacatatgaggacacagcgaaaagacagctgtctgcaagccgggggcaaagccttcaccaggaagcaggcgttgtcaccctaaccttgagactgctcagcctccataatcgaatggaccagttatttagcgcgtgcgcctgtgtgtgtgcacgcacgcttgtgcgtacacacgtgctcttgcatacacacacgcataatactggttttgtttttctggagaaccctgactaatacagattttggatccaggaaatgggtattgctgtaacaaatctctaaacatgtggaagaagctttggaactgggtaatggatataggctagaagagttttgaggtggatgctagaaatacggatgttaagggcaattctggtgaggtcttagttggaaatgaggaacatactgaaaactggatgaaaggtgatcctataaagcagcaaaggatttgagtaaactgtgtttactgtttcatggaaggtagaacttgcaagtgattaaactggatatgtaactgaagagatttgtaagcaaagtgttgaaggagcagtttggttcctcctgatggcttatagtaaaatgcaaaaggagaaagatgaatggaagaaggaattgttaagataaaagatgaagatttagatttagaaaatatttagactattcatattgcaaaaaataagtattaagtacattttgaagaaaataccaaagttatggctggactctcatttgataaagcgcttatgaaattatatgagcagagacactgccagtttgaactgtagtggatggaaacaggatgaaaggaaggagagaggctgttggacttcttagctttgaccagctgggatgatggagctgtttggccactaacatgcactattcttcaagaagaaagaaaaataaccttgaaagtgattcagagatcattaggtccacctcctcagtttcagcaggccagatggcctttgcacagagccttgtgggcagagccat

SEQ ID NO: 39619 - DNA, 1032 bp, Homo sapiens
tcccattatgtaagcagagaggacatctaatgcatgcagctaaatccttcacctttaaacgtcctcttcaggttgccgtcttcctgtggctggacctcctcctgttgtcctttccccatttggaccctccacacagcagccaggctaattgtcccacatcatagctttagggagctcaatctgccatcctcccactcctcaggagcccagagtttctcatcaagctcaaaaccagtatatatgagacttaatgcattttttcatagactgttttaaaccttaccatactcattttaatcacactgtctttggggtagactgtcattaaacatgtgtgtctccatgttacaaataaagggactgagaagcagagatacaacatgggatcaaaaggcagccaaaaaactttactaatttgatttaaatattgcagatggtgaaatgctagataaatttgttgaaattcacactgttgcagaagaaattataagaatcactggcattagggtaagaaatgacttgttccacctgccattttcccaggactgattgtgcaggcccctggcagaaggccatttccacgcttgctccaaggcaacagagagtgaaagacagttaattctttgagttccttacaaatggatcgctggatctcatttcagtgtatactaagtatattttgagatggggtcttgctctgtcatccaggctcaagtggagttgtgtaatcgtagctcattgcagccttgaactcctgggctcaagcgatcctcctgcctcagcctcccaagcagctgggactgcaggtgtgtgccaccacacccagtttctcaatatattttaaaatgtatattattcaatgtaaagttgtcattctttcctcatattcataaagcaaaagcaaggggagagctttgttaaattcgggcactggctgcagggtgagaacccaacacccaggctggctgtccagaaaaagaaaggactgctggagtcagggccatgctcaccattcccgccacggatgcctga

SEQ ID NO: 39620 - DNA, 1817 bp, Homo sapiens
cctgtgatgttgtttaggatcaggcccctctcctgggcctgctgtgcaggagcacaggaactatctgctggcgttgggttccaaatttgcattttatttggaaacagacaagtagaagatgctacagaaaagtattttcaaatttaaacgttttttaatcccctgttttagttaaaaaattggaaaagaaaccgacccatttttttcccagatcaagatgacatgacatcactcccaattctctccaaaccccagagaaatactgacgaagttttctgatgtggcaaaggatatttcccatctaataccagtttctcatttatatttaacgtattggacctgatatttttagtgggtgcattcttccagaaagaattcagcaatgttatcagaattaattcttttatatgagtttatgtagcttgatatggtgtttcagtgcttattggttgtgcaataatggttatagcctgttagataatctaaatgcaattcccctgttttgtcgtttaggagataattatttatcttgcttttcatagtgttcttaggaattattttgttgttacgttttggtgagttatacccattttatttatttagaaaaatagtatctttgttaacgacttacatggtcacagtatattttgctgcaagaaataaagaggatatgatagaaggtttttttttttttttttttttttttttgagacggagtcccactcttgtcgcccaactagagtgtagtggcacaatctcggctccccacaacctctgactccagggttcaggtgattattttgcctcagcctcccaagcagctgggattatagacacccgccaacacgccaggctaatgtttttgtatttttaatagagatggggttttgccatgttggccaggctggtcttgaactcctgacctcaggtgatccgcccgcctcggcctcccaaagtgctgggattacagacgtgagccaccactcccggcccatagaaggttttttgctggataatttgtaacttttctaattgggaaaaaattcctattaatcacttaaaaatttttttttgtattttgtgttattgattatatacaaaggagactttttttttgagataacactcaaatagtattctcttcttttgaaaattttatttttatctgaaaataacagttgatctgaaataaaaaggggagacctattagaatgagagtagccaaggaaagagttactaggtaataagcttcactttttgtgttctaattgtttttgagatataaagaccctgaaaaagcccattttagaacctgtttaataagagcaaatataggggaaaatctttgaaatgaaagctacaaatacatgtgagaagaaaaaaatggatttttttagcaaataattaactaagcttctaaatgcctagctccctcccccaaaggcgctttcccccgatggaggcacaggcttctgtctcggatgtttggcgcacgtgagtttgtatgagtttgtaccggagtgaccccggcagccactgcccacctcccctctacccaggggcctgaaaagaggggctgccctcctgcgccaaggcagacacaagctgcgggctgtgcggtcctagtagtgtgacgtttcagttaatagtggtggtcttattttcaactatgctttcattcagtcagtctctgttgactaaatacgacgaaaattcatactttatgcaggagatttctaaaaatttaatgtttattaatagtttatgaatatcaagatacctcattgaatccctaaatttaaaagcagtccagtaaa

SEQ ID NO: 39621 - DNA, 1031 bp, Homo sapiens
ttgggtcctcatttctgaaggttcccatgtcatgtaaaacttgcatcacttaacaatgagagatgtcctgagaaatgtgtcactaggctgttttgtcactgtgggaacctcacagagtgcacttacacagacctagaggcatgacctgcggcacacttggtctctgtggggccgctgattgcttccggactgcaaacccgcacagcatgtcactgtgttgaacactgcaggcaactgaaacacaatgggaggtatttttgtatctaaacatagaaaagggacaactaaaatccagtgttatagtcatacgggatcaccattgcatattcagtctgttgttgactgaagcatctttatgaggtgcatggctgtattaaataaaatttgtatggttttctcttgttaatgggggccctggtcatgaccctagtgatggatgaggaaaagaaatgtttcctcccctgcaaaggtttggtcccagttaaaagatggggaaatctcagatagaaaatcgtaagtgactttcctctcatccaggcagtgtgtgttgaaaaagagtcaggagcaaatctcagagccatgaggccgcagcccctctttgagaatcgctccttgaagcatcctgaaccacagagaacaagcgccggctccccagggagcagaagccagcacctcagatagaagcctcccctccagggaaatgagtcacagacgagcccgggtgaggctgcgcggctgcgcctgccccgacctttgcttttaacttcctttctcctttgcagtcaccttcccatgagggagatgatactccgaagatgggttcattttgtccagactttgtccaggttcccgaagatgatctggaggatcattttattgtatgtttatggaaataaacaaaaccagtgccagtgagcctcgcaatagaaggtggtgagtataaaatgtaaacggcaccctgatcagcactcagccttcttcgtgttcacactgaaactatccagcctgccaggtccttgctgctgggtaaa

SEQ ID NO: 39622 - DNA, 1050 bp, Homo sapiens
cttaccatttaccattgcagggaaaataggagaacatggaggaaaacagaaaaaaacagggaagagtgagttagtaaaaatgagaggcatcgaaagttactggacctgcaccattcctgaggctcagtgctggcctctgggggtgggaggggagctgcaggtgtggggagggtgtggtgtggatccacagtggagcccctgcaatgaaatcctgaaaactggtgcagcgtgtcctgcgggcgagtggacagttgctttcccccacagagcctcgcggtgggggcgggggtggagtgacctgtcagtggccgcaggatgggcagtgccccacagcagggatgcctgctgtcttgcgttctgaaaggacagttcccggcacctcgagacaggaggttttctatgcctatgtgactttgtatgttgcgtttccttctaaattttgttttatttctggggtgtgtgtactggtggagaactttggatttagtagaatatctgaggtgaatctaaatagattcttcccagtctcctggcttgtgtacctggacggttggagttgttgtgtcctgagatgggccaggccacaggcacaggaccaggggtttggtgtgaggcaggtcatgtgtgaggtacctgcttgatagccaaacgggcatgccaagtggttgagtaggggtctggagttgaggggagaggactgggctgaggtctagagcaggccattgttcatacctgcatcctctcgcaagcccgagacaggatgagattaccaagggagtgagagtagagaaggggaggggacagagagcagtgtgtcccaggatgatgatggtgagggaggtgatggggtgaggaagatgatggcgaggagttgatgagggaggtgatggtgagggaggtgatggtgagctcctgagggaggtgatggggtgaaggagatgatggtgaggagttgagggaggtgatggggtggagggaggtgatacggtgagggaggtgatggtgaggagttgagggaggtgatggggtggagggaggtgatacggtgag

SEQ ID NO: 39623 - DNA, 2812 bp, Homo sapiens
tgagtgggccagcctggagtctggcttgaccctattgggcagcatcatagaattgaagctctggagttggatgcgcgggtttcagtgttgcacttagcagccttgtgatctagggcaagtaatggaaccttcctgagtctgagctttctcatctgaaaggggttgcagtagtacctatctcagggctgtgatgacggagggagtgcgtataattcacataggatatgtgcagggtggcaggaaggctggagagggattgtggggaaggatctcggggactttgaaaggcctgtctaaacttgatggagttggctgcggggcactgtacgcttcctgagcagggcgaggctgttaaagtgctgtaatggcacaaaggaaggtgcgtttggaggtgatggcagcagctggcaggagtttttggggcctgaacagtgggactggcgtgctggggatgaagaggaactggggagcaaggactcagctcttcctggctggctgaaagtgtggaaggagcgagagaagggcatctgagatggtgccaggtttcagggtacgagaatggagaaagggtggaggcaggaagtgggcagtggaagcgggcttttcagtaatgttattttgttttttagctcagtttgaaaccttttgaccttgaagtactgtagggcttctaggtgaaaacgtgttgggcagcgctgcttcagagtggggtagggtgggcagggaggatggctcctgaaggcaggaaggacggagagagaagcagcaggagatgagctggtgttggaggactggtgcgaggggtggcaggagtctaggactagaggtttcaggaagcacacggggacgacagagatgaggagagggaaggcctggggtcagggacccccagggaccctctcctgttcgtaggctgtgcatattttctgcatcacagacttgcctctatgtgtttagaaatatcctcccttgggggactgatcagagagggccatgggctctcttggtcactgagacttactcggtcactggtctaggttggcatggtgttagagacctgtgagcattttcagcaggaggcagagctgccagtgggtttctgttgcagaacaggagccgtgttctgaagcgactggggactccagccgctgtggtcactgagctggtctcacagcagggggctaggttagttctggcaaagacacctcccctctcccatctttaccttggcttctcaatgttttgttgttttgcccatgagcaacagttttagagctatgattgatctgaaacggggtcttgtttctgaggtttctgaagtctgtggttttttggctcaaatcttttttattttaattttttagtgacagggtctcgccctgttacccaggctgagtgcagtggtgcagtcttagctcactgtagcttcaaatttctgagctcaaacgatcctcccccctcagcctccagagctgctgggactacaggcatgagccatgctgggctgtttcagaacttttagattggaagtcgagagcggaaagagtcgcagaggggaaggcattgatcatcacgcagaattatcctgtcctgggtgctgccttggcccatgatagccctgcaggctgcagagggtcccaggaccctaggccctccagtgaggatgcctgcttgtcaggaaaatgaagacagcggaagccagggcctggcgcccaccctctcacccacgagcctgttgcagcacaggcggttatacccagcttacacttgcttaagaagacagattatgttgttttctctgtcttttttcctttgagttggatgacttgattgttaaaccaggaaaatttctaataagttggacttaagtagaagttttcgggaaggggagacaatggattttattgagccttctgagagagactggcaggtgcctggggcgggttgtgccctcatgccctttctcttttttttttttttttaaattgagacagggtcttgctctgtcgcccaggctggagtacagtggcatggtctaggctcactgcaacctccacctcccgggttcaagcgattctcctgcttcagcctcccaagtagctgggattataggcatgtgccatcacacctggctaagttttgtatttttgtagagatggggtttcaccatgttggccaaggctggtcccgaattcctgacctcaggtgatctgcctgcctcggcctcccatgccctttctgggattgcaggcgtgagccaccgcacccagcctctcatgccctttcttaaggcctctttttgcaacgttccttctcatttgctaaataactgtgctagtagggggtcaataatgtgtttttgaaatcaagatttaaaatatagttattctggttttctctgcttccaagtaatttctcttgtgcttttagcctctgcttgggtagttctcggagctccatagtcttgggactgtggctgccccgggggacgggacctccgagaacgttgtagtggaggaactcagaaatagcagtgtcattgtttaaaagctacttgagctttacagcagagggccagagatagcagagtgtttccgtacactttttttttttttttttgagatggagtcttgctctgtcgcccaggctggggtgcagtggtgcaatctcagctcaatgcaagctctgcctcccgggttcacaccgttctcctgcctcggcctcccgagtagctgggactacaggtgcccgccacaaagcctggctaatttttttttttttttgtagtttcagtagagacagggtttcaccg

SEQ ID NO: 39624 - DNA, 1049 bp, Homo sapiens
tgagtaagaccatatgacagatctgttaggcagagactttaaaacagctgtcttaaaggtgctgaggcaactaaaggaagagacatggagacagtcaagaaaacaatgtatgaataaaaagatagaaaacctaaaaggaaaccaaaaagaaattctggagatgaaaagtacgctagagtgattcaaaggcagatttgaacaggtagaggaaagaatcagtgaatctgaagataggacagtggaaatttttgagcctgaggaacagaaaaacagaagaaaaatgaacagagactgagggacctttgggacactatcaaatggaccaacatacacactctgggagtctgagaaggagaagagatagagaatgggtcagagaatatttcaagcggtgatgactgaaaacttcccatatttggtgaatgtgaatataaacatccaagaagctcaacaaactcaaagtaggatgaactgaaagagacccacaccaagatataatcaaactgtagaaagccaaagacagaatcttgaaagcagtaagagagtgactcatcacatacaagggatcctcagtaagtttgtcagcagatacctcatcagaaactttggagaccagaagtcagtgggctgatacattcaaagttctaaaagaaaactgttggccgggtgcagtggctcacccctgtaatcccagtactttgggaggctgaggcgggtggatcacctgaggtcgggagttcaagaccagcctgaccaaggtggagaaaccccatttctactaaaaatacaaaattagccaggcgtggtggcacatgcctgtaatcctagctacttgggaggctgaggcaggagaatctcttgaacccgggaggtggaggttgtggtgagctgagatcgcgccattgcactccagcctgggcaacaagagcgaaactccatctcaaaaaaaagacaaaaaaacaaagaacaaaacaaaactgtcagtcaagaatcctacgtgtagcaaaactgagggagaagttaagacattcccagataaaatttgagga

SEQ ID NO: 39625 - DNA, 1668 bp, Homo sapiens
aggcgtttgggttgtttccatttttttggctgttgtgaactacacaaaatgagtttttttctctgtctaccctatagccctttgcaggcggccgtctcctcccctctgagattgttcttttctttcacgttgtgctggggatgtgacctctgcacccctctggctccatgtttccttcctgaagctgccccagtcacccagctgcaggggcaggtgttgctgatgtggaaggagcaggtggccctgggctgtgctgctgggacagctgagccggctctctcgggagccacgtcactagtggtctcttcctttcagccctttgcctcagccagcctttccagatcttttggatctgaatctggggtctggtctttgctgtctgaatgatctcctggatcttagtcttcagagaatccgattagtattctgcttgtgtcctccattcatggtgcagtgggggattccagatggggtctgaggcaggtgcactgagcttaggcatactttgatgtagtcctttgttaatcatctgtgctttagactttgctatttcagaatcattctgattcaacagtgcagacaaacaagggacctctccctttcatcatcttctttattagaacatcatctcctacaagccttttatggttctcagcacctttctccagaagctgtagttcatcctgaccctgttctatgggtgtgggccgctgttttgtctttatggtttttgtccttccatcttttgtatctatgtttcctcttaaagttgttcctgaagaatttggtacatatgttaggtgaactaggtacatgccattctgccattgctgatggaaggcaagtgatacagtgttactgtggggctcaaaaaggaattggttcaaaagacgttaccatgggaaccactcaccttgaattacaccacagccagagcctcatttctggtggcactcttcagcatctggaaagacagcccttgagacccttgggatttgtaagggatgtcaccaaagatttttctgcgttttttgtacatttcgtttccccagcagccagcatagggcccagcagctgctaggcttgcaatagatatgtattggttgaatgaaagaacagcagtacagcaccttacaaatttagaaattcacgtggcaacagacttctgaaattatgttcatccttgctttaaaccaaagattagagagttcaagaatgaatgtcttttttcaaccaatcaattttcatagattgggccgggggcagtagcttatgcctgtaatcccagcactttggaaagtgaatgtagtaggattgcttgagcccaggagttcgagaccagcctggacaacataatgagaccccatcttttttttttttctgaaacggagtctcactgtgttgcccaggctggagtgcagtggcgcgatcacggcttactgtaacatctgcctcccgggttcaggcaattctcctgccttagcctccctagtagctgggattacagctactaatagctgtagtagttcaccacgccctgctaattttcatatatttagtagagatggggttttaccacgttggccaggctagtttcaaactcctgaactcaggtaatcggcctagctgagacccccatctctaaacaaaagtttaaaacttagccat

SEQ ID NO: 39626 - DNA, 2335 bp, Homo sapiens
gaaagaaacaggaaaagcggctcaacagtcaaagacaggtttgttttggacaataaacctgagagggccttctggccgagttaggtcagagtcactctctcttacaggctaagagtatttaagggttcagggcagaagaggttatcacaggcttggaatgtttctgtatctcttcgccttgcttatctgggagggggaggttttgtgtctgttcccatacaactccctgcagctgcagggataccccccccacctcctagtctgcttttagcttgtctatcttagcgcatttaaagggaaaggaatgtgcttattagggcctacttttttactggggcccatttttgggggcccatttacactcccaaaacatgagtgtgaagttcggtggttacccaagagacttgggtgcccagctgtgcccagctgtcttatctgtgttttactgtctactctttctggctgctttttgttagaagtgatttccttgaaacgtaagaagttagaaagggagctggaactgaaaatgggggtgtttgtccaagatgacggtgctcctgctctgtcattccagaccctatagttataaaaggaccaggggcgacgtgttctttctggttacttcctgctgggtgggagaggtagagagtcccttggtctcggattgactgcgggagcaatgccgtctgtagatgttttggatagttgtctgtgaaatagccatgctcctgtcagttaagaatctttgaaaaaggttaattaggcagggtaaaaacattagtcctaggcttattattaggagagggcccaggaatgggatgacccatggtatgctttttgttcccaaaccaataattcatttggttgttttggtattcgcttagcattttagccctttgtttgagatttttagcagcctctcttacgagacctgattggttgagatagaagcaacatttctttcccaatgagaggcagaggcacatgtttggaaagacccatgtgttattttttattagtaactgttattcctgctgtaaggatagtaattaagcaaaatgctacggtaattgagattgtctgtctgatatcctaccctcagggtgctgcagtacatagtcctactgcaaatagtccagtaaagcagttcccgcaagggtggcatggtaaataatttccataaaaaagctttaatatttggcttaaaaggagaggtagaaatgacaaaaagtacttggtgaggtaagagtgagactgagtcagatgagtaattgtcactcagttagttattttttatgattttcaacttaagatttcttatttctttacattgatatttaggacgttcctctgggctgttgggattgcttcctcagcttttcaggctttgacttgagtgtgatgtatgcaggggttgattcctgtaacagatgtaatttaaactgtcgaaaaccataaaaattgaaaaacatcagtcaagactagaatttaacaggtgtgctatagtttttgaaacctaattttctctctccagtttaccatttttattaaaagacaaatcataataggactggtttgctttattatacttggcttatttatttgtatacagtgcagcaagagtaattatttgctacatacaccttttaaattggctttgatggaacttttttccatagaaggaatcagataagactttccaaagccaaacccagccatggatttgtaccattaaatacctatgagttgggtgaattcctttcctcttgaggtttcaagataacttggggttcctggcctgtcaaagtgacatgctttgcttagcacaggtcagaaactctgtacagggactgtgtacacagaatatgagaccagtttccaagggctttcttggcttcctaagtcaagttcgattccttaaaggagagcacaccattccagtgaaagccttggcagaataaccagtttctccaattgtgttctgttacgcaagaaaatatattcttaccgcactgatgcacacaactatattgttgtggtttaagaatacttataactagttttcaaattctagaggaactaggcagagagaaacaaacatctttaaatcctaatatttacaggagtatatttagtttaagacaagtttccttgactctggaaaataaaataaggattggcagtgtcctgttcggatacaatcagaaacacaattgacaaataaatttggttatttctgtggtttacagtaacccaacataaccttacttgtgattaatagcacatatttagatactagaaccttagacatcccatacagttttagaacatatgt

SEQ ID NO: 39627 - DNA, 1136 bp, Homo sapiens
cttttttcctaattgaataccctttatttctttctcctgcctgactgcccgggccagaacttccaatactatgttgaataggagtggtgagagagggcatccctgtcttgtgccagttttcaaagggaatgcttccagtttttgcccattcagtatgatattggctgtgggtttgtcataaatagctcttattattttgagatacgtcccatcaacacctagtttattgagagtttttagcatgaagcgctgttgaattttgtcagaggccttttctgcatctattgagataatcacgtggtttttgtctttggttctgtttatatgctggattacatttatagatttgtatatgttgaaccagccttgcatcccagggatgaagccaacttgatcgtggtggataagctttttgatgtgctgctggattcggtttgccagtattttattgaggattttcacatcaatgttcatcagggatattggtctaaaattctcttttgttgtgtctctggccaggctttggtgtcaggatgatgctggcctcataaaatgagttagggaggattccttctttttctattgattggaatagtttcagaaagaataatagcaactcctccctgtacctctggtagaattcggctgtgaatccgtctggtcctggactttttttcgttggtaagctattaattattgcctcaatttcagagcctgttattggtctattaagagattcagcttcttcctggtttcgtcttgggagagtgtatgtgtccaggaatttatctatttcttccagattttctagtttatttgagtagaggtgtttatagtactctctgatggtagtttgtatttctgtgggttcggtggtgatatccccttcatcattttttattgcatctatttggttcttctctcttctttattaatcttgctagcggtctattttgttgatcttttcaaaaaaccagctcctggattcattgatttttttgaagggttttttttgtgtctctatctccttcagttctgctctgatcttagttatttcttgccttctgctagcttttgaatgtgtttgctcttgcttctctagttcttttaatggtgatgttagggtgtcaatttta

SEQ ID NO: 39628 - DNA, 1035 bp, Homo sapiens
gtgcttttgtcctgtaaaatggccccacagcagaagcctagtgtggtagcagcctggttcacatgaataggactttcacggagtagctccgtttccaggtgtgacttcggagcccagcatgcctagtttcatgccacagtgacccaagtgagtcaccccgtctgctccagtcccctgtccccaattccctgtcatctcagccacccattttcattttgaaaatcaatctcatggaagtttctatttgcttttattgctttctttgttttcttgtctatttcctagtactcatacgtgccattaaaaaggtgactggaaaaacagctcttaaaactgcaagagaaatagtatatagggttttgtgtaataaaaaatactgcaactttccaatactgataaatgtggacccttggtaggattgtatagttttttcatgtgaaatatgaaattcaggatttctcataaatttaggattgctttgtaaaaatccttcactgttggtaggaagtagtttatattaataagtaaaaaaaacaaaaagtcaataagaaaaaatgtaaaataaaaagtaaaggtagttattaatctataattatttataatgtcaatttttagagttaacgaattacatgatccaatgtaccagtatcgagttgataccggaaattttcaggtaaggattgttaatgaggcctgcaatttttcttcttaatgctgttttgtaaaattactgaattttgtgacttaaattgttctgttgagctttttgctaactgactacttgggaaggactacatagaaagttcaagggtggaagatttggggaaattttttttttttttttgagttggagtcttgctctgtcgcccaggctggagtgcagtggtgcaatctcagcttactgcagcctccgcctcctgggttcaagtggttctcctgcgtcagccttctgagtaactgggacgataggcgtgcgccaccacacctgggtaatttctgtatttttagtagagatgggggtttcaccatattggc

SEQ ID NO: 39629 - DNA, 1063 bp, Homo sapiens
ctcctaggctgctggcgactccggctaagtctggagggaggagcatttgtccaaagagctttgcttaatttttgttttttatttttcaaaataaaatgcaagtggaatttacttccagagttgttaatgagtttctttctttttcagatctcaggttgaaatttttgactgcattgactttcgtagtacttgtcattaggtaagaagaccttatttcttgaaaacagcaaaacggaatttttcttttactgtcaggaatatctgttgcctccttttgtggagtggatttcagggtacttctagcccagtagactcatgaggttagagggcctcccaccaaggctgggcagccgagagcagccgtcagcctggagagcatgtttttgttgtaagcggccgaggactggagcacgttcacttgcacactcggcccgcgctgggcatgttctgtccttgctgtgccacctgctatgtgtgcagcgtgcagtcaccagctggaagtaagggcactggggacctcgggatccttggggtgccccagggacaggactctaagcgagttaggacagcaaacacccttgagcagcatgctccattgctgccattgggggagatgggaggcgaagtgggcttggtcctgttgtgtcagggagtggcgtcagcctgaggtctcccagggcaggctcggcctggcctgagtgccccagacctccctggggaccggtgctggccagttggtagaggaacagagcggtctgggaagttgtttatttgaatcgattccaggtaattgcttggtggtttatggtttgtctgtttctcctaaaatcagaatccagaggaggaaaaaatctagctgctgcttgcctttttaggttgtttggatggcaaataagcggatgttggcccttttcctttatgagtgacaaggggcctctgggaggtcaacccttgtccaagctttccaggtgggctctgggagtccccaccttgtggagggcgaggactgagataggcatccaaggtcgtccaccaccactaggagtgtgaactcagctcagac

SEQ ID NO: 39630 - DNA, 2671 bp, Homo sapiens
ctagaaggggctgctgatggcgggaggagtggtcgggctgtaggcagagcctctgactgatgtgtccagatgccgcgttccttcccttgacagcaccaccagccgagttcttatctttctatggcctgttgaacttctatctctacaccttggcctttgtatattctccatcgaagaatgccctctatggtaagccaccctggggtctggactgctggccagttagcgggcacagaggcctgtgttcatccacgacccacttcccgggtttcccattcatgtgggcgctgtgattcccagtgacttctcttggcagagagagagtgagttgaaatgtcgagctctgaggtgagttggggcccagcatatgtagaacctgcgttgtgtcattcccacagagttgacacactcattttattagtgtcagtccccagcttttgctgttcagtttgggattttttgactttacaatgatgcaaaagcaatgcacattcaggagaaatcacactttgaatacccaaacaaccattctgtttttcactttcagtacagcattcagcaaattcatgagagagtcaccatttattacaaaacaggctttgatcctttgatcccagcacttctggaggccaaggcgggaggattgtttgaggctgggagtttgaaaccagcctggggaacaaaatagggaccccatctctccaaaaatttaaaaattagacaggtgtggtgacatgtgcctgtagtcctagctactcggttggctgaggagggacggtcgcttgagcccaagaggagaggctgcagtgagctatgacaccactacactccaacctcggtgacagaatgagaccctgtctcttaaaaaaaaattaaataaaataggctttgcattagatgattttgcccaactataggctaatgtagtaacacttaaggcagaataggctaagctgcaatgttcggtgccttagctgtagttgatgcgtttttgacttcacgatattttcaacctgacgatgggtttatcaggacataaccccatcgtaagtcaaggagcatctgtagtagtgttgttaccattaaaaaaaaaaaaagccaaaacatacaaaaagtcacctaatagtgaaaccaaaacaaccctcttgcacagggaatgaaaaggatgggaactctctagaacataggcagccccccgcaccccccgacatcttatagtgggctagcacttgcccagcaccttcacaaacggcgtctcacttaagcttcacagcaactttatgataaacatataatcatgcccgttttacagaagcagcagctcgctgcacgtccaaggactgggcgggggcaggcagggcagagccacctctcctggggcctatgttcagctccccactccttgtgtcaacaggaggcagctcgtgcgtgggcaatggcagcctgcctgctccttcccacaggccgcctccctcagccttcaggacgtccctgccaggcaggccaggccagccctgtcttgtagatgagaaaacagcctcacgagatgtgttcaggtttatacagacatggcagctctgcgatttgagtccagttctttccaactcccttcctttgtccgggacagcatcctgcctgtccaggctcatcacgtcaattgcttgagatgcaaatgctcttgttggttttcagagtcccagctgaaagacaatcctgccttctccatgctgaatgactcggatgatgatgtgatttatgggtaagtccctgtccgttagaaggccggcacaccttgggcatcccggcacggccttgcatgtttctgaatgggttactcttctaaaattattttcaaggtatgaaggcatttaccttggagtgtcaagtggctcgtggttttctgttttcacagtattcaggcttagatgtggtagtagtcctttctgctggctacctgtagggcgtgctggccacgggaagaactgtgctttctggactgatgggccctgggaactgggggtcagggagaggaggacggggtgagcagtagcagttggtgatagaaaattgaaagagcgaagctatgatttaattcctgctggaatggtgtgtcagtgtggaagaggaaaataaagagctgtcagaagttagacggtctcaaaggtctctttgctcacaggagtgactatgaggaaatgccgctgcagaacggccaggccatccgggccaagtacaaggaggagtcagatagtgactgagccccggccagcccagcgaggcgacaagatgcctggatgctttccccggtgaccgtctgctgaccttcccctgttatattcagatttttcttacaagcagagatttcctgttcatttgtttacatatttttttaaaggaaaaccaaaactgagggtaaatttaaatgtttagccaaatttattgtcatggtggctacgagaagaggcattgataacaagtttcaacagccaaatccttttttacagagatttcagatgagcgtgttttcagtgatgaggaaatttcacgtttttagtacagtgaattatgtacttttttttcctgtaatcattcactgattccaagttcacgggcagcctgtgactaggtcctcagcgtgacagcatcaccctctttcttcccttttccatgg

SEQ ID NO: 39631 - DNA, 1033 bp, Homo sapiens
aataaagctacatgaaagattgatagaatattttagattatttattggccaaaagtttttaaaactcatatttggaagcaaaatgaaaagcaagtaaaatgttttaaatggttcatggaaaacgtatttgggtagaaggcaactcgtgcttccggaaggggttccctgtcctccatgtgtccacatggcggtcaggtagggacgacctgttctgtaaagtccttggcactgctgaatctgtggcatcatagaaggccctggagcttccccgttcctttcagtcagggactccatatagagtctcatgtggacgtctcccgtgctttcctcttgacctctacagtcacacttctgttaacatctggtaactgtgggcaacctgactgatgccgtcttggcaattgaggtccagaagatgatagttccgcaacgcaagcagtacctactttttttcttcatctatgcattgactctcagattaccatgcagagcttcacgttatcatccacgttaagtagtgctaggtaggaccttagagatgttcatgagaaactatttgttatgactttcctttgtatctttccttttaatttaaactttaatgataatgtacttttaatatggattctattcacatttgttttaaaaaccttgtaaatatgaatgtttaagacaacttactgcaagggtaattcaagtttacatgatttttaaatttgcaatgatgttttttttattctgtgtattgaaaaaaattttctgttaccaaattttacaacttctaataagactactataactttatgtaaactgatgaagatgtgctgattaacatattctgtgatatggtttacaacttttaatcataattgtccatgattttggaatgctgttatttatcagtaaatgtaaaatatttgaggcatttagccatacacacactagaactttttaaaactttgtcctatagtgtaattataaactgatgactattatcttcatacattgagtcttcatgcatcaatgaaatgaa

SEQ ID NO: 39632 - DNA, 1050 bp, Homo sapiens
ctttttttctgtctagattgtattttctaattgagacttccaggtcatgagatgaaggcagtcttgttctaccacagacagtccatgggccgtggatctgacagcctttgaccttcttgatgatatggaaaaccatcacgttctcttttcctgtaacatgtgccctggctccagtctgttttttaataccactttccactccacccatcaatttccttctactgctctctgatagcctgggagaattgaagcatcttgttttggctaataattctcagaatccacatatgtacctgctgatattcaaacaaaccacacccaaaggatgtgaggccttggggtgatcttattttcacagctgcatcatgactgcactttcaatgctagcacctagggaggctgaggttcagggtacaaacactagatatcatctgagcagattgtgtgtccctcttaacaagcatgcggaatctgacttggggtccttgggatgagttccgtggggtccactggcactctgaaattgtaatgtagtttcattacaggaaacaattctcagcattttgaggagtcaaagataggctaggtcacagccacagagagggacagactatgtgtcctcttggaattcaagccctggaaagcagtgagtgacccagggcttccacacatggggaaaatctctagtaaaagcgctctttgaattccattaatgccatactctgttctctgattatcctagctttgggaggacttcctttcccctgggccctgataatgtttcttgttagtggcactcagctgatagtaaatgcctgataccctcactctttcatgtgccaatgtagtgcttccttcagtagattgaagcccattgcctttcttacatatctccaaattaattcacttgtattcccaggggagtggctttcttagtaactctatgtcacccaattgaatagcatattcaaagatgtttacctttgaaggtagggaaatgtgttggaatttgcctgggtctgtccagtcatggaaatcactgaagactat

SEQ ID NO: 39633 - DNA, 1050 bp, Homo sapiens
attatgaatcaaagactgccttctttccaagtacaatttcaatcaaagcctttggccaatggggaattaatgctgtctgtgacattactttcacagtagctttctcatgcagttattagttttatttagtgtgcacttcacaggacaaaagttcatggcctggaaggtgagctccttaagggcagggtgctttgatttactcatcttcctatctccagagcctggggcaattgcacagtgggtgctcaggagacatttgttcagtggaaatgcatttggcggttgcttctgccccatacctgtgcttggtagaggagtgggcattgacaagagtgttgacaacagctggggcttggacgttgcagaggtgcctgtgagaagattggggtcacctctgtctagttcaatgttgattcggggggttctgggcaagcccgtttgttgaactcagattggtgctaccattaatcagagattctacttcttgtcttttgctactgtgagggcctgggccaaaaaaaaagatgtgtgcatctgtaaactggaattctttgggctggctggtctatgaagatgaggtgtttgcacagccagatccatgggctgtggggtggcctgcccactactccctcccaaggaagtactgccccagaacgagcccttccatcttaagggcttggatctcttcatccggtgctcgtttcaaagctgcctctcatgttaaaatacagctagactttgctagttgtagagcccattctttaggtaataaaaatgtgggagacagaggtttgtgtgagaagctgtttgactccatttagccagatgtccctggggagaagcaaaggcctcaggagtccctgctggcacccccccaccccagcagaaatgccatggaagggaggcaggaaggagctagctggccagaaaagagattgattgggcacagccttctcctacctttgaggtgaaatcacaggcatttcacgtgaagacacaagcagtgggggtaaggccctttcttaggacaccaggatgtgtgcttatttc

SEQ ID NO: 39634 - DNA, 1478 bp, Homo sapiens
attttttattttctgagacagagtctcactctgttgcccatgctggagtgcagtggtacaatcttggctcattgtggcctcataccccagcttatgcgatcctcccacctttgccccccaaagtagctcagactacaggtgtgccactacgcctggctaatttttgtattttttggtagagatggggttttgccatgttacccaggctgatcttgaactcccgagttcaagatatactcccgcctcagtctcccaaagtgcaggaggcatgagccacaatgcccagccaaagccttaattttatactgaggtaggagaggtatctcacctttacagcctttatttggtgtagtgaatatactgtttctcaatttttgaagcatgttagcttatgcccttctttcagctttttgttttgaaataattatagattcataggaagttgcaaataaatgtacagagaggttctgtgcaactttcactgagcctgcttcattgttaacaccttgcgtgactagcagacatctctaataactgtgaaaatcagggaattgacattggtacaatccacagagcttattcacatttcacgttatactagcactgttattgggggaagtggggaagagctatatgcactattatcatgtctagctttgtgtaaccatcattaatcaagatacatatctgaactatcaccataaagcttcatcgagttattcttttatagccacatctaccccgtccctctccatgcctgacccctggcaaccactaatttatctccatttgtataattgttacttcagagtgttatataaatgtaatcatgtagtatgcatctttttgagactattttttttccttccacttagcacagtttccttaaggcttatacaaattgtttcatgtatcagtagtcctgtttctttttattgcttaaagtgttccatggtgtggctgtatgatagttcaatcatttgcctgttaaaggacatttggatagttttcagttttttagcttttacaagtaaagctgcttgcatgttttcatttctttgagatacatgtttaagagtgcaactgctgagttatatggcacattcatttttagttgtattaataaaaggaactgccatacttcttcagataccatttttatattctcacctgcagtgtaggaaacttcagtttctctgaatcctcaccagcgtttggtgttgccactaatttttattttagccattctaatcagtgtgtggtgatacctggggttttaatgtgcattttcctaatgatgatgcccattgttaagataccaaatagtttaccttaaaaaaaaaaaacttttgtaataaaatactttttcaaaaaatcataatatgtactgagccgtttaaatctcacacttgggagatgtttcataggtctcattatagaactttgtgtcttcaggaagaacactaaattcatattgt

SEQ ID NO: 39635 - DNA, 1068 bp, Homo sapiens
tttctaaagccaaattttaattaattgtacctgaagagcagcttgaaaacatggctcttaagtatgcaggatagcagacattcagggcagggtgctttccattaggaactgcctaataagactaggaaaaatctttattgctaagaggacctagcagtgtatatattcagggtagagaagtataatgaagaacaacggtccccttgtattctgatagcatatggcatttatgcaggtttctgacagttagatgtgattgttaaattacagtcttgaaaaatgttatattctccccctgtgtttacaggcagaaattgatactaccttgagaagagtcacatggtattttcccaaaagagccaagataaagaaccttcaattctacataatgaggcacatttctaatatgccttttgttctaagtggacaacatatgaaagcagcagtgggatttttttttcagcttctataatccaggattatcctgaacatcagtgatatcaaagtgaatctggggtttgatctcacccagggcatgcttggcatgttctcagcagaaaaaaccttctctatatatctctttttacctgtttcctgtaaaatgggaaggaataatgagggactattttatgatcagttaaactagatttaggctgggtgtggtgactcaggcctgtaatttcagcagtttgggaggccagggtgtgaggatcatttgagctcgggagttcaagaccagcctgggcaacgtagtgagaccccatctctacaaaaaaatgagccatgtgcctttggtcccagctatacaggaagctgaggcagggacatcgcttgagcccagaccctgtttgcgccacgctgcactccagcctgggggacagagcgagactctgtctaaaaaaaactagatttaaaatgaaaaatccagaagaatgctcagtattactaaaatctgtgagtttatagatatcttctagtttatttaataaactattttatcgtaacaactaatgtatggatttttttttattagatggaaacaatatgaagcatatgtacaagctttgg

SEQ ID NO: 39636 - DNA, 1796 bp, Homo sapiens
tactgtataacacagatgttttctgtcttctgttgggagtagatgaaactataaaaacataatttagttagtagtcatggagcactatgacaccattgtctcctaaaggagctctcgtgaccaggaagaaattcgcctgttataaaagtagttaggatggaaactaaagacttgattaattttttgaccctagttcttattgttcttgacagaggtatttagaacttgatcttaaaattgtatttataatttttttttgaatcatcagctaatgatgtaactggcctaagagagtctgaagaaaaactaaagcaacaacagcaggagtctgcacgcagggaaaacatccttgtaatgcgactagcaaccaaggaacaagagatgcaagagtgtactgtaagtatttcaagttatataaatgtctttagttgaggaattggtttttagtccacattattacatgttaattttaaacatttaatgctaaatataagagcttatcttttataggtacgtatgctttgagctttaagaatactagatgaaaaattttgataatgtctcatttagactgttttttgtggccaagaaggcaaagttttaagttttttttgaaattttcatgccttataagtattagttcatcaattccagacatttttcagatatcttggtgtctgaggatgtaatcaataaaagaacatttgctctttattgctttactttcactgattaggaaagccatctgaggactttatctctgttctcttgtcccctctgtgtatagaactgtttttcctagtgtcagcaacctctttagtgtctcctttttaattgttagaactttgatgtgtactgtgtagtatttactatgtctacgtagatctgaaatctagtgacataattgatcatccagctctggtagtttaggctcaatcttacggtgtaattatacaaaataattagaggcagctgtatccttgtttctgattttaaaatctgaatgtttcttcaattctttgtgtactctcccttcatttggtacatatagaagtcttcttatgtgttattaaagtcttctaagatagtattctggtcattggagacaccaaaaatctatgggcacagtcctgttctgtttcttttgccaatagaatgttccttaaggttcagtcacagtccttttacttcccttacagagattgtttaaatttccacaaaagcacgtatttactcttctttcacttgttactaaatgacttcttcacattttactttgctaaaggctggcttttatcattttctttacttttttttcccactaacccccccgcccttttcttgagacagggcctctctctcatccaggctggagtgcagtggtgtaatcacacctcacttcagcttcccgagtaactgatttcaggtgtgcgccaccaagcgcagctaatttcttaatttttgtagagatgaggtcttccctatgttgcccaggctggtcttgaactgctgtactttggcaatccttactccttggcctcccaaaactgttgggattataggtgtgagccatcgcacctggcccattatcattttctctaccttcttaacacattttgtccttttgtttctatcagttttgttgtaattcttaccaccactgatacttctttctccatagttactaatgaatgttttaacaaatttccctttacacgagaaatggatcttacctttagactgctagcacttgggagatagagtgtgaatagaaggtgttgatggtaatatctcat

SEQ ID NO: 39637 - DNA, 1896 bp, Homo sapiens
tgtgtgcacatcacaatgtttgtgctattcatgcacatctgattctccatctgtcctatatgcgctggcagttttgatcatattacgcctggtcaaggccttcggtgatacctcatcactcttgtctcctcgacctggattttaaggttatttcaactataatggaacctaaccttttccagcttttttttttttttaaaacagctgtcacctgcatacgccagctgaacaacttcctgttcttccaattataatacaagtgaggttttgcagacagggcagggcagcaggagcaaaatcacaaggaaaggtcaagattatatatggcagatgaggataaagtttcaggtgagagtgaaaaaagatgaggtcagcctggaatcttgggtattctagaagagaggggactactgaagaattcttcagcaagagatgtatgtgatggatcagatttagatttacattttaggtagatcactctgacttgagtatgaaagatagatttgagaggaacaggactttaagcaggaaaaccaattgtgaggctgttaaaatagttcagatgaaatacatgaagccactggtggtagcagacaggacagaataggtgttttggaggcacaatcaataggacttgtttagtttggatgctgttgtggaaggaatgaaaaaaatctagggaggaatcacagcttcaggtttgtcttgtttgactgagtaacgatgctactaggatagatcctacaaagatcaaattttaaaagaagagtagagtgtggtgttaggaaaacaggaaatccagcattccctcctccttccccaaaatacaaagtgattaaaacaaaggcatacataaagttctgtacaatacgaatttaaaattgttcgttagatttggcagttaagaggttgttggccaaggaagccaaaagattggatacccctgctctagaggaactgtcaagtgggaagtgagagaaactaaatttaaagagtagaaagaatgggagtgatgtactataggagtttggagggaataggttaagcgaatggttgaaaggattggccctgagaaggagggtttcttaccctcttgagtgaaaaatagtggaaaggtttgtattaggtacctgtcctttaaaacagagctgctgcatttacccttggtgtttcaaattaagctaagcttagaaaaaataaaatatacatccttaggaatctatttgtgtagatcttttgtttgtccagcatactaactcatccatttgatcttttaataataatgctttatttctttgtctacatgcagtctttgccaagtacatcagtagtcaatttagttagttttgagcgtaaggcataaattagccacgtagttactatattcttaactatatactgtattcttaactatattttattttgttggtaagtaaaatctgtcatttttgttcacctcagtggtatttctgtttttcatttagtcttttgccaatcaactcaaaatagatttaggaataaaactaactttgaaaacactttactcagtgttctcttccctagaacatggaatttattctagtctgattcacctctcttttcatgaatgaaagtgttgactattgggtctttgtaaagctaaatagtaactgagtctcagtcagtgctgtagactgttttaatcagtcctgtcagtacatggagtgcactgtaagtcatggtttattctcgctctgttatcttagcagctggcttcacattgactatgcagttgtactagatttttgctcagtgaaacaaatatattcccaaaccacttagtatatttgttccttttactaaatttatattagaaaattttaactgtaatcctatttaagccttagtatggagtta

SEQ ID NO: 39638 - DNA, 1039 bp, Homo sapiens
aaactggaacaagcccaaaatgaactgagtgcctggaagtttacgcctgataggtaaacaaatcatactccccagtcaagacttccctgacagtcccactacgagaaagctgtggtgggacagccaagtactcgtttccacaccaagactcagactttttgagccaaaaaaaagccacattcttacactgtccagcttgtaatggttaatgtaaaacttaccagatgaaccttgtgtttcagcttttttcttttccccttccccttgcttcagaggcctgatggcgtcggactattccgaagaagtggccacctccgaaaaattccccttctagaacatgtagacacttgagaaatgtttctgtttgaagaaaatagagggagaaacagaagtcttaagtctgtggcacactgtgtcttcagacagtttgaaggaatgaaaacctagagattttaaatcatgaattgaacatgtaaaattccagtaaaatgtaaaaacggaatatgcatcgctcttaaccttgagcatagtgacttagagacactgtgtatcagttttgccaataagactgtggacttcatgattgttgttgaacttctgggtcaaaactcaaatgaggtgaattttgcctttaaagggtttatttgctgagaaccaactttcaatagtcatgagagaatcaaataatagatgtccgtacaagtagcgcatatatttaaccatttagtttggggctctatattacttgcttgagccttaatcaatgtggttttattcaatggtttgttctttgaatggttgcaaaaactgtagataatcttactgaggactgtacaaacatgaaggtgtggtatcaaacttcaggttgaaactgtttgaagcattataaacattcatttcacaactagattgtataaggatattagctgtgatgagactcactgcattattttttttagtgaattttatgaaatccccgttccattcaacaggcacatgtttaaaagagctttgtcgttggtgttaatgggggaatgtg

SEQ ID NO: 39639 - DNA, 1144 bp, Homo sapiens
cagtaaagtggaaggaattccattgtttttgacaatcttgcatatctctcattttcccattgtttaatttctaagtggatgttcagtggaggctaacgcctgagagtgctgatgggaaatggtggaaatctggagctacagtagcagtgaacaagaacaccagctaataaagttatcatatcaaagaataaagcctttaccacatgctcactggtggctttcaccctcgggctcctctgagcagtagtaacccaggttgaactcttcaggtattttctggaagaaagcttaattacaaacttttccttgaattacattaggttagaaaacatgcagccaggcacggtggctcatgcctgtaatcccaacactttggaaggctgaggtaggcagatcacttgagcttaggagtttgagaccagcctgggcaacaaggcgaaaccccatctctactaaaaatccaaaattagctgggggtgctcgtgcacacctatagtccccaggtactccggaggctgaggtgggaggatcacctgagcctggggacgtcaaggctccagtgagctgagatcacgccactgcactccagcctggcaacacagtgagacccccatctcaaaaaaaaaaaaaaaatgctgtaggtgaaagaaccatgcaacacttcaaagattgataaaatatttacaaaatgctctcatttttaaacttataaggcatactgaagtagtgtatcaggcaagtgaaagcctcactagaagaaggaaagactagaatttaaaaaatgttttaacccataaggtcatcctggacttaccccaaggacaagaatgtcacactgtctttatccaagtctcaaaggtaaatatcacaattatttacttagatccctttaaaagtgatcatttctttttttttcttttttcataaataattacaagaacaagcaaataatttctccttttattgctgaggctaaagaaaagcagtaaaattttattgggaaacatttgagcttttcattacatatttgcaattgctatgtatgtgcacataggttcagtagtatgttgcactagcatttggaaactataatctgtggaaagtgtgacactcctagattggcagatatttgcgtgtttgaatt

SEQ ID NO: 39640 - DNA, 1792 bp, Homo sapiens
gatgatcttttccaataaagtcttaagtctttaaaaaaaaaaccttaactgctgaatgtgcctcaattaatataatagataatattcttgagagttatggaagatggatgtaccagaaaacttccctctctcctcctcttttttgagacagggtccctgtttccgaagctggaatgcagtggcatggtcacagcgtcaaccacttgggcttaagcagtcctctcacctcagcctttccagaggctggcactacaagcatgtgtgcctggctactttttaaaaaattttttgtagagttggagtctatgttgcccatgctggaggacttcctgttaaggaaaatccttattaaatgtttttctagcaagaataaatactctcattcatttttatttgtaggtactgattttcataaatatttgtgattgatgttgcatgtaccttttcaagaacttttctgataaagcgctagattccttagtgtaataatactggtatagccaaggtgtgtgttaattaactggctctgtttccatttcaaatgataatttgagatgaaaatagatggatttcagaattgattattgatgtaatagaaacaaggtgtagctgtttgggcactttttgtttagggtttatttttactgctgtgttggcaaaatactgaaatgcagaagatggatgtgtcccagaaaagaagatggtaattatggggaagcatctgctgtgatatagttatgtttgtatgtgttacatctatcactgtaataattgtaagcaaagacagagagttttgtcttcattttgtgatggatggctctttcctttgcagccaaacagggaaaaagttaatggcgaagtgtcgaatgcttatccaggagaatcaagagcttggaaggcagctgtcccagggacgtattgcacaacttgaagcagagttggctttacagaagaaatacagtgaggagcttaaaagcagtcaggatggtaaggggtttgtttctttttggaacgttgtctcaactttgcattggctttttaaaactgccagtcatgaatattataggttagattctgtacattgttaacctctgccctatgattgtatattattgtgagtgaagcatttttagttgagtccgcaaacaaagccatataattttagtttgtttatccccaccctcctaattctttattgttcaaaatttcttacatttttgtttttagttgggggtaggatttggtaaaagataaaagggtgttgtattacttaacaagatggacaaatttgtattcattgtttgaaagggagaataagcatttctcgttaagtgtaaatcttagaaacatgggcagttttcagcgatctgaaagtaataaagttgattgtatctgtgaaggttttattagtgaataagagatttaatctttaaatttgctgagataaaacttgtcagcctccatcctttttagtgcaagtgtagctgtatctctgtttctcttctttgtaaggtgcattattaataaggaaaatatccaaattctttgaaattttaaattgaaaattagtgtctctggttaattgcaaagatgatcagtagccaagtaatttcttctgaactacctaccttttcaaaatcttcaggaattatttcctgtgacttttgtccttttatatgtaacagtccttggttgagaacatgggcctctttggagtgttatagaggaccacactatccttaaggatcagacttgctatggaactaaggcactggatcaggaataaggggat

SEQ ID NO: 39641 - DNA, 1716 bp, Homo sapiens
agtagagggtatgcagagtaccattctagttctgcagcagcagctgaaggagacacgccagcagttggctcagtaccagcagcagcagtctcaggcctctgccccaagtaccagcaggactacagcttctgaacctgtagaacagtcagaggccacaagtaaagactgcagtcgtctgacaaacggaccaagtaatggtagctcctcccgccagaggacgtctgggtctggatttcacagggagggcaacacaaccgaagatgactttccttcttctccagggaatggtaataagtcctccaacagctcagaggagagaactggcagaggaggtagtggttacgtaaatcaactcagtgcggggtatgaaagtgtagactctcccacgggcagtgaaaactctctcacacaccaatcaaatgacacagactccagtcatgaccctcaagaggagaaagcagtgagtgggaaaggtaatcgaactgtgggttcccgccacgttcagaatggcttggactcaagtgtaaatgtacagggttcagttttgtaatattttttcagcaaatttttatacagtgtcatttaatttgggagaggatactgtccagaaaattaatgcatacttttgtcacaatttgcctttttgtgggtgtacgttttggtttttttttgttgttttttttctttgttttttttttcttttctttttttttttttttttttttttttgcttcaatacttctgccgctttggaaattgtaacagttaattactttgaatgttgctaaaaggacattttgtgtagggtcaagttatttttatatgagttaatgtgaaattgtaaatggaaatttttccttaaaatacaacacaatgatgtctgtataaatctgtctgtttagaatctgtgctgtgtaagggcattcgtactcatgctgttactgtacttatgcaccattcagacttgttagagtagatgtgggtttatgactgccaagtttgcccagtacagtagttttttatcactaaaagttggactcattgatggagtcctgtagtagtttcagtgttagatacagttttttccaccatacatctgtgcattttctctttaggtgactgtttaagaaatttgtgtgcatagttactcagtttttatgaactgttgtatcctgttaatgcatattgctctgtgactccagtatatcttacctgtactgaccaaacctaaataaagatttttattgtaactccttaattagcttttttgttttgttttgggtgtatgtttagcatttgtcattttcattgagtcattgaatttctactcattatccttcaagtaccacaacagtcaaacttaagaccaagcatcgattacgattttgcacacaatttttaatttatgccttattttgcaaaacggagctggagtttagggctacacttaaaattttttcttgacttataattgttacaaaatattttaaaatacagaaaagtataaagaaaatagtcatctatttcttaggctttttttttttttttttttttaattgagacagggtcttgctttgtcacttaggctcaagtgcagtggtgcagtcatggctcactgcagcctcaaagtcctcgactcaagtgatcctcccacttcaggcttccgagtacctgagactataggcatatactaccacacccagctacatttatttt

SEQ ID NO: 39642 - DNA, 1024 bp, Homo sapiens
taatatacctgctgttgagttggtgagagttaagactggccgctactcagaaatccctccccatcatttagttagcctgattattctcactgtagacattatgtcatccattgaaataggtaacacattgttagctttacttaagcccttagaggatttcttcatttaacagataattaattgcctcgatggaaagaataaatggaattcttaaggaaacaggacacagaatgggtaggtttgagggagaattgaaaatgggtaggtaggagagtaatcgttcccaacaataggaaagatgaagtctgctaattccaggggtctttagaccttggcctggctgaggacctagaactggggagaagggctgcaaaggggcctagatgaagacttaggaaatactagatagttttgagttgtattctggggagaagactaattgcaactaagcctaaatccatttttatttctgacttctaggctcctcacttggcttacttgagaacaggagtaaagataggtgagatgccactgactgacagtatactctgtgatggtcttacagatgcatttcacaactgtcatatgggtattacaggtaaggcagacatggctgaaactgtattagctttaaaaaggttaaaaagaccatatactaatctgcttcttaggtgctttcgtccttatggccagagactgtcttaaggatttttatatctcttctttgattaactgaagtgaagtaagtattctcttctttgtgaactcttgattatcagagaatgttagaagtgggaagtacctcagagttcttctggatcaacccctcattttaccaaatgaagaaacagggcccacaaatagtgcttctgtggcagaggtagtgacagagataaaccagttgtttttttggtacctagctgtactttttgtactacacaattgggttattggtcattcatgctgaagggtcctgtggtctaagtttaatggcaaagcaactgggaaatcaaaagcactcttg

SEQ ID NO: 39643 - DNA, 1786 bp, Homo sapiens
ctccagaactgtaagaaaataaattgctcttctttagaaaaaaagaaaagaaaaaaggctcaggtcatgatggagtaattgacaaagattagatttcctactataaacaagcataaaacttgtgaaaatatataaagccactgttttatgtatgtcaggttttgactaatactcatgtaagactgagatccttgagagaagggaaaaccccactgtcactgtctctacccagggcacttcccaaactgtgttatggagaggcagagcctaagctggaaacagtggtctcagtgatctgaagaagcagagaatttggggcttctgagatggctggagtttgtggggcagaataagggggagaagaaaaaaagagctccagaaatctgcaaaaggttccccttaagtctttgatcaaatactaagcttgtagataacagcttacaaggcctagtagaaaagagctgcaaaggagaggtgaactggagattttatagattactaggagataaaagttctggacaagcgagtggaaaccttactgaactccttggacactccattgacatctcagaaagaccacagtttaggggtagggccaaagccatagagtaaaagctactctagacccaaactaataagcttaaaaacaagcctcaaaaggatcaaggtgatttgccagtattttgactgcttgtggaaacaaaactcaatatattctctaaagataataaaatctctatgtccagttatgtagcaactataatgttcagcatgcaatgagaactttctagatacacaaagaattaggaaaatatagcttacaaccagggtggaaaaaaaccacaacagtcaacagaccctgcaatactagaattatcagatgaggatcttaaaggctctattttacatatgtttaaagatacaaaggaaaatataatcttcatagaggaatagatgtggacatctcaggagtaaaaggaaaaaatataaacaagaaccaaatagaaattctagaacttgcaaagtacacaatctgaaattaagaattcactgggatggggccgggcatggtggctcgcacctgtaatcccagcaccttgggaggctgaggtgggaggatcacttgaggctgggggtttgagactaggctgagcaacatagttagacctcatctctaaaaaaaaagaaaaaaaaattctgaatggccttaacagcatcttggagacagaagaaaaagggtcaggaagtttgaagatagatcatatacacgacctgaagaacacagagaaaaataatgaagaataaatgaacaggccaggcacggtagctcacgcttgtaatcccagcactttgggaggccaagccgggtagatcatctgaggtcaggagttcaagaccagcctggccaacatggggaaaccctgtctctactaaaaatacaaaaatgagctggatgtggtggcccatgcctgtaatcccaactacttgggaggctgaggcagaagaatagcttgaacccaggaggtggaggttgcagcaagctgagatcacaccattgcgctccagcctgggtaacaaacaaaactctgtctcaaaaaattaaattaaattaaattaaattaaaaaataggccaggtgtggtggctcatgcctgtaatcccagcactttgggaggtcaatgcaggcagatcacctgaggtcgggagtttgagacccacatgaccaacatggagaaactccatctctactaaaaatacaaaattagccaggctggtggcgcatgcct

SEQ ID NO: 39644 - DNA, 1040 bp, Homo sapiens
aagtaagtaatgagagtaatgagttataacttattcaataaaatgaaaatgtatgagtccatcctgatataaataactgaataaatgggagaaaaggaaaaggttttctttgtggtaaaatgccaattaatatcttaccaatagaaggaatgttggagttagaaagtcatgaatgaatgctaaaactagtgggtgaaaatatgatggggaagaagatatttggataatccaaaaagaacctctgataaattattgattacttataaatgaaaaaatggtacctttaaaagctagaaacctggtgaataccaaaccattttaaccaagtgatcaaagataacatcacctgggataaactgattgtcatttgtgtcctaataagactcactgagaaaaatcatactatcattcagtggtatacctgccttttggcagaatcttaatctaattctgaggaaacatcagacaaatcaaaattgatgacccttaacaaaagaactcgcccatgttcttcaaaaatatcaagcttaagaagcatagtctgaagaactgttacagacaaaagcaaactagagagattgatagttgtacaatgcatgcttctttattggctcaaataaaggagctagaaggacattactgaaatataggtgaaatttgaatgtggaccaaggattagataatagtgtttgattcatgttaaatttcctgatttttgttttgttttgtgagacagggtcacccaggctggagtgcagaggcacaatcatggctcactgcagccttgaactcctaggctcaagtgatccttctgcctcagcctcccaagcagctaggactactagctacatggcacacacaccatgcccggctaaatttatttttaatggagacagggtctcgctgtgcccaggctggtctcaaactcctgggctcaagtgatcctcccacctcggcctcccaaaatgctgggattacaggtgtgagccgccacacttggcccaatttcttgagttttataactgtgcttatgtaagaaa

SEQ ID NO: 39645 - DNA, 1024 bp, Homo sapiens
gtagaaaacccaaacatggttttgtggggtgtgtgcctttgaccccggacttaagcaacaagcgtggtcttgggcgtagctacgaggtggttggtgggctccagggcctgcgtgcccctcgacgtgagcgatgattggcgatgaaggataacagatcgccttctcggccactcagtggcaggggacttgctacttccgggtcggtggcgtctggcgtggagagtttggggatctacagcagccaaaggcttgtccctgactttatatggctgctcctggcgagcgactgagtcgtccgtgaggaaaaagaggcgaggcttttccgagatcgtctcagcgatggcgcttcggtcgcggttttgggggttgttctcggtttgcaggaaccctggtaattagtcttgccccccttctcccagctcactcgcctgggcttgcacagtacattggaacgtgcgggttctattttgtattcgacgtgccggatcgaaatagagctcgcggcactgcgaagaccacagtaggaagttaaggacggggtcagtgctgactccaccctgtgggcatacgtatttttcgtcccctcgggcctaaagattgggggtgtaaaagcggatagacgttagagcgggttcgtgcgctgtccatatccgtcatttttaagccctgtgcggtttttcccgttgcccagggtgcaggttcgcagccctgtcaaccagctccgagccggcagcgaaacctgaagtggaccctgtggaaaatgaagctgtcgccccagaattcaccaaccggaacccccggaacctggagcttttatctgtagccaggaaagagcggggctggcggacggtgtttccctcccgtgagttctggcacaggtaattaaatctgcttgtgattgacaagggcagtgcaccctacagactattttcattcattcaactccaggcactctcccaggtagctgccatgcggcgggtagaggcagggttcgcggaggggctggaacaaacaacaaataggt

SEQ ID NO: 39646 - DNA, 1095 bp, Homo sapiens
ttctgaaaagttaaaaccatttctttaaatggaaaataaatgaagccgtttacctaattggttaaggactcacccgtgggcctcacaccgcctaggttaattcttcactttataattccgtgatgttgggcaagttcctcattctgagccttgggatatttggcttcaaagctgaggaacttgggagggttggataatggcatcacgttctgtggggagatttggctcacatgttagctgtgtgggtgagagccgtgctgtcatgcgttcttagccactggccagtttccttctcaagccatcagtagagatgctgatcctgcatctgccagtcattgctccaggagggaagacattactgtcccagagtgacggtgtcattggggataacagacacttcagaaaatgccaccactgagctgtatgaagtgccatggcagctagtgctggagctgtggattcagccggggagcactgtctggaggagctgctgcagcacatgtgtgtctctccagctgtcaggctggcctttggagtgcatttggattttttgagaatgagagagggaccattggctaactgttttacgctctgaaaaatgacatagaatagcaaagattttacttatttttgctgattttctagaacattttctgtcccagagtgatggttttgaagaaccagcgttcttggaaagatggttttgcatccagaagagtgattttaactaaaatcaggctgcctcccttgaggatggtcactgaattttgtacaactgggacaacggacagggatcctgggttgtttccagtggacaagccgcttctgtgggggcctttgcagttctccccgctcctctcctgtgtcccgctggtttccttcagttgagatggaatacagcatagagtcagtgacttttagaagacttgacagagtttcaggaaaatgctcactgggctttcttacctatcctgctgcagaactttttttttttttttttgagatggagtctcactctgtcacccagtctggagtgcagtggtgcgatctcggctcactgcaacctccacctcctggattcaagctattctcgtg

SEQ ID NO: 39647 - DNA, 1030 bp, Homo sapiens
tatctgttttactctttcctctttcacttttcgctaggagtaatcattagctcccatcttgtattaatttttttttttttttactgtatctaatttccaaaaaaaaaaaatctgtgtgtttgcaactaagttatcttcctatgtgtaactttttgggacttaagtgataacagtaatattactaaaaatcaaccgtattgttgtttttcactgtggtttattccttctgactgctgtgatattttgtgtggatctgctgaagttaatttatccactcttctgttgatgggcctttggtcatttccaggtttttgctcttctgaagagcatgagatattctttcacattttctgctgtgcatgttccatatgtgcatggttttctcttttatatagacctgagtggagtaactaggtcatagggcacacgaatgttcaattttaggacataatgtcctgctgacttacatagttgttgaaccagttaacatttcactagcaatacaggagagctctgagccacctcatggctgacacttggtatttaatttttgccagagggatggttgtaaatggtataccattttggtcttgatttgaaattccttgatcaccagtaacattgaacatgtcttaacatatttattgatgtacatttttctttgatttgcttgatcatgtcttgttcattttatattgggttattgtgtgtgacctagattagaattttttcttttcattggatattaagatccaccattgtgtggctaggagtgggtttttccttctctctcctttccagcatggtgtgtgctttctcagtcagaggtaattcatcgtcctttatttcctggaattatacagacattcttttcttgtttgtttgcatgtgaatgtgtatgtagagattcttgatgctggttctttgccagttctgtgtttttcctagtttataacttacttccgttttctttaagctgttttttgatgagtataaactcttaaattgaataggtcaacctcattaatct

SEQ ID NO: 39648 - DNA, 1064 bp, Homo sapiens
aaagccagaactaattggtaaagacatacactgaagctaaagggatggaaaaagatattccaggcaaatggaaatcaaaagcaagcaggaagacccacctatacttagataaaactgactttaaatcaacaacagtaaaaaaaaaggaaaaagatggtcattatatgataaaaagattattcaacaagatgtaacaatcttaaatatgtatgcatgcaactctagagcacaagattcataaaacaactgctggtagacttcagaaaagaaatggacagcaatgcaataatagaattcaatcactgagaaagaaaatcaacaaacacggcacataaattggattcaggaccacgtagacctaacagatatttatagaacattctccccacagccgcagaacatatattcttctcatcagtgcatggaacgtttttcgagatggactatatgtcataccaaaaaacaagtctcaataaattgaaaaaaaccaaaatgataccaagtatcttctcagaccacagtggaatgaaactagaaatcaattcacagagaaactctcataactatacaaataattggaaattaaatagcctgcttctgaatgaattttgagtcaacaatgtagttaagatggaaattaaaaaaaaattgaaacaaatgaaagtggatacacagcataaaacctgcgggatacagcaaaagcagggctaagtgggaagtttatagtgttaaatgcctacatcaaaaatagagatcacaaattaacaacctaatatcacacttcaaggaactagaaaaaaaagaaaaaaccaaattgaaacctagcagaacagaagtaacaaataccagagcagaactaaatgaaatggagaccaaaaaatgcagtacaaaggataaaaaaaatgagaagttggttctttggaaagataatattcatagactgttggtcagattaaccagaagagagaggattcaatcagaaataagaaagtagacattacagctgataccacaaaaaagatcataagagacttctgtgaacatctgtgtactcacaactgaga

SEQ ID NO: 39649 - DNA, 1053 bp, Homo sapiens
tcagcccccttcatggctcacatcaaagacgaatggtggagctcctgctctgtagaagcaacacaatggcagaatcgggtttgtgtctgggtggtgccctggcttcacccaggagcaggtgtgggtacagatatggtggtgcccaggatcccaaaggggttgtggaccgtgtctctggttgtgcacgcatgtgataatgttcactcagtgtcagggttgcaccactccagttgagcacctcgtggaaagcggtgaatggaccatgcaccctgcacggcctgttagcgcttgccgatgtcctagtgattgccacgtgccactgagtccaggtgcttgctggccgaagcttgagtgtctctctgaaggtgactagactagaaagggaatagagtgtaaagaggaaatggaggtgttacgagtcaaatggaaaaaaaataacagtttagaaaaaaattaaaagtaactttactgagttgttataagtcaaataatcttaatgtgttagaggcaattatgattcaaaaaacagaaacagcaaaatgtagaaacctaacaacctgtctttgagcttttcataagtgtggaaaatctgcattaagctgcatgaaacattttttattttgcttctttcacattgttcctgatagggcaccattcccaaactcacagctaaatccaactgccgctatgaaattgagtggattactgagtatgcctgccacagagattacctggaaagtaaaacttgttctctgagcggcgagcagcaggatgtctccatagacctcacaccacttgcccagagcggaggtaagcaggtgctttctgcctcctggcgctgcttaggaagaaggggatcgagagagggaacgggacagtaggggccaagtcagtccatgcatgcttctgggttggagagagctgtagtttgggctggtgtttcagaaataggattcaggtttgactaagtaagactgtaatcttctaatacctattcatataaaacaagcctcttcttgttaatttccctgtttttaggttcatcctatattt

SEQ ID NO: 39650 - DNA, 1256 bp, Homo sapiens
tagaggcgtgtatggggaatgtggctgaagatgaccctggaacggtgagtgtgcagtattgtaagaaacttgtatgtcctgcagaggagctggattatatctggaaatctgtgaagtcccaaggattttcagcaggggtatgacatacatctgactcgtgaatgagaaaatcagtgtggcctctggatggacctcgcatctggtctgagcactccctgcacccctcagcttctccatcattctctcatcgccctcacctcctagcctacctacgctactagcctccttagccatgtctgcaccctgaatcacgtctctcctacttggtgtccccagtccccagggatgcagcctgtatcttccccatgtgcccagcccctctgatgcctgaccttggttctggctcccaggtcaccccaactggctctcctggactccggctggctcaggctgctctgctgtggtctgaatctccctgcaactttgtgatgacctcctttggcctgttctgttcagggctttttattaatgacttggccgagatctttgagagtgtgctgatctcatttggggatgctgggaagacagaatcattatccaaaaagatcgaaatggacgagcaggatatgagaagggcattatatcgtttcagacttacagggaagaggtgtggacatcgatgagctgccaaccaaacaaaaaacacaggagagaaaaaccaaagaacagaaagaaagaaaaatagaaaaaaaaaagaagacccgcagtagagtggggagatcttgccttgtagttatgagcatagatgaggccacaccctctgggtttggttcccagctgccctagtttttagttatgaaatcatgggcccagagggagctaaagcccagatgagctgaggcttgacaaaacgggtgaaggcctcccatagctccatttttccttttcattataaaaattttcaaacatggaacattaaaacagaaatttacatgcctgccactctgacagccattgatgttttgccagatttttcatgtaagccatgcgtcattgatggctcatatcaccccaccctgatgccaagaacgaacattcctttatgtaaattcagtaccatcgttgtacttaacaaaattaacagtgacatcctgatgttaaaaaacccatgttttcctaggctgttttcattatgattgtaacaaggagcctggacagagagatgtcaggtgttttgtgggagggttttgagctgg

SEQ ID NO: 39651 - DNA, 1058 bp, Homo sapiens
tttgaaggtgaacgagtgttaattggctatgtaatagaagtgtggtttaagttggatctctaggaattattcatgtgaatctaggttcatgtacttttcaggatgcaagcgcatcttttggtcataatattttttaccagtttaaatctagtttgttgtaaagcgatgctttattattggtgatttttttaaataaagatgttagataattttttggaagagcagaattcattaggataggctaataaactactcacaatttaagtggctcagcccattaaaggtttattttcttagttcagtgctagtctttggggatggggctggggtcgggggtgcgggctctgctccatgtggtcatttggagacctacgctttttccatcctgtgtttctgccatctgcagatgtgacttccaggggctctgcaggatgggaacatcaatttgctttgttttattttttttccaggccagaaataagtcacttggcccagcctgaatatcaggggaggctgggaaacggagtttagctatgtgtctagaggaaaaattaaactagttgggtaagaggtagcattgtttttgccacagagaaatgggtgctgctgcctcctccttaggcagagagctccttggttccatttgaaaaccttccttccccttttgctggaattgagagactgaggacacaaagtggtgtgctggagaataaactagagcctgtggtgccagactggcaacttggggattgtgtgagtgagggagagattgtgcagagctaatcctaacattgctgatgagtggacagaaaccataggcctcatgaatagtgatttctgaagtcaaagcccagtatgcttaaatatcaacccaagtggtttgggagaggggagcacagcttactgttctgctaaaattctttgaggaattaagtaagaatacgtgtaaggtacgtagcaatggttatttacaaaatggactctgcctgcagattattagtatgtctcagatgtaaaaccagctcaaaagtactaggacgatttgtagtagtatttaa

SEQ ID NO: 39652 - DNA, 1047 bp, Homo sapiens
tcctgcattcttcatatctctgttcctcatcagtcactgcaaagctgatcagacagattggcatggtgttcagcattttgagttccagactctggcgatgggagataggtcatttggaatttttccctcatcccctcctcaaaaccaaatcagaaatggagaaaccagatggtgtcagaagggagttgtgggtctcagcgctgtatcctcttcctcgggactgatactcggccagtcatgtggttacttaacttccttcaaaggggaaaaaaatcataaatggtttaaaacattgcccgtgatctcaccacttaaacacaatgttaattttcattacctttatttatagatgtatgttgtttttaccaagtcaaaatttttatggtaacaaatcttaatgtttctcaaagtgtagtattttgtaaatacttttctatgtttcacagttccattaataatttttaggaacttccttgttgacatggtgtggttttactatttttgaacattttccttattgttggattaatagcgcgtttccagtgttgctaattgtgctattatgtatcctctctctacctcccattgaaatatttcctttggataagttcccagctgtgggataaagtcagaagctagggtcattttgtttgtttgttttatatggtaaaatatacaacataacgtaaaatgtaccatcctaactgcttttaagtgtgtagcttggtgacattgttgtgtaataccaccaccatccatctccagaactttttgatcctcccagactgaaactcagttcccattaaacacgagctctccattccctctcttctactttttgtctctacggatttgactgttctagatacctcatataggtggaatgctacagtatttgtagggctgttttttgacccttctatgcattatacctcatttcccactgtcccttccaagtctacttctagcagagaagaatgaggtaagatattttaggaatgaacggattagtgatccccatctcttttccccattgacaggtgatct

SEQ ID NO: 39653 - DNA, 1804 bp, Homo sapiens
gagggagataggggatgtagacagttcttttgacggggcagcaaatgattatttgggagaaagaatggacagaaattaacttgcaaatgattctctttggagcctgaatgaggaaggcattatcttgtgcacaagtctgtccaggtgtgattgctgtcctcagtcttcttttgtgggatagataatgagatttccgagtttcttttggaaagaagccttcttggtcaggtaaggaaattccagagaaagtctctccctgtgcttgagggtggaggtaacaaggcacggttcaaaggatgaccttgattctcaggcagcttctcagcatgtcaaagcactgatccttggggtattgctttctgagccccagcagtccaaaccacaaagaccacagataggaatctgaggcttggtatagctcaggcctgtgggtgaacgatgagggctgtatgtgtaatacaaaacaggaataagaaattaaggctgagggctgggcacagtggttcagatctaacccagcactgtggaaggccaacatgggaagatcactcacttgaggacaggaattggtgaccagcctaggcaacatagtgagaccccatctacaaaaaatttaaaaaaaaatttagccaagtgtggtggctcatgcctgtagtcccagttactctggaggctgaggcaggaggattccttgagcccaggaggttgaggattcagtgagccatgattgcactgcagcctgggagacaaagcgagcccctgtctcaaaaaaaaaaaattgggaggcagaggtaggaggattgtttgagcccaggagtctcagactagcctgggcaacttagtgagaccccatctctacaaaaaattagccaagtgtggtgatgtgcacctgtagtcctggctacttgggaggctgaggtgggaggatcacttgagcccaggaggcagagattgcagtgagctgaggatgtgctactatactgcagccccttggcaacagagcaagatcctgtttcaaaatagtaatcatataaacaacttcagcaaagtctcaggatacaaaatcaaggtgcaaaaatcacaagcattcctatacaccattaacagacaaagagagccaaatcatgagtgaactcccattcacaattgctacagagagaataaaatacctaggaatccaacttacaagggatgtgaagaacctcttcaaggagaactacaaaccactgctcaaggaaataaaagaggacacaaacaaatggaagaatattccatgctcatggataggaagaatcagtgtcatgaaaatggccatactgcccaaagtaatttgtagattcaataccatccccatcaagctaccaatggttttcttcacagaattggaaaaaactactttaaagttcatatggaaccaaaaaagagcccacattgccaagacaatcctaagcaaaaagaacaaagctggaggcatcatgctacctgacttcaaactatgctacaaggctacaataaccaaaacagcatggtactggtgcaaaacagatatatagaccaatggaaccgaacagagtcctcagaaataacaccacacatctacaaccatctgatctttgacaaacctgacaaaaacaagaaatggggaaaggattccctatttaataaatggtgctgggaaaactggctagccatatgtagaaagctgaaactggatcccttccttacacctgagacaaaattaattcaagatggattaaagacttaaatgttagacctaaaaccataaaaaccctagaagaaaacc

SEQ ID NO: 39654 - DNA, 1049 bp, Homo sapiens
gaacatgcttccccctaggagccctcctgtgccctcttcctgccactgctgagcatcctcctgacctctgacagcgcaggccattgttgcccaatcctgagctgatgtcagtgaatcctacgtaccgttgcctttgtgtatggcttcttgcattcaactttttgtgtagggtacttttcagaaccttgagctcagacctaggtttggatctgaattctaccatttactgctggcacgatttctatatttctgaatatccaagcgtaggagattattttgtcttcatagggagaatgagaacattaaattctaattaggtaatgcacattaagtgcctagcttattggctgactcataataaacatctagcagattttggctatttttatgtctcaggcgagtattcttttggttctatcaagttccatgttactgtattgacttttaccctggatttgcccattcagaacagccaccccatcttttctctcaactgggagtgtgtggtcagtttcctgtggaacacagaggctgcctgtcccattcagacaacgacggatacagaccaggtacgtgtgctttcacctggccctcgtgctgagctgcctgctggacatcctcaactcaccccagtgttccagctctgaaccgacccctgccccttctttctgaatcagttactatgttgcattgacaatgggtgtctgcaggtcacccagagttcctctccactccgcagctcccagctcctgggataagaaccaggtccctcagtcttactctctgctcactgtagtttccttccttttgtttccattcctttgtgccttccatgtggcagtggtatcctggtgggctctggggcttctgcaccaccggcagatgtctgactagtcgatacgtcactccacacctaaaccatctcagtgcctgtcccctagagggtagagcccgtatgttttaatgtgaccctatccatagagcacagcctgcaggtgttaatgtgatcctgtctatagggtaaggcctgtgtgtctctcacctgtgca

SEQ ID NO: 39655 - DNA, 1689 bp, Homo sapiens
cttgagtgctcacaaggaggcagagttctccagcgtggttttttgttgtgtttcagacctggctggaaatgagtacgacctgactggcctaagcacagtcaggaaaccttggacggctgttgacacctctgtcgatgggagaaagaggactttctatttgagcgtttgcaatcctctcccttacattcctggatgccagggtgagttctccttggtctcttgattggcgtctgttcattttattagagcatttgactcaaggtcatcgccttcctcatgcccaaaccacttattctgttcttccaggcagcgcagtggggtcttgcttagtgtcagaaggcaatagctggaatctgggtgtggtgcagatgagtccccaagccgcggcgaatggatctttgagcatcatgtatgtcaacggtgacaagtgtgggaaccagcgcttctccaccaggatcacgtttgagtgtgctcagatatcggtgtgtgttcagaccagcaatgagatgttgtccccgggtgactccatttcccatttcccttgaacctctgaatcttctatcttgtttaaaacttgcctgtgttttcgtggagtttcagccattgctagggtttgacgagaatgcactcatttcttcaggtcttaaatgtttaataaatgttacgtagtttgcacatggaggtcaaagattgggtactaactgtggctatcatttatttaatttttttttttttttttttttttgagatggagtcttactctgtcacccaggctggagtgcagtggtgcaatcttggctcactgcaacctccgccccccaggttcaagtgattctcctgcctcagcctcccgagtagctgggattacaggcacctgccaccacgcccagctaacttttgtatttttagtagagacggggtttcaccatcttggccaggctgatcttgaactcctgaacttgtgatccacccgtctcggcctcccaaagtgctgagattacaggtgtgagccaccgtgcccggccccatttgattaatttttaaaataaacaggaaacaaatcaggctgctgatttatattacagggctcaccagcatttcagcttcaggatggttgtgagtacgtgtttatctggagaactgtggaagcctgtcccgttgtcagagtggaaggtaggactgggcctgtccctacaagtcattttaaatgtatagagtagcagacgttctgaacgatgccttagatatgagaccgtgtgataacagccatagctggggtcatgagacacacgctagggggaggataatttcttttccttgagcttttttttttactgaagcatattgctaatttcacgagtgacattttccttgtgtgcctggattgatgggattttggcgtctgatgcttgaagacactaatgtggggtttggttttgtgttgtttgatgaagcaagtctttattcggggacctagactttcctagaaagctgtttgccaggcgatttgtattatatataaacaaaatcatgtggaaatggcttttaatgcccatttatagctggtatttacctaaccaaaaattgtaaaagtttttttttttttttttgagaccgagttttgctctgttgccaggctggagtgtaatggcgccatctcggctcactgcaacctctgcctcttgggtt

SEQ ID NO: 39656 - DNA, 1028 bp, Homo sapiens
agtggccatttaagaggcgcccctgccttcctcccgggaatgcattcttttcccagggctgttaattattaaaattccttactggggaaagaattcagcgatatttctcttacccgttttcggtaataagagaaatatggctctgtcctcaccggcccacagtcagccagactttaaggttatctcacttgttccttgaaaatcactgttatcctgttcttaaggtgcccagatttcatattgttcaaacacacatgctttacgaacaatttgtgcagttaatgcaatcatcacagggtcctgaggcgacatacatcctcagcttacgaagatgatgggattaagagattaaagtaaagacaggcataggaaattataatattgattggggaagtgataaatgtccatgaaatcttcacaatgtatattcttctgtcacggcttcagcaggtccctccgttcatggtccctgacttcccgcaatagtccagggaccaaaatgggatgtattaaggaaccaaacgtgttaaatttacgaaggattgctatagctttgttttgaggcttattttgacaaaacgttattccctattttctgaatcacactcctgttttcaagtacttgtaggtattacattattatcttaaattttttttttttttgagatggagttttgctcttgttgcccaggctagagtgcagtggtgcagtcttggctcactgcaagctccaccttctggtttcaagtgatactcctgcctcagcctcccaagtagctgggattacaggggcccgccacctcacccagctaatttttttgtatttttggtagagatgggatttcaccatgttggtcaggctggtctccaactgctgacctcatgatccgcccacctcggcctcccagagtgctgggattacaggcgtgagccaccgcgcccagctatcttattttttttcgtgatcattagtagattggtcaaatattgaatacccgtgtgaggaatcacctagggctgtggggtta

SEQ ID NO: 39657 - DNA, 1027 bp, Homo sapiens
gtgctgagcgcatcgctgagaaggagcgggtgctctgtgccctggtgcggctgagaaggagcgggtgctccgtgccctggtgctgagcacatcgccgagaaggagcaggtgctccgtgccctggtgctgagcacatcgccgagaaggagcaggtgctccgtgccctggtgctgagcgcatcgccgagaaggagcaggtgctccgtgccctggtgctgagcgcatcgccgagaaggagcaggtgctccgtgccctggtgctgagcgcatcgccgagaaggagcaggtgctccgtgccctggtgctgagcgcatcgccgagaaggagcaggtgctctgtgccctggtgctgagcgcatcgccgagaaggagcaggtgctccgtgccctggtgctgagtgcatctccacgacggcagcacctgatggagggaagctgggtcagcatcgctgctcctggtcacagattgtagacagcgccctggtgcatctgctcatagcacctgtggcccctgaatagaactgggaaagtgaatgttctgctttctgggtgagttgatgatgggaaagttgatcagcctcattcacttgcataactccacagcacggagctagcactctgtgtttctctgttctctgccttcctcacacttcggtgaatccttcagtcattcagaatcagatgttgcatgtcacaggttgtgccttctcttgctgtcctctttcccagtgctcggtaaatcttgattaaaggaaggaaggaaggattgtttcagaagccttcaggggccctatcatgcagagaaggaaagtctaggctctctctgacacagcttgaagatgtctgagaggctcccatgtaccagggtagccttgcaagctgctgctcctacacatgcctcagccatcaggttattcactagttcccaaagtcaccctgtaacctggtgggtttacatatgctgctcttggtgctggaatgccttggcccaccttcctcatccttccaaacctacttctagtgcccctcct

SEQ ID NO: 39658 - DNA, 1033 bp, Homo sapiens
gtattttcagcttttgaatgtttatggtgttccggtgacgtcattacaaaatgaaaggattgaaactggaagttcttcctgaaagaagcaaaatgtgaatttttataaaagataaaacccagaagtgaactttccctgcattctctgtcatggagaggctacagctgccatgagatgaatcctgcctcctgacatggcagctggtcttctgtgtgggtttgagggaccaggccaggctaggatcccgtccatgttgaatgtttagagttcgacttctgtgagtaggaaaagcactgtttatagggctttggtgtttgactctaaaaccagagaggaagattctccaggaaacctcggtttcatgatgttcagaacatcaggattgggagctgtttaaatcccttaacacactgacaaggtaataaggactttaaaaaaaagaaacagaagttgaaaccaagagcaaaaactcagatggtggattttgagggatgcaggtaccacccgggggtgacgtggaatagtgcctgagatttttttttccccaaatgttatcagtgttgtacattgtagaatcatgtaaatatggccagacgcggtggctcacgcttgtaatcccaacattttgggaggctaaggtgggcggatcacttgaggtcaggagttctagaccagcctgggcaacatggtgaaaccccgtctctactaaaaatacaaaaattagccaggtgtggtggtgcacacctgtaatcgcagctactcagaaggctgaggcaggagaattgcttgaacctggaaggtggaggttgcagtgagccgagatggcgtcactgtactgcagcctgggtgacagagcgagactagatctcaggaaaaaaaatcatgtaactataacaaacaggtagcaatgttcgccctaatagattaccatttttagttcttttagctatttcttctggaatttacctcagtattttaaattaacatcctatatctcatctgttgacttcctgcaatagtagatgaagataga

SEQ ID NO: 39659 - DNA, 1025 bp, Homo sapiens
ctcagctttatgttatgttatgttatgttatgttatgttatgttatgttatgttatttttttgagacagagtctcgctctcgcccaggctggagtgcagtggcgcgatctcggctcactgcaagctctgcctcccaggttcacgccattctcctgcctcagcctcccaagtaactgggactacaggggcccgctaccatgcccggctaatttttttgtatttttagtagagacggggtttcaccgtgttagccaggttgatctcgatctcctgatcttgtgatccgcctgcctcagcctcccaaagtgctgggattacaggcgtgagccaccgtgcccggcctcatcaactttataatgagacagttttgaaggaaatgatgtcattcgaggacctcccatagtcgcttcacggaaggttgcagtttgaaggaaactgtcagcgaccctatgaggacacactgtactggacaacagtggtgtctaagctgagaggggtggcagagttcccagcttttaaaatttcttacagtgatagcatcatatgaaagtaaaaccattttcttgaaagaaatgaaggaaggaagaaaaggtagagttcctaattgtttggaagacatactgttagacttcctgtcttagtatgcatgccagtattttaagaataaccactaaaataatataaatatagtatgtaacttccaaaacagcggagaagaaaaggagaagtaaaaatacttaaatccccaaagaagacaagcaaggagaaaaataaaacaaaaatcagataagtagaaatttcagcccagtatggtagaaataaatctaaatatatctataatcataagtatagcttgactaaacttgtcagctaaaaaacaagttgtcaaactggatttcaaaaacaactctgtttacagggaacatgcctaaaacaaggatacagaaaagaccaaagtcaaaggagaagaaaagatataccagaaaataatctgaaagaaagctgcagtagttatgttaatataa

SEQ ID NO: 39660 - DNA, 1125 bp, Homo sapiens
tttttttttttttttttttttttttggagacagagacttgctcttttgcccaggctggagtgcagtggtgcgatcttggctcactgcaacctctgcttcccagattcaagtgattctcatgcctcagcctcctgagtagctgggattatgggcgtgtgccactacctcctggctaatttttgtatttttagtagagatggggtttcaccatgttggccaggctggtctcaaactcctgacctcaggtgatccacctgcctcagcctcctagagtgctgggattacaggcatgagccactgtgctcggcctaagtcagcagatttctgactgatgcaattaactacatacatgatgcaattaagttaggaaccaagaacaaacaactgaaaaatagaaatacgtttgaagactaaaactcacttctgaataatctatggtccaaagaagaaatcaaaggtagaaagtaaaatacgcttagaactgagtgatgatgtgtctcttggatgcatttcgagtggtcctgagtggctggagctgcttctgggtgagtgggtttctggcttggagggagaggtctgcatagctctcagacctgtctgtggagtgtggtggtgcttctttctgagcagaggtcaacccttgcaggcccacctagaactggacgccaggctgtccctgtggtttcttgtcttgctgatgttttagattgtttggcttaagctgaactttgagagcggcagcccttgcggctgggccgcgggttggcctgttgccctcaacctcagttctttgagcagccggcatcttcagcagcacaagatgcgccccgctggggttgcctcttatcaccagcagcacaggaggaatttctgtttatgtgatcctgttcctgtgtgtgtggccccaagtgacagagggccagagagattagaagtgtcaagtcgttacactcttgagtgtcatcttgctccctaagcgcaaagggaagtctccgtggttgtttctcattttctattattgtcccaactctgcttgagtgttcgatgtcatggaaacgcactgctttttcccacaagtgtgcatgtgggtcttgggtgggaatggtgaactccgctggtgaggca

SEQ ID NO: 39661 - DNA, 1030 bp, Homo sapiens
gtgcagatgggggtggggctggcgggggtggggctcctgcccatgccctctctacactggagtaattattgtctcctttttttttatagggaaacagtgataagtaagctgaccacttgctgtaggagaagttccaacgtgtcctacaaatactcaaaggtaattttctgtggcgagtctcttgaaggcctgcctccccggccccctgtgctgcgctgtccatgtcgttctcatcaggggtgccaaggaaagcagtcacaggctgactggaatccagaaaggaaagcaacacccgttgcctcagccacttacgccagcacatttttttgttatttttttccctcaagtttctctcgtggttacaactgatttccttgaagtatttaataattaggttgtttccactgtttttggctgttctttaaaaaaaaaacaaaacacacacacacacagtagtgaagatagttgtgcatgtagcatttggatgatttctttcaggtaaatttgcagaaaagaggcattatctggatcaaaggacataatgtttgtggtctcgatgggtaatgatgaattgctctctaaaactaggcttttgactggagtccctcctttgacattcctcccctgccatgcagtgggcacctttcagtctatgagtagcccggaagagccccttctcccccagctgcgctgggggatcactggtctgcttttcggtccaggccatcccgaacgccttctgcttggtcccacccttggctgtgagactcctgccaaatgaccccactgccaccctcccaaaccctcctgccttggtgcagtctcattaggaacaggaaggtgttgccagccctcgtcttcctttccctgggaactggagatgcagtgactgtgaggacagtgggccagttcttccccagctcgtgccagcagagagcatccctgatgtggtggatggtggagcagaatggggtctcttagggggctcacgtggtctctgctgttgatccctggcaggtgaataaggaag

SEQ ID NO: 39662 - DNA, 1244 bp, Homo sapiens
agcttccggcgggatgttgaactggtcattaatgtgtcccctgagttggagctcattctgtctcttttctcttttgctttctgtttcttaagggcacacacacgtgcgtgcgagcacacacacacatacgtgcacagggtccccgagtgcctaggttttggagagtttgcctgttctatgcctttagtcaggaatggctgcacctttttgcatgatatcttcaagcctgggcgtacagagcacatttgtcagtatttttgccggctggtgaattcaaacaacctgcccaaagattgatttgtgtgtttgtgtgtgtgtgtgtgtgtgtgtgtgtgtgtgtgagtggagttgaggtgtcagagaaaatgaattttttccagatttggggtataggtctcatctcttcaggttctcatgataccacctttactgtgcttatttttttaagaaaaaagtgttgatcaaccattcgacctataagaagccttaatttgcacagtgtgtgacttacagaaactgcatgaaaaatcatgggccagagcctcggccctagcattgcacttggcctcatgctggagggaggctgggcgggtacagcgcggaggaggagggaggccaggcgggcatggcgtggaggaggagggaggccgggcggtcacagcatggaggaggagggaggcgctgctggtgttcttattctggcggcagcgcctttcctgccatgtttagtgaatgacttttctcgcattgtagaattgtatatagactctggtgttctattgctgagaagcaaaccgccctgcagcatccctcagcctgtaccggtttggctggcttgtttgatttcaacatgagtgtattttttaaaattgatttttctcttcatttttttttcaatcaactttactgtaatataaagtattcaacaatttcaataaaagataaattattaattgggtgttaccattttttccttgatagtgagacgttcccgagcgagttacccatctgcctgcctgtcttttctttctgttaagtgactgaatttgggttttaactctggtgttctcgttgaccctttatgaggcagcactttcatttttctccagagtctcctggtcgtaggtgttaactttgggtccaatctgccttcccttggctctttctagatccgatttctttaccttctccaggccaacctcggggtgtggtcctgttcatcaaaacaatgaacatggagttta

SEQ ID NO: 39663 - DNA, 1022 bp, Homo sapiens
acatacactcacacacacgtatatatagtcatttagccactgccatgatgaaaatagagaatatttccatcacccccaaaaggttcttcatgtctctttgcagttaatacccttttcttctcacctccagaccatgcagttttagcttttccagaatgagctgtaaatgtaataatagggcacgtcaccttttgtgtttggcttccttcacttagcatgatgaaactcacccacttgttggatgtatcagtgttttgcttgttgttgctgtatagtactccagcatgtgaatgtcagtgtgccacaattcatacactgtttagctattcaccacttgagggacatttgaacggcttccttcagagggattctgatgcagatgctatagacatttgggtacaggcctttgagtggatacatgttttcatttacgttgggttaaaaactcaggagtgggattgttaggtcatatggtaagtgtgtgtttaattctatgagaaactgtcagactgtcagaccgttttccgaagtggctgtgccatcttgcgttcccaccagccatgtttgaggaatcctgtcgttccacattctcatcagtgtttggtgttgtcagctttttttttttttgagatggagtttcactcttgttgcccaggctggagtgcagtggcgtgatctcggctcactgcaacctctgcctcccaggttcaaacgattctcttgactcagccttttgagtagctgggactacaggcgtgcaccactgcgcctggctaattttttgtacttttagtagagacagggtttcaccatgttggccaggctggtcttgaactcctgacctcagatgatctgccctccttggcctcccaaaatgttgggattacaggtgtgagccaccacacctggtctggtgtcagctttctaaaagtcattttggtaggtaatggtattattgtgacttgacttttcctaattactgataatgttgagtatctttgtctgtacttaattgccttctg

SEQ ID NO: 39664 - DNA, 1046 bp, Homo sapiens
atgaaaaaaaatatagtagaagtatggtttacagtgctacaatttaagcacattaattgtgatccatggttatttactctacaaaaattacttagtgctaaattactaaaacttgctagcatttcccttttaaaaatcacactggattattttatcgtttctgctggtttttgttcatgttaacagctcatttccaaatatatgttaattcagtagaagttcataaagaacttaaatgctataatgctaacaaacccctgtatcagaggaaccagcccccaatatttcagcataggttctattttccataagtgttggccagctgagaaataaaaagagtacaaagagaggaattttacagctgggccgctgggggtgacatcacatatcggtaggactgtgatgcccacctgagccttaaagccagcaagtttttattaagggtttcaaaaggggagggggtgtaagaacagggagtaggtacaaagatcacatgcttcaaagggcaaaaaggagaacaaagatcacaaggcaaagggcaaaaacaaacatcacaagacaaagagcaaaagcagaatgactgaaaagggtctatgttcagcggtgcatgtattgtcttgataaacatcttaaacaacagaaaacagggttctagagcagagaactggtctgacctcaaatttaccagggcggggtttcccaatcctagtaagcctgagggtactgcaggaggccagggtgtatttcagtccttatctcaaccgcataaggcagactctcccagtgcgactgtttatagacctccccctaggaacgcattcctttcccagggtcttaattattaatattccttgctaggaaaagacttcagcaatatcttccctacttgcacatccatttataggctctctgcaagaagaaaaatatggctgtattctgcccgatcccacaagcagtcagaccttatggttgtcttctcttgttccctgaaaatcgctgttactctgttctatttcaaggtgcactgatttcatattgttcaaaca

SEQ ID NO: 39665 - DNA, 2077 bp, Homo sapiens
ctatgtttctttctagaaaggtattaagttattcataccagtgtgaaagacaaaatgcactggataattttatttacaaaagcatattctaaattgtaatgaggtatagatcgcttaagaggaaagggctccttatatattcagaaaataaaacattaataacagcaacaatattctcaacagaatccacggtcatccttgattagttcattcagtcctgtgtaattctttttccacttgatctttagttagcagtctcatgaatttatcttcttcttgattagagttctagaaatcctgagtcagtccactggtatcttctcaaagttgtttaaacattacatcagaagactgtactgcaaggtacctggcatagtccttttccttgggtcccaagacagctcttctttgttgaagacaggcactgtggcctgtagctgattgtaagtgctgtcagggaagcagcaaggtagaacgaaaacctatctgtaaatgacaaaataacttaaagtggctgtggttaacttattactataattttcaaaagtgaaagatccaatgagatttcattataagaataaagcaattaataaggatatttggttgtttctttgttgtacaagacaagattaaagtcattccaaaatttttttaaacaaaatattcatataaacataaggattctattttcaagaaagagtggctattccatttttataaattagatggaatatccactctttcttgaaaataagagttaatctttactgggaaataaaagtatataaatataattactgagaaaaagaagtttagatataacatatgatagttctgatatatgccaacaatataccaagcatatagttaaaatataccaagaatatcagagaaagagattctgtaagtccggaatatgtcctgaacatctatctgtgcttattaatgaaacatcataggtaagtaatgtgaatatccagttgaaaaccactggcctggaagatactagattcaaattaagttgggaccaagtcaacatttaaaaacaaagctgaaattatgacccataatgctgtgttgtctaatatcgaacaaagtagcaccaggactctgataaatagcagtgtatcattgtcagtgagagcactgacaattttctgttaacttctatagcaagcagagtctgaaatatttacaacattttacctatacacatttaacctagagaaggctaagcatttcttctgacttgacaactcatcaataacaacatgacagataaacctaattattttctagcacttctttttttaaaaggtgaaagaacaaatctttgtgattgtttcggggaccaccatctgggaaatctcaaagacagttttaggtgcaaatgatatttatgatttgattttggtaaggtaaaatattaaaagttgccaggagatttgaaaacttcaattaagataggatcgtgggttaccaagaaataatagatgactttatatttaacccaagtgacaataaatattttgaaagtaaacataagtggtaacatgatcgtcaagaaactttcctgaaggagaaacttgttccttaaataatcaaggacataataagttggcagaaaccataggttttcatagtaaaacagagaatcttgctgtttgtgcagataatgtagaaaagtaaagaataacttttacagtctattaagagcaaaccagtaatctgataaacatttgacgttgaaacagagaaaacacgattttagttttgtatcagtataacatttgatactaaaggtctttttaaaaaccttatttaaaaccaccaaacttatccagtcttgaccatgacaaataaaattccctttccatgaaccttctacaactttctgtattcaaaatgaacacattcattaatggactcaagacacaaaagtatataaactttttttttttttttttgagacagggtctcactctgttgtccaggctggggtgcggtggtaccatcatggctcactgcagcctcgacctcctgggctcaagtgatcctcccacctcagcctccccag

SEQ ID NO: 39666 - DNA, 1025 bp, Homo sapiens
tctggtaaacccataaagagtagaaagaaggtagaaaggcagaaagtgggatagagtggaaagtgggatgcagtgatgatatttattatataatatttgatataacttcagtctaccagtaggaacctttgttgggtagcaattgcatactcattttcactgggtgttttctgatatttctcttctaggaagctgtgatcttaatttaaccagtcttttgtcggactcttaggatgtttctgtttcttttactgttatgaatgaggttaaaagcattgtttttagcttaatctttatgtctagtcaagatgttttattagagtaaaatcctggaaatataattactataccaaagtgtgtgtgtgtgtaaatatatgtaaaattataatccattttattctttacagaattttacataccgagttttacgtataatgggagctgtataagcgttgacataatgtggtaatagatgaaacaggagctggcagttgaccaattatgtaggaccttgtagtttcccctctactttgtgtttaaatttttgtatgatatttattgttgtataatttaacaaagacatacttgtgtatattacatgtgtagcttgataaattgttcaaaagcaaatacagtgttataaagtttacctaagtgaagaaataaaatgtgagcagcatcctagaaaatctcttcctacttcttgcacacactaccctttctttcctcattatcctgacatttactgatattttacatctactactttcactcagcatggtgcttgtgaggttcatctatgttgttttggttgatggtggttctttcattcttgctactgtaaaatacttgttactgcaaaatgtgtaacattttgctcaatgggtataatgtttatacccattgtataaatgtatcatggcatattcatttttttaaaccatctgaacctttttttttttttttgagacggaatctcactctgtcaccaggctggagtgcagtggcacgatctcggcttacca

SEQ ID NO: 39667 - DNA, 1135 bp, Homo sapiens
atgtgtagatttttgtgagaggaatgtgcccactagaggaagtgacttgaaaacagtatagatttgcttttgatagcttgacgtgttataaattccttattgtaaagggtggtaatactagacaagggcattttgtgggatatcattcttgagagtccaaaatagtactgtacaagtgattttgcttttctggtgagtttgcatgttcgtctggctaaaagtgaaacccaaatctttgaaataccttatacccgtgttaagtctgtgattctgaattttagtagctgtatacatacatatgtacaatccccttggtatcagaggtggtttggttttgggacttcccacggatcccaaaatccgaaaatgctcaagtccctcatacaaaatgatgcagtatttgcatataaccaatgcacaacctcgtatgctttaatctcgagattatgtgtaatgccttatgtaatataaatgctgtgtaaatggttgttaatactgtatagtttggggaataatggcaagaaaaaagtttgtacatgtttaatacagatgtagtttttcttcccaaatatttctgatctgcagttggttgaattcatggatgtggaacccacggatatggagagccaactgtatatacttgttatttttatttttttaacttcattttttttttacacagcctggcttgctttaaattcattaacgataaacaacttggaaactatggaaaacacctgaagagaacttgagtttgcaagattttaattttttattctgacagccggattatgagcccttaggaggaacgggttaagcattcacataaattcaggaagatgtttacaacatgaaccagtgctttgtagctatattttaagagatttactttgaatattattttgattagaaatcttaaacatgaatggctggagtggtttaatttcattaaggacatatgttggtaagacaggattgatgtttaatttgtattgtgaccactggttttgaagtaacatgagtgaagaaaaaagtcctggcagtaccaacatcccttggtatctcatcccagggggatttgttccaggacccccatggacactcaaatccttggatgctccagtccctcatataa

SEQ ID NO: 39668 - DNA, 1030 bp, Homo sapiens
cctaatacaatgtaaatgctgtgtaaatagttgttatactgtatcttttttgtttgtattattactattactgttttagagacaagatctcactacgttgcccaggctggactcaaactcgtgggctaaaacagtcctcctgccttagcctcctgagtagcttgtattactttttattgttgtattcttatttttaatgttttttcaaacattcttgatctgcggatgcatatcccagggtttcagagggccgactgtataacctcacctctaattcagtggttcttataggagagcagcacatgagaagaggccacggtggggcgggggtgagttggacatgtcgggcttccgtaaactgcttcacccaccctccctccccaaattgtcttccttcctctccaggctcttcgtggtgattaactattgctactaatgaggattgtatcccttagatatgttatagcaagaaaagattgagaacacgtgccctacatcttatattagaactcatgttgaaaaaagacagtaatagtttccccagagttctgaattctcatctgagttgtagttctttggtttgaccaattgagatttcgctgaagaggtcatctttgttatagaagaaaagaaacacgaattcaaagtttataaggtatataactgaaagactttattagaattttgtgtaggttgtttgcttttcaaaaaatgaactacagaagcccctgttgttttaaattttggttcataagatgctaagtgttcatcagataatgaaagagtaacagagagcgaaagtgggacttcttcagtattggggattaatccaaactaacaaaagataaggctctacaattctaattaacttagtgggaaagtaagattttatttttattcccactttaggaacataatttctataaagggaggcgtgtgtgtgtgcgtgcttgtgtgtgtatgtgtgtgaatatgtgtacagtcccccactcccaggtttgttttagtcgttttatttggtatgtcagga

SEQ ID NO: 39669 - DNA, 1054 bp, Homo sapiens
gctgttgtttttactttgaattataatccagtaccattgttactgattttgttgctcaggctgttcttgttttagcccattggagctctttcagttgccttctgtgtcgtttgatatgctcccctcttttgttgtattattttccttttgatttgctttttgaatcatttcttactttctggcaccacaagatgctctgggcttgtcttgtattttccctcgttctgtcctaggatcagccatttctccaaggagctctggttccttttactggataattgtatttagaaatgaagatgtgggcactgggtgtgttcggtgctgttggggtgtcattgcttttaggccttctcagtgatagaattagaacgtacaggtatgtcttctaacctgtgtatacacacagatttataattccctatctaaaataatcatgagttcatactgatgtctttcgctctgattcagcacaaggttcattccgactttcctcccttgcttatctgtaacttacttctcttatagtgagaaacctggctaccattactacaattaattacatgtttgttcaaccctaccatacgtgtaaagtagtttcagaattgctaaccagtacccctgtgaggaataaatttatcaactagggtgtagtgtttcagtcaagttccttttgtctttagccttttatagtcaaaacactattctccaaagtaacttaggtcagcacctttttccttcaccttcctcagtgaggtggtatcatacttttgtaatttaattagattcatttatttcatctgcgttgcatcctgggatcctccaaaatcctgattgactttttaaaatgtgcatactctaaagttcactctgtaatatatagttctatgggttttgtgcaatttaaaatgttaaatacaaaatactgtaatatggttattttgtgctcctcctttttgatttccttatgaactttattttcagaagaataagatgaatatattgtaatgtaatgtacaaaatgtataattgtctgactttgttgcctcaaatactg

SEQ ID NO: 39670 - DNA, 1027 bp, Homo sapiens
cacaaaaatcacagagctatagattgttagagggattcaaattcaggattctgggataccagactttatcctacatggtttcgaaacctggctgcacctcagcattacctagagggcttttaaaaatacgtgtgcctagccattctgagagtaggacaagtcagaatctcccagtgggggacacgagcactgacattgtaaacaaacctcctgtgtgcctcacgtgaagctagaccagcaacagtgtagttctggtactcactggaaacactgattaggctccagtgctcttccgccccatgcctttaagatcatgctgcttaatacagttgttagagttaacttattacttgtttcaatcattccctgtctgatttcataagattacaagaactttgtaattgaatgacacactaacaagcacatacttgctcatttgcctttaggttttctgttttcttaaacatacaaacatacaaaggaaagtaggaagttgtgtacattattttggactatagtgagcaaaccgactcaaactgatgtaatatcacaggtaggatagaagtcatcaactttgagctgagaactggatcccgtgataacaacagcacaatagtaatattgagaagactagtagctagcattaactgaacactcgctacatgccggggcaaggaagagggctaagtaacttgatcaggtcacaaatctagaaagtggcagagccaggatatgaacccagagctctggctgtaaagccatgtatgctcttgacagtgtacagtctcccaaagttacattttgtcccacacagtgttttaaatattttttttgacttagtgtctaatatttttaaatgggaaaatccagattttgggttttcctagaaatactgggaagtctgtcaacactgggtccacattcccacatgaccagcagcataagggctccaggttaccacagtatccatcatttgtcttatggccacccaagtacacctgtttacatgacttactgggcctgtgta

SEQ ID NO: 39671 - DNA, 1029 bp, Homo sapiens
tgacactgagcctgtttttcatgtttattggccatttgcatgtcttttcgtttgcttatttattttgctcattttctgttaggctgcctttctattattgatctgttggaactatttatgaattttattcatttttctatgatggttgtaaatacttctttcaatttgccttttaacttgtttaggatacttaacactgtatagaaatttcacatttttatatagtcatgtctgttgttattttatgactaccttattttatttgtactcagagattattttaaaattttataattgtcatggttttctttttacactttgaatcagtttgcaaataatgtccatgtgttatcattgttcattatatttctaaagtgttttagtctgtagattccccctgcctttttttttttgccatatatgaagaagcagggtcatttatcctgtagggtctgaatttttatgattgtatcccagttgccccacatgtttctattttctgtgtcttctctgtgaattggctgtaaaatagagtggcttgatcaaattcaggattttttaattggttggttgtattaacactactttcccaggacacacacatatctgactatttgtgccattagtagtagttgatgaacattgcctagattccttaatacattaagggctgaaaagtgaggatattctaattctctcatttcttcttcatttattagcttctttattattcatttcatttattagatattgctataaggataaacttttcctcacctattatatggttacttagtggaatagttgacacaaatggcaagattaatgtgcttgattctttaccttttatttactattttttaaaataatgatgtggtttattgatgactaattagtgttattagtatgattttgaactcatgaatttaaacatatttggtatgtttcaatccatggatgtcattaatgtattgaagtaattattgtaattaatgttcacgtcccatctttggacaatgggaacatatt

SEQ ID NO: 39672 - DNA, 1035 bp, Homo sapiens
catagggaggtggtcactaggaggaagttgtataaggcaggtatctggatcagccacattgaggaactgggaggcagtgtagaactgcaccctgtgtcaagggtgacagagccctgcttctgctatgtgaaggttccacttagattcaaagtgcataccaaggcaacataaaattatgagaatttactatgcattttatccatgtccttatattattgaatcttcctagtttggctaggcttgatctggggttttacactgtgtttgatgctgtgctcttcactggaataagatgataacagatatgtgttcctgcactgcactgtccctttctccgctcactggttttattgtaataatttggaatgcaagatccaggccttttctttatagtgtacttaaaattgtgtttttaatatttcattctagaactcgaattgtagtcagtaaccaaattatcatcatatagttgtatctgcctatacagattgaaaatcccttatccgatatgcttgggaccagaagtgttttagacttcagctttcttcggattttagaatatttgtgggctgggcacggtggcttacgcctgtaatcccagcactttgggaggccaaggcgggtggatcatgagatcaggagatcaagaccatcctggctaacacagtgaaaccccgtctctactaaaaatacaaaaaattagtctggcgtggtggcgggagcctgtagtcccagctactcgggaggctgaggcaggagaatggcgtgaacccgggaggcggagcttgcagtgagccgagatcgcgccactgcactccagcctgggcaaaagagcaagactccgtctcaaaaaaaaaaaaaaaaaaaagaatatttgcagaatggataccagttgagcatcccaaatccaacatgtcagtgctcaaaaagttttggattttggagcatttcagattttgggtttttggattagggatgcgcaacctatataagttttgttaaatttatggcttttctctttgtttgctatttttc

SEQ ID NO: 39673 - DNA, 1024 bp, Homo sapiens
atagtaataatttctgcagttaattctagattattaaatcagttttagcagtgttcattctattttcactgtcttcttgagtttatttcagaagtcttaatttattattttccagaggactttaatgagatctcgtattagagtatttttattgttctctcctgttttctacattaaatcggtattaattgagcccagctgttctgattcttccctttagtctcctcttaaggaaattgctgtttcctctgaagtgctgaatttttgaaacatctgctcctctctgtctggacatgtattgacataccaagctcctccagcaggaagggggttcctctgtgactgtggaggtctggctgttggctctcccaggcaatgtggtcttgcacttttttgagaactagggattgtgcctttggctcattgagcccgtaaacaaagtcagcaggctgggactgtttggaatgctgaaagaattatttagaattttatcttagaaagtttggtgaattttatagagctttatataaacattgttttctgatatcattataccagaggcggtggagggaagcatttacagcgtctaaagcctttacttacacataccttaagctgttaaccctgaatatctgagacaggtctgttaatttagaaagtttgttttgccaaggtcaaggatgtgtgcgcctgtgacacagcctcaggacgtcctgactatgtgtgcccaaggtggtcagggcacagcttggttttatacattttagggagacatgagacatcaatcaatatatgtaagatgtacattggttccatccagaaagacaggacaactcgaagcagggatggggcttgcaggtcacaggtaggtaagagacaaaacgttacatttttttgaatttctgattagcttccttatgcatcgatctcagtgagcagagggaacaggatgggaggcaggtttaccctaagcagttcccagcttgacttttccctttagcttaatgatttgggggctccaaga

SEQ ID NO: 39674 - DNA, 1024 bp, Homo sapiens
ggggtgggggcggacaacgcaacactagggttcccgggaagcatcacaaaacggataactgagtcatgccaaccaggttgatcttaacgattttttaatttttctgtcagcatcgttcattacagctcaggggaacaaatggacagaagaattagtggaactgattagtttttatgttttcataaatggctacttaggatgagctgttatttgattttgtaatgttttctctaatttcagtaattctctggtttttttcccagtctagagatagttgtcgatagtactgtatataacctgaaaaataaagtgttctgatcattttaagtgtgaggcaaaaatgttaaagatgaacctgattctttttctaatatacttctttgatcaaagtattgcaatttggttttggttctcattatggtttccagcattcttagaactttttggatctatgttgaaaatgttgaagttattaaattcattaaattattaaatattcttttccctgtaaaattagaatttttgtagatttgttagcacattgtagagaataagagtttataaccacaaccgtagaacgttgtctcgtatgctcttttaatctgtgcctgttgaatttttgttatagttttctgaatttccagatcccatgtggggttcagattatgtgcagttgtcaaggacaccaccttcatctgaggagaaatgcagtgctgtgtcgtgggaggagctgaaggccatggatttaccttcattcgaacctgccttcctagttctctgccgagtccttctgaatgtcatacatgagtgtctgaagttaagattggagcagagacctgctggagaaccatctctcttgagtattaagcaggtttgcttcaaagactctttaaaatatttagcaattattatattatcctacaggcttatcatttttattttgagagttcctttttttttcttaattgtcgcaaatagtgaaaaatgactgtttgtccatggttttaagctgtatattttaggg

SEQ ID NO: 39675 - DNA, 1236 bp, Homo sapiens
ggagcccaaacaaaatcagtgtttctattaggaaggaaggaaagaacagcaattgaattggcagtcaaattatgtttaacacccttgtctggaaacccaccgaaaacagcaaatggaaaaattccttcttcagagaaggaggaaattggccacaatatcctttcccatacccttccaaaaataaaaagacttagaattattcgccttgaaatgtaaactaaaatgaaggtaaacccaagctctaaatacgtgtccgccttaggcccagaaggcccacccagagattaactagagccttgatatctaggggtgtgacagccatgaccgaagctgagcctgtctctccagggattctgttgttgactgaagagctgcccgacagaaggagcgcgagctataccgcagccttctctggttgtcaggaagactgccgaatgggagctctcttagcagggggaggggaagcagtgattagcaagttatgatgcagaaattctgtgaccttgggggctttactctgcgttaggacatccactgtactcgaaaaactgagacacttaagcatgtaggtcaaaggaagtaacttggtgagcatttggaacatcaaatctaaatcaaagctgtgaattgttatctcatttcctgggtccctggcctcagaagtaaccaagacaataaacataataatacatgatgtaggaacatgtgacagccttaaggaaaccacttaaaaagatttataaggattgaaaatatgaaaatgataggcgagatgtggtagttgtagaagagacacaagagagctcacatgtacacaatttgagtttctgcagaagaacaaagagcaaagaagcagggaagctcttaagttttcatcctacagataattattgggtatccactgtgtgccaggcaggcaccatgcggggaccaaggaactagtgccgagcgtaaactccctcttagagtttaagaataggggggtccatggtgattgtagaaccatgtgaacaagactacagctgagaaaaatgccctcaggaaaggcacaggtcttttgtggactggttaattcgattcaactttttgtggaggtcaggcttctctgaggggggagcattgcaacttatcggaaatttatatacattataatccagtttaggtaacagatgaaaaacgtagaccaaacaatactatatattgtagtttctgtaataagagattgttttaaaaagc

SEQ ID NO: 39676 - DNA, 1028 bp, Homo sapiens
gaaatgtgctcagttcatgatcattgttgcctctggggagggaggaaagagatagaagtgaagagagaacaaaggagaaactaactttctggtaccttatttcttattgaaaaaaatatctacatgtaccccggaacttaaaataaaaattaaagaaaaatcaacaagaacatatctaaagcaaatatgacaaaatactaacatttgtttattctgggtgatacttgtagaatactttttagaatttttttagcctctttgctttttaacttataaagagagggatcaagagaagcccctttttggtagcaggtgcggtccgcttgggaaaggagcctggcaagagcaaggcaccgcaggcagcctgtgggggctccagctgcaggtggagagtaggctgggggtccagagcagatgtgagaggaacagttcaaggccattccaggaatgcacatgcaagtccttggattagagggggtaacatacattcagaaagaagtataaggattcaaaggaaacgtaggcagtgaaatggcaggactcgggtggatcaaatgtgaacaaggtgttgggagtgactgtgggtgtccagctcctgcagctgtgtgagtggtgaagatgtgagtccggtgaggagttttaaattgggctgagggcatttgaaagccctcaggcttgactttgcaaactaagggaaagagatgggaaaaaaatatatatatgtattaatatgtatatacgagaaaagggtgaggttcctcagacttctggaggagatgggtctcaaactcaaagcacaagctttgggattaggaggaacagtagttcctctgctataaagaagggaggaagagaggatgtaaccctgtaggtttgcatgtttgggaccaggaagattttataccaaatgacttctatttttgtgtggagaggtagagatcatctgctgagaatgggtggtggtgggtattggcagttggaggaaaatggggaagtttcaaactggtggctctagacagaaggaaagt

SEQ ID NO: 39677 - DNA, 1010 bp, Homo sapiens
aaacagaatgtctttatttgtaggaaaatttttactaatttttgactagttcccagtatctttgctcaattaaagactcaccaaatcttttgtttttttttaacctttgttactattgaatttcttccatttgttactattgaatttcttccatttgccattgtaatagctaggataatgaatcagagacacaaattgcctgagggttttttgttaacaatcccttaagttttgttttgtaagttctgtaagggaacttcagatctctccatttttactacttctgtctctcttgtttccccttattaataggaaacaaaatcatgaagaaacaggatttccatttaggataaaacctatttgggataaaacatatataaactaaaattattaacatgaagagaaactatgacattaaaaaaatactaaggagggttaaaacagagtggtaaaagtgaagaagagaaaagcatgttacggagagtaggcaaaatatgacgcatgtccactaatactgacatctagttattgggaaagtggaattatcagcatatttgtaatcactaggtaagatctctaattttaaattttatctagttttaaatttttattttaaattttattcatatttacctattaccagaataaaagaaaaagagaagaaaacatgctcttgaaaaaaatgactcagttaaatctacctgatctggtttaaaggaactgaataaaactccatgcactcaggacaatgacagtgacctcaaaggcaggacctcttgaaatgtcgccagtgaccacaatctttttaacgtgtagacaacataaagaactcctttttattagggagataccacattttcatgtatctctaaaatgggttaaatcatttgtttagcttacattatgtatgttttactccaggatttttaaaaatgttttttgatggagaaaactgttaatatataatagggctttactgacttttaaaaagtgacattttccataatatt

SEQ ID NO: 39678 - DNA, 1050 bp, Homo sapiens
gaatgaagtccctaaggaatccactttttgcacagtattctgttgtctgttactcgtgaaaagatgagtgtagttaaaatcctgtaaccccattaacttcttagttggtgcaatttttagaattgattgcaaagatagtttctcacacctacatcaaacacactaaaaattaataaccagaaaggcaaacaggttgcttttaaccattacctttcctttcagttgttctcaaataagcatatttatttcataaatcttaatttgtataaaaataacttcctgcagaaccagcatatccaagaggagattcaagtgggtccacaagaagaagttgggaacttcggacactaatcagccagagtaaaggtgagagaaagagtgttgaagttaaaaaaaaaaaaaaaaaaaaaacacgattacacataaggggagcagtttcaggtaaaacttgatttagcttctgaattattaggcctcctccattactattttgtgatctcacagctctgacatcactttctatcatgtactgtgtttgtgtacatttcctatttctagtaacaaactacatgctcctttgggtctataatatgttttactcatctttatattcttaaagcaacttagcataattttttgtccatggtaggagtataataaacatttgtgaaataaccattcataaattagacattgagggaaagaacttacgaagcatgtgattaatattatcaaaagaacaaatagcagaaaaatcattggtctagtatttaatgatctataaaatgctttcatgtctttttttgctcaacaatattgagcagtaggcaaaatagatgttctctttttataaatgatagtttctaagcagcccaataatttggccaaggtagtaaatgagagggtgaggaccagaaggcacttgtctcaagtctagcgcactccatggcagcttccctttgaactttgtgtgactgaccagaagagtatttgtcttccaaggcctagagatgtctggaaggattttgtggagggaggagactgggctgg

SEQ ID NO: 39679 - DNA, 1032 bp, Homo sapiens
aaaggaattattatgcagcaatcttaactttgtgtacataccactcacctcccttaaaattcagcagaaccagaggtgccagaaatgtcaaaaaatatctagtcattccaatatgtaaaacaagactgccttgttttaaaaaaacaaattaaatgtaaaaattgtatgactcttacccagtgaaaagctttactaacacagccctgggtgctatttccagatactgaaaagatctaagtaggtgcttaagaactgctttttaacccattcacaaccttcatattaaactaggatgaggctgcaggagctgaggaaggaaggcctgggtgggaacctggatgtcctttcctggagaacagctttgctatttcactggtaactccgaaacttcaaaatattgactgtacaaattactcaagtttattttggcctaattattcttaagaaaggtggttcttttttagaaaagggaagcagaagctaattgaaattccattactcaggcctctagtaagtgcccccttcatgtagtcactattcactgagggccatgagggtgaggccctgctgggggggcagggcagggctgtgagctcaggagcccatccctgtgctcagagagatgggactccaatgaggagacacactatgtaggtgcaatttctgatttcttagtttttgaccaaaatagcagtaatttcaaacagttgaatgtcgtgatcgatactatgtcagttggtgatgaatgctgtgaatggtattgaatgtcctggaccaagaggaacagcaacatgtccttagtcctcagcctaagaagtccatcgagtccttctctcaaattgtacgtctgttgttttcaaaagccattgtgacaggtcaaaaccctggagtatttggtttgtgtttaaatgtacttgacactctggaaacactcaacctaagccctggatgcaggaggcagggatgctgaggatgtgaattagagtgctgggatgtgctaatgcctagggaggcatcaggcactgtgctggc

SEQ ID NO: 39680 - DNA, 1045 bp, Homo sapiens
tagtgatttcaagttggaggcttgaaatttataccacaaaaatcagcagctaccgctcatcagagctccccttcccagagccagttgttatgtcacaggaaaggggtccccttccagaccccaagagagggttcttggatctcacacaagaaagaattcagggtgagtccacagtgcaaaacaaaagtaagtttattaagaaagtacaggaataaaagaatggctactccatagacagagtagccctgagggctgcttgttgcccatttttatggttatttcttgatgatatggtatacaaggggtggactattcatgcctccccctttcagaccatatagggtaactcctgatgttgccatggcatttgtaaactgtcgtggcactggtgggaatgtagcagtgaggacgaccagaggtcactttcatcgccatcttggttttggtaggttttagccagcttctttactgcaacctgttttatcagcaaggtctttatgacttgtatcttgtgctgacctcctatctcatcctgtgacttagaatgcctgaaccatctaggaatgcagcccagtagcttcttcaagctgaataggcgcaatgatattcctgcctaacttctagggtctcttgtgttcagggtagagaggagctcagtcagaaagcatcagtatggcaagggccattcatgactcttgagttccaataagaggtgatatctggaagattaataagtactcagtttaagaaaatgttgagtaagcttattctgcattcttactcaaagagtacagcagcaatatattctacaacaataaagccaaataagtaaaattatcccaagtaaactaaattagaaggctttccatgaactaggcaactgttggaaccaagctggtagggggttgctagatcattccagtacatgcccagaattagaacactgatttagatttttacattacccatccctcttgtttcttctgagcagcagtcagagatcactggttggtttgcaggaataagcacggttagcctaaattgc

SEQ ID NO: 39681 - DNA, 1036 bp, Homo sapiens
ggcgccgcggcggggaccagcccagagagaccccccgagcccgcggcacaggcggcggcggcgctgagcgggctcgaccagccgagcgagcggcggccccggctcctcctcgtccggcgccagcagcccgcgccccgcgcccgcactcggccagccgagacccgcctcccgcccgcccgccggcctcgtgagggacgcgccgagccgggcggccgagagcggcggcggctgggagcgcgtcgggcccgggcggaaagtgcctgcggggggcgggcgagcgcgcggtgccggccgccccggggctcggcgcgggagccagagcgggagccggcgcggagcgggacgccgggtcccgagcggcccgcggccggggctcgcccccgcccctccctcctctccggcggcggcggcggcggcggcgggcggagtgagctgcggagcctggaatatggtcggggaaatggaaacgaaggagaagccgaagcccaccccagattacctgatgcagctgatgaacgacaagaagctcatgagcagcctgcccaacttctgcgggatcttcaaccacctcgagcggctgctggacgaaggtgagcgtctccagggccccggccccggcccgacccccgccggggcggcccctttccccgcttgggatggtggggagggcgggaaggtcacggccgggcgggaccgagcgccggggggactgggaggccaggagggcgcacaaaggaggtgccgggccgggcttgcggcgggcgggcgggccggggtggacccgccggtgccggacgccccctgcccggccgggaccccgcgccgctggcgtccaagttggcgcgttgcggagggctgcggggtgagccctgcggcccctctagcttcggcggtcacatttccgagaggtcggcgggggctgcgcggactcggtggtcctcgccgagccctcccgagagcaggcccacgccgcgccgccggcctggaggacgcgtgtgcccggcgcgggccccgctcctccgctcggcctcccgag

SEQ ID NO: 39682 - DNA, 1034 bp, Homo sapiens
gagcaagacactcacttctgccctctgttccattttgtggcgtgcctctccacaaggggaactggagggaaaaacctggaatatttccatatgctaaaaatctgctgctgttgcctcaagttgtgaaggtaaagaagacaaaccaaatgattttttgctaattctgtgatatgctggttttgaacaaatgatggtcagattcttagaactagaatttatttttaacgataactttctaattaagaggctaaaagtgagaaagccatttttagaggatttcagctcattcacttctttgtaagcaaaggctagagcctcagttttttgaataatgtaaaaattgttgctgctattatttttactactcaagaggaaacatttttggctgggtgatttaatagagaagtatgctattgctaagtgattcaagttaggaatgtatacttgtatcagttttagatcagcctggggtaaacagcccaatgatatatcaggtagataactgaagagtgacacccaggaggtggatggttatgaattgaatggaaacggtgctgcaccagatagccaccaggtagctactatatcgtattcctgatgccagcatctgggggatgattgctcatttcaaataattcaaacaaattaaatgtaagccacagttctttgctatgttacagcaattatatccctttgatacagttgttacatggcaggtgaatacatttttttaagaaaaaaaaatttcaaactgggatcaaaaaaattaccctgaaaccgcatctaattgtctattgtcgctgattccaccgtggttgcagtgatgccattatcatgagagtattcaagttttaactctgtatgtgtgtgcctgcacatgcgtgagccagcataaagatgaaatgaatttatgtttttgtgcatatgctaatgagaccctgtgatgaagtggtaagcattcttgtactatagacctgggatctaatcatgactccgcaattaactggtttggtgatcttgggtgagataactaa

SEQ ID NO: 39683 - DNA, 1702 bp, Homo sapiens
tgcctttacaactcagttgtttgaagggtttttgttttggtgggtgactgagtcacatatattgagaggtatcctgtttgtacgttttctttgtaattataaagtctttaggcagtttatttctgtttattaaaataaatcagaagaaaatgtgtcatagtttactatatgttatatgaagagaaagttcttttggggatcatagttttatcatagtaataaaaaattatcagcagtaaaaaagatagtcttatctcacttttattatagtttatagcattacgacatactgttagcttttttagtaggtaaatactacatagattgctttaacatatgctttgcaattgttgaaatactgctcatttaagttccttcttagatgtgattcagaagtgtactttaatgtatttaagttatattttcctagttcagttatattgagctttttttttttttaaactgtcaaggcaatttaaaatactcttgccttcagtgacttgaaattgaactctgcacaggagagaagaatatgtcttgtttctatatagagaaccaaggaggaagagattgactttgccacctttgtaactgataataacttgcattttagtccctgctccccagccccacttttttccttttctgttattcctaaaatgtagagaattggagatcgatccacagattttcagttcatctttggcagtagcatggtttgtaacttttttcattcctggaagaagcagtggtgagggcacagagatagcgtagcacattgtctttgaaccttaatgggaattacttcttttcagggaaatatagcaatggccaattttgtctatacattttaagattgtttcttatagttgttagagattttatgagaagcttgaatttctttcagtaatcctaaagaactgttataaagaacttatttatcagaagaaatattccttattgggaaaaactaaaatatatcaattaaaaagttaaaagtactcatcatgcactgatagctgctcttaatgtttccttgtagtccccccccaccagtgtttatggatgtagcaaaattggaattacggtttttaaaaaaaattatatcatgagcaaaatttttccttgccatttcatattctttgcaaatataatgtttatagtaatatatttcatgctgtcgaggtatattataatttacttaactaatctgttggacttgccactttgctttcaggaaatgtgtgtaatgatagcattaagtggctttagaagttacttttttaaaagccttaagttacaaaatactgtaactgggaattatgaataccaaactcttatttttgcaatgcagttaatctgaaataagcattttatgttgcattgcagtagaaactggttgttaggatgcaacgtgattttcgaataatgtcagagttgcatatttcatgtattagtttttagtgacttaacatacttaattgaaacttttcattctattctaggctgtttggttgtatgctattaatatgtgtgcgatgttatgagggacacactaaagcttcaaattcattccttcaagttatctcagtagttggaaagaatatgaaaataagagtaacaaaggaaatagaaacataccaagaagactaaagactggtgctaaagagggtgtttttggctgaggaggctatggaatgtt

SEQ ID NO: 39684 - DNA, 1030 bp, Homo sapiens
atttggctgaaggaagctgtggcaagttgagaattcagaggtaaagcctttgtgagagagatgatgtagtttaattattttaactctagttctcctgatccaggaaagctttatttttactttcagatgaaaattaaaatttgttgcaatttaacgtgtaacacgaagctagaataaggtatatacataagctatatatgtatataatttaaatgatacaagtgatgtatgtatacatatagtacttatgttaaaattttactgtttttctgtaacaggctataaatttagtgtatcgattatcaaagtataattagctgaatataattatttgtttatgagatgatactaaattcagttcccatagatactggtggtgatttactttttaaaaagagtttttcttgttatgtgcttaaatccacacccgaaatgtagccataatttagttcaagattgtttatgccacagtctggaaaacacctgaagtaattgagatttttgagtggttgtgaatggattttagaatcatgtgttgaacagtgacatcactaaattagccatagtaatgttactgtttcacattgagggtttcaggtgtgatgcttttcagttttttgtttttgtttagataactattttagggtttgagttatagttatgcaaatttacattacggtaatgcaaatataccttccaaacttgtgtcaatatgtattagacgctaaaatgccctcccctcccatctctgtttccctcaaattattcatttgtggttaaactaattttaaactccggaaaagtggttaagccaaaaaaggtcagatcctggaagaaaaagctctgaccttttaaaaagagtgttggaaaagtatttgacggtcattttcataagctaaatgtactgtgaggtttgtgtttgagtagcttttaaggttttctggattatgtggttgaattttaaggaggaacttagtaaaaatgagttgggaaaattaacctgttacattctaccttccttttgctatgt

SEQ ID NO: 39685 - DNA, 1073 bp, Homo sapiens
aagttgagtacacagtatttgctagtggatggaatatgaagtgtgagaatggacttgacattgtgtcattgcccgagatcaggaggaacaaattttggggaaggcttaggagtttagtcttgaatgtatcagataggttgagaagggagttggtgataggatttcattgtggagggttggtctggaatgtccattaccagggtttttgttggattgtattagtaatatatattttttaaatatagtatttagcttctaatcagttatacttttacaatctcaacacagagggctgtattctgcattgaaaaactgattaaatttgctttccaagtatgttattatatgatagaatgtacacttgaagaggcagtaaaaaagtaataaatgtagatttgccagtagcatgacatgacttagattttctgaatctttgtgaagtaaaccaactgtggtttaattaaaggagatcatattgcttaccatattaaaataatgttttcaataccaattactttgacatttgaaggcactgtgtaatatgttggtcttgttacagaccaagatatttttgctgaattttatttttcgaattcaatgtcagtgcttgttgtagttccttttggaatattgtgtatagtagattgtttcttaagcctttaaaaaactcttcaccgggtacagtggctcacgcctgtaatcccagcactttgggaggccaaggcgggtggattacgaggtcaggagttcaaaaccagcctggccaagatggtgaaatgctgtctctgctaaaaatacaaaaattagtcggtgtggtggcgggtgcctgtattcccagctacttgggagactgaggcagataatggcttgaatccgggaggcagaggttgcagtgagccaagattgcgccactacattccagcctgggcgagactccgtctcaaaacaataacaacaacaacaacaacaactcctcttggctttttcataatatgagagaattctcttgcaacacctgtgaatgtcttttgacatgtattttctttcctaaaaatgtcatgaagtgacagaca

SEQ ID NO: 39686 - DNA, 1028 bp, Homo sapiens
aatactctagtaacttgctttttaatctagttgctctctgtaccttgtgaacttggcctcttaaaaagagcacagtgaagttaaattccatgggtggttctcagctcaaaaataactttaaaactttctctgtatttagtcaagccttaattaaagtttatttctttttacagaagagattgttgttaaccctaaattcataaggttacacaccagccacctctttatgaagtgacagttcttcagttttaaatagattactaatattattgttttaagatttaatgagtattatctaaataaaaacgagtaatttgttattaagacctaaaataactaaatcttactttgctgtttgtgttagtgagctactttaatgtctagcaagaggtagggattgcagacagtgtggaaatactggagcctatttaagcttcagatgaaagcagtcattttaacttacctcataaaatgtattttatgtatatcaaattatgtatgtgtttatatatacttgtcgttttactgacaactaagattttccataagttaatggaaaatgttaaaaagcacagttatggtcaaatgacacagtgaccttttcattcctttattagctcctgctctagtacaatgataaggcagattttgttgatggattcaaatgtacaaagaaacagcagatagatacccagtgaaaaaatatatatgtctataacatcagcattgcaagttgagcaattgaatcagctaccacaacactaagtataagatgcattttatgtgagtttttcttcagtgttttaaaactgttttgtttttttacaaatcctgaaagtaattctttggtgcattttggctttgaattttacttttcattaatattttgttgcttatgattgagttagtaaatagtttttgtgtttcatttcctaattttgattttcttagtttaaatttgctgaaaaatttctaaaccagaaagtaatatagagctgtatttgattctttggctttccaacattgca

SEQ ID NO: 39687 - DNA, 2033 bp, Homo sapiens
tagtcattttatctgaattttctgataacttgcaatagattcttttgttttttttttttctaagtttgataaatttgtttatctggaaaatcagtattttttcttccctagatttattatattactatggttacttataatagtagatttttcaatattgaactattcttgcactcagggtataaattctactatatcttagtgcatttttctttttctatttatttcagatgtttgcatctatatttttaagcaaattttatctatagttttctttcatgctgctattctcaggctttgatattagtgtggtgctaactgcagtaagaataggtagtttccgaagaagatatttaaataataattatatggaaagtgcttttttagtccagagacctggctaaaggatgtatgtgtgattttaattagattaaatttttctaatgtcccttggttaattacttgctgtaattatgtaaatgatgtaaaggagtttaaattgttgcttggttgttgaaaacttgatttgagaattgctgtcatatgctaatttaagataaacaccaagttgatactggacattattaggaaagatttaattatgaagctagaagtataaaaagaaccttaggaaataataaaattctgcccttatcatgtagtcaaatccaaggtaatctctagatttttgttgattttatttgctattcagagaaaagcatttcgtaagctttgacaaacaaattgttatttaagagataaaatttgtaatatgaatattggtatcactgaagcagaaaatgtattacagtgccttttttaattgattaagattttataactgagtaagagtacctttgatcctgcctttttgctgtgttggattttatttaaccgaaactgatttaaataactagttagaaaaattaaagagtgccttcatatttgatagttcctaaggaactatcaataaattgaacttccccatgtttggaaagcatacaaaatacatttaaaaaatacattttatttttaaatactaatggatgcaagcctttctcccaaggaggacacagtctgtaggatagagagacattacatctgcatctggctaaccttaataatgacaacccttattgggcagtatgttccaaaggacaggagcctgtcttctggtgcatactagaagcttaataatttttgaaaagatccattttctttatgggactcggctcattaaaatagaattctcctacttttaaaaaaaatgtctatgtatatccaagaacagtaatacaggtctttaaaaacaggtcattgattttaggtattgctacttccttttttatatttaatatttcaatcattaacccagtgtagcttgatctgttaccctctttcccttgaaacttctctgatcaccagtggcttagtggtcaaatccaaggtaccatcttttgctgtttatcttacattcttttgtagtattcgatactgttggtcaccctgtccttgaatctgtcatttcttagcttctataacacctctcttctctagttctcctgcctacctccatttcttcttggtttggatcttcttttccttaccccttcctttttctcaagtggattccgtccttctttctcccattacttgctctaagacatctcttctgatagctttaaccattaaatttgtatatgaaactcagacttctgctgaacttgcagtctgttgtcttttgaacatctctgtttggatattccaaagatatctaaaaataatggaagtggtcccgtttaaatatccttcggacaaattagttctgaagtacaaaagaggctttggtattagttttgtctgacaggcattcttatagttgtttactgaagctatgatttggaatgactggcctcgtttagacttggaaaaattagatgaactaacaagtccatattataccggttaggaaggagctcgggctttgaagttaatttaataagatatgttatttgattcgtataaaaattggt

SEQ ID NO: 39688 - DNA, 1075 bp, Homo sapiens
acagtcttctaagtcaggacttgagtctagagggcacctgttcactatattcctttccttcctcctccagttgtgacttcttgccacggtgaactactattaccgactggtgtgttggagcatggcatttgtcttgatcggtgattctcaaaacacagtccttggaccatagtatctacgctttctgggaactgtaaatgttcaagcccctttccatacttattgaatcagaaactctggggtaagggcgaggcctagcaatttgcctgttaagccctgtagataattccgatgcatgctgaagtatgagaatcactcctctaatttttttttttttttttggagaggggacagggtcagccaggctgacaggtaggtgatcatgtacctggtcattttgccaggcatcgtttcaggaggcctgaaacagtaagtggtgaagtgatgaattaaacagtgtcactggtcttgtggagtggacatttcagtgacaaagacaaacagtacacaaatgaatctatagctgtaatcagtgttatggagaaacataaagtggggtagacagatgaatagtgactgtgtatggaaggaggtattcatttttaagggtaatcagggaagaaatctgttacaatatgatgggaatggagagacaggaacagaatgatgggaggaaggcatgaaaaccatctgggagaaaaacattctaggcagagtgaacagcaagtacagctgactcaggcaggaatgtgcttgggaagtgttgtaagatgtgaggttagagagttagcacaggggcagtgtcatgccgtggtcaaaagtaggaactcagattcagacttctagctagttttgctgcttgttttgtgactttggtactacacttgatcttaaccaaaaggccaggaagtgatgatgttttgtgactttaagcaaattacttttcattcctggtgttcgcttttctcatttctgtaatggagatattaaacctctcacaagattatgaagactaaagagttaatatgagtgaagcagttggaaaacatctttatgctatgtgtcacaagctcta

SEQ ID NO: 39689 - DNA, 1027 bp, Homo sapiens
taacaaatgtgtgacatctgatagagcaggcactctgtggtttttgtgattacacataagaaaaataatcctgttcttgaaggagttcagtcttgtgtgaaggataaacgattaaattattgaagactttaagtttctcatgcattcatgaaactacagacatgaaagaacattgaagttatatttagaccatcaaattgtttatttggctggtcaggttttcttgtttgaatccatggagatgtgttataaatgattatgaatagagttaactgatttatttaagtaaaaagtgttatattttgaatgagtcagtaataattttgtcattaaatttgcctagttatcaatttcaagttgttagaaattgttctataggatctgccagagtagtagacttgataaatattggcaaggtctagctgttgatgatactagtcgtcctgttaaatacatgaacagattagattggtaaactgcttcctttggacatgatgattaaattgtagtgagacttcttggagttttatgtgaatataattctgattttctgatgtttttaaaatgggatttaattttgactaatagctttgaaaggcatctcttgggtctaggccatcatgaatacccatattgtcaaaggttttgtaagacagacaaatgtcttttcaaggattgtgttttcagcctgtaggatcccagcctggttgctatagttagtagtttagattcataatgttattcacagtacactccactgtctctcttataataatacatgttgatgatggaacacgagttgtaagttctctttctgtttcattttcctgggtttgcaaatcagcttaggctcgtcatagcttctgagttagttagcatagggttgttgtttgtcagcagtcttgagaagttggtgtcaaattgggtgttgagctggcgtttgttttagagggattatggggagaggggccaattcagtaagttatctttccttaaagtctttgttcctttgaccattgcggccttc

SEQ ID NO: 39690 - DNA, 1035 bp, Homo sapiens
gctaataacagaatcttcctcatcctaacccctcagaattgtcacacatgaaatgggctatgaagcagtcaaaggttatactgcttgaactcttccactcatttcagttcctgtttataagtaggtgacctaaatttattttgtaagttaatgagactatgttttcttttgatttcagtttgggcggaaaagtaccttagtttttgagatcacgtgcctttactttagggatgttgaggttgagtttttcagctactagcttttgagataaattcagttaatcatttcattgggaaaaaatacatatatatttaagtaatttttgttttgttttatcttagagacaaggtttcactgtgttgcccaggctggtcttgaactcctgggctcaagcaatcttcctgcctcagcctcccaaagtgctgggattacaggcgggagccactgcgcccagccagaaaacatattttatgtcttaataaacccaggatttacaacaaggtagcttacaaataaattggggatttcttgaaatcttgttttgtctgccatagaacactgcttttcccaagtccaaaatcagtgtcatcaataagcagcctgtctatcataaacttgggcatctacttgtttcatattggtataatattttctttattatttggtagggaattgattgactttgaaaacttctatcctgtattgtttggggttacagaacaatgattgttttgattagtttctttgtacttttaagattgcatataaatagtataaatttgccatgttaaggacagattaaaacaaaactcttaaaatttgaaaagtagttagaacttgaacactaaaaaggatatctgaatataaaacagcaaaattttggtatcatttcttcatcctggaaatgtttgtgtgtggtctgtgctaggtaacaggacacaggaatatgaaaagatgtaattgctctcatggtactgatatagccacaatcctggtatggaataatgagagcttgaactcaggcaatggcagttg

SEQ ID NO: 39691 - DNA, 1470 bp, Homo sapiens
tacccacctcttaagctgttatcacatggtatgcagtgatctgcctgattcttgcaggtcattctctgaagtcaggaactcgctcttagtcttttattttttagaaatctatgatatctcgcgcaatacatagcccatagaagaaactatgtagtgaaattacatagtgatttttcattctcgcagtaaaaatttcctgggattttttttttttaatgggtgggaaactacctggaaatagtggatgccagagtcttaaacagaaggaatgaaataataaagatcagagcagaaataaatgaaatagaggccaggaatacaacagaaaagttcaacaaaacagagttggtttttgaaaaggtaaacaaaattgacagacctttagttggactaaccaagagaaaaaaaagtcaaaatacatgaaggagacattacaactgataccatagaaataataagatcataaaagactactctgagtaaatatatgccaaaaaattgaacaaactagaagaaatggataaattcctaaaacatacaacctatcaggaccacatcatgaaggaacagaaagtctgaacagacctataatgagtgaggagattgaatcactaagtcaaaacctcccaacaaatagaagcccaagagcagacagcttcacgggcaaattcctctgaacatctaaagacgaattaccaccaacccttctcaaacttccaaaaaactgagcaggagagaacacttcccagattcattttatgaggccagcattacccttaaccaaagccagataaggacattgtaagaaaataaagttacaggccaatatccttgatgaacagttgcaaaaatcctcaacaaaatactagcaaactgaattgaatagcacattaaaaggagcgtacaccatgatcaagtgagatttttcctctgaatgtaaaaatggttcaacatatgcaaatcattaactgagctacaccaaattaacagaatgaaaaataaaaaccataagatcatcttaaaagatgcaaaaaaggcatttgacaaaatgtaacatcctttcacaatgaaaattctcaacaagtaaggtatagaacagtatgccacaacataataaaggctatgtgtgacaggcccacagctgacatcatacttaatggtgaaaagctgaaagcttttcctctgaggtcaggaagaagacccttgctacttccattaaatatggtaagttctagccagaacagttaggccaagaaaaagaaataaaggcagccaggagtggtggctcatggctctgattcccagcactttgggaggctgaggtgggcggatcacttgaggtcaagagttggagaccagcctggccaacatgaaaccctgtctctactaaaaaatacaaaaattcaccaggcatggtgatgcatgcctgtaatcccagcttgctcgggaggctgaggcaggagaatcact

SEQ ID NO: 39692 - DNA, 1708 bp, Homo sapiens
agtgttgtgacattgttttaattgaatgaagctgcagaactggcgtgataaatcaacacagaatgaattttaatgcaaggcaaacgatattaacctggaaattggttgcagtagacaaagcagctgctgtgattagttttttttttttcttcattctctacttacaacattttgagaaggatgacctcgacaatttcagctgtactagagtcctgatggcttgcaccttaacatccttgagctgtttgtggcttcttggggcaatagtgattgtttcattttttaaggttagtaaaattttttaaggttagtaagattagtaaggttagtaagatttaatgtgattttaactgctttacaaatatttttaatttagtaaatcataattgtgaggattaattagctgtggtagaagcccttttctatgtaatcttgatgtggttccagccaaggagggttaatacttgaaaagcatggggtatgccaaacaaggctctatatgtggtcacagagtgtagggcagctggtttcacaaagggtacgggtcaaaaccaattacatattagtgatttgtactaaagtatctctgttcataatgcatttttccagacatttttgggccatatgtgaagtatataatgtgtatctagttagtgacaatttgggaaaagatctgtatagagtacaactattattgaagagtagctggcaaggttacttaaagaaatagccaaggtaacaaatatagtagaggcattttcacagacttcttgagagcagagtttcgttattctcaatccttcacatttacttcactccttgccacataataagccttaagtaaatgttttgttgaatttgaaaatgaaaggctgttctctgttttactgaaaaacagtgggtgagtgatagcatgtaaagattattatctctgtccaggttggaggagtggggaagtgaaatttaatgtaatctgtgacttacataaactggttaagtgatgatgttgtagaaaaaagtaggaagagcttattggagatgaacataaggccaggcatgttgatagattttctgttatgtttcttttttattcagatcctcatttcaacattgttacaccatactaccttatgtcaattctagacctctttagattaaaaagcaactgctcaaaaagtgccagtagacttgtgtttgttaaggactgacaagataatgcaggccagctgagcaattccaggaaaataggatacaataggaaaaaaaataactgaacacatcagagattgtgaatcagcaagattgtgaagaattactagttcatggtcttcaggaggtgagatgatcaaggatataaccgtgttttgggggatctctttttctgctgagcacgtttgcagaatctggagaggacagacgaaaggctgagctttgggggatagcgtttggagtctataatttgtctatgtgaacctcccttgccatgcccagcctagtcttcgcttgggggtagggacactgatggatacgtactttaggagtaagaatgaactaggaggttgcaggtcctcacagagacagtatctcagctcaaaattgtctatctcagtaagtgaaattgcattgatcctgggttgctagtaatagtaggtgcctggcagaagctgatatgtatctttcctggaggaagatattattgtctttggcc

SEQ ID NO: 39693 - DNA, 1039 bp, Homo sapiens
ttacttttatgtaatgatatactaaaagttggataaatgcaagaaaaaagtagaagaccatatgcataagaatcagtacctatttgattgaataagtaaatgaaaaccacctgtggaattttgtggaactgatagcaaactcttatattttggcctttatgcagataacatgcaaatgaggaaaatttacttttcacgatttagcccgtttttcctattggctttaaagaaataacttgtatatatgaatattaggaatttctgttgagggatggtaattttttatttttttattgtacagtttttaatttatacaattattgatatcactggcctatttagtgatattcagagtttaggtttcttataagttaaaggtagaaaggaatatgtactcttaagacacatttagtgtagccaacccatagttttcgtaacatatttctgaacagttgctttggagaaagtataatttttcttaggtaaataaaagaggactttccccaaaggattttggtagaaagggcagtgcctaacaatttcttcaacactgtcatgacaaagagacagttggacattttgtggaagggacttgtattcttggctggcatctaatattttgtcaaactctttaatactctctgttttaggttatttgttgatggacagttgtatctgttctagctgtatactgttcccagttcatagtttgtgttaatacttgtgaaaatataatgctaaacgatgagctattgtaattagacctgagacttagcaagaaattcataagggctctagattttatttcaacttagtattaaaaagacatttaacttcagtaagtaaatgtagatatactttatattttaagagctgtaagttccagcaagtgaataatgtatagtgatccttttttttttttctcagtttaattttgttgggagaatccttggacctagaggacttacagccaaacaacttgaagcagaaaccggatgtaaaatcatggtccgaggcaaaggctcaatgagggataaaa

SEQ ID NO: 39694 - DNA, 1611 bp, Homo sapiens
atgaagtcttgacaactggcagatatataaatctgtatgaaaagattagtatatattcatcagttaggctattctgtcagccagttaacaaaacccctttttccctgcttctgagtttctgtgaattctgcagtaatggccccccactcaaccttgcttactgtttcaagccctcacagacaatgagcattagagcttataactgtgtgattatactgttgcactcttataagtgtttataataaaagtaaagtcagaatggaatgcttggccatttggtaaagaacatgaaaagagatggaaacaaaaagaagtattgatgtaagtaataaagatagctcattgagatgtatttcaggagttcaagaggaaaagccatttgctttaaacttttctacagagttgtccatgtatatatagacatgtgtgtatatatatatatgtgtgtgcgtatatatataatgtgtatatctatatgtgtgtatatactgattgcctgttttacttttaacacaaaatgctacgatgggaatggtgtgtgctggtctgaatccttccctacactggtaaactcagtgagagcctaccatggctattctatggagtattaatttccttggtgtttggtgagtacctggcacagagtgcaggcacttgaaaaaaatacctgtgaaaggagtgactagttcaggtaataaatgaaaggcttaggtgtaccttccctcatgttccccgaaaaggttggttaaataaagaaaattgtaaatgctatgtacttctaatgctttggggaagttagtactatattattctaagctgctggtttttagcaagtaagttaatatgccactttagttttcattttcttggattgttattatttcagcattattgatgggctcaacagcattgatttagtgcataaatacccagtggaatggtactagttaagatcatggaaccagggcttgaaaactattatgaacttcttgtctgtaccagctattttgtaaatgaagagaccaaagccttggggaggttgagtaatttgccaaaggtcacacgccaaaatgtggcagtcaaatttgaaactaggctgggcacagtggctcacacctgtaatctcagcactttgggaggctgaggcaggaggatcccaggagttgaagaccaacaaggtcaacatagtgagacccccatctctacaataaaacttaaaaaataattagccaggtgtggtggcgtgcacctgtagtcccagctgctaggtaggctgaggagggaggatgcttgagcccaggagttgaggcaacagtgagctatgattgtgtgccactgcactccagcttgggtgacagaacgagactctgtctcgggggaaaaaagaaaaagaaactgaattctgagttctattctgtggtacattattttctaattataaaccatttctaagagtgataacttcagacatactagaacaacttgaatattgagtattagaaactttgactaccatttcacacaccacccagtacacttgtgaccccagatgttgtaagggtttctccccacaaaccaaacaaatctccagaaaacaccatctgaatgtcc

SEQ ID NO: 39695 - DNA, 1105 bp, Homo sapiens
tcatctcaagaaatcactttctctgctcatccataagaagcaactcctgatcaagtttgatcatgcagttgcagcaattcagtcacatcttcaggctacacttctaattctagttctcttgctctttccaccacatctgcagtttcttcctccatcatactcctaaacccctcagagtcatccttgagggttggaattaactttttccagactcctgctaatgttgatattttgacctctctccatgaatcatgaatgttcttaatggcattgagaatggtgattcctttccaggaggttttcaatatactttgcccagatttatcagaggaatcactgtctgtggcagctataggcctatgaaagacatttcttaaataataaggcttgaaagtctaaattactccttgatccatgggttacagaatgaatgttgtgttagcaggagtgaaaacaacattcatctccttgtacgtctctaccagagattttgggttaccaggtggattgacaatgagcagtaatatttggaaaggaatctctttttctgagcaatatgtctcaacagtaggcttaaaatattcaataaacctttctctgctgacatccaggctttgttgttccaattgtagagcacaggcagggtacattagcctttttttttttttttctttttaagacagagtctcactctaccgcccaggctggtgtgtagtggtgcaatctcaggtcactgcaacctccgccttctgggttcgagcagtcatgcctcagcctgctgagtagctggggttagaggcatgcaccaccacacccagctaattttttgtatttttagtagagatgcggttttgccgtgttggccaggctagtctcgaactcctggcctcaagtgatctgcccaccttggccttccaaagtgctaggattacaggtgtgagccactgcacctgtcccatttagcataatttttaagggccctagtatttttggaatggtcaatcagcatttgcttcaacataaagtcaccagttgcattagcccctaacaagagaatcagcctgtctttggaaggtttgaagccaggcattgacttctctctagc

SEQ ID NO: 39696 - DNA, 1049 bp, Homo sapiens
ttgtttcccaaatgtatttggccatagtctccccttttttgaagatgtccctataactccttgaagaactacagtgttttgtggaacatgacttacgaaatgttattagagtcatattgtataattgcagacataggtggaattcttgaattttgttttgcaggacttgtttaggtagagcatttaataacttcttttacgtgatgcttttcatatacattacaaattgttaagtatctcttatagcagagatttcttagctctatttgttatgcttaaaatatattttaattggtcaatatgttatatttttagaaaagtgagaaagtcctagagggtctcaagaaaattaaaggctcctgacattccattagtttagacactacccttgtttatagtttggtatgtcttgtagattgttcttcatgcagttatgcatatgtacacgtatggtatattaagtggatcatattatatttgctgctttataatcaacatttttttcctgcaactctgtatcctgtcctatgtcagttcaccgaatagtagagctttatgcctaagactgtgataggtgataggaaagtacacttaaaggacatttcaaggcagcattcatagtgatatgcaaaaataaatttccttgaatttttgggtgggggaacttacaagattttattcttatgaaatatgttactgctgtgtcaacactttgaaagagagaaattaattcagtcttgtgattgatacaccagagtggctttggcaattggtggcatgacatcaagtacaagtagggttccaaacagcctgttttatcgatcttgttgaatacttagctctctgacaagctctagcatggatatagttttttttttttacgttttcattatgcaaaattttaagcaatggaaagacaagtagtgtagtgaactctaatttacccatcacccagggtcagcattgcctctctcctttcaagagggaactctctcattccccattgcctcacttcaccttttgcctcccagattattttagaatcaaat

SEQ ID NO: 39697 - DNA, 1943 bp, Homo sapiens
tccatttctttttttttttttttttaaacataaacagttatgtaacagttttgtgtgtgtatctgtgtataatttctcactcttcatagattattatactctcagcactttttaatacctttattatttattttcacttaatagtatattgtggtcatttaatgggagtgtataaagaatagcctttattcgttttttttttttttgccgttacaaaaaggtatagtgctgtgttgaaaagtgtttcttgaagttgctagtttatgtttgaatagaattgtagaagcaggatcgtgtgtggttttattagttagtgctaaattcctccgtcttagggtgatggtttgcgttaccatcagcagtgtatgagagtagcagtttccccccagcttcacaaaactttgctctgttgtgcaggagattgagcatctgttaaaggcactttcaaagaagttatgctgtgtgtgtgtgtgtgtgtgtgtgtgtgtgtgttgtgtgtaaaagtcattactgttatgaacactgttaccaccttcagtttcccaactattgtttgtagtgcgttttttaatattctgactgaagcagtttataaataatggttagacttacttgaaatggtaccattacaacatgtcttaaggcacactaattgtaataacttctggctgggcttaagaaactacttcttaaatgtttttaagtggaaatatgctttgatttttctgtaagcttaacaagcttttctcagctagggttcctcatctgaaccacagaaaataggaattatttcattttattaaagatgactcatcaagagaaccattatagttacacaggagagaagttaaccacatataatttttatgtcttgggctgggcattgaaatttgattctcatgtggaattcttagttgagaaaggtgtaccctgtgagaaatggtttttttctcgcattttatattactgcctctccatcaaaccatatatatctccccctcttccttcagcctcccttattggtaccatttgacgagatgattagggagtaggaactgttacaggttgtttgttagagggttaatcttacaaattgtattcttatcaactttcatgaatccaattgaatagtagaattcgctatgaaaacagatgagttgctttagaaaagtggcaatgaaatgtatactcttgtataacctggtttagagggaaccttattaagtcatcgagtctaaaccatatttgtgatacttaattccatgatatttcagtaagtagtactataaatgactgttagtcagttttcattaccttctaccatagttaatttaatacaatctgcggcagcagttatgtttttgaatgcctgtgattttttaccctcaaggaactttcacccctggaagactgatatattgacagtgaactgatgcagcggagatgatatatacattgtgcaggaagtcaagaagtaatgtgttctttgaaggttgaaggtttttaaaggaagctggagaagattgaagtaggagtttaccaggcaaataagtaaaatggtattctagacatcagaaatagaatcaaccagggtatgttgctatgtggatgcttggtgtgtctcagtggaaggtatggggcacagtggagtgttggtattggagataaggctgaggtctgaggataaaggaccatgaaccttatatccaaatttatttcattttgaaagcagtgcattgacactcttctcttttaaagatgagaagttatatgatgtattaattgttttggaaaggtaacttgacagtagtggaagagatggacagaagtgggaagtgactaaaggcagaagacaaatgatcaagtctcacacaactctgcctagaaagttctttcttgtgttaggataaaatctttgaaacttcagtcctctgatcttaatc

SEQ ID NO: 39698 - DNA, 1042 bp, Homo sapiens
gtgatatggtgttgaattcaacttcaaaagtggtagattggtttgtttttaaagagaaaagaagacccgctatccttttcagtgcttttcaaactgtctgtggtaagagacccactaaaaaaattcaatccattatatcttttggtgaaatacaataaaattagttaccagagaagtggagttttaaaaagacatatatttaaccccatttaaaactgtcttttatcaagagacataaaattatcctgtcagaatgctcaaagagtttctgaacaggcttgatttctgtacttgtaggctgcacttccggccgcactggtttaaatgccaactgtgacgtggtatgtttgtttcaggattgtaaactagctccctggtgtccctcctcctctacttttgttcttctcactccctcatttttttttattttttatttttttgctctgtgtttataaaataaaattcattttagattattgactagattatttttaagtttgatttctggttacatgttcattaaggactcaaatggcttagctttgttttaagatagaagagtacaaaacagtgcaataaagattaaatgtttatttccgggttgataatatctcagtacatttatagagtggagtcactgctttttgcccattgttaagaaagattgggaagacttgaaataaaaaatttatttgaaaatacatttattaaaatttgtgagacaccctttgagaggtaaaaagatggacccaataagaatagacttttgtttttattagtaaagtaatactttaacctgtaaaacttcatctcattactcagccatagatataactccaggatgagttaattgcccatgtctaatgaaatgagacgtgagtctcagtgaaaagggagagtccattttatcactagatgctcttaatgagccttttaaaattaagtcttgattggattgcagtcaatttcgttaaggaatatttgagcatcttgtagttgtgtcttatgtaacattttctttttagaggattcagctctctgt

SEQ ID NO: 39699 - DNA, 1049 bp, Homo sapiens
tagttgtaagttctttctgattcagaatctagtccagatcacagattacatttatttgccctgtctcttacagtgtaatttggaacagttcctcagacttttcattatcttttataatttgtgtgtgtctttcttcatgactagattcaggccatgcatttttcacaagaatgttttaaaaagtgatgttgtgtccttctcagccatcacattagcagttagatgatgtcaatttgcctcatttttgatgttgataactgatcatttggttaaagtagtgtgagttatgtattgtcaccgtaaaggtaactttttctccttttaaatcatatctgaggagaaatactttgaaactttgtaaatattctttcctaacaaatttaggattgtaatgtcttttgtccaattttcgtatcattccctttacatttgttagttaacatttaattgtaatgaatatattgtctgacatttctaataggttaagatctctttcagtattacatgtattcttgcatatcccattcgtttgctgattttagagtctctctccttgacttttacactgcttgatatctttacttggttagatggtgatagtagtggttgtggtgacaacaataagttgatgttattgttaagggcttcaacacactgagctttgatttaggcattgttatcagtccatgtgaattaacccatctagtcctctgaaagccctatgaggcagttattgttctaattttatagatgaggaaatgaagcattaaggaggaggtaaagtaccttctgtggctggtgagttgcttggccccaagatatgaacccaggctggcttgagtttaactactacattgtgcctttcctctaagtagtcttctgatttccttatttccattcttccgcccttttctcttttcagcaaccagagtgaatttaaagaataatcttctagcatattttaatgtattcagttagagtcaggtctttactgtggctaaaggccctacgtggccttgtagcttgctcctccctagagttttctactc

SEQ ID NO: 39700 - DNA, 1050 bp, Homo sapiens
tctaaatatacaatgtaatgtttatatttattgtttgcttttgtttccttacccaggctgtcttcttcaggagggactaatttatatttccaatttcctcaatgaaatgtggacataattggtgcctactaaaaaaattatgttcttcctacagaattttacaggaaatttcttattttctgacgtagaggagcatcaaataatgcatacacttagaaatttaaataaacaactgaataagacttaaattacagaatagagaaaaaaccaacaaatactttatgaattagttggagtcgaagttaaggaaagttgaatgtaaaacctaaaagtaaaattaattgctaagctagaggcaatatgtgagcatattttgcaaagactttggtggccatattaggttttcaagccacgcccacacacataactgacaatttttgatacttatgaagtacaaattctcccctccaatgtatgcgtgattctccatagtaacacccacatgtagcttctgatagaaacccacaaaataagatgaaaatagtttctcagtcaaatggttggaatatttagtaatacttggcagtattttttattttgttaataacaggtgtcatttaatacaatgacttttaaattatatattaaaagaaatttttaaaagttttatggcaagctgtgaaatactcagatggataatgtgaattaaggcgtgttctttggccactcaaagtgctccccacccaacactggcatggactgctcactaggtggccaaaagagatttcgtttatggatgtgttttgaatgttttaacattaaaaaaaaaaaacccaaagcatttgaggcagagatttttttagacaatagttgtttaatgagctgcttgtacatacaagagaagagaatgggcctgattgctcacaatctgatgtttgaaaagtatttttctggatcttatgcatttgcatatctaattgctatgtaatcaaaactaagtgaactgtagctacttgaaactctaaaatgaaaggcaatcatcttacgggg

SEQ ID NO: 39701 - DNA, 1012 bp, Homo sapiens
gaaagttgattacatagaaatttttaccctgatactggtaaataccttcataaagaggaaaataaccattttttttgctccttcccccttcttaatttctttatattacatatgaccatttaataaaggggggggggaatagtattgtcctgtggagtttttgattcttgtatgtgtacacgtggacgtatgtggttacaggtttctacatattatgtgaaacagtataatattgattgtaagtaggccttgaaaagttaaagatttgtattgtatcccctatagcaataactgaaaaagcaatgccaaaaggtatatgtaaagagcctttaagtataacttaaaaactgaaatggaattataaaatatattgaaataatgtatatatagatatattgttcaaagtccggaagggaagctaaggaacaaaatacagaggctacaaatagaaaaacagtagtaaaaatggtagataaacacctaatcattcaaaaattccattaaatagaaatggaagaaccacttcaattgaatgaaagagattgtcagattgtcatcatggattaaaaattaaaagcaaggctggctgtggtggctcaggcctgtaatcctagcacttttggaggccaagatgggccaattgccctgagctcaggagtttgaaaccagtctgggcaatatgttgaaaccccatgtctactaaaaatacaaaaaattagctggatgtggtgatgcgcatttgtaatgccagctactcaggaggctgaggcaggagaatcgcttgaacctgggaggtggaggttgcagtgagccaagatcgtgccactgcactccagcctgggcagcagagcaagactctatctcaaaataataataataataataataataataataataataataataagtaaactaaaaagcaagccaagtgcagtggctcatgcccataatcccaacactttgggaggccgaggcaggtggatcacttgaggtcaggagtttgagacca

SEQ ID NO: 39702 - DNA, 1050 bp, Homo sapiens
gaaaatattttggaccgagtgattgtggaaatgcaagataacaatttatgagatgaagctaaagcagtgtttggaggaaatttatatatttaattatgttggaataaaactacaattatctaatttcctacctaattaaacatttaaagaaaacagcaaggtaaacccaaggtaatgtaaaaaaaggaaataataataaattcttgaaatagaatacggacaactagagaaaaataatgaaactaaaaagagttcttggaaaagttagttaagataaagctctaattagactaatccagaataagagagaagacactaattaccagtatatttaataaaataggagacatcactgtcgatcatatggacattaaaaggccttttaagagaatatcataaacagctttaagccagtaaattagacaacttagttgaaaaaaataaattctttggaaaacacaaattattacccaggagcaatagaaaattttagtatccctatattgattagagaagctgaatttgcaattaaaaattattccaccaagacaatgtgaagcctaaatggccacactaataaattttatcaaacttcaagaaagaaatattgtgaatcttatgtaaagtcttccattaagaaaaaaaaatgagaatacttcttaactcattttattataacaaattggtaactaccattgttactgtgatactaaaattcaacaaagataacagcaaaacaaagaatcagtattcttcatggatatagatgtaaacattttaaacaaaatttgagcaaattaaattaacgataaaaaaagaagatactgcattaccaagagaggtatattttgagaatgcaagtttagttttaacatcttgaaactaatcagtgcagttaatcataacaatagaataaaggtgtaaaactgtataattatatctaggagcaacagaagtatttgacaaaattcaatacacaaaaatgataaagcttcccagcaaacttagaaggaaacttcctcagtttgataaattcgccttatgaaaaga

SEQ ID NO: 39703 - DNA, 1085 bp, Homo sapiens
acatattttatttcttgccatacagataaccctgaggtttccagtttcttgattcattgactccttggtttcccacttagtttgcatggtgtaccctagtcaaaaagaaatatttcagagttctgtttattaaatatttactctacaaacaactttgaaacagactatacattttatttgtaaataaccacatttttactaatagcatttgtattttcttgggtgctgttcaaattctcaaactttggaatcagatttttgtactgccaccctcttttcttgttccacattgatttttgtatgttcttgatttttattacagcaaccgctaacaacctagctttgtaaagatatgacatcatcaaaaagaatgtaatgtgaccttatgttgaaacagtcagatattctgagctggtggttcacacagtgtcggacagatggtacccctgtaaaatgctgtgctgactcagagttcactctttggaaatacatagatggcccagcataggattgtgtctgattttttttttccctgtatccccttacaatatgtggatgcattttcatcctaaagatgtgttgattaaaaataaagcagaagcatttactgttaaaatttatttttagccttattggctaagctcaatcatgtgaattgttgcagaaagcagttttattatgcctgctttattttcttttactggaatctaacaattaggtaaatagtaacttctaaaataaaggtccaaaaacagcagatatttattgtttgtctgtggtaccttgctgtgtgccaggtgcatttatatttaccatttatatactacttatatattcttattttatttaaaaacactttctctaaaacttaaaacagcgattctgaaattatgccaactctacttaacctccctgtagcttaaccaggttttcaacatggggatatttcttactagaagacattaaggaaatgaaatatagatattctctatgaaactagtatttatgacttgatataattaaagagtagccttacagttaattttaaggtatggtctgatgggaatgtagataaaactattttc

SEQ ID NO: 39704 - DNA, 1047 bp, Homo sapiens
tatcacaattcttcccttgttttctctgtagaatgatacttgttgcctaggactcatccaccttccttccacctttttctctcctgccctggctccttcccatctatatcatcaccaagttctgtctgattctacctccaaatagcacatatcttttctccatctccacagatggagtaggtctgttacccatggtgctccctcctatccattttctacttgaggccaaaactatctttttaatatatagaaatgtcatcacactccttgttgtaggttttcagtgactttctatcaccccatggtaaaaatgtatggcattcatagcttatcttcatctaacatgtgcctacttttccaactttgtttcatgtcattcctcctttacacttacacccacacatattaaataactcacagttttcagaacactgtttgtttacgtagtgtattttggcgatctccagaaagaactccgtgatttgtattctgtactaatattatagtagaatgcattgtctatgatagtggtgtagaattattagaactgaatgtttgtttgtttgtttatccccttgcccctgactgggcatttcagtgacatgcatgaagtctgtttcatcttagtatctctccctcactgccttgcacatacatagaaagtgatcagtgtttgttgaattaatgattgaatattagtcctttaacaaagcacttgttgtttgcttttcatagtaaaaatggaacctaaaaacacattcatgtaaaatcttccacaagtcacttacccctttttgcctcattttttaaatcacctcattaggttgctctgttctaaatcaattaatatctatatatgtgtgatggtcatacacatacgtaagcctacccaaaactattaaattttacactttaaacaggtaaatattgtggtatataaattatggcagtaaaactgttttttaaaagattgtaatagaacatggtcagtttggtaaggaactgaaagaaggtatgtgtgaccagagtgcagagtgagagagattg

SEQ ID NO: 39705 - DNA, 1031 bp, Homo sapiens
aagagttttaagaagtgagccaggtttattttcattttgtcaatatcactctggctacgaggtgagagaacatcttaatgggccagagtggatgtgtgaaaggagacccggaaggtgacagttgagttagaactgggcaaaataagcagttatttaagtggtaatatagactggatgtggtgaatggtgattgactagaaggtatcgtttgtaactccagaattctgacttgtataactggatggatagtgctgtattcactgtaattatagaatatggttgctgactgggtaatttataaagaaaagaggtttaattgactcatagttccacatggctggggaggccttaggcaacttacaatcatggcggaaggcatctcttcacagggcggcaggaaagagaatgagtgccgagcgaagaagatttgaccagagaaatgtgggaggagaggccagagaggttgaggggggggacatgaggttggtgatgatgaaatttgagcagagccaatgtctcattttccttagcagtcctggaggggatatgcaggaagtatggacaggaaagggtaggaaaaggcttgtgaacatcccagagaaagtgttctcctgcactccagtgctgtgaataacttaagactcagtaaaagaccaacagctagaaaacttacttcctgaaaacactgcgctgggcatggtggctcatgcctgtaatcctagcactttgggaggctgaggcgggcggatctcttgaggccaggagtttgataccagcctgggcaacatagtgaatccccatctttacgaaaaatacaaaaaattagttgggcatggtgacgcacacatgtaatctcagctactccgaaagctgaggcacaagaatcatttgaacccaggaggtggaggttgcagtgagccgagatcgtgccactgcactccagcctgggtgacacagtgagaacttgtttcaaaaaaacaaacaaaacaaaaacatactacatggtgttctttacttgtctgtggttttta

SEQ ID NO: 39706 - DNA, 1086 bp, Homo sapiens
aataagcagcatgaatttataaaagcaagaccagtatgcgtgagagttcttagaaaagcctgcactcaggagaatcgcttgaaccagggagttggaggttgcagtgagccaagatcacgccacagcactgaagcctagcgacagagcgaaactccagctcaaaaaaaaaaaaaaaaaaaaagcctgcactctgagagaaaacgatgatctgtgttattgaggaacacataggatgcttccaataggagcctaacttggagaggaaagtaccaggtctactcggggattgtggacagatgattttgactaatgcaaaacatttgcaagcaaggttgctcatgtaaactgttcaatgccctgaatgctggagaatttgggcctttgtgataggcagtggttcgaattatttttttagttgacatagttttaatgatttggaaatacacatttgtttcagctctctggtgattactttgttgtagtttttttttaaaagtatatagatctaaaaatactaaataaacatgattttcttactttctaacatgtggtctgatgaattcaaaagatacttccacttaaaggcatcataagactggagaaggtataatgtaatggttaaacatgaggactttgaatcaggtattctgggttggaagccaggtttgcaatgtgaacttttgtggctttggataagctgcctaccctgcctgagcctcagggataatgcactgccaataccacacatttgttaggaagcgtaaatgattggataatgaagatctagtgtctaagtctagaaaagttgaacaatgtataaattacattaaacgtgacctgtttgtatccttttaacatagctgttaaacatagttgatgatggctgggcacagtggctcacgcctgtagtcccagcactttgggaggccgaggcgggtagatcacctgaggtcaggagttcgagaccagcctgaccaacatggtgaaaccgcatctctactaaatacaaaaaattagctgggcgtagtgacatatgcctgtaatcccagctacttgggaggctgaggcaggagaatcccaggaggc

SEQ ID NO: 39707 - DNA, 1026 bp, Homo sapiens
tatgagattgcggataatcacttgagttcagtattacaaaatatgattttaatgacccattttacaaatgtaaaagttagtgttctgtctctgtagagttgctcattcccgatcaaggttctgcaggatactttgtgaactatctggagttgacatgtacaacttcaggatgccctgtttgatcagttgtaatttttgagaaaaaaagaggtcagaaaaactggtctgaagactggctcatagaagctctagagcctctagactgtagaagaaacttagttttctcatctgaacttatatttgaaaaagaggtgatatataccttcaacagtgtttaggcaggtacgtactaccaaatctcattgtcaaaaccaggacagtaacattgaaataaccacttcgatgtgaaagtaattctataattaaccctgttgtctcttctttttttttctttttctttttttttttttttgagacagtctcgccctgttgcctaggctggagtgcaacggcgcgatgtcgactcactgcaacctccgccttccaagttcaagcgattctctttcctcagcctcctaagtagctgggattacaggcacctgccaccacgcccagctaatttttgtatttttagtagagacagagtttcaccatgttggccaggctggtctcgaactcctaatcttcatgatctgcccacctcagcctcccaaagtgttgggattacaggcgtgagccaccacacccggccagtgaaccctgttgtctcttaagacacacaagatcatgccctgtgaatacagagtggaggggagtggtcaggacatgagggtgaagcccatcctggactgagaccacctagaatcaaattccagctctgccaactaaatcctgtgcatttctgggaggcattagtgtaccctgccaaaatgtggctgtgatctggtgtaacataccatcacctccagcaacaccatatggcagactacaccaggatctcctcctatgccactcttatttttattc

SEQ ID NO: 39708 - DNA, 1024 bp, Homo sapiens
ataagttgaagttttattataatggatttgattcttcttttccaatagtagcttacttatttcgtttttaacaaataatttctgtgtctttctaagatcatacttactttttgttcatctttgtacaagttgataggagtcaaattctacaggcatgccagtatccactccctgtaatcttctgcaaagtaggtttttaaaaagttggcagtagcacatcaaaacattgtctttatgtttcactcatatttttctttaattcttgtgatttactaaaagctcactgaacagttctgtttactatatattatagtataccattcaccattgtaatgccaaaaacagaattttgtgtgtcattacagctataatagaaaggagcactgagaagcctgtgtcctggtcgtccttcccgttttatgaatcagagaggaacaagactatgtcagaaaattgttgcattgtgttactttcattgtaaatatcacaaagtcatgtaaagttactgggattcgatgatacataaaagtggggggcagttagttctatctctacacagactttgatagatggaccctcatctactgcttgctttgactgtggctaaagtttatgttggactgagacatttgggatttggaaataaagttaaagacttctcataccagtcacttataagttctagtaagtaacttgggggtggccgtgggaacatggggttaggcagtggtaacaaagaaataagccctattctcatggagcttactttgggagtggtgatactcaacagactgtaatttgaagtagaagcaattaactttgtcgataggttcttggagatacaactttaaacaaaatgagtatattgcagcctcttttttcatcaatgttataatgaaaccatgttgaaagcagtggcattatttgaggacctgctgtctgtcgtttcacttaaagttagttttaaagaatgtattgaccacattaagtgaggatctactgtaatctagggatggcccctgga

SEQ ID NO: 39709 - DNA, 1049 bp, Homo sapiens
ggtaggaggatggctcgaacctaggaattcaaggtggctgtgagctaggatcatgccacagcactccagcctgggtaacagagcaagaccctgtatctaaaaacaataaaattaattaaagtaattttaaaatgatagatgctgaagagaatatgttatgtttagtcttatctcacattttcattcatttctatttaaaagtaaagctttttaggggaactttaataaatcggtgtaactgacaaaaaatttacaaatacaatatgctgtatatcaacatgcctttactgagaaaacagagaaagcaggctccattatgttagcaccttttggttcttgatctttttttccccttattaaaacaggtgactgtagtcacatgatacttactttaaggcttgtgtgtagatatagctattatatttgtggacagtctcaaatgctttcatctcatgtgttttccatgtataggcagaaggagaagacagcctgaagaagatgcagctgatggagcttgcgattctgaatggcacctacagagatgccaacattaaatcacgtaagaatgagctctgaggcccagggttactgctgtctgcgttgttttgtctacagacttttttccttttggcaacacaataatagttcatacaaagtgaacagttgaaataactgttctgtcacttgatatggggctgacagtcctatttttaatgctttcatgaattgaggacactcttgattttattttatgtcagcatgttgaagttttaggttgataaacttacattattttaacaaaatcacaatctctaaattcaagtgtttaagaaattttctgtttggttaactacagatgtagggcttgcagcttatcttgttaaatttatgcaaaagacaacatattgaaagcttattttgaaaaagtgaatttgaagtgtatctgactgaaatgaccctctgttgagttctgtcctttcactttgcttgcatgttttccctctagtatttttccctgttgatttcatatgtgagttcacagagatcag

SEQ ID NO: 39710 - DNA, 1040 bp, Homo sapiens
ttatttgagatttattttatctcacaggtttgtgtaattgttggaaaatttttaaacttctaagtgaaagtagtctgagcgctttataaaattcatattattgtgtgtgttttgtaatatttgcgatcacttaaaatatcagataaatacagtcatgcatcgcttaacaacggggatacagtctaagaattgccttgtctggcagtttcatcatttggtgtacatcatagagtgtacttacacagacatagatgatatcgtttactacacacctaggctgtgtggtatagccattataatcttatgggaccacatagtataagtggtccgttgttgaccaaaatgttgttatgcaggcatgactgtagttgtattcttaagatttttcagttcttgtgttttggagtcctagtcatattaaacatgagagatactcttaatttcagtagtacagtatggaatagttaaataaatagcaaatcactgaattcagaatctcacttaaggcagaaattaaaatcataatataaacgcttggttttacatgaacaaaaagtggtgtgctcgaaaaagacattactgatgccttttttttatagagtggattgaaatgccagtcatgcctgatatttcagcccattgacttgctggatgaaggactagaatacagcagctgttataacacgaccagtcaatgtggaacaaactgtttctgtgcaacccctttgttttaccagacaaaatttgaatactttttttcctgaattgtatatgaccttggtgctgcatgcatgctgttgacttttaggactttgatcttttaaggttttttttccccagcattaatattgatttataaagatttgaaaatctttaatgaactggagaacactaagatttaaactcgaaaattcgttgttcaagtaaagaaagccatgatgctctgtatgttatctgtgtgtgtgcatgcactcaggtgccctttgtttcatgaacaaatacatttcattgtacatgttttctgtttaaatcattgtata

SEQ ID NO: 39711 - DNA, 1026 bp, Homo sapiens
gcctattagagaccaactgaccttttagttgtaatgaactgtatggtcttgcatggtgacacacctgtgtaggaggccaagacttggcagaggatgtagtctaggtgtcctggtatatataaatggtcactcacttcgtttatatattccacactcagaaaagaagtcagagttttttctgagtaatacaaaaaccatcacttacataatttgtataagaaactttaaacagttttaatcaaaactatgagtaacatcaaaaatgctttaagattctatattttggaatacctgtgaagtagtatgactacatcatgttaaatatttattttcttctatgattttggagcagcaatttttattttaaataaaattccacttttaagaaattcagggaagatttggtcacattgaagatacagtatttttgtagtatttataaactgttctaaatgatagactatagaaaacatttttgtcatatgaaggtaaatcagtccattattttggatcatttaaactgaacattacaccttctgggctttgatttatgaagtggcacagaatctaactttgcactgaatatcttttcattcacatctcctctgccttagtcacaatggcaacagtacagaaaattctatcaaacctcagaatatagtagaaataattaagctgttgaatgagtcttaaaaattatactactgttaagtggaccaagtttggtgaagcagaatgtgacaaaggttgattaaggaaggaacaactcaaggacattgggaatgataacttttccacttgagaactactttatgttttactgtaatttttaaagtttttttgtcctttttgttattttgcaaaagaaaatagtatttacaggtggcttcttttaaaatataaaaatataaagcaggaatgtatatgaaatgtcagattttattgtatttgcagagtattagctttgaaattgaataaagaaagctgtttgtagttttaaaatgccttattggtatcaattagaaa

SEQ ID NO: 39712 - DNA, 1048 bp, Homo sapiens
tttaaaagaatagtttaatacttttggttattccaatcttcaatgttaacccaaaggattctgagataaaaattatgtgtcatctaaacttcagtttacagacaaaattagagctttgttttatttggagaagggggatgcattcatttgattttgttttttgtttttaattaattgaatataataggatacctagcaaatgttttcacaaaagtgaatctttgtgattttcattctagaaaacaatgttttaaatcacccaaatttaatcacatgtctttatatcataccagataactggtgtagtgtatccttttactgtttcaataacctctgcctcccccaccccttaactttaaaagaatgtgaaaaactagcatcatagtgcatataaatactcaaccacatttcagcttaagcttctaatttctcaagaagttgaaacagttagttatgtagttgaagcaatttgtgtgcaaagcctacatctaaacacttgagtgaataatcattaactgctcagtaccagacgtggcaaatctcaagtgacagtggacccccccccccgcccagcttatcaactcgtcccctcttccacaccttcccagcatcacagtcagaggtcagcaggaagctgagtcattaccttcttggtgacctcccccaccatcttgtctcacttggaaaccgttgtcagtttatttactatgcaatagacattcattgttttgtatccagctagctttggtttaatatgccactgctttgtctttctgttacacatacagttttgatttatttacaatatatgctgtgccattttgatttttatattgtttggttggttgaataaatttgcgacactcaaacacttgaggtgatagttgttaaaaacaataccagtatttgatccagtttcatctcaactatgttatacctggacattttagatgtttatcaaaggtcttttatggggaagaaagtaaatgtatgaaataataaatgtgtgacatttatagggaatgttggctctgaacaaacttttgaa

SEQ ID NO: 39713 - DNA, 2051 bp, Homo sapiens
atcttagtttcatgctatgtatgtaccataaccaacctattgcctatgagaaacatgtaagataatgtatttacagccattgttacaagtttataatgtatttttctatcttgttttatatgtatgttatataacattcaaaaagaatttttttcttgattgagaaaaggatacaaaatgcaaaatccacaattttgataactgaaaattgccaattgttttgcagtactttattatattgggtgtcttgtcttttttgggcttttagttagctaatgaatgaatacattagacacttttgggttttagttgggattttacatagcttgcattttaattctttggttctttgctgtttctattaacccacagcattattttaataaatgttataataccaacctactaactctggactttgtctgtttattaacctttatatgtttaattaaaataaacaaataaagacaaaagaatgtaaagtcttgagttactggactaaccctgaagaacgtgaccacagataacatagtgtgacttgtttttatgttgtttgtcagctgacagttttgcacactactgttaaaatggctttggttattctggtcttttagcttgggggccggggcgggtgtgggtgtaggtgcagtagagatgggaacaaagtagcctttgtttgaggcattcttctcttgccacttgcctttcagcatctgcattactaattccacaccttatttttccttctccaaaataatcactgtctgctcacagcatcgagtaaaaagatacattgtcatggtatatacctggagaaaccagtttgattctttgttgaaccatttcttttaatttctgtaaataagtaattttatggtcacattgtaaagcagagaaactgttgatattttacctttatttagatttttgttttaacttgacctttttcctttggaaagcgttgaacttgtttagctaactactcctattaggggagcttaacttgggtaaagtcaaaggcccactggctgtttctcatggtggcctgaagccccgctgctttccagtgaggaaaagaaccctcagcacgttactgagctttcctcaggtatttttttctctgtcacctactttacaaatacagtcagactaaaacattaaacaagaagtttaagggggaataacattgggatttgaaaagttgtatgtgattaatttcttgcatgcaaatcaatttaagatttcttaaatatcttcatgcttttcttggctggaacttgggtaaattaacctgtaattatgaattatttagtttaactcaaggtgcatttttatttcacagattgatacttgcttttttctgtgaaacagttctcctagataccaaaatcctcaggatgaatttttgcatttgtaaataacaatttatctttgtaaattacattttatttatttagagttctaaaattgagggctgaaatgaatgacatgtaatagaagacaaaactgtaccaatacgctgttaaccaatcagactgtccaggtattctcatttcataaatatgtatacacacatataaatacacagagtagtgttagctgatgtgagtgataacagcgaatcaccattgagatggtcatttggatcatgtaaacaaaccgtgtcatgtctctgatgggagcggtgggtagtgtactgttaggtggacaggtcttttaacatgctactatttgtaaaagtttccgttgccataacagttcatgtagtagtctgtgaaaattcgaagctgtctgtcaagctgctaatatacaagttgtcatggtaccatgtaacttaaattgatgaatttctatgcaatttactattctctgaagcctatgaatgcagcctcatctcattttcagttaagggtactttatgtataattatgtcattgctgccttttatgtaggaaatgtaaaaaagttttaaaaggcgaaaataacattacagatttcatttttatacaggttacaatattaaacatgaaactaccaaattccaagaatag

SEQ ID NO: 39714 - DNA, 1028 bp, Homo sapiens
aagttaaacattacacttttgttttcatagtggttacagttaatatgaagcctgtaattatgtgtatttacccatagtaataaacttagcaatgtctacagtgctttcaagtcaagaatttttgcacatgattatgtccattaatctccctcttccctcagcccctgtgtcatgttgatattttaattctgggctgttatgaatacagtcattttccttttttgatctgttaaattaaaacttggcctgaggctgccatagcttaaatccctgagtagggaagtataaactggtttagtaggtaaacaaactgaaagcctaattaaggagtattcttcgtaacaaacagctgagtgtcagccgatctgagcagtggccttcagccaatcacaggcttcctgctgatcagtccgcatccaaatacagcaaacacaaagctgaaatcattcacacccattctgcacctcacttcccttttctgtctataaactctccctgcccactccgaggaggagagttttctgaattgccactggtttattgctgctgattcatgaatcgtccttcgctcaattaaattgtttaatttgtctaaaaacttcttcttttgacaggtcctataataaactttacctaggtattcagttacccttaatttttatgtcttttgtataaatatcctggatttgctgttttctcatttaaaccttcctttaagagtgttttcaacatgtggcaaaattttggaaatatatgaatgagaatattgttattatactttcacatttaatgacaatttgattggataaaacttttagtattcaaagttcttttcttttaatattttaaaaacattctactgtttttctcttgtaccattttgctattgaggagtccacaatcagtcttactcttattcctttgtagacaggatgatgatataacttatcattcaactaggacactttggagcgtgaaggggatactagtaataattacgcttgtcagtgggtgtaacccaggactgt

SEQ ID NO: 39715 - DNA, 1125 bp, Homo sapiens
ggccgcgtagcccgcgcgcggagcgtaccctgctgcggccgttggccgttagcgcggcttcggcggttgtcttggagaagcaagatggcggcgacggcggccgcagtggtggccgaggaggacacggagctgcgggacctgctggtgcagacgctggagaacagcggggtcctgaaccgcatcaaggtgaggccggaggctggggccgggcctggcggatccgcagggcttgcgtggacagcgggcgtcacaacggtcgcggcgaggaggccgcctccctggcgagggaccggggccggcgggcactgggggcgcgccccggcatggcctccgtcctgcccgccccacagagggggtcggctcgttcgttcgtgtggtcccggagggcaccgcggactgggggtgcctggcccatcccctgcctcattccgtgggggcgggaccgcggggcttgggggccacacgggcggcccgcagctgggccctggagtgcggccccagcgtctcttcctcaggctcgggcatgatccgcggcgggaaagcagcgcgtccagccgaagcctgggggtcggagagcttgtgtgactgagaacgtttcggaaggcgtttctgacctttgcacctgccctcccagctcgttggcttgctcgtgtttgttgctggataaatgtgagcttgttgtgaaaattgtcttgaaattataatttcctgtttcttaacttttttttaaggctgaactccgagcagctgtgtttttagcactagaggagcaagaaaaagtagaggtatgaagtttccagattttaacatggctgtattcgttaatacttaatttcttattcattaaaaaccgtcttaaaaatagtttatagtaacatatagctagggataattttgaactgttaaggattacattactattgagagagagccaaaattattcttttttcgtgtagcttttgaatttgggggtaatcttaaggtaccacagtaactctgatactaatgcttaatctgaaacaaatggtcataggagtttcttgaagaaatggtgccattgtcaatgtgttaagtgcaggttcactcagatcctttagtaagctaatatgttattaatccctatga

SEQ ID NO: 39716 - DNA, 1054 bp, Homo sapiens
ctgtccctccattctcttaaaatatttcagttgactccctatcttagaattccctgaaccagcctaccaactaccttgaggatctctcctctccttgtcttttattttaacaactttattgaggtaaaattgacctatagtaaagctaaagtatttaatatgtacaatttgatttttaatagttaatttatgcagctgtgaaatgatcatcacaatcaaggtactgcgcatatccttcaaacttttgaccttcaaaagttttccttgtgccccttatgtaaccctctcccccaccccaaacctttttaagaattatataaatggaatcgtatagtaggtactctttttttttggtctgtttcttcaacataatgcatttgaaattcattcatgttgtggtatgtattaataaatcatttcattaatacattgtacagatatgacagtttagccattacctgctgacagacatttaggctgtttccagtttttgagtattacaaataaggtttctgtgaacagtcacatacaagtctttgcttggatctgtgatttctcttgagaaaatatgtagaggtgaagtgactaggtcacatgctaggaatatttgtgacttttaagaaacactaccaaattgctgtccaaactcgttatgccattttgcattcccatcagcagtgtatgaggctgccactgtagcagcaattaatgtggtcttaaggaagcttaccatgtgctacctactgtagcctcttctcagcaacaatcacaggcttgatggtctagaagtattttttccatacttattcaaataaatgtataattacaaaaataagttggcctatgggccgcataagatcatctcacatttcatggataaactgggaattacaagtgtataattaaattcctgttcatagtaagtatgctataaatggtagatacctgagatgacaaaacttttatcaaacttcatgtatttgaaataataaacagttgttgacatttaattgtatttcacacaggtatttgaaaatatctagcttcaaaagca

SEQ ID NO: 39717 - DNA, 1047 bp, Homo sapiens
aaaactatttatatagcatttacattgtattagatataagttagacacgatttgaagtacataagttatatgcaaatatgtcatttcacataagagacttgagcatccttggattttggtgtccacaggagagtcctacaaccagtcccctgtggatactgagggacgactgtgttagtattactgtttcttgttattgtatggatgactctttaagttcagtgtagtctgcctaagctcagctcagtcctttatcctagctccagactagaatttccagctcttcacaaaacatacctccctggataacccaatagtatattcgaatcctgtgtggaaaaacttactttcttctctttacctctaaaaagtaaaaacataaagacaaaagcaaatcccaccttactccccgcaaataaccctcttcaagttcttcttgctcacttctgtgttttgattgattctattcctgtgactccttggtttcatcccaaggagccacctcttcacatgtgctctggattcagttcttctgtcaggaaggattcactctccaccttgcaccccgtagctttggtaacaggctgtggaagaaagaataattgctggagggctttctgttctctgctagataggagtgtacctcaaaatgagacccagtagcatgcctgtgtagtgggtgtgatgtgaaaatggacacagaatcactgttcttcagtacttcattctgactcgtggatttgaggcctcccctgaagtttgccctgactttttcatagctgtgattctgtcaaatagagccaggataggaattctgtatcctcaaaaggtagttgttttactcccccaagttgctgaaccagtaagttgggcatctcatctccattttttgctagttttcccttcctaatatctggatatttaattttaatagtttgtgcatatgtatataaacaaatagataaaatatttaaaatagagacctcaaagatgtatgttttggcccttcattatttattagtgttttctattactttggaagaaaac

SEQ ID NO: 39718 - DNA, 1129 bp, Homo sapiens
tgcacttgatctatctgatgtacattctccaccaaagtcaccagagggaaaaacaagtgcacagacaacaccaagtaaggtgagttagctgtggaacacggaagtcatgtctggacttaactccagagtgctctgcttttctctctctagtctttcttgttacaagttgtattgttttatataaacacatgggctctttagtttcttgaaggtgctttttttccattaagtatacattaaaaaaaaagttttgctttgttggtagttgtttgacatttgtattgtagaaaggaatgtgctggtaagtaacagaatcatagaatatttggatttatttggtacttcggacattttctcctattaacaaggagatttacttacttttcatttataaattcctagcttgagaatattaagctagaaatatgtattataggatataatattgaatgaatattttagacttctagatgggtgatgagattcagaattgtaaatcatgatggtttttaatatacctgggctgttttgatacaatttctaagaaaatgtatgtactttggttacatttgtgtgtgtatgcatgtgtgcgtctgtttgtgtgtttatgagttgttaaaggtaagacttgatttcagagattaagcataatgggaaaaaaaatgagctctacactttgaatttaagatccaggatatgtaggaatggatagaaagatgattgtcaggaaatttgttttctcaagagcacagcatgaattggtagtcccaggcggtcttaccaaaggataggttggggtctgtcttagtctgttcaggctgccaagtaccatagattgggcagcttacaaacaacacatttttcctcacagttctggaggctggaagtccaagatcacggcatcactgtggttaggtctggtgaggtccctcttctaggttgcagagagctgccttctcattgtgtcctcacgtggtggaaagagggtgagagagctctctggggtcagggccctaatcccattcacaaagccttcacccgcatgatctgctcaccccgcaaaggctccaccttctgataccatcacattgagggttaggatttcaacataggagctgggggtttgtgg

SEQ ID NO: 39719 - DNA, 1496 bp, Homo sapiens
tcatttctaaccaaagaaacaactattgtattgtttatagttgctccttctgagatttctagttggtgtagggaaggcctttttttaaaattttttttttcctaaatactcataggaggctataaccccagtgatagagtaaggtcatgagtaaatttttaaaatttctttaaattaattgcaaataaaacagcctatgtaagtaagctttacttttcatgaaaatacctggctttagaaaaattaaaattaatgaatattccaaaatacttatcagtacctatagcatttgactatttggaagctctttttagcaaattattactgtttttaaagcaaattagcaatcctaacctatatataatgtatgtcttcagggtaaaatattaaagtctattttacgtactcttattctccctacatacattttaagatctaagaattataatgagaatctcaatgttttaagtcagtcaggaaatgatgctgtgagtttttccagagaaggggggactgtcctgaggctgctttagagaatagcgtttgtcctaacagctgtctctgccgtcatcccgttattctagtttagtctccgtttctcagttggcctcataaacccacttcagaaataccctagatagtccttgtgtagggttgcatctgttctaaaataaacccttattttggcacttaaaatgcaatttctctagtactaaaggacctggatttgggatccagtactttccctaccgtcttcttgctagctacctcctaccaaatcagccttgagggcccacggagaatgctagaaactctccaagagtagggtccacccaacctttaggaaccagctttgtgtgctcctgagaaaggtcagatgaggtcaggacaagtcttcaaggaagttgcctaggaactcaagtgaggcttatttagaatgctgctaaaatgtagcatgaaagagctgattctccacccagtagaagctgagcaggtggaggctaaggtatctgtgtttgacctagtaactattggaaacagtaaacatgaggtagatcactctaggaatagttaagaaaggaccaaaaaaagcaggcctcacagaacatattaactagatgttccacttctgagacatttttcagtaggtatctttgtttggtaatgagttagtttattttttaaagatttctattttgtggtaaaatctcattttattctcatgctcagataccaaggtataaaggacaaggtaagaagaagacaagcgggcagaaggctggtgacaaggtaacatgcatgagggcagaggagaaaagcagcctgtgggcatcaggtctcgactctggggcctcctggagcgctgggctcctgtcagattgggttctcagttttcttatgaaatgtcacttgaggctgggctaggtggctcacgcctgtaatcccagcactttgggagtccaaggcgggcggatcacttgaggtcaggagttcga

SEQ ID NO: 39720 - DNA, 1056 bp, Homo sapiens
gaaagttattgtgtgttaatgctttgggcaacacatttaacacagttctcacttaaggagtttatagtttaattggagagatgagacataccttaagtaagatataaaacttcttaatagattttaaaaatcagtttcttgggcttttctaaaatttaaaagcatattttatagtattaagcttttataatcttactgctattgtgggtttcaaacaacttaaacattttcaagaagtttatacatagagccaaggcatcctaagagatgtggttttcactttgtgtgatgtgaaataactgtgatgggcccagactttagctttcgcggtactttgggcagagtgtagtgtgtgccctgacttgagaggggattgaagaatctaggtgggcccatatcccaggatttagtccataatttgggtctcttctatttcattgttgtgttcctgaggccaggatgcttcctcaattacttggaaacctttttccctgtacatttctgatcttgtttctgaactgccttgtgagaagtctgtattgtaccccatgtggcctattgccagccttacttatatgggtaagcccttagctctttgttcccctgcctttctgctttgccttgtgcatgcagtgagttcccaacagccttaacattctcaacatcttcatcatccagatgctatgttgcatgtggtggttgaggttgtacacagcaagactccagatggagccatccgcatggtaggtgagtggcatctcccaaggtatgcaaagccatcatgggagccctgcctgtcctgcagacgtgaactgggcatgcgatgcaggagggcctagggtaccgctgctcccggagctctggagcactgatcaggagtgtcgcatgtgtccggttgctttcgaatgcaggaggcgacaagtactagtggctcactcagagacccttggcactttcttcagggaagctatattcatattataaataaacttaaaaaaacattcatatgtatagttagaattgatttgtagggtttttgaactgatgtaacttggg

SEQ ID NO: 39721 - DNA, 1144 bp, Homo sapiens
ctcctgacctcatgatccgcctgcctcggcctcccaaagtgctgggattacaggtgtgagccactgtgcctggccttatattttttaaatcttatttgttagtttttaaacaatacttaaccttagttatttagcttcattttgaatcttcaacttagccaaatccaggtgatacaaaacccaagtaactgaagtttatgtacgtaacataagttcgtcttaactcatgataagggtttttaaagcagattcccgggtatacatacgtatacagatggtccccaatgttacaacagtttgatttatgcttttttgactttatgatggtacaaaagtgatatagattaagtagatagcatacgttgagttttgatcttttcccaggacagtaatcggtggtacgattctctctcggggccaggcagtgacgttgagccacggcttccagtcagccacatggtcacgaggcactctgatgccaggggactgaatagccagcattttttggatattgtgtttttgcacctcatgtttatgaagtgcccgttttccactttgtgatattttcacttgacggttgatgaggtgaagcgctgttgtgggttgagcatctgtgcacatgcatacacctgctgtgcacacgcatacacctgctgtgcacacacatacacctgctgtgcacacgcgtacacctgctgtgcacacgggtacacctgctgtgtacatggaggagccactgaaactgctctcagcgttttcagtgctttggttttaatctgcaaaatgtgttgatgacaaatctttctcctcttcctgtagatttttttaatagtgaagtttatttggaattaagtttagtgaattcattaataacctagttggtaatggtcttttggcaaaaatgagccatagttataaagtagtaacatgttactgtgtggtttagaactagattttgagagcagttccaaagcagattgtttcagaatttatttttactccctggattaagagaactatatttttaaaataattctgttatgtttacaagtatgtgttgtgtaatatagtaatgcccttctccgtaaaacttgtcttcctaaaactggtctttctgtctatagcgggaatattggtcaaacct

SEQ ID NO: 39722 - DNA, 2509 bp, Homo sapiens
gctcagctttgatactagatagttcattatgtggatttaagttacattggcagtgtgaattcttggggaaatcagaataattattgtttctcataatattgctttacatttacatttttcagtttctgtcatgccagttattctttggcactttctcatgagtgtttagaaggagagaatctgtcgtggccacaggctgtgtcattgtacatatgtttaaatatcacatcagggtatttatttccaaatgcatattcttttaaaaagacataaatccattattaaaacagtgtaaaaatcagaaattacaactgctgtgaattacataatatttttctatatttgataataccaggaaaatgtcaagaaagttgttaggaaatttttgaaagtttccatccctttgaaaatatgttgtctaaaattataacttgctatttattttttcagacatctctttataatcattaatttatattaataacatggaatgtgtagctctctagaaggcaataaaatttgcacagcatatatcttgcctactgtcaactagtcaagacctctacctggtgtaaagatgtaaacgtatatcataagacatgcataatgcattctgtctgtacccatatgaaaagtgaaaccatccttcaggagcgtcttgttcggtaatgtctaacccagactttggtcaccatgcttcagtagttactactctttaattctttctcagccatccatcccttcctagatataatttgatctgaaaaatatgaatctagttcaattcttgaggaaactcatgcctaggaaattaatttacttaagattacacgggccatgtatggtggctcacggctcacgcctgtaatcccagcactttgggaggccgaggcgggtggatcacttgaggtcagaagttcgagaccagcgtggccaacatgttgaaaccctgtttctactaaaaatacaaaaattagccaagcgtggtggcacgcgcctgaaatcccagctactcaggaggctgaggcaggagaatcgcttgaatctgggaggcggaggttgcagttagcccagattgccccactgcactccagcctgagtgacagagcgagactctgtctcaaaaaaaaaaaaaaaaaaaaaaaagattatacgactgggtgtagtttgtgcttgtaatcccataaacccagctacttgggagactgaggcaaggaggactgcttgagcccaggagttttaagaccagcctggatgacatagtgagagcctgtttcttaaaaaagaaaaaaaaaaaaaagaaaaaaaaatggagttaataattttggactacattccagattccttgtttcagttgagtgctttttctattattccacgggtattttacacaatactgctctctttagtatgcaaggctgaattttgggaaattgccatttttaacccataaagcccacaaattcattataatttagcttaatagcataaatattgagttaacctctggaagcaggctttgactttgatattgacctgaccacttaactctctggagactttgacaagtgacatcaatgtctgtctctgtgtttcctgatttatatccacagatagaaagccatctccagatcctagggccattttcaagattcagtgagataaggtgaagcatttgaatgttctccataaatgtcagctgcttttattattactagcattattttttgttttcattattattattaacatagacccgtctaagggcagaaagaaatctgaccaagaatggagtgaaagtcggctgtgaaggttaggactccctgaaaacaaaaaagaaaagtggtaacatcactctgtatccaagggcatggataaggatgattcagaatttttttataacattgatgttaatatacatagagaaatacacacacacacacacgtatatatgtccatggacatcaaaatgaggtataggttaggaagttaccctggaagttagaattgagataattactttgattagcaaaggtttatgttagaaatatgagtggttgaaggcagcgcctttcaccttgatgcctgttgtgtttagcactggatagaaaattgctatttttactgatgactactttaatgcttggttcattcatatgaaataatctttcttttctcctttaataataatgatctctcctgatttcaagttgaaaatgtattaatttaagataacttatgaagcaatgacatatggaagaggagatgggaaattgtttctcaatgggaaagtgtttataaatgggataggtatactaaaggtatttccatttagggaaagaggaaaggaatggtattaatatatttctctaatatttttccccctttgaaagtttgccatgttaggaatcctggggatggagtgatgaattgtggcattgctctgcagttcacgctgctgagagctgccccaacacacacacacacacacacacacacacacacacac

SEQ ID NO: 39723 - DNA, 1437 bp, Homo sapiens
ataagactcatgaaaataattaacagtctatgaattcatacctaacagggctgtttatggaaagtgatgtcttataatgaggcaaaaaatggtttttggtggttgtgttccaataaagtagtattgtttatggtttaaaaagggatgtagctgggtgcagtggctcacgcctgtaataccagcactttgggaggccgaggtgggtggatcacgaggtcaggagttcgagaccagcctatccaacatagggaaaccctgtctctactaaaaatacaaaaattagctgggtgtggtagcacatgcctgtagtcccagctactcgggaggctgaggcgggagaatcgcttgaacccagaaggcagaggttgcagtgagctgagaccgcgccattgcactccagcctgagtgacagtgatgagactccgtctcaaaaaaagggttgtgatgcatagcttaagcgttcattaatcacagtttattttttccttagttttaggttattatgctcctgtcataaagaagccccatattgaacaacgacaaaaattgatgtggtttagagactgttatattctaagtcactctaatgttaatattttctcctgttcacaggtaaaaggggaaatacagttttgaaagatctgaaattgatcagtgataaaattggatcacttggattaggtaattagatttctagtttttgtgctgatcgttttaaagtgattatttttagggtaaggctgtaaaagaagtgactccgtctgcctacgctgagcaccttcctgctgctgctcattcagcaggtgtttgaatggcttttatgtgttcaggattacacgctatgcgagagatggctacagcaacagccatcatgttctcgtgaacctctgtcttcatggagtttaaattctggtcaggaatatgaacattaaacgggcatctacagatattttgactgtaaaagggtcagtatatatgggtatagaaatggctagtaggttacctttgtccagtcttggcattcagggaagacttcttataagaagtgacttctgtgcagaagcttcatggttaagtacatgtataagagagaagggaagatatttcagttcagactgagaaaaatttgggcagaggcagagccatttgctagatgctggtagtacatggtccaggcctcagagaattcagtctagtggggaaacagacttattgaaagaaaaattgtgagatgtgttcagttctgttctatggagcagaagttggtaagcctgccatgtaagtacattcattcctatggaagtaagagtgtcgatgtgaacattaccgagccctgggccatatgttgagagcacatttctcattcagtgttctgttctgtgcaagactgtagcagtgtgacaggcatactttaggcaaactcatttatgtaaaggc

SEQ ID NO: 39724 - DNA, 1293 bp, Homo sapiens
attacagatgtgcgtcactgctctgggctgcactggtggtttttcaaaccaccgcaccctcccccacctcagggcctttcacatgtttcctcttggaacacactgtccccagtaatttgtacctctgcaacctaggtttccactcagttgctaccttggagttcttcccaattgcactagcagtatttggtttgttccactgttcctcttcactagagtgtttgctccctgagatcagagataccatcttagtcattgctatacctctaggggacctagtcatcactcagctggttgataaattaatcatatgatttggctgtaagagaattacattgtctaactgtctggacagagcttgaatcccctcagcagtctgaccgatttagagacagtccagccttatctgagggaagatcgaggacaaggcccgcagggtctttgaacggctctctgtcatgccaggtcttctttttgtgatctgcatcttctgcatgtggctgtacatgcttcctgggtctttcataggccatccattcacattttaagttggctctcatgtgcctccaagtctgctttgaggctgacaactctttttcctcatctagccctcagaagtcctgggagggaagggctgctgatttgcaaatttgtcctttatagccttaagttgatctgaaggtgccccctctgtcagaggcttgtggtgcactttgagaaactggtaacactgcctcactattcaccatcccaccttcattcagttgccttttattaagatcttactgtggaccaaggtctctgttaagcacatcatgtacctgaatccttatgttaactctgattggtgtggctttggctgtacgtcagagcagaggacatggcccagaaagggcacctcacattcccaggtcacagagctgttgagtggcaggtctgaggcctgagcctggctctgtctgactgaaggtgcccttatttgctgtgcttcatggcctcttcacacctcatgagtgttttttaacttttataacaaaacaattagcatgttgaaaacgctcagtagttcatctagtacctagaggggattgatgatgacttgctattgctatacgccattaagtcaagggaccttattaatggtgagtgtgccccatgttaattgccttagagtacccggagtaaagatgaggtgttaaccacattttatagtcacttgtaacagtttattatttcttaggtatttcatttgtcatttgtcttcatattatatatgcttaaaatgttatttct

SEQ ID NO: 39725 - DNA, 1025 bp, Homo sapiens
cgtgtttgcattcttattctttcatatattttcttatttaagctttaacctttgactctcagtttctttacttgtaagatggaagtattaatacctatgtgataggattattttgaaggttaaatgataatatataaagcacttctctaattcctgatgtattatatacccttataattataaatttagctttctcttttcaccctgcatcatcctaaagaggcctgaagaatgttgctttaaagttataccaaagaaactatgaaggattctttaaatatgagggagaggactcgaagaaatgactgttaaactaggatttgtgaaatgacgtgggttgaagaggaggtgtggcatccctttgccattgggggccttggatggcgtccaggagtctgggctttgttagactgcttctcactgggtcctactcactgggtttggcacatcaatgttcctaggagttttcacttaaaagcttaaatttagataattttgccatttacatagattggactttgacagtcactgtacttcatcaggaagcattttctaaagccttctgtgtagagaattgctactgggcacctggggaacacaaaagcatttgtattctttgcagtaagaatacagcagacaatctggtcacctttcagccaaggtgaccaaaaccagtgtccattaagcacctactatttagagagcacagggctggggatgtgggggtgtgaggaaggagatagcccagtggaatgggcaagttctgtaagttcatcacatctgggtttgagttctggagctgctacttaccactcacaaatttggccaagttatttaacttttttttgttttttttttttttagacagagtcttgctctgttgcccaggctggagtgcagtggcgctatctcagctcactgcaagctccgcctcccgggttcatgccattctgctgcctcagcctcccgcgtagctgggactacaggcgcctgccaccacgcccagctgattttttgtatttttt

SEQ ID NO: 39726 - DNA, 1840 bp, Homo sapiens
tccctttcaagactcaaaatgtacgttttagatatttttattttgtgatgtaaaatctatttttatagttttgaactaagttggtcactttgagttcttattctaaaactaaggaggcatgaaagccgcctttattagttttgtttttgtttttgtttttgtttttgagacagagtctcactctgttgcctaggctggagtgcaatggctggatcttggctcattgcagcctctgcctcctgggatcaagcaattctaccttagccttctgagtagctaggaccacaggcatgtaccaccatgcccggctagtttttgtattttgagtagagatggggtttcacctatgttagccaggctggtctcaaactcctggcctcttgtgatccccccgccttggcctctcaaagtgctgagattacaggcgtgagtcactgtacccggcggaaaggctttattaaatagccatttatttctagttagcttttgttcattcagttttctttcttggtaactactttaaatgaaactgttcttcttggaagtttctggttattattgtggtcttttctttgccttaaagcaaaactaaattaatgatctccaataactgaattatctagattaagatcgttttcagtccacgatttttcctgtattcactcttgtctgtagtttagcatttgtattaatataacactcaattactttgtaaacgagatggaataccttactgatttcactctgtaataatgatgggaagagaaaattacagttccaaggtatcagtttgttttacagtctgtctgcaagcttttctgacttttcagtttttgtgtaaattggatttgaattgaatgcataagaactgtaattaagattcctaataattttctttgtgagatagttttacagcaggactatgtttggaccaagagaaagggcaaggacttatttgttgaaaaggattttacttacaacttaaatttctgaatatccgaagaataacaaaatgagaggatatgtggggggcagatgaacagacaaataaaagcatctcacagtatctcgggatgaaactgttgcatctctacaagatgttcctattcttgtgcgttattacctggcccaggtgttggcacacttgttctctaaaaggccatatagtgaatattttaggctttgcaggccataactactccaccttgccattgcatggagaagacagccatagacgatgcctaagagtgtgtgtgtgggtgtggctgtgactgtcccctggtctgttgccacaacaatgagtctaggtgggactgggaaggttgggttctgtccttgttcagctgtcagtgggacctgcccagctgtatgttctatattctggagcctgtatattcacccgtggttttttccttagttaagaaatgttttcccagcctgcattatgcttacatatctattaatatttcctttctccattatcatgagttgtttatacaaatgaatagatataagttggttaataggttaactttctagtttacaagtagtttaaacagaagtagaaatgagtcgtttcttacaacactttgtgaacccggggctgggagtctgagactccatgggccgtcctgtctgcccttctgttttcacttcatgatctggcttcaggtggcacagtgttaaagtgtgtcacaccatgtcgagtttgatgttagaaacttaacgttctataccgtcatatgaaaacataagaagggatcgtttccaaattatacattttaatgaattttcgtgaaatttaacgtgggtaaattatggttttagagttagcaattca

SEQ ID NO: 39727 - DNA, 1026 bp, Homo sapiens
agccactgcgcctggcctatttgttcctttttatggctgagtagtattccatggtatgtatataccacaatgtctttatccagttgttgattgatgggcatttgggctgggtttcatgtttttgcaattcggaattgtgctgctgtaaacatgcgtgtgcaagtatctttttcatataatgacttcttttcctctgggtagatacccagtagtgggattggtggatcaaacagtagttctacttttagttctttaaggaatctccacgctgttttccatagtggttgtactagtttacattcccaccaacagtgtaaaagtgttcccttttcaccacatcttcactgacatttatattattttttgattttttgattatggccattcttgcaggagtaaggtggtatctcattgtggctttgattttttaaaataacttaagactactcacattctgacacttaattattttctttcttttgaacaacaaagcttgatgacctcacacaagatctgactgtatcccagctcagtgatgttgcggattatctggaagatgttgcatagacacgaagaaggaagtattctaattaacaaggacagaggactgaccggttccattttttttttttccagacaatcactcagctggaatgtctgctctctattggtgccttgcatttcaaaaacactgcagatattttttaaaagtaattttcattttactaaacaaaatacttcctatttgagcccatgtgtggaagatttaatattcttaatttaactgtacatttctttatggaaattgattatctacactcagtttcattacagggaaggaacccatgaaaacatcagtgttaagagcatgatgaaaggtgtcaataaagccgtaggatcgcgcaaccctttgtgtgtgtggctgctggtacgtgtgatctttgaaaaccttggctttagccctctggaatcagagcttacccaccatagtatattttgatattaggtggttctacacatagttgg

SEQ ID NO: 39728 - DNA, 1107 bp, Homo sapiens
ttttgcttgttttaaagaaatctagaagtggttatgagttttaattcatagaattgtcaataacataacatttgcaatcgtcattcctcctgttatccatgtaagcagctttagtcgtaggttctcttcattataatttattatctgtaaagattccttgaaacttaaatgcatctgaaaccattaagcagtgcttttatttcagatctgtaagttaattgtattaaaatccaaattggaatgaaatagtagtaatggcctaagaccatgttcagtttgacaagctttatatactgtacataatttcattgtaacccttaaaaatagagccaataatagaatttccacagtctcatttatacggttaaagcattattgctattatgtaggtcacggatgtttataatactaaagtattttaaaatgtgcaagtagaaaaaacagtagaaagtgatgcatgcatatttatatataagtaaagcaggattgtgctgtttttgcactttataatttcaattaagttgcggctttttactacaagttaactttattagtaaaaggagcaaattagacctaattcattgatctcggttaagtgagcagactgcatgacttgtgtaatgccagtttctcatttcatattagcctaaatattacagaaattactccttgggctctaaaatgtagaggaaatgaaaatgtaaggattaaggctgtgtaacagaatctggctttttaaaatttaagtgaaactaagctgtaaacatcaagaggaagtaggacataaactgggccggtacagcctgggagccctgtgtatttctgccctccgtctgtgagctgctatctcagtctccttcagctcttcatgtcttagtaaacagcaccacgtgcagatgtaatcttgttgcagtcccccagtgtggttgttataaaatgcatttctttgtaagtcatctctgtaaacagtcactttctaaaagcactatagttctggtcccctggaatctggatcacatgtatgatttatttttaatatttgataggaactaggtttcagtgaaatgatttgaaagcatagcaggatgtggctttttaaatttatga

SEQ ID NO: 39729 - DNA, 1031 bp, Homo sapiens
ttgtgtcgttcacgtcttttatttccttgttgatcttactcttagttgttctatccatcattgaaaatggggcattggccaggcgtggtggctcacgcctgtaatcccagcactttgggaggccaagaccagcagatcacttgaggtcaggggttcgagaccagcgtggctaacatggagaactcctgtctctactaaaaatacaaaaattagtcaggtgtggcagtgcgtgcccgcctatagtcccatctacttgggaggctgaggcaggggaattgcttgaaccctggagtcagagtttgcagtgagctgagatcatgccactgcgctccagtctgggtgacagagtgagactcaaaaaagaaaaaaaaaaaaaaaaaaaaaaagaaagaaaatgagacattggatttgtaagtttctgacaggttcattttgcctgctgcccagatagagccgatttatgaggacagggaaattgcaatagagaaagagtttaatacatgtagaactggctaaacaagagactggagttttattattactcaaatcagcctccacaaaaatttggaggctaggtcttttcaaagatagtttggtgggcaggggtttgtgtactaagaaactaaatgtttcttgtgtactaagtcagcttctgggtgggggccagaggaccagttgagccaagaattcaagaggtacaggttcaagtagggccatctggttgtcagaaatgcaaaagcctggaaagtcatctcaaatgttaggttctacaatagtcaagttatttatagtaattgggaaagttgcaaatcttgtgacctctgtagaaaataggtggtaatctttacacctatatcttagtagaattcaggcccctcacttcctcctaacctggtagcctttcattagttttacaaaggcagtttaattttggggggcagggctattatcatctaaactataaactataatcgtttgtcccaaagttagcttggcccatgcccaggaatgaccaagggcaatttggagat

SEQ ID NO: 39730 - DNA, 1046 bp, Homo sapiens
ctccccaaatcgttacacaggttaaaagcaatccctatcagaatcacagagattttttgcagacatcgacaaactgattcgaaattcatatagaattgcagggaatccacaatagccaaaacaatcttaaaaatgaagaataaactaggactcatacttcctgatttaaaaatttactacaatgcgatagcaatcaatcaagacagtgtggtactggcataaagatagaaatacaaatcaatggaatggaattgagagtctggaagtatatccatacatctgtggtcaactgagttttgaaaaaggctccaggaccgttcaatggggaaagaatagtcttttcaacaaattatactaggtggaatggatagtcacatccaaagaatgaagcttgatccttacctcacactgtataaaaaattaactcaaaatagatcaaagatctaaatgtaaaacaaaaaaactaaaactcttagaagaaatctattagttagggttccctagagggacagaattaataggatggatgtagatgtaaaggggagtttattaaggagcattaactcacacaattacaaggtgaggtcccacaatagcccatctgcaaaccgaggagcaaggaagccaatcccagtcccaaagctgaagaacttggagtccgatgtttgagagcagggagtatccagcatggaagaaagatgtaggctcagagggtaagctagtctagttttttcacattcttctgtctgcttttattctggctgagctggcagctgattagattgtgcccacccagattgagggtgggtctgcctttcccagacccactgattcactgattaactgattcaaatgttaatctcctttggcaacaggctcacagacacacccaggaacaatactttgcctccttcaatccaatcaagttgacactcagtattaatcatcacaagtccaccccttgtcaacttgaacccatacacatctcctgaaatcatacataatctgcaaataaagacaataataaggtaataataattatgcct

SEQ ID NO: 39731 - DNA, 1045 bp, Homo sapiens
ccaatggaatcagtattttatttttatcatcatctgtctctttagcatcagatatttggggccagattcccttttcattgatttttaattattaacttttcattttatttgaccatttgttctttgtggagcaccaacatacagaaacaggcaaaaaccactgaaaaattggctctgagctctgagtggcccctgtctgaatgtcttcatgcgacagatgcttagaaatttaatcccaagaaataataggattatatttgggaatgacagtgaccatgtccagcttagtcagagtttaagtaaggcttcactttggcactcttcctcaggagagttggaggcagggatggatgaaagactgaaccttttcattctaataattaagactttgcttttgattaataagaatgtcaatccaaagcataataatagataccagcaggtaatatttctaaataatcagatttaaatatgcattaaaggaagtaattaccatgatgattaccatgactaaggttgattgttcatgttcacactgaatctccagattcctccatgtggcgcattctcaagtctttacagtgccagtgtcagtgatgatgggcagctcttatttaaaaataattgagttccatagcacggttccatttggctatagtagggaagaattggacccattttattccttcagaataaatgaatgttggtactaatactgttttctgcagcaaacatgaagaaagtttatttccaagtggctgttttgctcactctgccagcatcccaccggcatctttataatgtgtatttcagtaagccaaaacaaaaggcttacctgtaaaatatgtgtgtgtgtattgaaaaaaatgtacatattagaacaataaaagcagatgttgatcccaggatggaacaggcagtgtttacaagtttcctaagttctgccttagtttggggtttgctggcagcagcccctgcatttgagtgtgggtgtgttacctgggaggcatcaccagggtcctggaaagtgacggtgagggtggga

SEQ ID NO: 39732 - DNA, 1075 bp, Homo sapiens
ccaaacaggaatcaagaaattctgctttctcttgtcttcagaacatgtgataaagctcagtcaatgagatatgccttcctggtgaaggagatactcaggggatgagacatgatgagtctctcatttggtgtcatgccatagtgtgcccgccctacagggtaccccgggtcctgtgagaggctaacattcaggtggggggtgacaatgagttactgagacagcaacaatcgacactttacttgaggcagctgaatattggaaaagaagcctcttaactgcaaaaccgaattgagtcaaatgacatttctaaagtgtgtcattagatgactttttcttagagcccctgaaactcctcctccaaagaacagtgtgtcctacagaagctctagaagtattcctctgcccacttgtttgggaaatatctaaattccaaagacaagaaaattacactttaagaatcagttgagctgaatgtattttacatgtgatttaatgacatcaaagtgagatctggtgagaatggtggtcatagggaccacgtgtgagataggaagtgctgaacctcaaagagacagtgtgagatgtgttgcaggtggctgctttgcaagggtaggttcactggttcaccaagaactggacacagggctcagcacatttccctgcatctctcatctgccactcgtagataacagggtgtcttattctcagttcattaaagaaggaacagaaatatctactaaaaaacttcttagtgtcttcacatcaacattttcttaatagaaaatctgcagcctgtttctccaaggagctggtgactgctgcctgagatctgagatgatagagcaagttgtgaacaggattctttacacgttgaggtgatacccacgccaatctgtcaccaaaacagtttccttaaaacaattcacacagtttttcctgtgaaaacagtggcttggggaaggccgaatcattttcaatgactgtggctggcatacaggtgaacctgacaaccaccgtttttatggagaatcctgattcttaaccacagtgacattaaatttgtcattatctagaa

SEQ ID NO: 39733 - DNA, 1057 bp, Homo sapiens
gtttagtgatgagttttagggctgatttaaaaaatatgtgtgttctaaggtagatattatgtggttttccaagtaaggctataatataaacgtataatatttaaaatgtaaacatagggctcattattatggaagtatacatttcaacatttattttacgcattatatattttctgtatttataaatgcctccttttaatttttagttatcagtgctaagatgcacacatttacatttttgtgacttgagaatactggccacaagctattagagtgatgaccatcaagttttattacttgaattcactcgggatgtgacctaagccacacctacttatgggacattttcaagttctacttatagatcttgtagttcagggagcagtggcgtctcatgtattcagcacaatgtggagttatgctgttgtttaatgtggcttaggccttctggcacttgtctgccccttcagtctccgtctcccaaatataaactcttgagttagccaaccatcggctgtgtaaagacgtctttttctcctactatgtttagttgtattttcccttggcttatttcctgagaaacagacacacaaacacagacagtattttatgttctaagaccaatcacgcacatatggatttttaatacttcaaaataatatgtggatatattaaaaaaatacgtgtagtaaaaacaaaatgtcagagtactgcatttatatttaagattagcatcacttaagattagttttatttctacgtagtggcaccttgttttgcacaaaatatattgtgttgttaatttatggatgagtgcaaatgcattttgagtttttaagtcaccaatttaattgttatagatagcattactaaactattatgatggtacacaatttttaaccgtttagtgcatcatgcttattagcaaacattgttttaatttatcagaacaatataatacagataaaaaattgtagttggtgaatatatgaatttgtaatgattcttttgtaaagcagctaagctttcgttgattcagaactctgccaggagtacc

SEQ ID NO: 39734 - DNA, 1074 bp, Homo sapiens
ctgcaatgaaaccagtgtttggaagttttataggaaaataatatccaagtagaaaatttggaatgtaattttcaggaagaaccacaggcataatgtaataaaacatctcttctgttttatttggatcatatacttatgtgcatatatatttatttcatacataaatacatgatgtattgattttcatctagactttttaaagccctattataattttatcattgtgatagtagattctgtgttttgtagccaaggtgacacatgccatattttattttgtaactatatacaaaccttgtatcttatatagcatccagaaattggaatatgaatgaggagttcagtgaagaagtcttcatagcttcactgattactttcttaggcctataggaaagaaaggaggtcaagacctacccaaggttcagatgcctttttgacagcattggctgtgacgctgcgcttgtggagatcgttgtgcctgctcatgccatctcgccatctcgcttagtccctgtcctcttactgggcttcctcttggtgctgccttgcctgactctgctctggatgttgccctagcccttccctggtctgtgcttacaattaaacaataaacaaaatgtgtttattctgtgactcttggagactctggttctccttactgccatcactcagttaattttgtgtcataaagttttatttacacattaactagcaatttttccccagataacatttgaattttaacaatcttcgagaggttatctttattaccaacagttcctcaacatctactgaacaaatacttgcatttccaaatgaaaagggtgaatctcagacacagtggcctgttgtaccttcttacatcctacagcccatcttctctggtgatgagcctttgtttttccttcttgtaagaaacagtgaagcttggcgagtaaccctggaggaggtttctaggtaggaagttaggaatatttttctttcatgaatcatgggtgctctgaatatttgattttaagaaccacatattagcctacctgatattgtgatgagaataaactaagactactcact

SEQ ID NO: 39735 - DNA, 1025 bp, Homo sapiens
caggcacagcaagcaagcagagtgtgttcagggctgtgaagaggggagacccggtaggtagctcatgggcggtggacctttccaggatttgtcaagtcagggaagcttaactgagttcattttaggaagtgatgtttattctgaatcctgaaaaatttgtaggaaatagctgggcaaaggggtaaggcttgagaccttatttaaaaacattcaatttggttgaatctgtgcgcagacatgtgtgaatatgcaggcccattttgtggcttgcagattgtactgttcctcgttattcactgtcctccttgtaagaggattatatggcctttgcccttttgacatcaagtttgaccatgtgactttctttggccagtgacagatacggtttctgagcagaagcttgaagtccatttcatggttctgtcattgcctttttctgtcatccgtgaatcagtgtgtcccatgctggggctcattcttgaaccatagtaccagaatgaagatgactagatcagagctccagctactcacagaatgatatgttattgtgagaaagaaatacagctttgttgttgtaagctgctaagatcttggggccatgtgttttcatagcatcatgttgtgactgagaagagtactatatgtgtgtctgtgtgtacatgcaagtgtacatactagttggtttggggctgaggagccagttgccagttatgaaaccaaaggtgtaaatcatggtcagttcttatgggccttgtaagccaagttaagaacattcaagatgaaagaacatgaggaggttgacagttcagatggacctccctggcagccgagtctgtggagtgaagggagggaagttaaaaacattcgagatgaaagaatgtgaggaagtttgcagttcagatggacctccgtggcatctgagtctgtggagtgaagggagggcacgcttggaggcggggccttcaggccttcctgcgcttgtgtctgtgagataaaggcctgaactaaggtaacagggaaggaga

SEQ ID NO: 39736 - DNA, 1022 bp, Homo sapiens
taattgaagaatgcatgcattaagaaattaatgaaagttgatcggtaaggacataactgtcatacacaaactcagcacagtaaatttgaagacttttatttaaagctttgaaagtctggccccttgctgggcttgtgtagatttctttagaaataggataacttacagcaaaaatttattaaatataagtagctcattgcagatattcatgatttggtagtacattgtaagaaataatagatttattctgagaatatgctgctgcttttcacctggtactataatctgctcatataattagaaccttttgtgttaacatttcaatatctgactaaaggagaaacaccttgggatagttaggctgttgaagactaatgtaagctttttcaggtgggcagtaactgacctgttttactcaaagggaaacttaagttttatagcaagagatatggagagcttgtatttattaagatttatgtggataaaatttagttcgtgttttttgaattgagtctgtagggtaaatttgaaggtctccctttctcctctgaattctagctatccagacatagccactgtaaggaatttttacagtgtgtctttcccagttttgctcttgtagactcaaaaatgaagtgtgtgtgtgtgtgtgtgtgtgtgtgtgtgtgtgtgtgtgttttgagatgagatcttgctgtgttgctcaggctggtctcttaaatcctgggctcaagcaatcctcctgcctcccaaatagctgggattacaggaatgcaccattgtagcacagctgtatttgaattttgttttacaaaaattggatcgtaggatatacacttttctgcaacatgctttattaaagaaattctcccatatttctataaaacaaaagtatgtataaatataattatctttttagtagctgtataatccatgtagtaatcattttcttaactattaatgaacactttgactgtttccacagtacactgtttcagtaatgctgctatgaacatttttat

SEQ ID NO: 39737 - DNA, 1056 bp, Homo sapiens
gagaacttccttgttttccagcataacaagatgtcccaaactcatcttgtacattttctgacctagacctggattaagccatttctccaagtagctgtggtttcttttagtggtatttaagagactacagtctaagtgctagagatgttcatttttacagattgttgtttgcttctgggccttttcagtgggaaaaactaggaggtatttatattttgtggggagaaaaatctgtatatttctactgatgtttccaattcagaatggccttgtatggcttttacttaatttatttaattttatatctcttttctcttacattgaaaaccttgtcactgtataaacacaactacctgttggctttattgtatcatatagttattattacaacatattgccagtattattactaacaacaggatatctgaatgggcatttaaaaaattctgcaaaattatttgcagatactgacttgtcagtagactagtctgctggcaatttaaagtcaaaagctgttgtccaaaatcactcagaaaaaaatcttttttctgtatgctaatatgaccaacttgatagagagttaagactcattcatttcagtttgttttatgtttccagcgattgtctttttttgttaaatagttacatggttccagagctgaaactgtgtgataaagtacatttagaaaagctttgcttccatcttgattatgttttggtttgttcatgcatggaaggcatctctttgaagatgtaaccaaatacaggttgtgtgtttgtgtcctgtcttttcatataatagatgcttatgacacatgctgttgtgcgttgtgcttttttcacttaactgtgtatcttatgcatcatgccatatcacagtataaagagttttgccctaactcttaatggcaccgttttattccactcagtgaatatacgagaattttttcaaccagttccctactgctggatcattttcaaacatttgcttttataaacattgccacagtgaatagcctttcgcatttcatatgtattttttttagtgtatctttg

SEQ ID NO: 39738 - DNA, 1010 bp, Homo sapiens
ctctttatctgttaaagaaattatatttctttctgtgaaacaagttggaaatttttttcccccagtgtgttacttgtcttggtactttacctattgtgtgctttttgaattttttgtgatatcaaagttttacattgtcaaacttattaacatttctttaattgactttggatttcaagtcatggttaggaagcttttcttatttctaagttttcatggagtttatccattttttcttgtacttgtgttgtttcttttttgtatcccttgaccatttgaaatttatcttaatgtacagtgtgatgtatagatccagttttctctttgccgtctgtctgtcccaacacatttatgaagaacttcgtcttttccacactgatttgagacccacctaaaagtctagactttttctttcatttatgtcaaggtggtgttttaaatagagatttttatagtttttttaaacatctagtaggctgacccttcatatttataattcttcttttcctggattgctctggatttcttgcttattttcctcataggaaataaaatcttttaaattagcttgtttagttccaggaaaaaaagaaaaaccaacaaaaccattgtatttttagttactgttttcttaaatttataaattaagtgtgtaacttgatttttttcagaagaaaataagcaaaaggttttgttaatattacaagagaaattctgttttgaaaaacaaactgttcaatgatgatattcagtgtaatttgacttcaaatttgtcttcatgtccttgataactataattttttgttgaaattgagtttagttgacacagttttcaaggtattctagtttacttaagtatttgaagtgacatggaattcataaattaatcttttttaaaactattaaaatgaatacagttgtgataaattgtttttcgtgtgcttgacaatactgatctagttaattggacggttgaactacttgttgaaatgagccaagttgtctcctgc

SEQ ID NO: 39739 - DNA, 1056 bp, Homo sapiens
tttttgttttgattttcataagtttgtatggttgttaaccctgttctaatacaggttaagtgtctctaacttgaaaacctgaaatatgacatgctccaaaatctgaaatgttttgagcgccaacatgacactcaaaggagaaatgcatattgcagcatttcagatttcagattctcagatcagacatgctgaagtgtatcatgcaaatattccaaaatctgcaaatactcaaaattcaaaatagttctggttccaagcattttgaataaagtattctcaacctgtatcccatttctcctatttttcttcaaataagtacttcttagttcatacttattagtcaaaaagaggctagtggattggggaaaattaaagaaaggcttcattcagtgtgatgggctttgaggaccaaatggtttgacttttgagaacatgaaagccattgcaaaatgtaaagccaaggaatgatgtgttgtgacttagtttgaacaggactttggttggattctgggtgtattttgatggatcagatgtggaaccaaggatgactttagttgaacaactgaatctttaatcttgcttgagacagtaaaagtgacctaggagttagaaatattctctggaatttttgttgggagttgtgctttttctgtgtgcaaggaaataatgggaaaggacatcccacagttgtgagtgtcagcccacattgcagtagatgatacctgtggaggggatacctttggctggaataccaatgtgctttttctctagaggtaagattttgagacaaatctaaaatgcgttcattgattatgggcaagtagttcatttagaaaattagttacaactattaggttggtgcaaaagtacttgtgctttttgccattgaaaataatggcaaaacccacaattttgcaccaacataatatattcttcaaaaattaagagttttcatttattcacattaatggttgggaccaacatttccctcttgctttttaaaaggaacttgttcatttaggcttttgacccttggagctggaaagggacctcacg

SEQ ID NO: 39740 - DNA, 1098 bp, Homo sapiens
actgccaccactcaagatgtaatcgaaacgctcgcggagaaatttcgacctgatatgcgaatgctgtcctctcccaagtattcactctatgaagtgcatgtcagcggaggtcagtgtatacaggaagggtttgctagaggcatgacctgacctgtgaagagacagcttgtccagggtcattgtggtcatgtcaggtttactgctcgtctccatctttcttctcttttggtgggtaggagagtagctggcaggctgagaaaactgttttatgtctgggaagtgttcttataaatccctggcacatatatctgttggaagttagaatgaatatattaattttgcatatgcttatttctccaaagataagtaacgttacatttatccaacatatctgggtgtcacatacattgtgtagtatgctacctgctttttgagaatgttttatgtggctcttatgtagagattataataattgtaacacagttaaatattatataggtatgagtcatcaatcttgctgtaatatttttgccttctgaaacaatacattttcattattctttgggaataatttagggtatgtatcttaaggaaacctccttatgtatttagtaatttctgcttgtattaacattagaaatttctgaaaatatcttatatagcaatatcaaatgacaactaaaattagactgattaagaaatgtggaaatttaggtaagtgccatggcttatgcctgtaatcctgacactttgggaggctgaggtgggaagattgcttgaggcaacatagtgagacccgtctccacaaaaaaataaaaaaaaaaagttagctaggcatgatggcacatgcctgtagtcccagctacttgggaggctgaggcaggaggatcacttgagctcaggagtttgaggcttcagtgagctaggatcgtgccactgcactccaccctgggtgacacagtgagactttgtctctaaaaaaattaataaaatgaaatgtagaaatttttaaattttttcattggtgttttggaaatgttgagtaacctgttttaataaaatacagattacagttggtgcagcaaataaaggatttat

SEQ ID NO: 39741 - DNA, 1024 bp, Homo sapiens
ttcataaaagccaatttattatggctactcttaacaattcctttaaagttaaaaactactataggcgatttgtctattattcactctttgtttttataattttgttaggtttcttttattcaagttactttatgtaaattacttggagttttatttactgaaaatcagatttcatcatttctcccccagttttctaactggctttgatttttgtttcttagcttgcttgcttgctagtttttaaatgaggtaaaatatagattcggtgagatgcacagatcttgagtgtgcagttcaattgattttgataaatacacccatgtaactgccagctgaatcaagataaagaccattctcattactccagaccttcctgtgtttcagtagctttgttcacatgttcggcagcatgtgagatgaagttacctaagccgtaggcaattttatgtgattctgcatagtagtcaatatggtgataatgttactttcatcagaaggctcaaagtaatggacctgaaaagcaggaaaaagaaggggttatccagaacttcaagagaactctctcaaagaaagaaaagaaggaaaaaaagaagagagaaaaagaggcattgcgacaggcatctgataaagatgatagacctttccaaggggaggatgtgtaagtcagttttggaaatgttcccctttctttgtgctccaaatcagatgtttttgttgcaccaaaattgttaaattttcagataaattatggaaaggatgagtatcagtcaggaaatgtgtttgggtctactcccagctcttctgtgtggagggaggatagagggtcttacctaagcagggttcattgctggcagtgcctgtcttgctgtgcttgggaagaatctctgcacccacagtcttgctagtcttaaataagcaaactctagttaacattattatttttctttttcatcttcagctgggttttttcctcatttctgtggttttggccatgaggcagcagttgtctcatatgtacctcaga

SEQ ID NO: 39742 - DNA, 1021 bp, Homo sapiens
tttcttgtggttggaaggtcatggtaaaatattggtctgttttagggtaacactggtggaagttactgaaatgtataatcaatatatttttcttttagcattattcatgaataaactcactattaatgtaaacttttaatgatagatgtctgcttagttcagtatattagtttgtgttgagagaaactatattctttatcatatagtaattagcatgtggtaaatagtacgtaacagacctcttaggtacagatgtagccaaatagcacctgccattttgatttttgtgcggttgcaatgtgtctatttctaataagaaaacagtgtttaaaatatttttggtatttttttttcttacagtgaaaattctcgactggctgctgaggtttacaaagacatgccggaaaccagctttactcgaaccatttctaatcctgaggtggttatgaaacgacggaggcagcaaaaattggaaaagagaatgcaggaatttcggagctcagatgggcggcctgattcaggtacaacttggtattttttctctgttctacctgttacaaagagcattgtttaattacactgtacgtgcgtgagacttgctttaactaaagcaatgggtggtgtaaccttttcataacaaatgtgtaccatatacttctggtacaaaatcagcctaccctatgtacaagagtcctgttcacatagggatatgtttagtttcatacttttacccaatacagctcttaaaaaaaaaaaactagaaaatttcaagtatatacaaaaaaagagaaagatacaataaactcccgtgtacgtatcactgaggtttcttctgttctccaaaatacattgcctccattctcaaactattattgggaagcaaatccctaacttctcattctttcaactataaatattttggtatattttcctgaaggataaagattccttaaaaacaaaacaaaatataaccatagtatcattatcatatataaaataattgataataattccttaatac

SEQ ID NO: 39743 - DNA, 1029 bp, Homo sapiens
ttcactttttaaaaatggatttatttagtgggttaatatttaactttatctgggtttttagtttttttcagattgatgatcaggaagtaggaaaatgggagaaataggtatataataatatataggtaaggaaatcgcaaagcaattgaataaagagcagcaccatagagaaattctggagttccttccttttctttcctcactatagatacggaaatcaattcattgtttttaaaaactcctttagcttgaagagagaagatgaaaatggtctttgtcatgctggattgttcatggtttctaagtgtcactagatcaactagttactgctattatatgttatctaacaggaaatgaaacaatagttattaggcagattgtctttacactcattttagctagaatgcaggtacctttttctcaagtgactgtaaatgttagctatctctgttactggcataaagtaagttgtactcaaagatgtcaaaatgttttttcaggtggaacattgagaatttatgcagatagtttaaaaccaaatattccctacaagacaatcctgctgtctactacagatcctgcagactttgctgtggctgaagctttagagaagtatggtctggaaaaagaaaaccctaaggattactgcatcgcccgggtaaggaactttatcaaatcagtagttctttctacttcacatttaaatggtagattttctttaaatcaaattaaacctagattttcagcctaccatatcatttagaatctgataatttacaaatcatgtgctaaatatatatttttaaaaagcagtctcccttccattacaaaagcaatacatatttctattataaaataagaaaaatattaaaaggcaaattaaagaaaatgaaaattaccccaaaatcaattgaccacatatacttgtggttcttattctggtctcttttctgttccattgatacatatgtctatctttttaccaataccaagctgccttaattactgtagatttataagtctaaaatt

SEQ ID NO: 39744 - DNA, 1032 bp, Homo sapiens
tgtgcatagcaataaaaaagcagacaacaagcccagcactaaggaatgcttctaccactcagtgacgtgttgctctgcaacgtcagttaaatctctactagttgacctggaggtatatacaggcacacctcagagatgttgcaggttcgatgccagagaccgtcacggtaaatctggcatcgcagtatagtgaatcacaggagtgttttggtttcccaatacgtataaaagttatgcttttagtaaagtgtgcagtagcattgtgtttaagaaaaaatggacctaccttaatataaaaatgctttattacttaaaaaatgctaacagtcatctgagccttcagcaagttataatctttttgctggtgcaggggcttgcgtggatgttgatagccactgactgaccagggtggtggttgctgaaggtgagttaggttggctgtggcaactccctaaaatacaacaaatgaagtttgctgcattgattgactcttcctttcacaaaacatttctctgtagcatatgatactgttagataacattttatgtacagtaaaatgtctttcggaattgaagtcagtcctcccaacccctgccactgctttatcaactaagtttatataatatttgaaatcctttgttttcatttcaacagtgttcacagcatcttcaccaggagttgattccataagaaactactttctttgcttattcacaagaggcaactccttgtttgttcagcttttatcatgagattgcagcatttcagtcacatcttcagaccccatttataatcttagttctcttcctgttttcacctcatcttcatgtacttccttcactaaagtcttgaacagctccaaatcatccatagggtttgaatcagtttcttccaaactcctttcactattgatatttttccttatcccgtgaatcatgaatattctaatggcatctagaatggtgaatactttccaggttttcaccccagatttatcagagaatcactatctatggcagctatagcctcatt

SEQ ID NO: 39745 - DNA, 1020 bp, Homo sapiens
ccctgacagttacttgaagtgcaagagagctctgttacaatcctgggccttataagataatcccttaccattcacaagaactatatagcaagtatgattgtatatataagagagataatttacctatagaataattaagtccatggatatgatgggttttttaagtggtccgtatacttagaattgattagtaactgctgtacaaagttttctaagtcagaatactattagtaaaacagcagtgtacatagggtctgtactactgaacagacgcctgatgctttctgagctgtgtccctcagctgttgtggtgtgaacactgagggcaggaacttgaagccctgtctctactaaaaatacaaaaattaattgggcatggtggtgggcacctgtaatcccagctactcgggaggctgaggtgggagaatcacttgaacccaggaggcggaggttgcagtgagctgagatcgcaccactgcactccagcctgggtgacagagcgagactgtatcaaaaaaaaaaaaaaaaaaaaagaatgcctggtgttgcatctgatacctggtgttgctccagtatttgccaagggaatgttgatgttgataagtgtatataagtctatttaataataaactgttctataaaattgcatctgataaactttttaacatctttttcttttcagtaatttttggctgatttttactgatgaaaatgagaaagtgaaagagcaccttaatcggggttttaaagttataaaagcctatcttgggattttattgacagtcccttatgaagtcatttgataatttccattgagtgtttcttctagttttggttttctgttctgttatttcctaaccagttttcttttgcaagattaggcaatacaaatcaggaggtaattattgttttaccttgaaattctttatcttctcagcttgcctttttttttttttttctttttttccttttggagatgaagtctcgctctgtcacccaggctggagtgcaatggcacga

SEQ ID NO: 39746 - DNA, 1027 bp, Homo sapiens
tttaatcgtgtcaatatggaatgtagattggtagttttaaaacaccaaaaaaatctttctcagcaagcaaatttctatcctccttaaaacacttgtttagtattttttaaaaacagtgtaaagttaaaattttattaaaggcaaattgcctaaattctttaagttgaatttaataaaaatcaggtcaactaaaaatatacacatatattttgttagtaatagaattgttgttttatttcaataggcttttgcgggaacaggcggtatttggttacatgaataaattttttcgtggtgatttctgagattttagtgtacttatcaccctaaaagtacatttttatatgtgtatttgtgtgtgaatgtggtttttatatgtatgaatgtatttactgatcatagagttgtttactaatgtaagcatttattcttaacctggtgtttttttttcaagcttatgatgtctttcggtagctgttaatttagagtagtctttggaaattgcttgctagagcttttcaaacacaccaagaggctaatatttcctctgttgagtgaaagtatgaattgggtaagctgtacacagtgattccttggcagatgttcctaaattacatgcatctttttgagaaagttttgcacagttgactgccagtcagcgggccatcctgaccaacctgagtctgcctgatgatttcccatgctgctgttctagggattttagtctttcagttgaagaggaggccaccagaccacatcccaaagaaaaccaagaaacacttggaaggcaagacacccaagggaaaggagagagctgacgggtctggctatggctccacccttcctccggagaagctgccctatttagtagagttaagcccaggtgagaaaactggtcacaccagcacacattattaatgtgcatttttagcttcaaatctttgtactttctaatgcatcttcaagtagtcttctgttggctgacttaacatttttagccatttatttttttaaaagtaactctcat

SEQ ID NO: 39747 - DNA, 1048 bp, Homo sapiens
gaaagtttacttgaagctttattatctcactgtagtttggaaacacatcccagtattgttgtgtgtctataatgtgtgtgagagcattgatgtttggttgtctgaggtaatgaatggcaactatgaagcagccattagtttttgaacttaaaattttttaggctcttttttgggtattgggtctgccctttaaaattttatattaaattctagaaactaatgattgttttctccaaatccaaatttttgaggatctaagagtgttgagttctgagagaaattaataaatagcagctgacagaataattttcagatgagtaatggacagtttattttggtagatagcagagacaggatgaggattcattcattcacgcatgcatttgataaatattgattgaatacttgtgtgtcataccgtgttctgggccttggaggtagagcaccaaaacagattaaaccccttcaccttggggatttctcttctagtgagaattgttatttcgactgcttctttcatacttatagtctctcaggtaatcaaatacatagaatttttttttgtaggtgtggagtagatcacagttctgtactacttttcaccaaatattggcaacagcatttgttacatggttattaatacactgcatccctcatggcactctgctgccttcagtcagcattcactgacccttctactttaggcaaaacaatggatacaaaaggattaagttccttcccgccttcaggtaattcacacagtgggagggaatcacagtgccatgtgacaagtgactctgcctctagtcccgacttctcctgagccctgtgcctgtgggatagcttaacttgttccacaaatgtctgaagttcaggtctggtgccactattttaagggtgacctaagggttggtggcaggcctgaatgcaaggccagggtcttccctgcaccaaagccatgttctttcactaagtcatgatgtcgttttaggttttcattattatgcattgctcacagtcagcatgctgaatgaaattgatctatttt

SEQ ID NO: 39748 - DNA, 1106 bp, Homo sapiens
attggtttaatgaagtatgatgaatagacaacaaaatgttatacagccattacaagtctgtaatataaaaataagtgatattgtaagatgtttgtaacatctgaaaaagtgtttttttatcaagaagattgtaaatcccatttatggaaaatatgaaaagctggaaagacgtacagtacagtaataatcgctaggtgataagagaaacatgattttttatttactacttgtgcccagtttctgtagtaagcagatgtaataagaaattttacatgaaattttttctacagtgaatttcattgtataaaattttttcttttctggtgattttcttaatgtaggtaactcatccttttgtctgcctacaaattccatacaaatggttagaattgtatactttttagaagtatttaaatatacctgattgggttaccatataatatgtgttttccccggtgttgattaagggcaagaaagaagccagtttctgtactgaattcattaggtattgagctataaggagtaggatttctaaatctgttctgagaaataataaactttaaaaagaccctgcctcttcatgttgtacatattttcttatgtcttatcctgattttaaaataacttgttggaatcgaattactattaatgtactttcagaaaaatcatcatgtgtgtgttaccagctttgcctgcctgtgttttaaaggcaactcctagctctttgagaatgaaagtggctgtgcgtcttcctatgctttaataccagtgtgctttgggcactccccgtggacatagtgtccccagcattgctttgttatttcctggtctgtgttcttgcctgccctgcttggcagccctgtatcagatctctgcttgcaacgctgagtgtcaagcttggttggtctgtgtgaggttctaaacccgttgtgctttctctccatgtagagcaccactaggctggacagcgacagagtgtcgtctgcctctagcacagccgagcggggaatggtgaagccgatgatcagagtagaacagcagccagattatcgcaggcaagaaagcaggtaggaaacacatcatttttcaatggtgaaagtactgaa

SEQ ID NO: 39749 - DNA, 1122 bp, Homo sapiens
atgcaagcttttttctattttgttttccctgtaaaacttcagcataagtgaagttaacttgtagtaatagttgtgagaaagtgctgagactgttgtgggcttttgtagaattttttctgtaaataatttgttgagatgaagttcatataatattaaccattttgaagtgaacaattcagtcgcatttggtgcattcacagtgttgtgcagccaccacccctgtcggttccaaaacgtctccatcacctcagagcgatacccctcaagtagttcctggggtttttctcttcccccgttccctggtaacgccttcttagactttttaaaaatggttctcaaaagtcacttgctcctgtgtaatgagcctagacgttggtagtaattgggctttttgatagcacatgtgtaggtgtaatggacattgtaacatacttctcacttaaaatgaaattctgtcataaacctgttttcaaaatttcagaagataaaggtattttgttggtagaatggtttgactcctttacgtactttctgtcccgatctacagttgataaaattttcatagcagtttttcatctacagatgatttgaagatttaatctttaaagttcttaaaagtaaatgtacagattttttcagtttttctgaatcacttgtcaatgttgttatttaacttaataaaactctagttatataatgttaataacatagatagattggttgcttttctcctggcaggatcatttgagggaaactaagatcttttagttccttcagaattgttttcaaaggccagaatttttcaagaaatgtttcttttatatttgagtgattagcatgagtttgatagggttatgcttcttttacccaagttaggaaataggtaaaaaagaaagtcattttatttggataccgttttgttactttcatgtcattattttataaacaaacatggatttccttttcagttgtcattcaaagccattgtctgtcttctatcatgtttggacttactaagcctgtttcgagttgtgagacacctatcataaaactacccttgatagccttttccttattgatgtgaactagtcagtgaaatcaccattatcaaacaagtctttt

SEQ ID NO: 39750 - DNA, 1034 bp, Homo sapiens
ttgtccacaaataacggtcagaattttctccttgttgaaccactggaatgggtgagactgtcagctactgccagggaaaactcctcaccagtccaagccattagaccacttgagactgtggtgaaaagctgcgcagagtctgtcacacaggacgctcttgatgaatgttaggtgctgatagtgggaagaagatggcagtagagaaaatgtaccgaggattgttcagggcccgtgtgatagataggagttggtcaaaaacattgctgagaaacaaaataggatttgactaaatgaggaatgacctagtttgaattgaaaggcttacttttacaaagcatgtcatttgtccctgatgaaaatatcagagatattcttgaaaacattataaaatgattctgaactttatttgtaagaaatttaaattagtatgaccttaaaagtaaatttggacagagtaatgaggaggactcctagaattgttatacaagttacccagtaatttgaatgtaagtagttgaaccgagagtctgacgtgctggcagacaccccatgctcgtattgttttctggctccttccctcttttctttccctttgctaagtaggtattctgaatgttattaaggatctcttagtgtagtggagtaaacggttctgcaaggaagtaatgacaaggctatttggtaatttcttataggagtaagaaaaaagttcttttggaacacagaggagtgggaggccaattttactttactgcttggtgctgaaatgctcttggaccaaaacaaatggataattttaaatgtctggtaattcagtttgcagaggggattaaaggtgtagagtaagaagaatcaataccgtgtgttggatattaagcaattggtaattaatcttgcttcctttatcttgacaagatgtgctttttcacttacaatttgcttgtttcctccttaggattttgcaggttaattcctcacacacgttcaccaggtacttggacaatatattttgaaggtgcagattatgaaagtca

SEQ ID NO: 39751 - DNA, 1067 bp, Homo sapiens
catagaaaatgataatttgtagagtttacctggatgtagaatattggctgtggggtagcccagaggttcacactgccccaggcttgccccatctctctcagtggaatcttaagtgatccagacccatcccctgcacaggccaggactctggggagctttgtcaggagtgtcaggctcacctccagtggtctcttgtgcctgaaaatctgctgagtcgcacaccgctttgcgaggctaaggagagttgtgcactctaccctggtgaaattcacacacctgcaaatgtcgcgtgcggtctttgggggtttatgggcttcctgcatcccatctgtgggaccaccttcgttcccttcattttatggagagggaagagatagatgtggtctgttgggtttgtattttatacaaagcataaacgaaacccagagctggaactacagccttgctcatagatatcaagctcagttaccttgctcacagcaccaaacctgctgggggtaacttaccatggacttccaaggttgctgaatgtagaattcatatacaaagtgaattttagaactgattatttcacaattaaggtaattcctacccaagaagagagatctttagaatgtttttaaaacccaagcctggatttacttatctgactagaagtaaagcagttgaaaaacccagaggagagcagcgagcgggcagagtgtcaacagaagtatgcctgatgactgaaatacttctgggctctgaggtcatttcagccacttattgttctaaaatcaccagccagagaacccaggctaggttttcttacctgagaacaatagggttggattcatgatgatttggccagcatatctttcttcctcctgctcttttttttttggattgtgttttaatgatgtctttatgctgtttatcacgttgtactcccacacgcactcagggtttgctactggaatgtttgaagcctaggctccgcctgaccgagcctccctgtgcgtgtggggagactacctacacttctataagccctcttctgaaaaggtgcagtaaaagaattagagaag

SEQ ID NO: 39752 - DNA, 1032 bp, Homo sapiens
atgatctcattctgtatacagtcatgctcacctggcaagggggatccattctgaaaaattcgtccttagtttatctcatcattgtatatacgtcacagtgtactacacaaacctagatggtgtagcctattgctcctaggctgtagacctgcacagcgtgtcactgtactgaatactgcaggcaactgtaattcagtgggaacatatcttcacatagaaaaactacagttaaaaaaaaaaaaagtggaagagtaacaatgctagacccatagaaggccacttaaccctgagtggagcttgtaggatggaagttgctctgggtgcgtccacgagtgagtagtgagtgaatgtgaaggcccaggacatggccatgactactgtggactttatcaacactctacacttaagctacactaaatttacaaatatatatatatatttctttaatagtaaattaaccttagcttgctgtaactttactacataaaattttaaattaaaaaaaaccttttgactcttttgtagtaacacttggcttaaaacacaaacatgttgtacaactgtacaaaatattttcgttctttctatgcttattccataagtgattttctattttttttttaatttatcttttcatctttttggttaaaatctcgtacataagcacacacattagcttcggcctgcacagggtcaggattatcagtgtcactgtcttccacctccacatctggtcccacgggaaggtcttcaggggcagtgacatgccatggagccatcacctcctgtggtgacaatgcctttttctggaaggcttcctgacagacctgcctggggctacttgaccattaactctttttataagtaaagggagtacactctaaaataacaataaaaaatatagtatagtaaaatatataaacaagcaacccagtcgcatattacattatcaagtattatataccgtgtataattgtatgaactatacttgtatacagctagcagtgcagtctggcacgaccacaaacacga

SEQ ID NO: 39753 - DNA, 1897 bp, Homo sapiens
gggcgattaaaagttcagatatttttctacaaagtcagggaaacatatatatctttattgattttttttttaaagatactttaaaaatggttagatttgttgcttaaaatagtgaagtttcagttaatgagaaaataagctttgaaagtgtttatcttcccatcattactaattaagtaaaaatattttctttattctcagtatatttacttaaaagctgttttatgattctgtaggaagaattgacctttatcaccttatttcttatgctaagaacaattcttatggaattttaatgataatcagggtgttgaaaataaaatcttaagagatactgaatatgctttgattccagtttcagatcgtcgtggctcaggtaaaccccgaccaaagagtgaaggctttgagctctataataattcaactcaaaatgggtctcctgagagtcctcagctgccttgggcagaatatagtgaaccaaagaaattgcctggtgatgacagactgatgaaaaatagagctgatcaccgttccagccccaacgtagcaagtaagagtgacacttttttgcttcctaagtacacttgtgatcacagtctgaagtgagaggaggcactttgtggtttgttaattattaaaattattctctgcaaacattggctaactaggatatggttttcataagggatatcataagtaacatttctctaacaaaaactaagatggaaaaactttagattcagttgatcccataagcaaatacattaataacatctctatttggggttggtaaattaccaagagaaactaaaatatgttttacatttttttttttttttttgagacggagtctcactctctcgcccaggctggagtgcagtgcagtggcgcgatctcggctaactgcaagctccacctcctgggttcatgccattctcctgccttagcttcccgagtggctgggactatgggcgcccaccaccacgcccggctaattttttgtatttttagtagagacggggtttcaccatgttagccaggatggtctcgatctcctgacctcgtgatctgcccgccttggcctcccaaagtgctgggattacaggcttgagccaccatgcccagccaatattttttacatttttaaagggttgttaacaaagagaagaagaaataatagaaggatatgcagcaggagacaaaggctcacaaagcctaaagtatttactttctggcctattaccaaaaatgtttaccagtccctggcctgatacacagagctacaaaggtttttttgtagctctgggctctgattatttaaaagatggatgtggatatgacaagacctgatttcttacctgccttgatttttttttttcatctctgtgctggatactcactagcagtatgaagatgaatgaggtctttaaggaaatttcatgttatatataggttgtttatttaatattacacttttttttttcccccctgacttgagcagatcagcctcctagtcctggagggaaaagtgcatatgcctctggaacaacagcgaagataacatctgtctctactggaaacctctgcactgaggtctgattgattgataagcaaaaggcttctactgcatttccatccttagggttccctttggacatctcagttatctagtacaatttttactctgaattagcattgattataatttctaaatttgcagtgttttatcttttgatttttaatatactagtcaggtaaatcagttttaaattaataagtctgggcaaaatgaaatgttatttattctcagtatggatcaaacactttttaatgcagtatttaacatatactattttttaaattttaaaacagatcattgaaaatcaagttagtctgt

SEQ ID NO: 39754 - DNA, 1049 bp, Homo sapiens
ttttgcgtggaactgtagaaattggacatgcccctcttgagcatcccaggtatagaaggggttgaattaaaagccttataaaaatttcaagcaggaattagtaggaagcctaatttcagaattgtttcttcagagaaatctatctgggggaagtcagactgtattttgtctattcaaattggagtgcctctagaatgaaaatgggccctgcccagaatatcagagccacagtgtagtcacagtgcatcttcaggaagtctcagttttactcaaggaattaggagaagaaatatgtattaaaaccaacacgtatatattgcagaatggaatacaaagtttgtatgattgcgtaaaacagttgccctaaaagaacttcaagtttctgttgtaggcctctttgagccacactgtcttccttgtggattacggtgttaagtctctgccacaagggcgtttcaccagctaagctctagatcttacaacttctaataaaatggtcattttacttaaatctgaaaaaagtgtgtgggctgtgctacaggaagggagctagcacttactgaggaccaggtgctacagtggatggtttttcctgtgtcatttaatacattctaccactgtgagagaggacttcagtttcctaatgaggaaatcggtccctaagacatagagtagacttttgcttggtctaaaaaccaggtgttatgtcacttaccagaggtactccgattcaatcattaatttgtaataaatgatcaggtgttttcttcatgtttttgtccctaaaatttttttagggtggacatttttaaagggagggagcataggcagaaaaagtctgtagagtaaaaggctttttaagggctttaacagagtcgtgttttcagtaatttgtcaaaaagtaaagggtattatgaccccattttatgttcagataccagtttcattttcatgatacaaaattataaacacacagatctcaacatatacacacacatatatatgtatataaaacctgaaaatacctgttttggggaatgtggactacc

SEQ ID NO: 39755 - DNA, 1066 bp, Homo sapiens
gttaactaaatttgttccagtaaaagaattgtgcttgttgaatgtgtgaatgtagatgataaattccatcttatagccatgattaatggaggaataactgggatttgtggcaaccgtttttaggtaatttattttaaaattgtagagctaaaaaattgtaaaaagttttattttccaacagtgattttaacctggtattttatatttaactttctgtgtgtgtgtgtttgtgtatatgtgtgtctacttgtcttaatgtgtgcattttatgtcttgtgctggtggagtttgtggagggagattaatgtcagcctgttgttagttgcaggacgaggagcggaggcggcagcagcagttagaagagatgcgcaagcgggaagcggaagaccgagcgaggcaagaggaagagcgccggcggcaggaggaggagcgaacaaaacgagacgctgaagaaaaggttatggtcctttaagggcagctagaattttaccaagttagcctgaacgtaatcgattggctggggcagagcgggctggaagttctgtgtttcttaagaagcacgaggcagagcagggcctggctcccccagctttgtgattggacctgcaactttaccccatctggcccacctacctctcttctggactgtctccagatccccttatctgccaagttttgtctccttcaaacttctgaactcttgggcgtgtgtagcagtgagcctctttgcaaagggttcgtttcctcgggcactcatctttactgaacatggcccagcttgtcattgtgaaggtgacattggttcagtgattgcttaaatggcatgtggaccgtgggaagcagtaggagcgtagtaagacagttggctgccattcaacatttcaaatagatggtttactcaaatcactcacttctggttgatggtaaagagagcagatggcttagaaaacatgatacaggaaaatttagtatgtaatccagtaaatatcctaagttatttattttcatgtgtgtgtgtgtgtttaaatcaagtaacccttttaattgaattttaaaatgacagcga

SEQ ID NO: 39756 - DNA, 1572 bp, Homo sapiens
tgcccattgctatagctgggcccagtcctggccacgccggagcctcggcgggggcagctgggttgtcacggcagcacagtgcacatgcagagaggaccaggccatgtttttcctgtgctgagaaactcttgggttatttaatttttccaatgtgttttcataactcatgattatttgaaatacacttgtgttagtaactgcttctataattaagtggtcactgtaaaaaggcgaataacctatttttatatcagaatgtccaaaactcatgggtttgctttgttatagaaaaatgtgccattcatttgttgggtagaataaagttgtcttgtaattgtatctgctcttggtataactaaaagaggatattttgatttcttcctaaaatgttaccaagcaactgttcttcatgttaatactaagattcttgatagttccatttaaaagccacaagaagtcattctggtttattcctcactccaagggaacacttactttgtgtagacaagaagatgagagtctttccttcaggatttctaaacacagagcaagaagattcaatgaaaaattgggctcagggcagtaattggggctggcatttattcttaagagttttctccctcaaaaggtgaaggagtgacattgcgtattcactctgtgtgtgtgtgtgtgtgtgtgtgtgtgtgtgtgtgtgtgtgtgtgtagctctagagggagtagggagaaaatacaggatgaaattgaaaacagggactaacaacttttcactgaatgccagcaagctctctaaaattagttttctttggttgaacaaatttacaattcattgtacttcatttcacagcattaaacatttactcgaggcagtttattctgtttgctctttcatcccccttcttatttacttttttcttgtgctctaaaacttttgtcaatctttaacaaaactgtgctgttaccttttttaatgttaaaagaattttaacactgtcaactgtagtttgtgcagatgtatgtcagaaaaaaatgtacagtatgtgtcaaaatatatttgaatatcttgttgctgttgctgttagttcctggctctctaattttctgtctgttagggagtttcttaagatttgaaatacaagttaagaactatggaaagcatatttgttagattgttactttgggagaatgagtgtttttttttttttcttcatttctggtttcctgttaatctccttcctgataactgaagtaaacagggtggttcactcatgtcctccttgtccaggaaggactgctcttctgcattcatgggggctcagtgaaaaagagtgcaagtttgccttttggaaagtgctggccatagaaagccagtgacagcctatttttagttttgcattatctttaaacacagcagtaacaggtaagttaatatcctgccaaaatcagaagaggagagagagaaggaagtaacaggagcgtggaggaaggaaagaaggaaagcagaggagaattcagtccactgggataatggaaaggcataagtgactgggaagcaggaggctgagaatccattcc

SEQ ID NO: 39757 - DNA, 1107 bp, Homo sapiens
gtgaaaatattgtactacttttgtggcctgtttaatccaatattcattgctgtcagtatttgctaaatagtttgagcatttattactgcagcctgtattacactgtcagatttttccagtgtgaatttttctaatgctacaattaatagaaatacattaacactgatttactgcattatgattttaacaatataacattgattgttacttggatacacttagtgacattattacttggatacattgaaaactttgtatctgcatcacatcttttgatcctcaacaatccaccgaagccagtaggaacagggcaaatgttgccgatgggttgatgttacactcacccagagttgctgtgccagtcagaggcagagctgggccagtgggcagtattcctccctcatagtgaagggcgtcaggtcaacattttagcaccttttgagagtagtaattggattactcaggccaccaacagggatgaatttcaaactgatgaaactttgatacaatatgaggggtcttttaccttcctacttactcagtaaaggtatttttgtattctctgagcactgcatctttatcatgagtaaagcttagaaataatcaggtactttaacttgtactgtttctttcatggaaaaggaccaaactcttacccaggatctactggagcagctgttggagcccatgacgcctgtcgggatgcaaaagagaagcgctctaaaaggtatggacggttgcactagacgaggaacttcatctgtacctgatgagccctttcactcttcacgacaccttgagattatgtaaacagacttcatggcttcactctgtgacctcacctggattgtaattaggaatgctattgccccaagtgttcttaaaacatggaatttgaactcaccagaaaaatcatcagtactattctataacttattattaaatttggcatatttatagatgcctctcaggtacatgtaagatgccttaaaatgctgtattttaaaactgtacccctcaggttacacttaactggtaagagtcacctgcttgctaaaatctaacttacaagttttttgagagttgactatgactgggaaaagttaa

SEQ ID NO: 39758 - DNA, 1030 bp, Homo sapiens
gtttcaattccaagaaattttattttactttaccatgagattgccatttatgtaatttaaacactgtctagtttcttaattatctaactcacacgagggtaagttttttgttggtttcttttttggagtcctgagttcaaaggggacagaactaagggcaggagaagagaatggatgtgtcttctctcccatcttcccctcatcatcgaccgaggagcacaaagaagttctgtttctgtttttttcagaaactttattttagctgtcaagcagagaatagcttgaactattcagactattgttggcactgtttagtagtgaccacacgctcttctacccgggaaggaacatatgacgacatgctcctcccatgtcccctgatggtgtctgttcccacaatatccttctagtctgcatcgtgaagtggcttaggccaaagcttcctgtgtgatgacgcacgtccgagactgttccatctcattcctcgcaaatttgagctcttctgatcaattctaaatatttgattaattttaattctgaaagaaaattttgaggatttaagcttaggggattttatttttataaataccagattattgttagacttaataaatcactgttaaatttaaagatgacagttaccttggaaagttcactaatacttcgctccaaggcgtctgtaaaagaagatatctttattggagcaatgttcatgtgactgggaatgacagaagaatgggagatgagtagggacccctcaagcacagctgtcactcagaaattttaaatttgaaaaagaaatcgattttcatctgtatgccgtcaaggaaggaattcagttacagggcatctgtaacttaaatattgtaagaataactcatatggaagttcaagctatttttatactataatagagttatttaattttaatttgttgaattattagttaccactgtcatttcttcagctatggatatgtggctgatgttggggagacggacctcagtgtgttttatattgtctggtgtta

SEQ ID NO: 39759 - DNA, 1038 bp, Homo sapiens
atgaatgttaaattggagacagtggttccaacttcaacttggaacttttaaaaatgattataagatattaagtaatctaagcccaaagagagacctgggaaaccatagagtcaattgtatggctttaaaaatgttccaccttcctcccgtcaatcttttttgtatgagaatagatcccaaaatataaaaacagcctagttcagttgagcaaaatacgtaccatgttctgaacaggcgaagcatagctagggagtctcgggactttgggtttgtctgatttctgtaactgccattacctaaatattggaaaattgctgacatcgatgcagagactgtccagagccctctaagtctttgtggacaaagagtgacttatttaatgaagcagcctctccttcctgtgatgtgagatgtttatttctctttccagttttttaattatacgtcacccatcgcagactaggcacccataaatatttgttgggtaaattcttctcaatctgaagtctagtatgtatctttggggttgtgtgactttttggaataaactggatgaaatcgtggaattaaaaattcactttttgcatatactttccctcctgcaagtcatccagttacatcttgcttagtgttactaaatataactttctgaaattagctttccatgcaagaaaacatagaggaatgctatcttcagtacagtagacggattgctcacagacagctggaggctgcagtctataaatgatttgatcagatctctctcaagaattcttgtagcaagacaagaaaagggattggtggaatacaaacaaaaataggaaatgaaggaagaggagagtgcaaaggtgaggaccacacaggccgactgcattgcgaggccgtgctgcgcggggaggctgggtaccacataccagttgcatgtattcagaagaggagcaagacgcaagcaccttccggagggaatttgtctcagcctcatattctaagaggagtttctcaggcagcactggacatgggccgccctgaatattcttt

SEQ ID NO: 39760 - DNA, 1033 bp, Homo sapiens
acatattcgtagcactttgagcaaggatggaaacgtgttgttggagtgagtagactaataattctaatgtctttgggcacgttttcagttttagaatggtagggttgatattacctcaatggggtccctgtgttgggcagacacatatcaccaaatattttccaattttactattttatgatgccctgcttgcatttggtgttgtgggtctaatgtgccactcaaaatctaacccccatgttcagtttttttacacctaattacctggttttttctttcttcgctcacatggaaccacatttgtggcccatcgcccatcttcagaagtgaacgcagacctgcctgtggctccctgtgtccagcttctgttgtctgattcccagtgtctgtgcagattgatccgtcttcacatgaatccacccacacgcttgcccccttattcctctgccatggcgtttcttataacgttgagaaaaaaatgtaaatctgaagtcgtatctcagaaccatgtgtacaaactttcctcacatttatagcggtcactgtaatattcttcctgacattagcaatcgaattgagggaaaatgacttcataaaatatagtcaccttttaaataagagaattacttttagataggagatagaaatttcaaataacaaaggaaattccatatgtgcttataattttaaaaataatttgagagatctggatgaaaaagaatcaggccaactttagggtatatttttggttttggttgtatattaattcatgccacatgggatgtgggtctatgtaatcaagaatttttttaagtacaattaaaactaacctaaaatgtaccttggaaaaaagaagttagtatcctttcattttgcggtggctggcagcttgggactgtcagataaaccgtgcatggccattctttggcattaagattctgggctgtccagctccctgtgtgtgacaagcacttctggaccctctagaaggtttcattacctttaatgaagcataaaataaacacgtgctttt

SEQ ID NO: 39761 - DNA, 1052 bp, Homo sapiens
ctacattttgtttcctacacaatttgagactaatacacttaaagaaattattacttaatgcttcgatgtacagaatgtatgaagatgtgattttgtaacatagtagcagaatgaacagggtaaaaaacatgatctcaaatagaaataaaacaacaatcgaaaggtaggaacagagctgctaaaagaacagagtttttgtatgttattgaagttaagctggtataaatttaaataaaaatgttcttattttaggatgtaaaatataatcctcatggtaactaaaaacacacaaacagctatagagtatatatgaaaggaagtgagaaagaaatttaaatgtttcactacaaatagttaactaatcacaaaataagacaggacatgcaggaaatgagggacaaagtccttataagatatgtaagaaataaatagaaaaatgaccaaagtacatcccttttatcagaaattaatttaaatgtaaatagattaatctctccaattaaaagacaaagactgtcagaatggataaaaagtttaactatatgatgtctacaagagacttgttttagatcttatgtaacttgtgtctaaaggcaaaagtagcttgaaaggaaagaatggaaaaagattccatgccaaaaaaataaccaaaataaagtaaccaaaaacttaggaaatgcagtaaaactagttgtaagggaaaaatgtatagctattaattctaccctttaaaaaaataagaaaaaaacctaactttacaacttgaggaactgaaaaataagaacaagctaaacctaaagctagcagaaggaactacataataaagatgaagacagagatgaatgaaatagaaaacagaaaaataatagaggaaaattagtgaaacaaaaaattggttctttgaaaagatcaataaaattgataacattttagctacatagactaagaaaaaaagagacgtttcaaattactaaaatagaaagtgaaagtgggttttcctaagaaaaagaaagaaataaaagtgggaacagtactaccaactctacagaaat

SEQ ID NO: 39762 - DNA, 1033 bp, Homo sapiens
ctgcagataacatgagaattaagtgacatggccctcgctggcctttgggctcctctcccagcctctcctctgccctgtggccatctcagcactcaaacgtccccctgcttcttgttgctggttgctcggaaaccttgggttccagacaaatctttttccccggcaaagctgcacctccacagggccccttaaaattctactttcccctgtgttctgatctcagctgcggatggggaaagctccaacttaaataaactcacagtggacaggaacgactcatatttggcttatgaattagtcaacttgattgactactcgtcagggtgatgggcaaggcagtctttatttcagaatataagagatgctgtgccaacagtatttgggaattgcttctatatggtgcattttagtatttattgagctatctcatgcaccgaaaattatcgtatgtaggaaagaattaaatattgacttaatttaaaaattaccttttttctttttttgagacggatcttgctctgttgcccaggtgctggagtgcagtgtgcgatcttgactcactgcaacctccatctcctggattgaagcgattctactgcctcagcctcccaagtagctaggattacaggtaccccaccatgcctggctaatttttgtgtttttagtagagatggggcttcaccatgttggccagggtggtctcaaactcctgacttcaggtgatccaccctccacagcctcccaaagtactgggattacaggcatgagccactgtgcctagccaaaaattaccttttgattaaaaaacatacatggcacacaatctatacgttgatgtagttcccttttaagtattttttttggcaatttacatgtatattctatatgtaaagcagtaaaatgctacaatcattctgattggggaattttatgtgacagcatagtttattagtaatggtgatttcgagagcaatatttgaggaggagtattttactgcttttctctccggttatagagcaaggcaatacatct

SEQ ID NO: 39763 - DNA, 1044 bp, Homo sapiens
cgctggggtcgctggtgttggacctgtgctccgaggcttgtttcgggaccaacggcagatgctgttaggaccccctggaacctcccagtctgtgactgtggagagggctgaggctcagtattttggctccctgtgggattctaaaccattgcagttattgaggaccctgataaagatgcctcaactcctccctacaaggaggaagaggaacagtttttctacctacagcaatccctgcctctgagactggtacaaacaagagctgaacagaacccttaaccttaaacatcatgtcgcagcctgcaggtcctgtttcggggtctgcggggtctgtcacatgcccaccatgacccccctgggaaagtctccatcctcttctctgcccttgcctcggccaacacccttcagtaccaggacacatttctgcttttctcttacatcagcctttaaagtcagacgttgttttcaagatgagaagaaatactttagtaccaaaattttaggtacttttcttttctagtgtaggttacagtgtaatgaaccagtaacaaacaaaaataatataaacacagaccaggccgaggcaggcagatcacctgaggtcaggagtttgagaccagcctggccaaaatggtgaaacgccatctctactaaaaagacaaaaattaaccaggcatggtggtgcatgcctgtaatcccaggtagtcaggaggttgaggcaggagaattgcttgagcccaggagatggaggttgcagtgagccgagatcacgccactgcactccagcctgggcaacagagtgagattctgtctcaaaaacaaaaacaaaataataaaaataaaaatcggagttttattcaaccaatcccttctgcatgtgtggaaactgtggtggggcccatccctgccctggaagatcctttgcaaaaagagttctgtattactaggacactgacattttggagggacaagctggcatgaaagtaaatgtcaggctttctgtccagagggtgcctaccaaggatgaggcaggactggcttcct

SEQ ID NO: 39764 - DNA, 1104 bp, Homo sapiens
tcgttctcctcatcgtcttcacgttgagtgggctgaggaggaggaagaggaggaggggctggccttgctgtgacagaggcaaaggataaatccttgtaacagtggacccatgacatcaaaactctgttgttcaggggtcagctgtaaatattctcacttggttactcagtcatgaaaataattcttattatttgatcaccggcatatatttttaaattcggcattttaaaattaaattttctaaattctttaacagatttctctgtggatgtcaaactatagctttagttaataagtaaataattataaatttgcttttgacctaatttcagagatgttaaaacactttgctaatttagtttaaaatcctccaaattgtgtgcattttgtttgctataaagcagtgtttgagagaactttcaccttttaaagctgactattttgacattttgaagaccagtaatgggttgcttcatctttggttaatgattttgactgttttcatggaagcgggtttgttctgtaattttcatttaggctctcagttgattgcttgtgtgtttctcattgccttttcaaataagaatttcacagattcttactgaagggaagtagctctgtaggtttaaagtagttcagctgctgaggaaatacggagttagtaacagcttgaattttctgcgatcagctttgggtgaaaaaattgcaaacattcacagaggctgcttatgcattaaaactttatctgtggttatgcatccatatattcttctgcttacaaaaaaaatcaaaaggtatattaaagttcaggagactaagagtggttcgattcccccttcacccagctcttacacacccaacctgaaaaggacccttgagggaagtgcctgagtccccttaagccagcagccacctcagaaccccatggcgagtctatggtaggcccgtccactgatttccacctgcaaagctagcgcggtgcaatgccagatgagctggcacaggtccaatgtgtgatctctgccccatgatgctctgaaatcactgcctccagccccggagtcttagctgtgtggcatcttcttgttactttacccttctggg

SEQ ID NO: 39765 - DNA, 1047 bp, Homo sapiens
ctggattttgtggtgagaagggcactatgagttccttaatttaaggaaaaaatgtaaacttaatcaatgtaatcaatgccatgcaaaattcattgcaagtcaagggggatgggagagatgcaatgccatacggtgatacggacctttaagaaagtacaatctttcctgaaattcaaacactatcatacttcaaaaggtcaaaacccattccggaatttggcttttttaagactttttctctcctgctcactggcagctgtgtgtcttaacagcattctttcaagtcctggtgtactctgctgacagcactttaaaactttaacagcacaatgataacttgtactacatacttgatctgaattactacagaaaaataattatgttgcttgcttaatgattcccaggaaacttcgttgtaggcatatattttataagagtattatacagtgttaactatgcaagtaagttctaaaattacacaattatctgtgtaatgttttagtccaattactgtgatttattcaactctgttctaaagttatctggaattgtcatgctgcctcaatttacagaaatctataatagatttctatagaaatgtataaagacgtagcagtcattttgttgtttctaaatagataacatataaaaataaaggctttgttactttagtatttcagtagaaaaacaccagctcattctatagaactatacttccaaaacttagcaggggcattctggcctttcacttatcctttagttggaattgtctagggatgaaaagctggtggacatgacctgtataatcacagctttggtcatatttgcacataagagtccacaagctcttcatgtcatgatagcgtttatgcagccttttggagtgctgggagagtctcatcacccaaagataatgtttgctctttttttaatctttacctgatggaatagcaccaaggcccacacaaaaagtatgataacctctgtcacacatatcacagaacatcatttcttcttcatggtggggttgtccacatataatgcatg

SEQ ID NO: 39766 - DNA, 1051 bp, Homo sapiens
ttcattatagttgcctacactcaacaaacaaaagttgggaaagataaagggattattctagcgcgtcacattgacaaacaccgacgttaacacgctcagtccagcctgactcacttgcctcaggtcagagaggtcaccactgacgacgccgggccctcaagccgatcctaatccagcttggttctctcagcctcagccagaccatccgttcttgcctctgtcccaccacgtgcaggtgtaagcttccgccgcacttcttgtctgaatctgccaagaagaaactgcatctttcagctaaattcttttcactgatcagggtagagtttagcggttttttttttaagaaaaaaaacaaaaacaaaaaaaaactcttaagctatttggtactcctctccctccgggattctgtctctagattgtgaaagctgtcagagaatggagtcagggaaagccgtgatgggaaagttctcactaataattgcctgatataaagaattagcacaaaagactgccaaaaccacaaccttgcacaaaggccacaaaactacacaaaaaaatgcttcaaggacatttgcgcagcaactgcctgtccaaccttggactggccatcccctttgttactgatctttgtagccaaggataattgtttcaaaacaacttacgtaatcctcctcgtttttccttttaaaccccttatcttcctttacctccctgaatacacctatagtttactatgacaccatattctacattgcaatgcccactttcaaataaatttgtcatgtttggcaaacctgtctgttatttaggttgacaagatcaaatgcaaatttattctggagtcaacaaataactgattcagtcttccaatgtgcaaggcaaagaagaatattaaggagacactgtatagattagatccctgcctataggcagcttcaacactaatacaatatggtacgaatatataattgtactttaaggcagcttaggtgggaaaacaactagcaactaaaaaaaaaaatggagtttactaccaactaaaaaaaatgga

SEQ ID NO: 39767 - DNA, 1501 bp, Homo sapiens
gaaagtgcaacttctgggtgcaggaggagcaaacagggcaactgatagcagtttccacattaggaagctgcccagagctaattatgactgtcacaacacagcccccccttaactcaacacaccaaaataaagagcttcggttccgctttagatcctgaatttgacttctttgcaggtttatacgatggtcttagtgtcatgtggggtaattgtgaggatttcgattgtatttaattctccatggaaaaccagtacggtttgctactttttacatggcagggaaggctaaactttacctctgcccatcttagttcggagtgacccctttaacaaatgaaaggataacaagaaaaaagtttattcttggacagagtacacatcacaagggataaaccttaatgagaagtaacttgaaatggtggcttagaactacatttgtataccatcttcaacaaagaactgtagatttgcagagaagtgacaggacacaggagagcagttttaggcttcaaagggcaggaaattgggaaggtagatacatattcggaaactaatggagtaagaattgtttgcagattcccctggtaccttaactggtctggtaagtctaaagttatccccagtaaagaatttatatcctgtctttgggcggaagagggggaggatagagagagcttttccttcatttgctgcctcttgtcttcagctcaaatttgttgttgtttttatatcgaagaggcatgttttgggatgacattgtggttttcttcaacaccgtttaggtagtcagaggtacgtggggttctttttccttcttgttcgttatacttggtttctgctctcccattccccatttaaaaaaattgcttattttgataactctgggatagtgaaggaatgctgagagcaataatgctctggtcgtaaaacacattcagcttccgtgaacttgtattttttcttttttttttttaagtgaaaggcaagtttattaagaaagtaaaggaataaacaatggctaccccatagacagagcagtttgcaaatattatgattgataattttaggtctttaagcctttatcatatttgagaacatttatgtaaattatctttaatatttaatcactatgttttaatcatacagctctcacgatatccagaaagcatgttaacagcaactatacctgagtgcattcagttcttaagagatgtgtctgaaatatataatactctatttttctttctgttaagcagtgccttttattttattttattttttaggtattaataggggaccctattaccacatgtctttctccctcagtgtatgatataatttgtaatcttgggtttcaactcagagaaaattgtgatatcaatagcattgtaactcagaatggtgaagtatgctggaaaacaatcacagactgtgtgagctacacagagtcaggtttgtgctgtctttgtactccaaactttcataactgtcccattgaaaa

SEQ ID NO: 39768 - DNA, 1028 bp, Homo sapiens
gctttgaatttggagtgaaggaatcatcatgtcccccttgtactagcacttttaaatggcaggatgagtgccttgtgtgtatctgtttgagggctcagccaaatcaaaaggagaaacatgatggaggtcaaaatgcttgacttttccacttaaattgtgccagatttgttgctttcaataaacgtttaaataaagaaccttcaaggaattctttagctattaaaatatttttattgattctttaggcaatataattatacagaaaatgtttacttattcactgaaaataaaatatggcagttgaaatctctcgaggtttgaatttcaataaataatattgttgctttgagaagtagtttcagagtgtacatcctaatatgtgttttattgtaaatagttatttcctgaaatatttgatgccttggaaagtctacaatctcctgctatttctcttagcttaatgaaactgacatcgtgtctagaacgagccttgggtgatgtaagtgtgagaactctttcattattggcccattaaattatctgaatgaacatgaaactattttacagttgtcctcagttttcttgattattttcctataagataaaatcatttagtatgaatttttaatatttcccttttgaatgattatgaaatcaaaggattggtgtctaagtacttttcacccttcatttgtacaaacagttgcttcatggataatgtttttaatgtttattggctcataatacaactgttacacaatttttgtttgaattttaggtatttttactgattgggaaggaatgcccctttcttttaagagatctgctttcatctgaggagcttgctcaagtcttcagtcagtctgtggtaagcttgttcatctaaactcatggagtatattagtccgttttcatgctgctgttaaagacatacccaagactaggaagagaaagaggtttaattggacttacggtttcacatggctgaggaggcctcagaatcatggcaggaggagaaagacatttct

SEQ ID NO: 39769 - DNA, 1031 bp, Homo sapiens
gttaagaaatgactttggaagtgactctaatgtgtacacaaacaacacacatgcacacaccacacatacatacacacacgaacacatacctccatgctgcatatacacacacaggcatacacacactctaatgtgtacacaaacacacatgcacataccacacatacacacacacacatgaacacatacctccatgccacacagacacacacaggcatacacatactctaatgtgtacacaacacacatgcacacaccacacacgaactcacacatccatgccacatatacacacacaggcatacacacatgcaggcacatacactacacacacacacacacacacacacaggcacagttgcatataaacacacaaatgtacacacccccacaccacatatgcacatacacatatacacaccacacatattcatagtcacatacacaaacacacatgtgtatacaattattaatatagtcttaaagtcattctgttggttaagaaaatatttcctgaacacctgtttgctgaattttaaagactgtccatttaatttgcttagaccttagataacaagttaggctaaaagtactatatccatcaactctgaaagttctgtatgtttatgtatggggaccagttaaccaatgtatttatttttgatgttttagatattggcaaaacacttgaatgatggtaaaatcaatcagcttcctcttttccttggagagcctgctatggtaagtattaggtattttccaggctaatattcttgtatttatggatgtcgtcagcacttctctaaaattaaattaattttggcttgtggtttgctcaagaaaaatacttctgaaacattgctgtgctgtctcagcttcagccaccaatcagctgatgtttgccaagctgtcactccttaaatgtgttttttaaaggcctgatgatttagctgccctgtccctaagcaaaatttgtatttgttttttacatgtatttgtgctgtagaacggacatatatttgtgccttgtt

SEQ ID NO: 39770 - DNA, 1045 bp, Homo sapiens
gttttgttttgtttacttaattcaacttcttcaattaatataggcttactcatcatttctacttcttctttgttcaggtttggtgatttgcatggttcaaggaatttcttatctaaagttgttcaaatgttcttttattccttaactgcaggtggtttctgtagtgacactgtcttccattgctgggatgcgcaatgtgtgtcttctctcttcttgagagattatgatcagagtattataggcttatcagttgtatcagtcttatcaaagaaccagtcttttgtgtcattgatttttccctgctctaggcagagatggggcagccactaggctcacctcatttgttttcctcctttcaagattctccatcctttacttcctgttgtctgttgtctgaaaatagtaattttgtatttttgtccagttttttagttatttaaagtgggaggaccagttctgtaggaattattccttcttggatggaagctagaacaggacacttttggttgtaacagaacatcctgattcactatctgactatgtataaagaagattctctctcttataatcaggaaagaaggtggtttgagtgctggttgatgtagtggctctgccacgtcaaggcccaagtgctctccttctttctgctctgacatccatgccctgtcagtcactccatttcctgactgcatgatgtctgcagcagtaccagacatcttcaccattacaatgatcataagaagaggaacattgtctttctacatgataccttttatcagcaataaaacacttcagcagcatttaatgtgcattctctatgtagaaatcagtatgttttcatggttttggctttttgtctttcctaatttttggacggtcaattgttacctgtattagtctgttctcatgctgctaataaagacatacttgagactgggtaatttataaagggaagaggtttaattgactcacaggtcagcatggctggggaggcctcaggaaaccttacaatcatggcagaaggggaagcaaacacatccttctt

SEQ ID NO: 39771 - DNA, 1047 bp, Homo sapiens
aaactcaggcccggacagcagctgagcagctgtgtggtgatacctggagggcagccatgtgaacctgccagccaaccagcattcgattttttttaagcaggtatatcgatatgatcagatttttggtttttgaaacattacagtgcagtgagtggatttaaagtggccattgtagtaactcaggtaaaatacaaaagagctagaattaggaaaatggcagtggaaataggaagaaacaaattcaagaaatgtttcagaagtgaaactaataaataagtcttgctgtggaggtgaagttcctccttgagtaccggcgatggtagatggtgttaatctaaagaagaaggaggaaaggttttacagggagaagaagattaagtgggttatattttaattgagtagatggcacctctaacacatgttctcgtagtgaaatatggacctaaagttctattactggcaagagacagacatctgggagttatcctattttatgtgtaaagtaaaagatgatgtgggatggagacttaaggaacagtccactgagagatcaggagtgagcagaggaggaaggagaataaggaggggataatccccacaaaagtccaagggggcaagtttcaagaatgagaaaagaaacggtcaggagtatcacatgctacagaggtaaagaggtagaataggactagacatagggacttgggtcagtaattaggaggtcctgatggcatcagagagttactgcagcacagggttgggagtggaggcaaagccgacagggagtttggcagtggaagagactttgttggggaaggcagggtcaaggagagtcctcacaggaagggagtgcctgggcaaagtggtgggtcgagagttgttcacatggattgaacttaattgtatctttgaaaacaattttgaagtttcttacattgcccttacattttctctataaaatttttttgcaatgtcatcttcaaaccctaacaggcaactaaaattcaaacgtgtattttaaccatacatagtcaccctggaaaaatgctc

SEQ ID NO: 39772 - DNA, 1148 bp, Homo sapiens
ggagtcttgctctgtcgcccaggctggagggcagtagcacaatcttggctcactgcaagctccgcctcccgggttcacaccattctcctgcctcagcctcccaagtacctgggactacaggcacccgccaccatgcccggctaattttttgtatttttaggagagacggggtttcactgtgttagccaggatgatctcgatctcctgaccttgtgatccgcccacctcggcctcccaaagtgctgggattacaggcgtgagccaccgcgcccggccaacttgaattttatagagtataattttcaggagtcacaaaatattcttaaaaacatttttttccaaccattaaaaaaatatgaaaacattattagttttcagactgtaaaaaagcaggcagatttgacccatgagctggtagtttgccaatttccactttaaattataggctttatacacactgcacacggaggctgctccggtgagtccatgagtgagtggggagtgagtgggaagaccaggatatgaccatgctgctgtaggctttatacacactgcacacgcaggctgctccggtgagtccatgagtgagtggagagtgagtgggaaggccaggacatgaccatacaccgctgtaggctttatacacactgcacatgcaggctgctccggtgagtccatgagtgaatgaagagtcagtgggaaggccaggacacgaccgtatactgctgtaggctttatacacactgcacacgcaggctgctccggtgagtccatgagtgagtgaagagtcagtgggaaggccaggacatgaccgtgttgctgtaggctttacacacactgcacacgcaggctgctctggtgactccggtgagcgagtgggaagtgaatgggaaggccaggacatgaccatacactgctgtaggttttatacatactgcacatttagggctataatacattcaaaaaatatttctttcctcaacaataaattaaccttaacttactgtaacttttttactttataaacttttaaatttatttaactttttgactcttgtaattaacacctaacttaaaatacaaacacattatacaactggacaaaaaattctttctttatatcattctataagcctttttctattaga

SEQ ID NO: 39773 - DNA, 1048 bp, Homo sapiens
tcttcttctcttcatcaaggcctgcttcccccagccctggaccaagcccactgcctctttctgccccgcatcgaagccctctgcccaacttgagcagctgtctgactgatgatcacctttgtgctgggatatctggcatctagggacaccacctcttcttcccttcccccttaagcacctgttctctgctgacctcctcccttcagagttcctcagttacacccactgtcttctttacctggtcttgctttaaaaaactgtatccatgttgactgtccaattccagcagttttctttaagtgttttctggaacagtgtgagggaggtagggaggaaagacatcgtaggagtcattaacatggtaaactctctctcccatattattgtttacttacccagattatcctgaggattttgtcggttccacagggtatggttcttgatggaatgaacagattaccctcagattggaggataagaaattaattgttggataacttaaggttactcagtcaccttggatttgagagctcacctttgaattggccacctgggcagagctgggtctgtgacactgtgagcctggcgatgcatgccctcatgcatctactgacccaactctttttcttcagatgtcaccagcacctgcctagctgtcaaggagtggtttgtgtatcctgggaacccactgaggcacccggacctcgtcaggccgctgcagatgaccattccaggtacaggcagcctttctttaaatgaaccacagatctttccattctatgataaaagtctaagaatgcatcagttatggaaagcatcttttaccagaattgcacaaatactagtttttatttaaacccttggctcatgattaatgtatccatctaacaaagtcccaaaataatggaaggatgatgctgtggcaggtttaccctggaccatctgcggcggtgctctgcctctttctccatccaccctggtccaggtccacagcagtggagagagaaaagagacagaaggatggccgtggtcagcgcatgttgctgcc

SEQ ID NO: 39774 - DNA, 1158 bp, Homo sapiens
agagacccacaaagagactcccacacaataatagtgggagactttaacacccaactgacaaatattagatcatcaagacagaaaattaataaagacattcatgacctgaactcagctctggatcacttggacctgatagatagccacagaattctccacccaaattcaacataatatacattcttctcattgctgctcggcacttactctaaaatggatcacataatcggaagtaaaacacatctcagcaaatgcagaagagctgaaatcataacaaacagtctcttagaccacagagcagtcatatttgaactcaagattaagaaattcactcaaaaccacacaactacatggaaattgaacaacctgcccctgaatgactcttggttaaataatgaaattaatgagaacaaagagactacttaccagaatctctgggctgcagctaaagcaatgttaagagggaaatttatagcactaaatgctggaaagatctcaagttaacaacctgacatctctactaaaagaactagagaaccaagagcaaaagaaaaccccaaagctagcagagcacaagaaataaccaagatcagagctgaactgaaggagatagagacacaaaaaaccttttaaaaaaaaatcaatgaatccaggagctgtttttttttaaattaatagaccactagctacactaataaagaagagagaagaatcaaataaatacaatcagaaatgataagggggttatcaccactcacctcacagaaatataagcaaccatcagagaatactgtaaacacctctgtgcacataaactagaaaatctagatgacattgataaattcctgcacacatatgccttcttgagactgaaccaggaagaaattgaatccctgaatagaccaattgaatccctgagtagaccaataatgagttctgaaattaaggcaataataaatagcttaccaaacaaacaaaaaaaaatccagaaccagatggattcacagctgaattctaccagaggtacaaagaagagctggcaccatttctactgaaactgttccaaaatattgaaaaggaaggactcctttctaacttgttctatgagtccagcatcatcctgataccaaaacctggtagacatagaacaaagaaaga

SEQ ID NO: 39775 - DNA, 1023 bp, Homo sapiens
agcccagatgttttctgttcgtgaactagatgtgtcctcctgagggaattcaaatcaaagagttggcaaaactgggtggtggcagtggtagagaggcatgagcacgggcctcctgacacacacacacacccctccctcccccccctcccccctgccaggctgcctggagcagggctcggcccctgacaccccgcctcccccacaggctgcctggagcagggctctgctggaatcacggaaggaacacacaccctttttgagactatcagaattgcaaagcctggccagttggtgcaagtgtttatccgcctgccatcaccatcgggtggggtggtctgtgacaggctcagcaggtgttggtaaaaggacccttggccagaaatgcaaaggggacagagcaggaactcctcacaatcataacagcagtgagctgtttcttgttctctgtgggaaaatgcttggagcctaagtcttgtacgaaaaaatagataaataagcaaaatgtagactcagtggcattctgtcattcagtggcatgttgcacatccagactctcaagatataatacaagtttctctgcagctgttgggaggtggcactaaatcgttgttcttgggagttagattctgctgcctgaaagctgaaagggaagcaaaggcctccccagttatcctggtgagacgagagcttggtgtgtggggagctgagagctgggactcatgggtgggggaagcggttaggttctggccagttgccttggcagagccttgctggctcctaggaaagagtaggagtctctccattgcatctgggaagtgggggtggccgggaaggggaatggcaagtggggaggggcaggcagctgagtctatttggctggacctgtgctctgaggggcaggtgccagggcatgagggagagtggcgtgtgagcgcacctgagtggggttcccctggtggcctacacccgtcaggggcccatgtcacccacaggaggggaagcttcacttgggaggtgaggggt

SEQ ID NO: 39776 - DNA, 1344 bp, Homo sapiens
tatgtccgaaatggttttcttggcacatagccatgctcagtcatttgcagctgcctttgccctgcaacagcagagttgaacggctgcgagagacatcatatggcccacaaagccaaaagtgtttccatctggctctttccagaagagcgtgctgacccttggctggagccagcaggtaagtccgcggggagacggcaggatggggagccccatgcttttgtctctgtgcccctcctgcagccaggtctgcacgcacacacagtgacagtaataaccccatgcgtgaatgtagcaagttttaaagacattagagggctttggtagttagttttcatgtcattcctttgaggtaattaagtcctatcttattcttagaaaaatgaagatataattatgtgtcttggcattggtccttataaaggagctgaagtgaggatataaattccctgactcttggttccacttccacctaattctcctacacaaagaccctcgccatgataaaacctggatttgggagtctgtaggggtagggctgtggctgactcacatggatctcctcacacctattagggggccttacaagcatcaagtgcctttttaagatgaagtcatgtttccagttgacataataattgtgcatatttatggggtacagtgaaatgtttcaatatgcatgtatgttgtgtgatttaatattgaagtgtaatgttgcctgttggttcagagcacagtggtaccttagagacagttcagtcaagcacttttgtcttatagaccagggttttaggctcagattagtggaacggtttgcaccaggtcaaggtatagtgcatgtctgagctgatcaaaaggccaaggttccgagttccaccatgcactccctttacttcctgtcttctcaccagacagtgagacacctctaaagtgataagcaggtatgccatgtgtcaaaagcagatttagaaaccttctcataaaagatctttactcagtgctgctcttggtgaattctcactttacaaattgaatatttttctgtaggcagaatcaaaatgctttgaagacataatgagatcaagccgttaagatggcgctttaccgattaaatccctaagacaaccatgaaaatacaggattgtgtaatatgttttcaaggagatatttacaaaaatgtttttacttccctacacaagttcacagaagaaatacaatttttaaagaaggaaaaatgctttcattattgggcactcaataaaaatttggtgaatgaatgaatagtagatgtactggtcagtttgggctgccataacaaaacaccacggactgggtggcctaaaacca

SEQ ID NO: 39777 - DNA, 1015 bp, Homo sapiens
cctggacttggcagcagggccccactttcactgactttgcccatagtcctcataattgtagtaggtgtctcctgctacagatcttgatacgtgtttgagaaaatgtgatctctatgaggaagcaagaaaaggtaagaaggactatagcagaaagcagagaattccgagtccagtttggagagagtgaggaagtcaactggaaaggtctctcatgataaaggttccaggtgttgccagcagtgctggggcaggccccggggctgaacccgccactggatgtagcctgtggcactcctcgggtgacctttgcctcagcaaacttagggtagtttttttttttttttttttcctgctcccatacctgactcctagataggaggtttctcttgtcctggagaatcttaagagaagtatgtctatgttcttggaatcaggagagctcagttacttgggggtggaaactgagtcttttataatttccatggaacctttgcaccttgtaggtactcaataattaattgtcagtttgctgaatatgtccataaatcttatacttaagagtttatgctataatgctggtagatggattttatcttcgtgaataagaatctttcacatgtaacttatttttctacagcagaagcaaatttcaggatgtaatttcaattttacaaaaaatgtaccttttttgaatatagcaatctaatttctcttttaaacccattctgtgagtcggcagaaatttatcgcagagacattgcagaggtgagacggagactctcagttgcccttgagctttcctggccctgctctctgcacctcacagacttccccagcggggcggcccccaggccttgtgtcctcctgctcccacatgtgctaagtggcaccttagggggcccttgctgcccagacagtccatgcagacctttcttttctgagacgcagctacgtccccgagctctttgtggaagacagggaaagtgatggtctgctctaagatgccccagccacc

SEQ ID NO: 39778 - DNA, 1024 bp, Homo sapiens
tggttgttttgcccattttggatttgatcatatgtgtaattctttgaggtagagaaataaaagaggtaaattatacgtaaattgtgaaatgggagcatggaaagtttggttgacttttagcttgaatgaacctgacagaagtcggtgtatttaggaagaacagggtgaactggtgtggacccagcaagttccatttcagccatttactctgcccgagacgagatctcattgcttcttgatgctcttgcaccaggagtttgcaagttcctgcttggaacagaattgtttaatgtttattattgactcgttgaggctttctttcactgaaaaacttacccacacgtaacactcgttcagagcacaccctgacttctaagaatgaacacgtcttgtcatttaggccaggttattttcaagagcaaacttttcagttttcagtatgggaaataatcacctttcttcttcccttcactcagtgttagtgccatgaatagggcattgttggtcgggtgtctgacccaggatggcatctgttagatgaacgggtgatgtcactttacattcctaaggagtattcacctgtccttgttgcagcatgtcatagcagctttacccgtgaagggccgtcagagcacatcagtagatgatagtttggtgccatctgtctttatttccattatactttaatttcttgaggataggacttccacatttgcacttggttcagtagttgtcagctgttggtgactgagctgaaccaaatccagttcttcattgcacagatgagatcaccacaacccacagaagtggcatcacctgctttcagccccttggccaggtggtgagagagctggggcttccagttcagggctccctctgctgtaactcagggatggtccctaagctggtggttaaagtgttcatatgaagtaggtccaatctgtggttgttgctgtaatcagtgtgtcagcacagagttccgcaatttcagtatctttctaaataaccgactgtggaatgtttg

SEQ ID NO: 39779 - DNA, 1046 bp, Homo sapiens
agaacttcataactgttaaagaaattgaatccgtagtttgcaaactcccctcaaaagaggtctctagcccagaggtgtcactcggtaatttaccatatgtttaaagaagaattaatgctagttctacattctcttccagaaaatacaagaagatagaccattccccagtgaggccagtattaccctgacacccaaaccagacaaaaaaaaaatagtgcaaaatagaaaactacaggccattatcccttttgaatgtaggtacaaaaatcttgaacaaaatatgagtgaatcaaatccagcaattaattatacactatgaccaagtggctggtttagtacttaaaaatcagtcagtgaaaccctccatattaatagattaaggaagaaaagtcacatgatcatatgaatcattcagaaaaaggatttgacaaaattcagtgcccattcatggttaaaaaaaaaaaaaactttcagaaaaatgataatggaggagatctttctcaacttgataaagaacatctacaaaagcccctacagccaatgtaacacataatagtaaaagactaattgcttttctccaatatcagggatattagggacagagatgtctgtcctcaccactcttattcaacatagtgctggaagttctgtctagtgcagtgaggaaagaaaaggaaataaaaagcatgcagacaaaaagaaggaaacaaaactgtctctatttgcaaatgacatgattctctaaataaaaaatcccaaggaatctacaaaaaaaactagagctaggtggggtgtggtggctcatgcctgtaatcccagcactttgggaggctgaattaagaggattacctaaaccaagaagttcaagaccagcctgcgcaacatagtaagacccccatctctacaaaaaattgaaaaattagctggatgtattagctactcagggagctgagctgggagggattgtttgagccagagaggtcagggctctggtgatccatgatcacatcaccatactccagcctgggcaaccgagtgagaccctg

SEQ ID NO: 39780 - DNA, 1055 bp, Homo sapiens
gaaattaaaagttttaggacagaaaaagctgttccgtgcagctgctaacccaaagaaaccagtgcgcctgcatcagaagtggacttcaggtagaaatggccatgagaggaagaagggacatttgagaagaaaggtcagcgccccaggattatttccggattctctagatctgtaagttagtatgcacagtttccagatgcatcagatgaaaactgacacaactgaaaaacgaagcagacatatctgtaatcacagtgggacgtgtgagcacaggggtccacaaactgtagccagtaggccaagtctggcctttggcctgcttttgtgtgggtctgtgagctaagaatgctttttggagtttttaaagggttggtttaaaaaagaatatctaacagaaactgtagggggccagtgaagcctaaactcttcactgtctggcccctgcagaggaagtctatggagctttaacaaagcctctctcaagagctgataggacaaacagacagaaggttagtatggattcgaattgttgaacacattttgaacacagtgaacacactcatcctaacggacatatagaatcctgcacccaaaagctatagagtaaacacttctccagtgcatatgggaaatctaccagaattgactagatgacagctcataaagcaagcttcagcaaatttcaaacaattgaaagcatccctcttttttctgtccacagtaagctagaaatcagtaataacaataagtaaaaattctgttatttgaaattaaaatagtacacttctaaataattcacagggaaaaagcagaaaccacagtgggcattataaaatattttgaatgacagtgaaaatattgtccataaaaaatgtgtgggatgaagctgaaagctgttctgagaaggaaatttgtagaattaaatgaatatactttaaaaaaaaggctgaaaatcaatgatctaagtatacatctctataaattaataaaaaatcaaactcagggagtgtggtaggtaggaaggaaatagtaaaagcaggaactagtgaaatagg

SEQ ID NO: 39781 - DNA, 1042 bp, Homo sapiens
tccagacaccgaaggaggaaccagcagctgtgctacgccctttcttccagagagcagaagaagaaggaaggctttccaactgtttctctaagtccagcaaaatcctgatgcaaaaatctaacaaagacatcacaagaaatagaaatttaggccattctgtttcatgaaaataaagcttccaaacaaaatactaacaaatcaaatccagcaatatgtaaaaccaataatacatgatgaccaagttgggtttatttttggaatgcaatattgatttaacatttgaaaaccattgtaaataacaatgaataagaaaaaggatataatggatgctaaaaaaatacttgattaaattcagtacctgttcatggcagtcaccttcaggcttctgtaggaaatacacttctcactaacacgtcctgttagcatctgctcagccctgtgtacgtgtgtaatggttgctctttttaaaaacgagtgttgttttggataattttgtagaataaaaagtgtcgcacagcactattttagggtatagtagtgctgtgcaacaaaaatcattttgattaaacctagattaactctcggataatctcagttcatgatacgtttcttacagtggtgagcaaggttcttctattttagtaagtgaagccttaacttctaaaggagctaaaatatctgttacttttttcctaatttattttagttttatttaaaataactcttggttaatttgagctacatagataagccagacaatgacggattcagtttcacttacctcatttacggactcatgtggacactcgctagatatcggtatcactttccatggggccagtgtcagccaggaggtagagagtatctcatgcagcatcctcgctaaatgcaggaaccctctgcagcatcttaggatagcttccccgtttgagaacagaatgttggacatcaaggtaaatttgacagtgaaaagaaatatttcatattggtatggtcttaatttgcaaagattatcagcctatcaacctagtgagatacataa

SEQ ID NO: 39782 - DNA, 1860 bp, Homo sapiens
ttatacagtattattaatgacgtgcatggaacagtgttttcactgcatccatcacatgagaccaggtgtggaattttccacttatagcagttttagattttggattttcagattaggagtgctcaacctgtagcttcttccagaattcttaaataggattcaggactcccaaacttatggttaggtagggcgagcagtatcacacccagtctgacacatttttaatttttgaagtgcttttcactcctctccccatttctcacacacacacacgcacacatatatgtaatacacatactttttttttttgaaacagggtcttgctctgttgcccagcctggaatgcagtggtgcaatctccactaactgcaaacttccacctcctgggctcaagtgatcctccctcctcagccttctgagtagccaggactgcaggcgcgcatcaccatgcccagctaatttttgtattttctgtagaggtgaggtttttccacgttgcccaggctggtcttgaactcctgggctcaaagtgatccgtctgcctcagcctcccaaagtgctgggattacaggtgtgagccaccgcgaccagcccctctccctattttttaatgaggaactaatactccctgcaaaagtgccccacagatatcagactaatctgataggtgtagttatgatttattacttgaaaatactccccaaaggctgccaatttagttggggacgctggctgctgtccagcttaataaatacaatcgctacatgactcctggaagatttccaagtaaggcctcaagccaagctcatttggaatgtgttttaatacccgcagggatgagaaaagcggtgtgatccgtgagagagcataccggtctgtcacgataaagcactccaagctttcatagcggagagaacacatttggtaatgtgttgccatcactgttcctcacatacacacacacagattccagagtggcataggactgcaagtatttagaacttagaagcagcctgaattttatagagagcaaaagcagaacaagaggagaaatgtgcttctaataagccaataagtattggaaagtagactgtagaaatgaaaggtaaagtagccttagtgtagcctgtaagtcattccatcaaggatcttttcctttctttatccaatctcttgaccaagttccaagtgattatacgttctagtttgggaaaaaaaaaaagtataggatagaatattcaacaataaaacaggaagcttgaaggaaaggttgaatgttccatgttccatttcttgatctgctgatgttgttttgttttttgttttttgttttttttctgacgttggcatttctgctgaatgttcttataattaagaatcgaaagattaagatatattaaatccaaacactttttaaggtaagattgtgtggtaatcacctaaattgtcgtaataggacttgaagattcttttttagaaatgattgtttaacctacagaagctgcttggtgttctttttctgggggatttaggagaatatgttctcgaagaacctcttgggatgtggtcatgctgaaggagaactgtgctgcggttcatgtctgggaggagggtgcagccaccattgctgcctcgccttgggaacagtgtggaagggtgtcccctaagcttccttccagccacatctggccctactttgccacatctggcccctcacatctcatttgcatctggtctgtttgcagagatctcggctcaccaaattccacaacctgaaggcagtcgtctgcaaggcctgcatgaaggagaacagacgcatcactggccgagcccactggggctcacaccacgcaggtggga

SEQ ID NO: 39783 - DNA, 1805 bp, Homo sapiens
tcacgatacctttaaaaaatcacatgagtttgtatgtaatcaggccttctagtagagacaaacaggacaaggtgtcatggactgggaagttatggaaattttaaagcacgaaaagtgtgtgtgagtgaagtttgtggagaatggggagaagctcacaagtcccagaagtgctgctccatgcctcaaccagggccctagagggatgggcttggtcatgggcgccatggcctgcatgggtccagggggccccagggaagaggagtggttgggctgctcaagtctttgtttgcagagtccgacctctcaccaccaataccagattctcctggggtagggtttaacacgcagatctgtgactccactcctgagccgggttctctggggatgcaacccttaaatttgcgttttttcatgaccctccctctgatttaagtacggggatactgctgacctggtgctgccttgccaccctttacatgctgtgtcatttgggttaagacatttgacaacttactaatcttctgactatgtgttcccacagggaggtggggaagacagggctccagctaccacaggacgggctctgggtatagccgttccagtcagggacagccgtggagagaccagggaccaggtaagaaggccagtggtcactctgctgggccacctgcatggcactgcctctcaccttgtgcttttgctgataactgccttcctctgtttcagaaaggttgtatagttccagtaaataaacagataaatataccaatgcatctaatttttatcatttagtgaaataaagacaaataatttccatggttgatgctagccctgtctgcatctggccactttattcattttctatcagttcattctgctcaagatccagtttttgtaatttacttgctagaaggtacttgtaaagtttacatgtggaagatccattgttctcatgaaaaaaggacaggttatagtgtttcaccaatagctgcattcaggtaataggattctgatattttccgtgacttggattacagtgtgaggtaggaaatagccccaaccctttgttttttacatatgttgtacagatgctgttttaatgcatgtatcgtgctgaatttaaatacatcgagaacttcacatcagtatttgagctcaaattccgtatagttttgagagccaaactttataaactttgaaattacctaatatttatcatttaatcccttaaaatccaaatcagcctttgatttatgatatctgtgactttcacaacgtctaaaatgtgtagagacttcgcaagctgctcaaattattccctaaaacacagcaagtcttcagtgtgaatccagttgacctttggggtctgtctcgggtggagtctgcatggaggctgcggggccgcacatctgttgagtaccgtgtcctttcctcttgggtctgtacagtcagcaaacattgcgagtccactgtattgctgactgtagatgagaattgatggtgaatgtttttgaaatgcccatccttgagagagagctccatgaatttaatgcccatctttgagagagctccaggaatttagatttacatttgcttgagatgtttccttgaatgagcttaacctgcagaaactcaaccccaccgagtcgtgcagtcactgtcatgtggagcttccagatggccccactgaacacgtgcagtccatcctttcatggtctctactacagtgtaaacataagggtcacttccacttcgtcactaactaaatcatccgagtatttataccagtgcagggcaactgagat

SEQ ID NO: 39784 - DNA, 3456 bp, Homo sapiens
ctgcagacaggtgtgcctgcctgtcacagaggaaactgtaaagagtgtgccatcaggcctcccactgatgggactcatcgccacaggcaacgcactgaaacctttccatcaggcatctggcctggataaccttgagtgtcctttctagctctggaattctgtgactttctattctatttattgaatggtgggtgagacattagtaaagtgtaactcttaggagtcaataaggaaggtagaactatgtcataactcttaggagtgagtgggaaaggtagaactatgtcataactcttaggagtgagtggggaaggtagaactatgtcataactcttaggagtgagtgagaaaggtagaactatgtcataagccttaggagtgagtggggaaggtagaactatgtcataactcttaggagtgagtggggaaggtagaactatgtcataactcttaggagtgagtgagaaaggtagaactatgtcataagccttaggagtgagtggggaaggtagaactatgtcttaactcttcggagtgagtgggaaaggtagaactatgtcataactcttaggagtgagtggggaaggtagaactatgtcataactcttaggagtgagtggggaaggtagaactatgtcataactcttaggagtgagtgagaaaggtagaactacgtcataagccttaggagtgagtggggaaggtagaactatgtcataactcttaggagtgagtggggaaggtagaactatgtcataactcttagaagtgagtgggaaaggtagaactatgtcataacttaggagtgagtgggaaaggtagaactatgtcataacccttaggagtgagtgagaaaggtagaactatgtcataactcttaggagtgagtgggaaaggtagaactatgtcataactcttaggagtgagtgggaaaggtagaactatgtcataactcttaggagtgagtggggaaggtagaactatgtcataactcttaggagtgagtggggaaggtagaactatgtcataactcttaggagtgagtgagaaaggtagaactatgtcataacttaggagtgagtggggaaggtagaactatgtcataactcttagaagtgagtgggaaaggtagaactatgtcataactcttaggagtgagtgagaaaggtagaactatgtcataactcttagtagtgagtggggaaggtagaactatgtcataactcttaggagtgagtgagaaaggtagaactatgtcataacccttaggagtgagtggggaaggtagaactatgtcataactcttaggagtgagtgagaaaggtagaactatgtcataactcttaggagtgagtggggaaggtagaactatgtcataactcttaggagtgagtgagaaaggtagaactatgtcataactcttaggagtgagtggggaaggtagaactatgtcataacccttaggagtgagtgagaaaggtagaactatgtcataacccttaggagtgagtgaggaaggtagaactatgtcataagccttaggagtgagtggggaaggtagaactatgtcataacttaggagtgagtggggaaggtagaactatgtcataactcttagaagtgagtgggaaaggtagaactatgtcataactcttaggagtgagtgaggaaggtagaactatgtcataacccttaggagtgagtgaggaaggtagaactatgtcataagccttaggagtgagtggggaaggtagaactatgtcataacttaggagtgagtggggaaggtagaactatgtcataactcttagaagtgagtgggaaaggtagaactatgtcataactcttaggagtgagtggggaaggtagaactatgtcataactcttaggagtgagtgaggaaggtagaactatgtcataactcttaggagtgagtggggaaggtagaactatgtcataactcttaggagtgagtggggaaggtagaactatgtcataagccttaggagtgagtgagaaaggtagaactatgtcataacccttaggagtgagtggggaaggtagaactatgtcataacccttaggagtgagtgaggaaggtagaactatgtcataacccttaggagtgagtggggaaggtagaactatgtcataactcttaggagtgagtggggaaggtagaactatgtcataagccttaggagtgagtggggaaggtagaactatgtcatttacagatgtatcatcaagaacatgccccatcctgccctgatctcagaaggcaggtggagtgggacctgtttggtactgactcctctgggaatgataagagtcacaggcttttctttatttctttcattttcttccagaggcggcctgctgtggtagcttcagacaggctgactttgtctcaagcgctggttctgccccttcccagtggcctgcccttaggggatccctggaccactgggctgctccctggcttctgatcagtgtggcctgaccggctgcagggacggcacctccacagcaccagcatccaggcagaggggatcgtggccacttcttccaaaaccaagtttttcctttcctggcattaattctaacatttctcttaatatttatgtcaaactattttgttaaagagttttttctgttaaaaataaagcaatgtccgtcctacctcagtatcgctgttcttgcagaatgaagtgaagcaggaacatcaccaaagcctgcaggtgtggcctggcgggagcagagccatctgcttctcccagggctcccccagagcatggcccccaggtcaagtgccaggaaggatgccatgcacattggcttctttctttcatgtgacgacagagactacaggagcatctttaaactagaccaaaagaacccccttccttggattgacaggaagcagctttcttccgattctgttagcagagaacagtgtccagaaatttctcatcctcatgcaaattaaaacagcataatgactttccataggcggaattgtagctagtcatcctcagccctgggtccctgccaggggaaagtctcactcttggaaccctgtgtgcctctgcagcagatccctcggccatccagtaacaggaaccccccagtcgccccggtcttgccagaagtccagaggccaccatggtttcctcgtcctgcctgatggcagctccttggggcaggctgagctaagcctgaggggtctccaagtggcattcagcagctggtgtgtgggtgaggagagagccctcagatggacacaggtttgggggtgacaggacatggggggctggcaggagacagacagaggcagtgtcccatcaggactgagctggagaaggaggccgtccagaagctggcagagaagagaggctctgaggatagaagctgacagaaagggccagggagcagggagggagggagcaaaggccg

SEQ ID NO: 39785 - DNA, 2100 bp, Homo sapiens
cgcttcagtccctcatcatctttgctgtgttcccactgctgagggtgctgtgcacgtcccaggatggacctaaggaggcaggctcagcagacgaaggcccctgtttgtgcgccctcttaaatattaaatattaaatctagtcttgctttaatatttgcttcctgtagattcccgaatccctgagctggtccgcaaggctgtgggggtggcagaggtcctccctagactctgcattttgccaagctttccatagcatgcccagtaatttgcttttaaatctagtacgcacacctgtaagtaccactttagcacaagcttcatttctgacatacatttctttaggatgtcattgacaaatataaataaaaagccaagtaaccaaagtgagttagtagctcttcctgacccagaaaggagcacggaggagatgtgagcagtgggcacaggagcagtgcgggcacgctggccctgctgagtgaagcacgcgtgaccaggagagcagctccacacctgtctctgtcgcctcgttcctaagtcactattaagtgaagtgggctctcccgggctctgcggagcccacagccctccagaaaaaggaggagacagttgggctacatggcgtgaactccaggtgtagggttcccttctcaccacctacaggaccactttgaatttcaggaatgatttggaactcgaaggaatgtttgtcagtctgggtgcaaggcctaagggagcatgttttaccacttctgttctggtcacttagaaacaataaaactgtaatgacctcagcagctggagcctaacaccacttcaaggctgtgccctagtttcataaataggtctttgaagaagatccctgctttattggagtagatcataacagtaacacagaaatcaaagagtggtgatgcgtgtgggtttggggccagaaagtagctctgggagactcttaggttaaaggcaaaattgagatgttaaatgctgagtttgtgtcagatttaagagtttaggaatgagagtgggagaaattaagccgttcttgcaagacagaagcaaggatgctatatttcatttgcattctgccttccatgcggaagtagttacaaaagtgatattagtggtgcctgtgtgtattctaatttcagagattccagtataaagtgtatgttatacacacatgcacacacactgctctcatcaggactggaatctgcttttcagaccaagtaatccaccttttcagttgtaattactgtgagggagtttggggcagcacatttctcctgggttttgcctaccttcaactcctcttttggtatttcttgaagatattaaagtagttcaagtagaaagttgtcactatttccagggcaattgataggtaaaatttcttgtgttagtaaaaaaactaaaaatgcctcttcatgaaagtattcagtcactgccaaaagttgtcaagtttctggagcctgagtgtgtggacaggtagggggtcctggggagcctggcctgaactctctggtccacttcaaaggcctcagagctcagtgcaggcagctgccccgagaacaaaggctgctcaagtgagaaggctttaacctcttccttgctgttgctcagccccgctggaaagagatgacgtgttaaattccacagtccatagctacaatttgcctgtgattttccagattgtcacttctctgtggtgattctgtaggaggcctgccataaaactgctgtgatcatctgtggtaacaagggtgggggcagagtaacaagggtctggaaacctcactttggctgtagccctctcctttcacaccttctgccggagcccacacttttgggggaggggagagacccaggctgcccacggcaggagtgggtcagaggagaggcatggagaccatccccagtcacggcaagtgaaggctcttgccgtcatacaccagaagataactcagagcagggaactctggaagaaaagtgttatttttaaaatgtgaaaaactgtcaccgtttttgctactagtagggaggttctgccccgagtctcttcccaacgttccctgtctatcagaaaggcagacagtagcc

SEQ ID NO: 39786 - DNA, 1048 bp, Homo sapiens
gattactaggcttagaagaatatgtaccaggcctggcctggtggctcacacctgtaatcccagcattttgggaggccgaggcaggcagatcagttgagttcaggagttcaagaccagcctggccaacatggtgaaacctcgtctttactaaaaatacaaaaattagctggacatggtggtgcatgcctgtaatcccagttacatgggaggctgaggcaggacaatcattcgaacccaggagatggaggttgcagtgagccaagatcgtgccactgtactccagcctgggcgacacagcaagactccgtctcaaaaaaaaaaagaatatataccaatagtccattcagtcagacagcttaatcaggtataggttaattctcaggctagtatataagtttgattaaatttcctgaccacaattgtcagctagagaatatttcaatttaaggaggtaagatatgattaaaagttaaactgtcagtattggatcttagaagtaaatgattattaggactgtaatagtaattattaggactgtaaaagtaaaggattattatctgcattagatatcattatatctaatgatatagagactgcagacataactacagggctctttttcttaaatcagaaaatccagattcaatagaaatagggtaaagtgataggaggacaaatagccttccatccagtggttatcaactgacgactacaagtcggcctcacttgctttaattattctattctatcctttgatgctgcttgaagaactgtgttttacctcttgactagtttgtttattcagtatttttccttgtacaggtcctcattttatctaaaagcacacaaagctcttgatttctaaactttttgcaattttccttctagttatgagccagagttatttcctggtttaatctacagaatgatcaaacccagaattgttctccttatttttgtttctggaaaagttgtattaacaggtaagttgtaacaggaagtagtatctgaaagtttgtaagtgttttgagtatggcattttctcagt

SEQ ID NO: 39787 - DNA, 1088 bp, Homo sapiens
ctgagggacttggctgaggttacacagctagtaagtggtaaaaatgagtgagtccttcaggtgtagaagctggtgccctatccacaggctgccaactctctgcagtaacttttttttgcttgttttgcagtttttttctcatggactatcaggtggacatttgtgggttcttaggttttattgttagagtggtttgttgtttttaattgtaaaagtacatcttcagctgactcaggaataaaatcagaaaggggaggtccttccttcctttctcttctgcctctttccccaagataacgaccagattagtgggtatcttctaagccctgttctgtctatcttctgggcatggcatttgatcccatttttggaaaaaagaaataatacattcaattttatagctttcccttttttcagtcaatatatcataaacctatttccatgattgggaatctaggatactcttcttaggtaccttcacttactgagctattcctgtaattatggtcatttacatgacctctagtttttcaatatcatcaacagcgctgcagggaacatccttgtatgtgtatttttcggatgagtgcaggtattcatgtagtaaactttcctagaagaggaactaaagactatacattctgagttttaatcagttgataccagattgcagtccaaagagaacggtgcatgaaatgcccttttcttgcattttccaatcattagtgatgccaataatgtatggattaattggaaagacatcattccaatattatctcctatctaagaaagaagtatctcttcatgtatgtaggtcttatgttcctcagtaaagttttgtactttttttcacacagggcttttatatttcataagtattacttccttaattcctaagtatagtatcatttctgttttattactggaagtttttcctaacactttaaaagttattgttgataatatttttcttattccgagtttactgaactcctattactgctgatttagttgattgcattgaaagttctaggcatgtaatcatctgtaaatagtaattttatgttttcctttccaacatttatttt

SEQ ID NO: 39788 - DNA, 1031 bp, Homo sapiens
gcacactctgctgcacccaacagccgtcatggggtctgctgttggcccgtggccatcacggtctaggactacctcttgaagctgtcaggactcctggatctaagtctcctcctgcccacgaattaggaagtttgaataggaggacaggatgtggtgagcgtaatatctggaggaaaaagcagattggaaccgagacatctctggtttgctgatatttcactcttctagaacaagcagtgttaacttacatttttggcaaaaaataccagagaaaggatgctcataacttgaatttaatcccaaaaaacattaaacacaattgaggcacattctacaaaatacccaaccaatactcttcagaattatcaaggtcacagaagacagagacttgaggaactaccccagattggagacgtgacaattaaatgcaatgtgtggtcctggattggatcttgaaccagaaaaaggacgtcagtgagccaaccggtgaaattttcgtaagatctgtaaattagctcacaatagtatatcaatgttaatttcctgcttttgatcattgtgttgtggctatttgagatattaatacttggagaagctgggagaggacaaggaatatgggaattcttcattctatttttaaaacatttttatgtctgaaattcttttaaaatgaaaaattgtgttttaatttttaaaaaagaatagatgtagaatagaaaactttcatagcagtgtatgttggtgaggaattaaaaaatcagtaggagtaactaacatggaaggggattggtgaagcacacaaaaaggaaagtgaatagaaaatccaaactaaggggtaaaaatattttctaatggattagcacagtaacatcaatgaactaatgttttcagatgaaatagatcctcagattagatcccagccccccccaaaaaaattcatctatgtggtatttctaaatatgtgctatttctgggtcctaaataaaaggactcaaaggttgaaagcaaaagaatgccagccctaccccact

SEQ ID NO: 39789 - DNA, 1087 bp, Homo sapiens
ttaaaaattgaactctgcacagaatatagaaacccagctgtgagaagcactggagagccgtcaaaagccgacagactggagggggcgcttgaacccttgcaggaggggagcttgcaccagccagatctgagggccatccacgactgcagcaggtgcccagcactcctgcagaaggcacagagggatgcagccaaagaaacactcgatggaaacttgaatctaaaggaaggaataaaaagaatcagaaatggttgatatgtgggaaaatagaaaagacaaactttttgggttttgacttttgattttttaaaagatgattaaatatagaaaaatttctatatttattaagttgaattcacaatcaaagacctttctttgtggaaaattccaagtccaaatggttttactgataagttctatgtaacatttaaggaataaataataccaattttatacaaactttatcagaaaatataataggaagcatattcaatcttattttatgaaacctgcataaccccaaatcaaaaatgtgacaagaacattacaaggagagaaaattacagactagcgtccctcatgaacgttggaacaaaaaattgtaacaattatttttagcagatcaaagcactattgtccatgcagtggaacactaattcattatgactaagtagggcttcttttttttaatgtttgaaatttttgttttatttatttttattttatttcattttcctttaagttctgggacacatgtgcagagcgtgcaggtttcttacatagatacagatgtgccgtggtgtttggtagtcatgggacgaccagaggcaggagccatgctgacctcttcacaagatgacacctctacgtaattacagtcattgccgagtctggtggttcttccccatacgtaaatgtcctaatgaatgaccgaataaggattataagacatttttctttccactcagcatatattgctcttacttttctatcaataaaaaaataaatccataagcagagctaccccctctgtttaacataatcaaacttcaagttctcctccctttgcggctttttcagttttggt

SEQ ID NO: 39790 - DNA, 1044 bp, Homo sapiens
tttcaaatgaattagttaatatgaagaaacagaacatgattttaaatggttcctttttaattgtagtttactggctattacaatttagtatttataatgcctcttgctctgtgtacagaaatgagtggttagtattttcaaaaatgaatgatatggttaggctttctgtccctacccaaatctcctcttgatttgtaatccccataatccccacgtgtcaagggagagaccaggtggaggtcattgaatcgtagtggccgtttcccccatgctcttctcatgatagtaagttctaatgggatctaatggttttataaggggctctcttccccttccactgggtacttctccttctggccaccttctccttcttcttgtgaagaagatgccttgcttcccctttgccttccaccaagactgtaagtttcctgagggctccccagccatgcataacataattgagtcaattaaacttctttcttttataaattacctaatcttgggcagttctttatagcagtatgagaacggactaatacaatgacctgtagtccatatatggagattattttttctcctgcaaaatagctatgctaaaagagatctttgttactgaaaatatataaaagtcacgagtttttgtaggaaaattgagaagtgcttttattatagtctgaagtatttattgttaacattattttactttttccatcaccctcaaataggcaactcatactcttcattatgtgtttataggttagcatggcctcattgaaagaactagatcaaagactctttgaaaattacatcgagttgaaagcagatcccatcgttggctccttagaacctggaatttatgcaggatattttgattggaaggactgcctgcctccaacaggtaagtaataaagtttcttgagtaatagatgtggatatacttttatcaattgatacttgcttgaattcttttcattttattctcatttttctcatatctactgagagtgagagattaatttgattttaactttttgtttgcttaaa

SEQ ID NO: 39791 - DNA, 1035 bp, Homo sapiens
tttataaatggtggttccagttcgtgaactacattgggatttttttttcaaagagtgaaaatgtcaaagtgggcggccctgtcttgttttcctgcctttttgtaaagattaatcatcctgatgagaaatgtcgtgacttaagcctttggggccaaatgtctagtttatttccagaaatttttgtgttaagaattgcaaggtgctatcttgcagtaaaaaagtggctatttgtagaaggtggttgctttgtttttatataacaacaatgacatgaatatatttattggagaaatgttatttatcattttaaaatatgtgaaatgattaggaattgcatgtaaaagaagcaagtttggttttctctaggttttttgcagtactaagtaggaactgttgcttcactttatatcactaagaagtagaattaaattaattcttaaaaagattttttcatatccttccttgtctttgtccagatcattttgagaccaagataatacaaaggatctggagatttagcagtataaatggtaggctctttcccactcagaatttggatttttttttcatcgaccgtcttgaatattttgaaattcagttgtgtttagaatgaatagatagtaaactagatttagatgataacatttgcactgattttattcatttgtgaatctgttaatttcatgattccaaccaagtaaagtctatttctggcatcaaagggaaaggtctgctgactctgccactgtttttcatagttttccctccaaaagacaaataattctaggggcatcgatcccagaagagtcacagggcacaggtcacagtggatggcttattcattccctctctgtttccgcacttgaagatgagggtctctcatagggggacctcatgtcactgggtgtgagaccttctctcagactcctctggtgtgagccagggcaggccaagtgtttcctccggggatatttcctcctgctttcttactggtacttacgccaggaaaggcattaaacggccagtttttcattc

SEQ ID NO: 39792 - DNA, 1096 bp, Homo sapiens
attctggttatgcacagaaagagcatgcagagtatgtgatggaaagtgttttttgccaaaggtttagtcaaaggatctaactcaaggctctagattagtcaaagttgttccagagaaggcccgcctgcctgcgggagcacaggttgggtgcctcggtgaaccgcaccagcagcaaaagggcaattcctggaattttatttaccaggtagtcttgaactgtgaaaggacactgtgtttatcagcatttgtgtctggtagttttcgtaagaaattactttaggtggacagaaccctggagaatgtagaagtaactggcttgtaccccttcctcttggcaacactgaccgtgtcctaaggtggagtcctccaccctcagtgaccctcactccccattagagggagattattccttgttttcttctgcaaacacaagcaattcttaatgccctaaggtatttaaaggagcccatcatacagatatatggcagtgtaattctgttccaggttataaaaatttataaactactttataatagtttctacattttaaatgtaattagttattaaaaatattcctgtagccttttcttgtatacaaagtattaagtaaacaatatagtagaacacttttcataagcaacactgatcccagttcccagctgatcctagttaatggaattttctcaatctgtttttccatccaagctgttaagtcttaaaggaaatatttgattctttagtatattgcatgtaattataagcaaatagtagagttgcaggattttactgtgtttctctttatgttataatattgggaaagaagcagccaagaaaagcaaagcattggatattgacgttaaagagcagagattataattaaacttgacaagtgttaatcagctattctctctggcaccataaaggtgattttctaaacatttgttttgcttttaggaacagcgccttttgatagtcctaagtaattgctgctatctagaacgtcacaccttcctaaatatcgcagaacattttgaaaagcacaacttccagggaatagaaaaaatcacacaggtaagcgagttcatgtaaaacgcac

SEQ ID NO: 39793 - DNA, 1032 bp, Homo sapiens
gtattccattagtagcttttgttcatccttaagtttttatgccattgtcggttttgtttcttcctgtgtgtccccacaggtattttaattagaacttgacaagaagtgtgtctggcataacacctgccaatagcaaccttggtatgtttagtacagttttttttctttattctgcaaaaatgtttctagcaccagacttcattttgccatggccttccctctgtcattcccttctgttcccttgaagtgggagtgacctgtgggttgttagcagatactgctcacgctggtcctcctgggtggtggtgaggttcctggagctgtttgtagtgtgaaaggccttcctgagctccttggtgcctctgggcacctcctttgttttggtggcgatttccctgaatgccccttgagcttgtgcatttagtgacctgtataatctcttgtttttagcggcaagtccagcattatcacttgcccctttcaagaacaactgtgggtcaaaactgtgtgagtgaatattcgttatggtacactggggtaaaaagccgaaacagactaaattacgcatgttcctccctgcgctctgtcttatttgtcttccttcccctgttccttttattgctgctgcttaactctgtgtggcttgagccgtaattgattttttgacacattctgttgttagtgtctattgatgtatgaagataattcaggtaggtatcattttctgggactcagttatctaagtgagaatcattcctgttactcttctgtgtaatagttgcaattattttactgtttgtttattttctttagtataatttgggaagaaaaggaaccacagattacgtaaccagtttaaatataatttatatatgatttgtctactctgataaaagtttggtaaaataagaaatagaaactaaatgtttgaagggctctctatcaatttaaaatattaatgcatcttacactaacccttcctcttctcctactttagtaaatataatcctactcagaggtcagcatgtgagc

SEQ ID NO: 39794 - DNA, 1047 bp, Homo sapiens
attcgtgtctggggtctcctgaacagacactgcagtggatcagtagcttcaaggggggactgggaacgaacaggtgagacagatagataaatatgtatgtatacacatacatacacacacacacacacacacacacacacccacacccacatatacttttcaaacctctactgtctctgctttattttggtttgttttccctgaaattctctattaagattttcatgttttattagcattgcattctaatttttaaatcatttaaaattcatgttataggccctttcgttatctgtttagtatttgtatgttctgtgtgatttttttaacattgattcttcagagatatcttttttgtgtttttaaaatgtgtattgtaattttcctccttagtagtttttagtaaatttttgttttcatagtctctgttctcatagtattgtgaacagagaatatgtttcttaatatatatttaagtttttgtaagtatgccaaaaattaaaaaggacggacggatgtggtttcttcagggtccactatttgatatagtatcaatgcctgattgattatattatttaaatatagcttatttatattaaacatgacagacaaatctctttctttaatttggattctgtcggcttttcttcatatgtaaagcatgtatttactttgtcacttttgatggtttagattctcttgatgataatatatttataagtagtccccaagattaccctcagtttggtgttttgctagaaggactcacagaactcagtgaaagctgttgtactcagacttatggttcattacagggaaattacaggttatagtcagccagggatagagattcatggagcaggtctaggaaattttcatccatggagcttccagtagtctcccagtggaattgcaggcagcactgactttcctggtaacagtccgtgacacacacatggagtacttgcagccaaggaagctccccaaaccttgttgtccagatccggagtctgtagtacggccccgtcacatggacatggtcaaggc

SEQ ID NO: 39795 - DNA, 1044 bp, Homo sapiens
acaggcctgtgtcttctcctggcttggggctagctgttttttagaaggtttaaatctgaccttacactgccatctaatggaaaacatatctgttcagggtggcaggaattgtccgtgactgaaactgtgtgtttcgattcctcgatgaaaacatttcgtgagtttacacagtagggtctctgtcactttcagtcctaactctgtgctagtggatttaaaatgcaggcttggtttgaagtactcagagcgtatgttgctttttctgatgtgtctgagccgggacttcacttggaaatgtagaatccgaaatccagttattctgaacaaacgtaagagtttttactccgtgcttcattagctgtgttgatatactacctcttcctttcctgttactgttattaagggcattagcaattctcttcatttgaaagcagctcccctttcgcactctcctgcattgtcatctttacggatttgtagttgtgatcgtatttcccacctaaaaccctctggttctctgtttgacagtagaagtaccaggttcaaatctcgactgtttacatataacctctcagaggccatttcctcatctggaacatggaaatatttaactcagttattgtcatgggaatcaaataatacttaggaaattagtctgtaagatataaataagtataaataataaaaataatagcaaataacatttttgagcatttatcatgtgtcagaaactgctaggcttccacaagcattatctactctgatcttcaaaacattcctaagaggaaggtatggtgatccattcataatggaataacttctcgagattatacaggtggattgagcaaacatcgagattgaacccagagcctgtgctcttagccactgcttattactgctgcttcccgttgggaatactgagatgagccacctgtacttttgcagctgtgttacccatggagcttcatggactctggcattggtattcattttttgttttttctaactcatttatttcacatttttgaggtgtttgcataaaag

SEQ ID NO: 39796 - DNA, 1035 bp, Homo sapiens
ttatgcaacagaacattttcttatgtgatgcgagttgtggcatcatttttgagaccaatcattcagagattaaagagaaaggaattgaatattttcagtgtagacactatgagtttttaaaagtcaaaaattattacagattttcagactggaaatgaaaggtcactgaagcattctgtggatttaatttgccatattgaaaagtattgatcactttaacctatgtgaacagaaagctgtttgaagtcctccttcccttttttttttttaaattaaaaaaagtaaagagttcttcagaccaaaaatgagaaaaccacagtggattatcctcagctgtgattggtccatttcttgctgtgacctcagtaggagtcattattgtaaaatgccaaacacttattttcgtccctggctctgcctaaatttttggcccaaggcagaatccaacagatagtactgccaccagaaggggatcctgcacagggacatacagccaaagaacctgcttgtgtggatgctgaactgaacctcacgtttgcagactttggctttagcaacgagctcacctttggcagcagggtagataacttctgtgtcagtgcttcttacactgtcctggaactcttctaggcaacgtacgcaaaagtacgatggctctgagatggatgttggcagcctgggagtcattctctgtgcagtggtcggtgatcatcaggtttctgtcttacaatggacagaactatagcagagcttccaaagtaggtatatatcacattccctttacatgtctatggagtatgaacacctaaataaattcctgctcccaaaccccagtaagagaggcactgcagaggaaatcatgagggacccatggataaatgtgggctatgaagaggaactaaaactacatccagccactccctgactccagggatccctggcacactgagttaatgctgtccttgggctacatgtaagggaaattctggactcattgatgggctacaggacacctcagctggagggccacaccat

SEQ ID NO: 39797 - DNA, 1085 bp, Homo sapiens
tgggaaaccagtattgagttgctttaaccaatacagcatatccagctttgaacaaaaaattacacggcagaaatgaaagacaaaaaccacattttgaagaaacagagcaagcattagaaccagattcaggtatggtggaggatgttagaatgatcaaaccagcaatttaaaacaactatgattatatgctaagggtcctaatgggaaaagtggggaacatgcagcagataagtaatgtgcacagagagatggaaactttaagaaggaatgaaaaagaaatggtagaaataacactaacagaagagaagagtgccattgatgagcacatcagtaggccagacatagctgaggaaagaatcagtgaactggaagaaacatcaatagagtcttcagaaactataatagagaaaaaaggtggaagaaaatggaatggaacagccaagaattgtgggacagttacacaaagtataatgtatgtatagtgggaaccaagaaggggaaggaaaaaaataacagaagaaatatttgccgtaataatggctgagagttttttgtaattaatgatagtcccagatctggaaagctcagagaacagtaggcaagcaagtaccaaaaaataaataaataaataaaaaataaaaaatctacacttagcatattgtattcaaactgtagaaaaatataaaaaatactgaaggatactgaaggaagctggggttggggatgagatggacaccttacataagggagacaagaatggaaattacatcagactttttttcagcaaccatgcaaacaagtaaggaaaaaagacccacctacatagaattccgtatccagtgaaattatccttcaaacgtgaaggagaaataaactttttccagacgaaattgaggggatttattgccattagatttgccttaactattaaaagaagttaaaatgttaaaagttgttctttagggagaagcaaaatgatataggtcaaatacttggatctgaaaaattcaaggatgaattttagagaaggaataaatgcagtggcttctgggttccctcccctcaggtcctggcatctggcacca

SEQ ID NO: 39798 - DNA, 1021 bp, Homo sapiens
ggttatcacagcaccacttgggagcctgatgtcacaggaatggttattgatttagcccctcctataggctatggaatatgtgtctcctgcggacagactttgtctctttttaaatttatttttggttcatgggtgtattcccagcaccaagaacagcgaacagcacatagtacacttagtaggctcttaattaatccttactgagtgagaacaaacgaacggagaagctgggagtacagaggccagttaggtggataaaggaaacgttccaggagagagataataaattaaggcctcaactagcttggttcttaggagaaggaattacaaagatcctcttttaggccgggagcggtggctcatgcctgtaatctcagcactttgggaggccaaggaaggtggatcacccaaggtcaggggttcaagaccagcttgccaacatggtgaagccccgtctctactaaaaatacaaaaattatccgggtatggtggcgggagcctgtaatcccagttactcgggaggctgagacagaagaatcgcttgaacctggaggcagaggttgcagtgagccgagatcacaccattgcactctagcctgggcaacacgagtgaaattccgtctcaaaaaaataaaaaagaataaattaaaaaacaaaaaataaaaaaagatcctcttttctctgcccggatagtccacatttttgtatttccttttacttgtgtatttcaaacacttcctcctttaggtaatcctccccaactacacccccaaacttggtttctcttactcctatccatatatataatgagtatgtgtgtaagtatatatatagacacacatacatacatatgtacatatttgtatataattgtttaaaaacattttgtaatgaaaatatcaaacatgaaatgcaacagaaagactagcacaatgaattccatgtacccttcacccattttccacaaaatgatcaatgtatgatccatcttctttcatccatagcccacttacttctcccc

SEQ ID NO: 39799 - DNA, 1045 bp, Homo sapiens
taagtgtaagttaccttggttaacataatttaattatctaaccacccttataaggtaggttctataattattcccattttgtaggttaggaaataaaagcacaggaaagttaagtaacttgacaaagaccacacacctgggtaagtggcggagctgtgatttggacccaggcaatcagaagccttgcttttaaccaccaaccgttgctctcctgaatagctgggcatcctatttgactattttcaaacaccagcaggactccacagaggtgcgacgtagaagtgctgaagatcatagatactgtttttttccttttatatgtattaaattccatatacttccctataatcccttaagccctatccaacaacagcttggttattatctggaatagttcagtcttagtgatctttctctctgagtgtaaacatcaaatcttgtgcttcatctggtgttctcaagggaagcagtgcttcaggagagaacttgctgagaaagagaatgcgagattcaggagctattgttacccttgtgggaatcccactgtcattgttagaggcctcggtattgcaattccttattcagctctcccaggtatgaaaacacaaggcagccattaatagatgcctggccactgcctggaggccccacgtgaacatccaggacccgtttcttgacccatctccttgccccccacatcctgagctctgtacccctcagaaaggagtctaagcacactaaagctacatcttcagctctggtggcttctccctaaatctgtaggaagcctttgaggttgaatgtttgttttgctcttttgaatcctaagaatagtaagtggaagaagtcagcaagatatctaaagaatgctcatttatttaagttagcttaattacctccattaaacttaattgtcataattgttgcttcactgtcattattgtttttcctttataggaaaggcattgtgagctttgtgcagctgtttacatggtgtttgatcctatttattttctcattgcttacttcctgctcttcagggatt

SEQ ID NO: 39800 - DNA, 1029 bp, Homo sapiens
gctgaatatctaaatccactcgataatggtgtctgcaggctttgatcctcagtgccagaattgtgagttcaaatgaaatctgaggatggaattaactccaggcattaagaagggcagaagtgcagtttctttgttgaaggaggccacccactcgtaagtttaccttgctagcctgtagcgctccaggcaatctgtcctttttgagcaggtgctgtggaatactatctcctagataaacccttgattgtgggctttgagttctggcgacccatgtttaaagggatcacgccagcccatcaatggttaaccgtggagaaatgaaccttcccagaggaggttatttgttctagatgttgccgttctggtgacttcaaggaaatggtgtgtgatcgtgtttgtatgtgtgtggcttctcctttcttaaacacatagattacagtgtgattacattgtgatttggaaatcggtgattctagattgtgctgttgtgctgacagagggaggactggattacacaatgatgatattgtaggtggtgcaaccctcaggcgctcggccagcctgcggcccaggtgcatgctgtttggaaagatctgcgtgcttgtcctattgtcatttattcacaccagtgcacagctgtgataatgaggcacatcgccccatgcaaatctatagagtaagtttcatgataaggctagctctttttaggaaatcggtggcaggttttgatagaaccccttagaggcctgtatgtttctagggcttaaattttgcatcctggaagttttagctataaatactgcatagactggtgaggtctacagtaagccaattctaccagtgtttaggccacgggacagtgatttccttatgcaactttctttaggttgttgctgaaacagggataatactggcccccaccttgatgtttgtttcaaggaaaaccttgtctttcatgggagtgtgttattgcttctcccaagggacactttccgtggtaaagaggaacagcaccgtggttgttagggc

SEQ ID NO: 39801 - DNA, 1030 bp, Homo sapiens
ctcctaataccaccacattaggggtgaggatttcaacagaagaattgtagggaaacacacacgttcagtcctgtgcaccctccttgggaaacttcttctaggttgggttcagtgtctctcctctgcacttccataggactcgtgctggcgtatgtgcttattacactgtaatagcagatatttgcctgctttccttactggacagtgacctctttaaggataaactgagcactttgtgtctgtgagagagtatgtgtgaatacacagttctgtatgtgtgtgtgtgagccacacagggtctgactccatgaaagatttttgaatgaataaatgaatgaaaagtgttacgagattgatctactcgaagtagcctaactacttcgtgattcactctgcatcattataacttgaaatacgaagtcatttgggaacatgcttaaagccaaaacatattatttagtcacaagggattctgagaaaagaggagtcctacagctatggaggaactatattcagcaagtctgttgatctgttgttgaaggatcaggtttctttttggtaatgaacgtgttcagtgcaatatctgtcttatgttaagagcaaccatgtaatgattaaaatgaataaccttcatgcttctggagctgtgctcaaccagttctgtcaaaatacaaccagtgagtctgctggttaaatttagagtggaacatgaggaataagtcaagagagagggaaatgtctccaaattaattgttgtggtaagttcccggcagacagaaactggaggcttattttgcttagcaagcctcacagtgaaagggattaattctgtgaagcaccgggtcactgtgagagtttagtcctcacagcaagaagaggcctgggtatgtggatggtgtttgtctatgtggacatgccgtcatcctaactaacgggctgtctaggcaggctggtgttgggtcaggacagtgggtccttctgtgggtgctgatcaaatttgattacttaaatagtttcattaaatatggaa

SEQ ID NO: 39802 - DNA, 1059 bp, Homo sapiens
acttttccatgattccatctcccatttggcaagggcccctgtacttccagatttctcctgtgtgagcacctagaggtcctggcagacatcagagagggctggggtcaaggtgctgaggagctgtacctacaaagaactggtcacagcagaggctggaatgagagttgggctgaggttacaaccagatgaggaagattagggtgagaagtaggctcaggctagaatgaggtgggctgaggctagaatgaattgtggtagttcccacagagaggttagatatttccttgggggaggggaaacaaatgtcagcatacatctgtttaattgaaagcatctcacagttttaccgacttcaatttatattgatagctgagtaaagaagagagtgttggcattaatagtgctgcttagcagctccctccctggcattccatttccatgtgttaagggtttagtgtggatctggctgtggcactggaagcagtgtgggatcccatggggaatgcacaattcagcagtaaccggtttgagggctgcagggtttaccctgatgctgatgtcaattatagcaaattgtaggtccttttcgatgttctctttatcttttactatttttaaaagccatttaaggattgtatgtaagcaatggaatattattcagccataaaaaagaataaaaccagttgaatacaggttaacttgtacaagttcctgtgatacagtatcacattttcttcatccattcatccactgaggaatacctaggttgattccaaatcttggctatcgtgagtaatgctgcaatgaacacgggagtgcagatagctctttgacatgctgatttcctttcctttgcatagatacccagtagtggcattgctggatcacattttaaatttttattgaaatttaaaaattgttctatttttaattttttgaggaacctccatgctattttccataagggctgcactaatttacattcccactgatggtgtatgagagagttccttttttctctgcatccttcccagcatttgttactttttgtctttccga

SEQ ID NO: 39803 - DNA, 1033 bp, Homo sapiens
aaagtttcccagaagtgcttggatatttctgccccttaattcccattccttggggagtacattgatgggttaataaaaaatgcctgcaggtggagcttgaccaaacacttgtaggtaagaaacacctattagcttattttcccccttgccctttaatttccatggagataagtgaataaactatggcaaaagataagttcatatttccatgatcgtatgacctccctgaagtggtgattttaggaagatagtgcatgtatctctgggcacaaagtaacttaattaactgtggaaactatctgcaaatttaacgctttccataatttgatagtgcttcactgacccagttcctaaacactaatcttgggaagaaaataatttaattcctaaaatacctaaggtgactccctgtggaaatattgatgacttgccctatgcattagaagatcacgcaggctcccagcccaaagggactacagaacaatcttgatcacatccacccagcaacctggaaacagctttgaatttcttgtcgtgttaacctctggatctgaagagagggtaaacttaaaattaccttcccatggggacctgggactctggatgaatctacagtacaatgctgtgaagaactgaagagcctcaggcttagagaccaggctaatgttgagagtcccagggcaaaatgcatggctctgaatccttgcagagtctccctaggggcatggagagggccctgacttggggctcgaggtcaggtggcagtgaagggcctctacagcgataaagcccagctgcctctttacctttcctcatagtgaaaatacatgggaagaaaaggagtgctttgtccaactctgttctagcccatttcatggtctggttgattcttttggtagatgctgaacactggaaaaatcctgcaaggattgaaggtgagtgtggaagtagacggagaaaacttaggcatttttacgtgtctgtatttttgcttctttccaaaaatgttttaatagggtcaggctcatttgtt

SEQ ID NO: 39804 - DNA, 1065 bp, Homo sapiens
ggagtcacccttggcttacgtgcagtgaggactttatcccagggtggtttgcatatagcctaagaaaaagtgtggacgaaaccaaccctagagacttccttgttttcatttataaaagaagcaacaagttagtgtttgtgaagttgggtaaaattacttaagttttaaaatgtgctgctaactgtctccattgaaacaggtaacggccttctactcaaaagaatgaggaggtttcttctctcttcctttcctttcctttctccttccctcctccctcctttaaacctttatgctttccttccctcctttgttttctcctcctttttctcttttgtattcttccccaaatagtaaactatgtttgtcttaatagtaaagtaatgcacattaatgataaaaatgacttctgccaagtagaatacaagagtgtaaggtaaaagataaaatgtttttccaaagataaaagacctctccagctttaccagatacacagaggtaactgcaatttaagtctttcttaaaatctttctgaaaatttcctctgcacgtgcaaactttcacacagacggatatatatctatttaaccttcactgcaaatggggtcacactcgatgtattgtccgcagcacacttctcctcactcaacagtgtatctcagaacctttccacaagagcataagaatccacccatgcttaatagtccattgtgtggtttgtatcataatgaatttaaccagtttcttaaattgatattagcaagttttctccccccatttggggagattacaaacaatacagcaagacgtgtcctggtacccttgcactctttgcacagatgagagaacaaacccttaggctgaattcttagcaatgaaattgctgggtcaaagggtatgtaaattttacattttaatagatattgccaaattgccctgtgaaaaagttatatcaatttacaaccctatcaacattatatgaactgcctatttcctcaaaacctcaccaactccatgtgctatgaaactcttaaatctttgccaataggcaataaatggcaaatgatt

SEQ ID NO: 39805 - DNA, 1048 bp, Homo sapiens
gtgacagttttcccaatgtatttattgcttatatgaaggggagaatttttggaggtcattactgccattcacagtgctatctgcattgtttttaacagtgaaaacctgataacaagaagaacatttgtaccatggaatgttgtgaaactactcagaagaaagagttttagttgtctcttgacatggaggagtgtggcaatgttttaaatgagaaaaattatatatatatagagagagtgagcacataaatgtgggtatctatgtctctatctatccatctatcttcaattttcctaaaattataacaactgaaagctcctatgtgtctatattttcctttgagtatggggacaggtgtataaggcaaatcctggggtgtcaagttggttgtagtgagattttgggaataaatggggagaggatgtgtggaaaagcatattagctttttctttattatctttgcatagtttcagagattgtggtgaacatgtgttgcatttgttatttttgaaggtgacatcttaagaaatatttatgggggacaaaaccatccattattctacaatcctcaagaattttacatttaaagttttctctttcttctttgctttctacagccgtataaatatactttcatagtcacagcagagatacattagtattctttttcatgtgaaccaaactatttcatagtttaaaaaattaaatgttgcactggctctccatgtttcctaggactattttttagactcaagagagaagagttgttcagtggatgccaaaacatgcagctgtgcttatgataaagcggtgatggctgaaacaattggcagggcctcctacagccattgcttcctgccaagcacaagccttcaggatgtgatgaaagggcagggagagctttgcaggcaggctcactgctgtgttgtggaagtccttttggattcttaagagacattctattgtcctgtgtattcagcctcaagtggccactctaaaatgtttagtcacccaagactttgaagagctctttactcttgagtggagg

SEQ ID NO: 39806 - DNA, 1014 bp, Homo sapiens
atatctactaagttcccatcatggtaactgatgatacaaagccagaagtttgaatttaaattttaaggagctatgaaaaagggagagtggcccttggatctcaagagagaacagctgaccactttaagaatttcaggtgcagcacacgtgggcacacattcaggcaggtccacgtactggtagtggtgacaggaggacttcctttttggaaggcttctattttacagtgagagtgaagagctgggtatggaggtttaagaaaagaataggtatgaagtggtcttatttcttgttttttcaaattactcaacccatattgtgttgatctaaatggacatttcaagatacagatactgtaaacaaaaagggcacaaaatctgtaatgcattagctagataaagggttaatacatccagtgtatgaagagctctcacacatcattaagaaaaagacaaaaacctaatagaaaaataggcaaagaatacgatttgggaattcatagttggagaaatccagattatacataaatacgaaaagaagtgcaatgaaagagggaaatgcagtttaagtaataatgatattgttttcacccatatgcttggcaaaaattaaacactgtgggacagacagaattcagagaaataaaattttcaatagacttttgttgtgagtgtgaattggaatatcacttttggaaaataaccttgcaatatctaaaattcagggaaaaaaacgccttagaactttgacacagccatctcacatttgggaatatatccttgagaaagaaaatctccaatttataacaatacatgtacaaaagtgtttatttctgcatttttccttttattgagatacagttcacattccatagaattcacccatttagaatatacatttatatattatataaatgtatttagaatatacatttatatattatataaatgtatttagaatatacatttatatgttatataaatgtatttagaatatacatttatatgttatata

SEQ ID NO: 39807 - DNA, 2049 bp, Homo sapiens
ttctctagggctccactgcaaagagggagctctgggagagggagaaggagaggggatgtttcccttggttggacctcgaggttggttcctccaggtatatcagattcctttgcagcactgggggtccagccacagacagccggtctgcattcgaggagtcttctgcccccgaaatcccatccggcagaacgtgaaagtgcagtggaaagaaaactcgactgcgcagctcgcaagggcgcctcgcgggttcctagcggacgtggccgaccgcaaagccgccaccgcgtttgcttatttcaggcgggactttctttctctccatcctatgttccctttgcaaaagatgcaggctctgggccgccctgtgggaggcggcgggacagcggaggaccctcaccttccacgcgcgccacagcgtggcaggagcccggcggccggcgactgtcttccccccgagtacgccaggacaccagggggcccggcacccctactctaccctgtaggctcgcagcctggctctgaaagtggaacctgcagtatgaaatactaagcacgtcaacgcttttcccagttcatttttttttttctgtgctttccaccctccctcctgctccagaataccctgcacttaccacctacgtgatctggaacaagttactttgtttctgcacctcggttttttgacttctacgattgggatcattataatgcctaacagtgttgctgggaggattaaacgaattaatacaagccaagctcttagaaccgcgtgcggcacgtgggaagcgctctataaacgtcggccctgaaactgacggtgcagagtcctctgaactcggtcccgcgtgggccggcgcgcccctacggctttccccggggtggtttcggccgtggcccgcagagcttggggagaattgggtccctgcgcctgtcccagccccaaccaaactcctgtgctttcaggatttggttaagaattgagttaggcacggagcagggagaaagtacgaaaagtcggggcaggaccccggagccgccggcttaagccgggagcgcggcggagcgaagcaggtgcacgcgggctggagcgcgtggctgccgcggcgccggccgcagccggggtcctgagtgctgtcgcctgtctagttctccaagaggggcctggtgggcggtgtcggactcagcgctgcttctccaggccccggccgcgccacccccgccggctccatgccccgaattgctgggggtgcggagtgctttctgcagctgggcgcagtggcgaccccggtgtgggagaacgccttccgcgaggggtggcaccgagggcggcgtctagaagctgcaggtggaaagcagggaggcaatttctgttttagcgtcttctcttccatgtccgacccttagccaggttcttccccgggtgggacttgtctccaaattttgcttggaaaaagcaggcggtaaacggtcgcgtttcggcggtcgtcttttgcttcgaggccggcgcgggcctctccaggactcgcgaggcggcacagggcagggaagggcaggctgacctcaccgtgggcgagaccggccccggcagcggcggccgccgggcgcgaggcgcgaaacctcaggcagcgcagccgccgccgggcaccgcgggcttggacggccttcagaaaggggtccggacgcggccgctccgccgagcgaggagggcggagagggaggggaagtgacctcttgaacctcatcaaacgcaaatgttataagaagcttgttaaggaaagaaaagcggaagggcagggaaatggagaaacgtggagtccacctgaggcttgaatggcctttttagagttccaggcccctgggatttgcagacttctctgcggtagaccgactattggtgatggactttgcattttcccgcaggagggtgaagctgccggccgacttcctccaatatgcatattttacatatataaacacctttgcagttttatagccatttaaataaaccattcacataaactcttaactcttaaaacgatccgcacaaaa

SEQ ID NO: 39808 - DNA, 1023 bp, Homo sapiens
ttggatgctgtcaacctaaagacactaaaagcccccactcttcaagatttgtgtgaaaaattaactctggatgtttttaaattcctacagctgaaatcctagactttgccttaaaaaaatgatgctggtgccaataggaccccttgcttgaaatgtaattggcacatggtttggtggctttgcctggcccatcccatgatgattacccccagatatggtcagcaggggctttccaggaatgctttagcaaggaaggatgcgggtgtacataacacagcaagcatatcatcttcttcaaggtgccacttaggcacctcctgtaagaacacaagcaggtccgcggctggggagccacgtgacgcatgcagggtgtctctcactggacgttggagtctaggccaccgagacttccttttggggtgcaccacagggagcccaggtttaaaaaggacttcctttttctggttaacatatattaacatgtcagggaaactaattgggtttaaaatggctgttactctttcttttttttttaatggatattatgtaacaattatgatcatctttttactagaagtttctgagcttcagttactcagtttcctgaataacaaagtctttctcaagtaattcagtgttgctgagagaaccattgaagtttattatgatacatggtcagggtgaaaagtgtcctctgcccgaaacagattcactatatgggagtatggggcaggggggcagtgagagaagcagctaccctatcctgttgccccctcagtggcatctgcccttggtccactgggtgctatcacccagctgccaaccttttcctgtccacccagccccttccttgcctgaacctatctgggtagacagtatggatattgcttattggtacaacaccctatcacacccaaagcaaggtacccaggctgtaactgggaggactgggatggaatgcatgtgagacaggcccctcccgagacagccatagtcccaagagacctgctttagttgaaactc

SEQ ID NO: 39809 - DNA, 1035 bp, Homo sapiens
ttaaaaatgagctaatagacacctcaccaaagaagatatacagatggcaagtaagcatatgaaaatatgctcagcgtcatacgtcactagggaatttaaactaaaacaaccatgagataccactacaatcctattagaatggcaaaacattagaatactaacatcaaatgctgactaggaggaggagcagcaggaactcttgttcattgctagtgggaatgcaaaaggtttagacactttgcacgaatgtttgcaatttcataaatagcacgatggtttcactacgcaatcagcaacctcgcggctatgtatttacccaattaagttgaaaacatgtcctcagaaaaacctgcgcatagatgtttatagcagcattattaataatcaacctaaactggaagcaagcaagacatccttctaatggatcaacttctggtacgttcatccaatggaatgctcttcagtgataaaaggaaatgagctatcaagccatgaaaggccatggaggaaccttaaatgtatgtcgctaaatgaaagaagccagtctgaaaaagctgagtactgtatgattccagctatatgacattctgggaaaggcgaaactatggagagagttaaaagatcagtgtttgcccagggtccaggggagggatagaggaagagcacagggggcttttgtggcagcagaactattctatatgatatagtaatggtggatacatgacattatacgtttgtcaaaatctgtagactcatgccatggagtgaaccctaatgtaaaaatctatggattttaggtaataataatatcagttcatcagttataacaaatataacactctgagatatattgttaataggggaaattgtgcaagagtggggtggaggaaaggtcctgtgagaactctctgtactttctgtgtagtttttctataaagctaaaactgctctaaaaatactaagtctatttaaaaaaaaaaaaagccctttggtaacctaactgaggagaagtcacgaagttgaaaaaaactgagt

SEQ ID NO: 39810 - DNA, 1035 bp, Homo sapiens
gggatggcctttgagtgtcaggcattcctgttcttggtggaggtggactgctcagcctcaggtcccagtgctgggcccgaggagggacagcgcgaggtgtgctggcacctgcagtcttctttcttgccaccgcataggacatcactagacaaaagacatcaaaatcagatgctgttgtcccacgttgccatctctctcctcaaatcagtgtcccaatattcaggccgacttcggttcatcctgttttagctgtgcccactagaatttaaaatgtggccgtgcagctcctgactctgctgagggtgcctcggaaccagaagactgtagagctgcttttctcccaggggagaaactaatgatttgcagaagctagtaatttagagtctatggaacttgccccaggctctcccttccctcctgctttcagtggtactgaggagctgtatttaatctgaacagaaaattccattttcttctgatgattttgtgactatatgaaaatggaattaagggattgtagatttcttccccacaagcatattttaaaatccagagtaaaaataaaaactttcgcagagtaattgagaataaaggtgagaagttttctaataatactttaaaaaattctcatatacagataaattagaagaagcatgaagacttttccttaaagaaatgttcctttccctgcactttgaatagatggacaaaattagtatgcagggacagatccaacttttgtgggagctcatacactttggtgtcggtgcggagggggtggttcttctatagaaaaagaatgcaaaaatatctcccttttgcagaatgttcacattctgcacgtgtgagctgctgttctcctcacctgggcctggagaacatgggtgagatgctgagccccagggcttaggccagctgcctctgcgtatggaggctgtgtgtgcccctcagctgtgccagggaggagtcacagcagacggcgtgctgccatcctaatctctgtggcacacaggagaatgtccccacccccaagga

SEQ ID NO: 39811 - DNA, 1124 bp, Homo sapiens
aaaatgtcttgtttcagacagaaggaaaaaactgtatttcatgcactctaccacacaggaggaaataaaaaggaaaggaagtaaccagtgcttgggagaggtagggctgtggagtcgtgcattgtccgggcacagggcgtggccggggctctgacacagtgaaccattgttcccggtgctaatggagagtgggtgtgcctaggagaggatgtgtactggccctcagggaggaagatgccagccacgctgtgctgacatagcagggactgccgactggagccctgagctgtgctgccatttgactctctggcctgatgaggtgcgacagagatgtcaattttctggaacattgcacagatcacatatttatgcaaatgcttttctgtatctacaatcaaaaatggtcatctcagagaaggaaatttactaagccaacagaaacctcaatttttacaacttaaatgtggctctttccctctctgacaccaaaatagtttcaaaagctaggaagtcattaagaatggcttgtctgtcattcctacttagacaaggtgtgggattgataaggacacagaacaaaagaattcactgaacaggaaaaggaccctcagactaacaagactgttcttgaatccgcatcgaccccctttcctgccgtgaccgacgccgcatccctcccgtttcttttgttcattcaagtgctatcatcatacctgttctgcagctctgttgacactagcattctttgagtataagagtggtgtctgatttcatatgcttgctttatttttccaccgatttggctctctcctgagcttccctttactgtccaattttgaatcttgaactacgttttatctttctaagcctctaggctgcattaatttcattcactccacttcaacctaatattccactgggtaagcttttcctgtatggtgagactaaacttttaacctcattcctcagaacaacaagttttcctaaaacttggatcaacttgacagcctcctgttgaattgcctcaggggtgagaatattcttccagttgaaaggtaaccagaactggagactatattgtaaataagcttttagttaggtgtgaggtcccaagagccaatggt

SEQ ID NO: 39812 - DNA, 1030 bp, Homo sapiens
gttgcataattgtcataccatccatcatgttcattctcacactgaccatggtttttaatgtctgtccacctgcagtctgtggcctcgccagacagtaagggcagcgccctggaagtgggggatttatcacttgccagtaggtttactcttggggagacgctggggttttatctccatgcccctggagaattgacttactgaatgcttcccttgaagacctaagtcactggttcttcagcccctttgcatagtcctctcactgaaatcagaactgaatttgttctttttcatttttggttaagaagatgcacattagaagacagctcagagcaatggggctgacctagtgggaaaagacactggtttcttttcacgtttctggatggcccgtggcccacatctgccagcatcttcgcacgtgtccacagcaccagtcagcctcacccaccttgtctttccctttgcgatcttagaaagaatttggtagaaatgggaaccgaagattgagcagaaagtataattaccacatgtatttaccagctcattttcaagagcagtaaaagtacactaaacattctgcttgtacatacactagcactttaaaactaccagctttctaaaacatggttttgatttttggagcaaacattcaattgctattctttgatattattgatttataaacaaaatgatcagcattccctaatgtctcgaagcaaagaaattagggtaacacatttaaaatttatcagtttgaaactttctaaatactcttccttaataataaccacaatacactgaaaatgtcaagttctgtaaaaaatgaacagggacgcgaatgtgtcgggcttcattttgaagacccagcgtgtttctcatcctccccaggaagggaaggttgaaatcatgaagttaacatctgccttttcgtaaacaccacctcaaagtgctctttctcttaggttggaggctgaaagaaagaagcacaaatcttccctgggccaagagtttcatcataagccctgtgtga

SEQ ID NO: 39813 - DNA, 1059 bp, Homo sapiens
ttacgtctgtggccttcaatgagttaaagaagaaattgaatttggtcagtgtttttttcattttaccactatcagttagagggacaggttcgcatccatgattgagtcatgcttgtgcagctgcttatacgctgttcttgggaggggatgggaaacacaagagcgcttttggggtcatttcctatcagaggacattcgttttcacacagacgcacactcatggaggacatgaggattgtctctgcaggggtcacacgcattgtttctcgctggaaaatcgcagactctatcaaaaactttccttccagagtcattgtctctagaagcttctcaattcacacacagttacctttatctgtggtggcagttggaggcagagggcccaggtagagtcccaggctgttaattcacctgatctgtgaccctgggcattggcaaatgcatcaggatgccacaggagcacttccagctccagaagcaggatacttcccccggccaggaggctgtgttagtgggactgggctagaatggtcagaactgggcctgggctcagaggggagcatcaggggatgaaagaccctcctctgaagtttccagtaagtggagccttggacagaaagtcctccagcatgaccctgagagggctgctggaggaaggctgtcctcgtacccagaggcatgtggacggtggtgatcacatctggtctgatttctaaacagagtacagctcatttctcttgagacccccacttgagcgctccctcctcactcccaccccagccaggactggtccagggatcagcatgggaggccacgccagcactgcgagatgatggggtaggcctttgaagggccagacacggcaataagaaacctgaaccaggagggcagcaggggtgttggggttggaaaaacattttcaggcgtatttctgctataagagaaaaaaaaaacaagaaaatgcaaggggccaagttctgactgcagagctggtacagtcctggcccacactggtcaggctgctgctgtcgacgagctttgaggtctgagctgcaaacg

SEQ ID NO: 39814 - DNA, 1026 bp, Homo sapiens
catccaaccataaacaaattagaacaggcaacacaaatgcctttttcagtttagtgaaatagcgtagcagttgcttagttgatggtgacgtggtaacatacatatgccgatctgtgagcatttcatttggcctctactagctttcatacctcaaattttgagttcaggtctcagagtttttctttcatttacacagcaaaaccaccaggaaagagactttaaaagagactatcaggcatgacaagatactagtgaatcaaaaacgtacttaaaaaataaagcaaacgaggccaggcacggtggctcaggcctgtaatcccagcactttgggaggctgaggcgggtggatcacgagatcaggagatcgagaccatcctggctaacatggtgaaaccctgtctctactaaaaatccaaaaaattagccaggcgtggtggtgggcacctgtagtcacagctccggtggtgtgaacccgggaggcggagcttacagtgagcgctacagatagcgctactgcactcctgcctgggcgacatagcgagactccgtctcaaaaaaataataataaaataaaataaataaaaaataaaataaaataaaaagcaaatgaaaaaaatgtctaatgactcccatgaacattaaattgatggcctcttctttccttgatttaacagttattttttgccctattaccaaattgatatcttaaagaattgttttactccaaatgcacttattatgtgcagttttattcatggttcctcacaatcaacaaattaaatgatatttatgcccatctgcctgcacttgttttttgaattagaaatacaaaagagatctaagaacttataaaatagttggtttatcaagcctaaaaagacataaatctaatttagtaatttaaatgtgaaaattactagatttttaaagattattttatagtgacatatctccttctatgtaaactctgtttcacattattttctgtaaaagcagaataagaattcaccaaatttgttataacaa

SEQ ID NO: 39815 - DNA, 1043 bp, Homo sapiens
agaaagcagtcaagtggtggatatgaacaagtcacgtgtcctccagccactggaaccacctgtgtcagcgtccttcctcatggttcttcctcccttcctatctgtgtctctacatcacaaacatacacatgaacaccacctacctgtacctgtacagagagacaatttctatagcagtgacactacagcaaaaatagggatatatgtgcaaaatattgttaatttgttgtgttacccattctgatattaatagcgtcccctttcctaatctttggaaatcttttaaataaacaattatgcttatttgaggaaaaaaatgagttggtaatttctaattagcagtgacatggatctttagtaggaagcaatcatttcaaaaacgttagcatttggttatcagcttgtgagtttgttaggttcgatagaagtttcactttgcagtgagagtttgggaggaaacactattttccaggatcatgtttcttacaaaggactaaaatatgcttaagccaacctcctccctgcataaagttcacctctgaactaagaccaaactgaaaacaaggaacgccttgaaatattttgggatgttctgagagcaagggattctaggagagagagttcatttgatttttagcacttccagcactttagcactccttaaaggtaaatgcccatgacttaccacccttattcttttactacataggatctttttatatcactataaaacattagtcaacaaagcttaaaaaaatcccgagaattaaaaatgtctagctagttcagtctctgatacctacattctgtttatgcagtgtgtccacctggcagaaacatgaaaaaaatttgactcataagtttccgtctgtcctgtttgtttgtaacttgcattacgtgtacagtgtagctggatggtgcaacagtcgccctcacaatgtcattagtggctgccagatccggtgagctccaaactgccactgaggcattttaaccaacccgaacgctgtttgttgagattaccctcaagaccacacattacg

SEQ ID NO: 39816 - DNA, 1033 bp, Homo sapiens
caatgggatgaaaagctgacttaacagacctaatgtagttttgatcaatgtgagcaagaacatctcgttaccaagcccaagtagtaacacgttgttaaaattcagaaaaggctgactttaagagcttgccatagtcaacatcagaattatgttccacggtcgtggagagaaacgtatcgtaattagcacaggccatctctgtagcccggaatattgggcaccatgtggcgactccaggcatgcttgcccccaggagctgagagccgggagccacggaaccagggagccacatctaaaaggctcactggaaagcaggtgcaggcacccaagggctgcttacgctctgctaccagcgcttcgccgttctctgacgtggatggttgctgaagacatgcctttcttgctagtaaatgtattaggaagtggcctgggaaggaaaaagttgcagcataactactttctcccttgcgtggtagtgagttagcgcgacatgttggcataactgagtcgtctgaaacactgtgagtgatatcatcgagagtgcttttttgcagttaagggaacatacattttcaaagtataacattttagactagaaggtacacttagaaattgtctactctgattagatgtggaaatgaagactgaaataagtcactgatttatccagtgtcggagagccagaatgaagtaaaatgacccagcagcttctctggctactggtttttccttttcactatgccaaactgtctcttcttgtcacattatttgaaagattagtagaagttggccataaaacttcatgactagtttctgaaaatacatcaagccatgtgcttgtgatatgtgtactttttaatttgtatattatacttcagtagaagttatcttaaaaacttcatgatttatgaaatttgacatcagacttaacagcaggggctctttatcaacacatttttaatcgtaataaaggcttaggtcttaaagttgaagtggttataaaaagatggatttcattggtgcttgtgtgtta

SEQ ID NO: 39817 - DNA, 1138 bp, Homo sapiens
tgcattgaacatttgatacaaatagcaaagtagtttgaacatttctctttatacacatattttaaatagttgccaaaaggtggtagctatctcagacaaatgcacattgtgaattgtcctcttttaagcctgagattcctttaaacgtgcctattggattttgagtacctgcagttaaatagtgttgctcttggcaggacttagtgagcaaatgaggtatgatctctctgatctcagtcatctgctcagtcagccatgaccttctcagtgtctcttctttccacaccctgtctccactgagccatggcccaggcagttcacagtggggtggccagagattaccacaggggaaaaatgcagggccccaaggcggaggttcatgtggggttcaggataaattggaatgatttctgttttccaatgaatattgtccaaactgtcattgtactttatctaactccaaaaaaatctttaaatcaaaagcttttggatgaagtattgagcaatggaatagaatttttattagacaaattttggttacttcaagtaccatttggatatggatggataatgtttagatatgtatgtatgcatgcatgcatgcacatatacaatcgtgtatctgtagacacacaaacaataaaaattgccacagggccataggaaatatacatttgaaaaagaagtaattttgtatagtgtgataagtagaattgtccctagtaggacttagtgaacctcctgtagggtttcttccttacgtctacggcatcatcagagggtgtcaaaaagaagtaattttgtgtagtgtggtaagtagaactgtccctagtaggacttagtgaacctcccatagggtttcttccttacgtctacggcatcatcagagggcgcccaaggttgcattttgtttttaaaaataaatctctattgaagtaatacattgtggaaaagattgtgacctaatatgcaatcaaattctttaataaattggctattattcatgtcttaaaggcaattccattgttttcagtttaatgctggcaatttaaagtgtgttttccaaattttgtcagtttttttcctttaatgtttgttatagaagatagagatgttatgttggtatgctttataatat

SEQ ID NO: 39818 - DNA, 1051 bp, Homo sapiens
aatttgaggggagtcagagacagggcaggttgacaaaccggacagtcacctgctgagtaattaaataaaggttatgatttattttaatgtagttgcaaaatatctggttagggtgtgtgtgtaaatatatgtgtgtgagagacagacacacacagacacaggcagagatggaagaagccaaaaggtgatgtccacaattaaatttagattaatatttgctgggattttgattggatttactttctgtcttgaaagagattaaactttaacaaaatgctttccagttcttaaacatatataattatctattttttaaaaaaggtatggtaaaggtcttaatttctgccatctcattccctctggttaaaaaaaaaagaaagaaagaaaaaaaatcacccagcagagccatctatcttgtataatcatcctcataaacccctaaagtatgctttgctcccaaaacattattggcatggatcctggcatacaatcatcacaccagtaattacagctgttaactggaatatagtcgttagtatttactagcctctattatgaacacataaatcatttcataaaacggtgagtggacacattacttgtcgttttgtttatgttagacattctctgcaggtattctacatgaaagttaaagcattctgaggctctttttgtagactgtgcttatcattaatagaaagcagcatgtgtgcatcctgcaagcccatttccttatttaaagtgggcatccttcctctgctgagatgtgcttcctctttcgttacaagactgaagatcaagcctttgtaaacccttaaaggtacatcccttccaaatgaccttttgtcctgagcgacgaagatgtattgtttagtccactcagaattacatggggtgtcctaagaatttttgttttggttaattaaatttggaaatgtgtcattttttcctattataaagcataaatgaaagtccagtcaaattgattttagagttctggtagatgagataattgcagaagctaaatgatttagggtttaaaaatgtgttt

SEQ ID NO: 39819 - DNA, 1049 bp, Homo sapiens
agtgctaatcaagaataaaggagagaagaaagacacgcctaaaaatgtaagaaatgagagatgaaatatcttttagagaggagatttttccttaaatttaagactttttaacatgataaaagatatgggaaaaataatgaaatgaattttataggaaaatataaattattaaaattaattcaagaaaatctaaataggctagtgaccacagaaataacagttacaaaacattagtaacaattgtgaaaacaaagttctgaaaggctctttttcttcatcattttataagcctttagtgaatggatgatttttgtgccatttaattttcggagtgctttgaaaaaggtgagatagttcctaatcgaattgtaaagttatcaaaggcctgaaaaaaacacacacacacacacacagaaaagaaaaaattatagattgaacaagtgccaggcattaataaaattctacctggaaccattaacagacatatttagctgtgaaacacttgaagtgttccaattaataatggcatttcctgtattcactttgaaactatgctgtacttaaaaacattttttttaacttttaaaagttcaggggtacacgtgcaggtttgttatatgggtgaactcacgccacggggtttgttgttcggattatttcatcatccaggtattaagcctagtacccatgagttatttttcctgatcttctccctcctctcaccctccaccctctgggaagccccagtgtctgttgttttcctctgtatgtccatgtgttctcatcatttagcttgcactttcaagtgagaacatgcagtatttggttttcctgttcctccagtagtttgctaaggataatggccttcagctccatccatgtccccaccaagaatatgatcttgttcttttttacggctgcatagtattccacggtgtatacatagcacatttttaaaaacccagtctactattgatggacatttaggttgatttcatgtcttctattgcgaatagtgctgcagtgaacatatgcgtgcatgtgtcttt

SEQ ID NO: 39820 - DNA, 1273 bp, Homo sapiens
ttacctctggaatcaggagacatatgtttcttatttggtgacatacaagcagtagaatgttttggttcagttggcaacattctttctttctgtgtggtgcataaaataaaatcttatcttacattgatgatgtcttacattcatttatgacatgctaataattagatgtattaattattaaaaataaagtggaatgctttggtcttttctttaaactgaaaaattacaatgatgagtattaatttcaagcgagtattgggcatttctctgtgccagggacagtgctaagcatttaatcttcataacaggaatcatagtaggtattttggggcatgattttgaggcagctaagaaaatcacaaaactaagatttaaacacacttgactctaaaccccagcctaataaccactgtgctatactgactatcctgatatttaatctacagttctgtgcctaatccgcagagttagttagtcctttttaggtaatgtggcaaggaatataaaccaaggggagtccaatttagtgttttctccgttaaccactcagccctaaatgctaacctatgaggttaagggaaaaattggttaagaaagagaatacagtaatttgacatccttagggcaagattctggactgtacaaataccagaagcatcatggccagacatgatagtaagtaggaagactgtgaatgtcatatagtaaatagtggaccagccaacgattaggtgattttcttcattgttgatggtcatttgactgacatgcctatgtgtggctttctttgtatttatcctgtttgggatttgctgacctttatgaatctgtagatttatgacttatatccttttagggaaatatatgtcttctgcctcattctctctctctctctctttttttttcttctctgggagcccaattacaagaatgttataatattgtcccacaggttcttaagatctcttcattttgtttgatacattttctctctattcctcagattcagtagtttttatcgctctatctttacaggaaagtctttactgactctgtcatcaccaatctgctaaacccatttgctgcttaacaatgtcgattttatatccgtatgatgttgtttagttttagaatttttattagattcttttttacaacagatttttttctgatgatattcctttcattcatcatgggcatatttttctgtataaccttgatgaaacttatagcagctggttgaagatccttctctgctaatttcaacatctgg

SEQ ID NO: 39821 - DNA, 1039 bp, Homo sapiens
atgacaccagaattaatcttcgcatttttatactttccaagaattggcctgcttggacctgtaacaccagtgccagtgtacactgccttggggcccaaggaaatgcatgctcaacccactgctgctatcatggggcctgaagactgacttacctgccaccccaggccctagcaaaacgttaccacagcctccactaataactgcaccataagctactgaggaaatcacagataactggtgctgtgtacagctgaagaaatcttacagagactacactactgcatacatctagaatcatagctaaagtgccctacccaaccaacaccatagatacatgttcaaaacaatgccctcccctgttaaagtaaattcaaaaaattgaaggcagtgactgacaccagatgcccaagtagcaacataaggatgcaggaaacatcaaaaagcaaggaaatatgacatctccaggggaacacaataattcttcagcaatgattccgatcaaaaagaaattcacgaaatcctgaacaaataattcacattcttgattgtgaagaagctcagtgagataccagggaattatgaaaaataatacatagaaatcagaaaaacagtgcaggatatgaatgaaaaatttgccaaagagatagttatcataaaaaagaaccatacagaaatcctgaaactgaagaattcattgaatgaaataaaaaatgttagattcaacaatagtctagattaagcagaagaaggaatctgacaactcaaagacagaagacaggtctttcaaaataacctaatcagacagaaataatgttaaaagaataaaaaagaataattgaagccttcgagacatatgggatactataaagccaccacatatttgaatcatttgggtcccagaagacagagaacaaaaggattggaaaactcatctatttttttgttattaaataatagatgaaaacttcccaaatctatcaaatgatttagatatccagaaacaggaggctccaagatccgcaaacatatacaatgcaag

SEQ ID NO: 39822 - DNA, 1045 bp, Homo sapiens
tagttttatgttcaatgaatttagcaatatgtacagagaaaactgtggcatttggctttcttaaaatcctgagacctttttcctttcttctcattttaacagaacattgaagaaagtatgggtttatatatggcatatgtaaagaaaatagatgtatattcagaaaggaagtttaaaagttctcatgcacagagataaacataatatctaccccgagacatattcatcttttaaaaatagtgatgttttgaatcataatctcagttcttaccttactttaggaaaaaaagaaagtaatttgctttgttggtcatattttgaaatttaagttttttttatttcttaaaacaaagtatcactacacttaatattttaatagttatcaaagaaatgttctaagactatatttgtaaaaaaacagtgacttaaatttgttgtgaaagtcattatttgcttgtttgcctgattctcttttgttttcttattaatctcaccatttgtcgagcatgtgctgtgggctgatactgtgcaaggcaggcaggcttgcctttgattttcttaaaaaatcaatatcctttttcagtaaaaacatctaaaaaaattcaccgtgatagtgacgtagagataattgcattaccataggaaggtgtttttttgagtgacaattagtctgttgctagttttcctttcacacctttaccttgaaattatgacatgcaacatacaaacaaatatgggagaaccagcttttcaagacgctctataatatatttataattttctaagccccgaatcagaaagtggtatcaattgaaaatatttaaagcaagaaaacactatattatccatctatttagatttttcttgacatttaggaaagctaacaattattcttccttcctggaatcattaaaaaaagtaaccctaatagtcaagtctaataaatgtaaaaaacaatgagcgatttaaattttcttttgttgtgggtttatttctttatacctgagtttgattttataagtaggttagtttaaaatatcttttc

SEQ ID NO: 39823 - DNA, 1110 bp, Homo sapiens
ttttcttgaacttgttgagaagtctgatgtggtatagaagtttcagcagttctaatattttccagtttcgcacaggcaaacataattttctgattttgtaaaatacctcgtagcagtaaaatgaaatttttcttattcatttcttctctgcagcattacttttctttattgcttaattctcttgtttttttttttttgtttatttgtttcttatccagtgatctctggaacatgattaaaaactcatataaacttggaccttttggtcattgaagagtcttagcatactttgacattttagaaaagaaaaacagaattgaaggggacacaaggtacattggtttatgggatgttcctcaaaccctttctcaaatattttggatgtatttcatttcctaacaaatatttttttcctattttgaggcaggaagtgaggatatgcctgttgacaggcagccccttcttcaggaattacatgtatctgtataatgtgtacaggcatatgcatctgtgtatacatagccagatttgtcatcatggccaggaaattaccctttagctcctgctgcaagttctgcattcttcgttacttttctcattggctggtcctggtctcaggctcccttccagtggctgcttattttagtaaatttcacacactttcccatcattcgttcacagtaagcctgtggcacgatgtgcatcatttccattttatagatggggataggaatgatcagagaagttactttgtacagtgtctccccgatggtaaatgatagagatgggatttggggagacctggctttctgactctaatgcacgcatcctccactggtacctgtgttgtttctcaataacagcttgaggaaatgaatgacagaaagtaaaatctgccttttagccctgcagaatgggctcctctgtgagaacgtggcttccatgagaggggtgtcttcctttgccatccctacttgtgccattgtttctctcacaaggcggctgtgtcctgttagcacccagaattaggaagtgtggaaaattaaagccatattatcctgttaaagtgtttcagggaaatgggatactttgatttgcatggaggaaaat

SEQ ID NO: 39824 - DNA, 1038 bp, Homo sapiens
ttatttatcttctgggtaggtaatatattcagctaatttaaaatataaagatgcaaatgggtattcaggtgagtcgtcctatgcctgtccgccacctccccatttcctcttctcagaggaccgacctgttgcctgtttactttctttttttgtttttcacacagggtcttgctctgtcgcccaggctggagtacagtggtatgatcgtagctcacttcagccttgacctcctgggctcaagcggtcctccctcctcaacctcccaagtagccagaactcaggcctgaatcactgtgcccagcctatttatttattaagagatttttaaagaaattcctaatgcttagaatctgtgaaaaagcacaggtgttaggttagctcttggaaccttgtgaccctgaataaactttagcctctacaaacctcagtttcataatgtatagaatgaagataattaactctaatttcagggttgttggcacgtaacatagctctcaataaatgatctggtgattgtaatctgaaatactttagaatgcacattaagatatatagaagattcataattacaattgtgcatattaaatatatttaataattatttgggaaagataaaaattaagataatgttctgtactctctgaggtgaatttttaaaaattgcttattttccattgcaagatgtaaaagtgtggtatcatagtatatttgcaaaagtgaatcactactttctggcaaagacagagtgtcttagtccaagaaacaatataaggtgaaaaattttgtaatttacggatgatctgatctaactggtttgtcctaatttttcacttccggtggtcaaagatatcttcatcccttgtttaaaacttagaagggaggcaatttctgtggacttgaggtggagaaagatggggttcctttttgctgtttactgccttgcttttctttcacctgtgcatttccagaggtgagtctgggtgttgtcttggtattcagatgagttcatcgtaatcctcaactttcttctctttcttt

SEQ ID NO: 39825 - DNA, 1034 bp, Homo sapiens
ttacgaggtcgtaccttctttaccactctagttccagaacactttttgatcactccggaaggagagcccatacccattcatcagtcactccccatcccctcctttcccagcccctggcagcacaaatttacattctgtcttgtatgtttttccctttgccttagatctgggaaaggttttttttcgtcatggtggggaaatgggcttctgtgcagtcaggggagaagccgatggaggaaaggagtagtgtggttatggaagaggctgaaggggagaaggtcgcgggcatctggaggcctgagatgtgcatgagcatccagtcctgcaccggcgctggtgctgcagtggtgccgtctctgtcactgcagtgctgttctctgagagctgttccgcagcgtgattttgggtgctgttcctcattatgaagcctctcagtcatcttcttcagtctgcactgtacctttcatagatttctgattcaattagctgcagattggtttttgtggcttcctacctgaacgaagatagaaaatgatgatatatatgatggtggacggtaagatgacaaaccagttttgaagtcctctaagaaacatgaaagtggatgtgagtggtagatcacaccagtgaggttgtgattttgattagagtgttgtgagtaaatttcatgggccataagtgctgacaaacaaagattgttatggtttgatgtttcaaaaggggcatcaggaattgaggataaagtgtttgttgtacccccttttggggtctaggagaatgaatgagtaaaaatcctgaatgtcagtagctcatggagtgttagattttacatagactggtaaaaacctgagattgatatatggtggctaggttattttgaaagtaagaatcttaggagtaacaaattgctgtctgctatcacagtatttaaaaaaaaaaacccgttttacacaccaaaatgtaagaagaacatgctcccagaataaagaacactcaccaaattatatacttttgactatgtgaactactttttc

SEQ ID NO: 39826 - DNA, 1033 bp, Homo sapiens
gtaatcacggcactttgggaggctgaggtgggtggatcatttgaggtcaggagttcaagaccagcctggccaacatggtgaaaccccgtctctactaaaaatacaaaaattatcccagtggtagtggcacgcacctgtaatcccagttacttgggaggctgaggcaggagaatcacttgagcctgggaggcggaggttgccgtgagccgagatcacgccactgccctccagtctgggtgacagagtgagaccctgtctcaaaaataaaaaataaaataaaataaaataaaataatcaatcaccaaagccgttgtgaagggcattagaaactgacaaaataactgtgtagaagacaaccaagttgtcttagatcccagaaatagtggggctccaaagtgctgccaacctaatgaagggtgtctctttagccagagatgactggaggcagagctacccacagcccgaccacttctacctgagctcttattgaggatgcaaaaagccaaaaccgtaagtttacaaggtgctctgatggggccatgagtgaaaaggaaatatggaaaattgattctaagtgaaagagcaaacgcagaccctggggtgccagcgagggcgagagaacctcaagctaactcagtgtgagggacgtcagcagtttttttgagagatctttgcatctgttttattccccaatatttgaatgctcaattgcttcagcaaatttgtttcaaattagagctttaaaataaactcttccccatgtttcacaaatatggagaacagaaagttttcagttagaaccttactgaattatcttaataattatcagcactcacataactttttcttttctttatttttgagacagggtctgactccgtcacccaggctggagtgcggtgacgtgatctcagctcactgcagccttgacttcccaggctcaagtgatcactgcacctcagcctcctgattagctgggactacaggcatgcgctaccatgcccagctaatttttttgagtttttgtagagat

SEQ ID NO: 39827 - DNA, 1024 bp, Homo sapiens
caaggctggttctggtgaatgctgtctatttcagaggaaactgggatgaacagtttgacaaggagaacaccgaggagagactgtttaaagtcagcaaggcgagtaaggggccgtgacaggagcagcgcctgtgttcacacgagcgtctccggctcggggcctcccgcgtctgcagccgtggggcctttctgtccctgcccctcctgcttgacatccattgggtggcctcgtgtccctgggcgcctggcatccgccctgccacctacagggcaagtctgaagctgcagccctcaggctcgatcaaggtcttaaagctcagactccagatatggcgtgccatcttctagcggacatttcctccttttctctagcttcattcccatcaggacctacccactcctttctttctggcggcgtcccgggaagccccgctaccgcgcctcctgctggcctccgtgccacactgcaggagcggaacaactcagcctgctgaattgaggctgagcagggaggactctctgacaagtgccagacacgtagctggtgcttagtaaatgctgaaccgatgagtgatattcagtcctctcttgatagtaaggataagtacagatttttgttttaaaacaaccaaaccaaacatgtagatagacactgagattaaccacctccagcgtggaagatgtcatttgctgatggccctttatcttcctctcactgaatcttctttattgtctcttgttttgtttttctttaactatagaaatttttgaacatagacaaagtaaacagaatagattaattacagtgtattcttgatcattgaccatagttagatcttccaggctaacttgaacttgagccttcagtttttcaagaaatttattttcattgtctgttctcctcgcaattcagaaagaattattttctttgaagctttattctgaaatgaactgtgctattttcccctggcaaaataatttctctctttaaaatttaatgattaacaagatgtacaagggctttg

SEQ ID NO: 39828 - DNA, 1015 bp, Homo sapiens
ctgctattgttattattgcatcctcttaatatatatataggagtctgggtgtaatggggcaggttaaaaagtgggtggtgagaaatgtaaaccacctttgcctaccagccttggaagcctccactagaattattggctttaaaagccaataattgcctacccttttttattgtcttcctcccatctgctgcagtgggctctgttgtttgacaggatttgaagtggcccgctgtggagagggggtgagctgtagcaccagccagcatgaccagctgttggtagcaacatattgaaagttgcttgctttcctttaatgagcaagtatttattgcatgcaccagggtgcccagcagcgtacttggtgctttggagtgctgtatctctgaggagcagacaggggagcatgtaccttaacaaggactggaaaccaagctgcacgaggcacggtccccaaggggcggcttcttggggtaggggcagtaaagacaaacgtgtgaggactggccagaagggatcttctggtcgagatggtagactgaacagacagggacccctccatacacacatataaatgctggttaaaatacagcattttttagaagtacgacactgagctccagggaaagaaggggaagttcccaggtgtcaaaccaaggagggaatcccagcaggagcagacacagaggcagctcccagggcatctgaaccagagagaagcgtgaggactctgggtttcaacacctgcccgggggctagagctgagctcccaggcctctgatgccgtgagaactgagctccttcagtcaagccaggagtcaaaactgtcaatggccacaggactgggagatctttgcctgccacagggactcagcccagagctggcggactgccttggaccgtgggcagaagaagattcacccaaagaaattggagccttgaagtctgcaccacgcaggactgtgtgttccaaattccacctgctccctgaggctgagatatcaatgtgagaaccagg

SEQ ID NO: 39829 - DNA, 1072 bp, Homo sapiens
aatgaaatatacatatacttacttgttcaccatattttaaaaacattttaaagtagaggagtggcaaaagcagtacagttaaaataattttagacttacagaggaatggcaaaggcagtacagagattttctgtaagcccttcactcacccgccttccgctaacgtgaactcacataaccacgctacggtccccagagctgagaaacggacgttgtcgtgggactaactaaacgacggactttccttgaatctcaccagtgttttctctactgtcctttttctgttccagaacactctattaaatgtagctgtgtctccacagtcgcctctgatctgtgacagttccttgggtttgtcttttgtgaccttaacactgtgatgaggacagtggtgtaacgggttggtattttgcagaatgcccctcgatgtgggtctgtctgatactttctcttgatcagactagggggaagagcaccaccctgctcatggcgtcgtatcgaggcaggagctctgacgtcagcgtgagctgtcactggtcacgctaaccttcctcagttgagatggggtctgccaggcttctcctctgcagttactagttttccctttctccacttagtttgttaggagtgagtcactttatttcttcagcaaagggactcacagctatgaagggcagataatccatgtggctaggtacactgctgtttacctcctcactcctcaaaaagctgtctcttctaaacgtgtgtattttttaaaggttagtagggtttttctgagaaacaaaggtgaaaatctgggtgaggttggaagagaagagttgtgtgtggttgttgttgatttcaaaggctggagtggtggtctgagtgacgaaccagagaaaggcctgctgcaccctggggtgcctgccccgccctggggtgccggccctgtggaagcaagtccttgttccccatgttgctgccaggtccgtgtgtcagcatcagagtatgcagactttccagatgtccttccagtggtgccctgggtgggagacccagtcccactgccgcctccacccctcccacgctg

SEQ ID NO: 39830 - DNA, 1045 bp, Homo sapiens
agaacctgcagcatcaaggcaaatgttctctacctgcactgcccaatagtccagcactaggcacgtgtgctattgagtgcttgagatgtgcaggagtaactaagggactgaatttgtcatttaaaaccattttaattcacataagtaaccacgtatggctcgtggctattatattggatgggcccagttcaggcagcaagtagaattagagacagtagcatcatttctccctttcacagcaaaacttctccaaacatgagccccaagcattgtctctggggccttgctttccgtccttgcctcagtccactgaggctttcgtcacccccgctgctcaggtggaattcccttgataagataacccacagcctccaggctgccacaggcttggtcattttctcttttgcttatctgaacttctcagcagtgtctgacccagcttgaccacaccctcttctttgctttcatgatacctcacccacttggcttttcccttcctttgccctccctccaaaggttggatctggggctcctgacatttctccatctacactctctgtgtgtctgctctgctagaaacatggcactaattcacctctccataggccagagactcccaggtgtatatcaccaactctgacctccctgctgagttccaaaatcgtataccctactgccttgtggatgttccacttggatgtccagtaggcatttcagattgtgtggccaaaacagaaccctccttcctcccacatcctcagagccatccctccctagaaccattatccatgcagttgctcaagccaaaaatgggtaagagtcaccctttcttctctctctctcccttgatcagcaaatcctctcagttcttcctccaaattacattctgagtccctcaatttctctgtctccactgccaccccctgaggcaaagccttttcatttcatgcctggaaaactaagcacaatggctttctaactgatcttcttgcttcctgttcagacctctacagctcattcttcacttacaactagggtgatattc

SEQ ID NO: 39831 - DNA, 1050 bp, Homo sapiens
cctggcctgctccatgagcaagcctcagtcattcgctataatggggtgcctgatggctgcgctactctatctgtctcctgaagataaagttagatttgtggcattactttaaagtaataattaaatatgcagttagtccatttatggctgtcattgagattggaagcattcgttattgcctgttttcctattactcttcttgctaatgaagctgatctttacaagatggatgggcacagtccttgtggtcccctgcctgacgctcaggctcagtagggtttgccgtacgcatgtgagatcttgattctcctactactttattcatacctgttagacctgcatttgtgcagccagtcatggtgacatgtggcctttggtgcgtataaatccagatgaaaatgtgggctccaaaatcttattataggttcacactgggctacaggcatcccatccagatgattgagaatacccttgtattaatataagactaagtttttcactgacatgagagcatacgattttaaaacttctgtagactgccaagaacacacccagagatggctacaatattcctgcccacttccggagccagcatcctggagcccagccccaccttggtgacccgtcctccctgcctcatacctgcccgccttggtgcctgcttttcatcactgggttgatggtgtggtttagacctgccccctgcctgtgactccatggttgggctgcctctgtgactctctggctgctttctccagcatctgaggatgaagtcccttccccgagtcttagcccctgtcaccagggagcctggccagacaggatgtgactctccacagaggacatgggactatcatgtgggggctgtgcaaaggtagaccagagcggggcaggcctcagagcgacgtggagacttaaggggtctggtctttaccctgtgggccctggagagccactgccagctttttgagggacaaagtgatgtgctttgctttgtgtttgggggggatcactctgggggtcacacccttctgattccaggggctgcca

SEQ ID NO: 39832 - DNA, 1110 bp, Homo sapiens
tctgagatggagaagaatgcaagggaaaatatgatttctcctctttggtaaatagtactggctgctttgtgttagggtggggtcatgtgactaccctcactacatgggaagtgtttgctgggaggccccagggccccccattcttggtcatttgctccccgttgggctgacctcagtgcttggagcgtgattgtgtctcatatctcattatgtcattcccttacctctttttagaaagaaccatatacagccccggagtgtaagagttagacatctagtagctacagtgaatcttggcttgagacctcccttttggcacacctcagcatgtgtgcatgtatatagcatggtgctgtatagctgagcactgttttgatattaaagagtaaaaagggattgaggctatcatgatagtgccttgacaacaatggatgataataagctatttattcagcattttctaagttcagaaactatgctgagttatacatatgtacatatacacaaatatatagaaagatatgtaaatttcatagtaaccatgtaaagtagctcccacaaatagccccattttacagttaaggaaactgagacctctaattcctggaccttgtctaatttgctagagatgcctttaagccagagataacacttactgagcttgtacactgcgtcttccctgagcccctctcgccagggagcctggccagccaggatgtgactctccataggtgacacggaattgtcatgtggggactgtgcaaaggtgaactttttcactgctgagtgctatggaactatttaatccacccagtaattctgtgatatgagcactcatttcataaacagaaatctgaggcctagggaaggtaacttgcctaaggttacatactaatgaaatgggaaaagttcccttgtcccccttgcagggtgtgggatgggagagtgggtcactcttccagtgccctgctgctcaaacctctagaggagcataaagcggacaggctgtggggctgcgaccccacagcagcgtctatgggtgaatgtttacagctcctgaagccccggtgggcgtgcgtgacggggtgctcttttagtttagccatcgga

SEQ ID NO: 39833 - DNA, 1022 bp, Homo sapiens
ctgacttagttaacaacctggggagaggaaacaaagccgctttgcttggtgaccatgttgacttttgatccaatcccaaaggtcaacgatttctcaagactttttatgctgggtgtatcaaggttcctgtttggagaattattaattttgttccccttgccttgaattatatcactatacactcagaaatagactcagcaacaggaattgggctcaagtctgaattctcttactctgtaattggttgatctctgctcccttatctcgagaattagggggttgggctaaatctccctttttacccatagtagcctaggatctagtgaagtgggtatagatggcacaggactttttacccagtactcattcaacatatattgagtgcctgctggacaccgggtttcagcatctagcgtcattgtcttgtttcacaatgattcctaactttttccctctccatatgcagggtcggccggcggcctgtgctgctgttttccatcatcttcattctgatctttggactgactgtggcactgtcagtgaatgtgacaatgttcagcacactcaggttctttgaaggattttgcctggctggaatcattctcaccttgtatgctttacgtaagtaggagccttcacgactagtcttgaaagaatttagcaaaagtattgttgcctgggaggttctgggaaagatactgtgcatgctgctcgtgtgggctggcagttttgtggaaacacaaacattaaaggcctcaagtgttgtgaaagaggcttttcaggtgatgccgtgaaacatttcactcaatcctgatctccagctcgggctcagtgcacatcaaaggacacgggaggttgcgtaactgcttggaggagtggcgatcggttctttcctgatatggagaggctttcggttttcttcagaattgtctgcattgacatcctgtgtgcttctatctggtgcataattgggtatccacacagaatccaaactttccacattctcatgtccacagttgtgt

SEQ ID NO: 39834 - DNA, 1034 bp, Homo sapiens
agggtcacattacacatgtggaaaatttcttccaaaacccagcgtgtatttgggagttccttgagctgacatgtaatgtgatttcctgtgtgcttgacatctgcctcatcatgatttgcaagtgcttctcatggacacgttctctgtggacagcaacagagaagcagtcagtgacctctggagacctacgcaggggacctcttgggggctttctttggtagaggcaacacagggtttatttttttaaaccaaatacttgagttcataggtttctagtgtgggctatattggtctaaaatataccgtttcccagaaatctacattgaaataggttagaaaaatatactaatataatccatgtcactgtctttctaaaaaaatgcaaactcaactggggttgtagtgtccttattcaataaataatttaatagaaaagtaaaaatcgacttttatgaatgaaccagtctgtaacagtttaaattgtttaaagattgttttcttaactttcttcttgtacacacatgtgatgtggcctccctgatcacacaccaggcctgaggacaaaagagtttgggtcttgctcttagagtaaccagaagtctgacatcgcaaaccatttctctgcagttgcttttctgaggttcctcctcagatgggcaagattgagggggtgccccgggaatcaggggcaggctgcctgagtggtagtttttgaacattttgagtggccttccctttcagtttgaaagcttggtattttccaactccattttctggcatttgactccctgcttgagccttgcttaaaaggaaataaacccatttaaagggaactccagacctctcggctatgggccctgtttcatggctgcaggggaagtggatcaagtcatacaatatgcttcctaaggctgcagtcagcatttagtaacatttaagtagtacacttctttcttcaaaaagttacatttttgacaccaagttttgtctggggatgttcactgggtattggtatagaatctgctagctcaggt

SEQ ID NO: 39835 - DNA, 1050 bp, Homo sapiens
gccctcccgcctctctgtaggcatctcttgcatgtgagcgtttgatgaagacctatttatcctccctttttgtaagaatgacctgggcaagccttttgagtgaaactcaaatgaaacaggtggggcctctgctgttacccagcccacagccagctgcaaagagccacaaagccccagcttgtagggtttcaagccaaggaagggaattatcttctgatggaacctgctctgcagaattgtacgttcccttcacaaggttccggaggccactggggaagtatctcccaacagggatgagttagtgagagaaggagggccaggcctcctgatttgcctgctccttgctaaaaaccttaaaaagagcaacgaactgtaggtgggcatttccaccatatttaaacatatgaaaagttcagtgcttttcctaagattttcccagggcttcaagtttgccagccactctgcacttcatcaggaagcatgtttgtgcttgcgtgcgtgtgtcatcctgagacgaactgcattcctctgaaagcaggttaaacaactgatggtgtgcttttattaggataacagtttagaaatttgaagcccccaaatgttctgcataaatgatgcatttgtcatgatggctactgaaattactgagccaaagcggagagctagaaggagacgcgttcctggaagtcctccctctgcctggttttacagtgagctgaagagcagttgtacacaacagcaaggaagattggttcctttaggttctgcaaaagcaatttcagaattcggggaaaaaacattaaacatttattttaaacttaggcttcttcaaagtctcacagccagcctaccctcaaagcctgagtgattgtggaaggagccagcgttcactcagcagaggaacagagctttcctgccgcaggctctcagtgaagatccagggagcagaggcgtgggcaaggagcactgggctcagatgcaggagaaccggtttgaaccctagcactaccgcctctacactgaggaaccttggggattactcagccccct

SEQ ID NO: 39836 - DNA, 1055 bp, Homo sapiens
gatttagagattgacagggacctatttgtctgggaaagggcaggggctgttgagtgcatgaagtggattcctctaaaataaaccattgctgtgagaggataccgccagcacgcgcccacccatggcatctgcatggtattgtatcctgtcagacctctcttcggtctcttttggctacaagtaactaaaacaaatttaaattacattaacaaaatataaaaggaatttcttggaaagatgcagggcagcaggtggaaggtgggatctgagatcacaaagtggggtggggagtgtcttttaggacactcagaagctatatcttctcatcccattctccagaagtgagctcggttcccacttcaaactggcttcgcctgatgcttttgctcatgtgatccctggtcaagcaacggccaacacagaggtcagcatctctctgtccaactccagcttcctgggtgcaaatctgattcccagcatggattggggtgagggaaaggaggttttggagcagggagtgaggttacgcagggctggggactccttcaaacggtgtgacaggatatggttccggctgttcttcaagctggggtggaaggggttataggcagatgtttctggcaattaattgagggtaattgagtattgatgatttaaccactaaatgctttaaacaaagtattcttttccctcccagagactcaggatgtaactcacctgctggctacttgagctgagtgtggaattagcaggaacatacctcctgaggcttctcttctaggaataattaaacatggccttagatattagctccagatcacccagggatcttggaaggagccgttggacagtcaccaacacagtgttgccaattgtcactcccacccctgccttcacacagggccagtctcctgctttccaaacatttcttctagtcagggccagctacataattcgcaggtccccgtggaaaataaaaatgcagagtcccttgttgacaaagtgtgttgtcaccactgcagagctaggcaagggtttccccaagcctttcccag

SEQ ID NO: 39837 - DNA, 1031 bp, Homo sapiens
ccgcagaacacctctctgggcagatttctctactctctgtcttcttagtcccggctagccaggcccccatcttgtcttgctgcttttaacaccacaggcccgagagacagaaaataagatggaaacctgcccacatcacttccctgcttgaagccttccatggctccccatcactgcagcacccatcaagggtgccctcagccctgagccccacatgtctttcctctcctcccctgccacccctccttgttgtagggggcatcttgtatatattaatagttcccagcccggtctctctcactgccttgtgccttgctcatgctattccacttgctcgagccccttccctccttccttcagccccttggttcctgctcatccctcaggtcagctcagtctccatctgaaggacggcaaccagctgtccccttatccaagccctcactggaccctggttggaaggatgcccgtctctctcccctcctgaagctctttgactttatgaggttaacaccataaatgtctgaactcatctgaacttgatgtcatgaaaagggcaagagtggccgggcacagtggctcatgcctgtaatcccagcacttcgggaggccgaggcaggtggatcccctgaggtcaggagttttgagaccagctggccaacatggtgaaaccctggtctctactaaaaatacaaaaattagctgggtatggtggtgcgtgcctgtaatcccagctactcaggaggctgaggcaggacaattgcttgaacctgggaggcggaagttgcagtgagccaagatggcgccattgcactccagcctgggggacacagtgagactctgtctcaaaaaaaaaaaataaaggggggcaagagtggcaggcctggcttgcagccccaactctgccacttgtcatgggtctctctcccagagcattactgcacctgtttcctcaatggtagaatgcggtcagtgctgcctgaccttgagggccattgtgaggacagacgcagaacactgggaagcgtgcc

SEQ ID NO: 39838 - DNA, 1044 bp, Homo sapiens
tatatcacgaaatcttggcatgcacagacatttgcacacgtgtaagaaatttttagaagtgggagggtgaaagtaggctgcatttttatgttaatactgtcagagtgttttctgtagaaatcttagctatgcacaattatactaataatatgtgtggttctgttccctacaccctccctgacccaggggattatcaaatctttacatattttctagtttgatgtgcaaaaaattgtatttggtggtggttgtgacttgcatttctcttgttatgaaggaagttaaacatctttttgaaagtttttgagccatccatatttcctgttctttgaacagtctcttcatttcctttgcctttatgtgtgtgtatatgctgtgagaagcattattttcttatgtatttataggtacactttatgtatgatgtaaattaacccttctggatgacttgtaaccattttcctcgagtttgctgtttggttttttaaattttgtacatgatatttttgttatgtagaaacgtatggtttggttagagttgtatgaattaatcttcttttttatgatttcttatgttagctttaaggcttggaagattcctggaagactggggggaaatcctatgttttcttctaacatttttatgatcttataacttctttattttggggttggagatacctgttttgcttttctgagctattaggataaattgctagaaaggtcagaggatataaccagcatttcatgcagacgttgacttgcttgtaacaacgtcctaaacatttagtttggcagtggcccttattaatgtaaggattagaggctagccagctgttaagcagcctttccacctccgtttgggagatagctgtcttcccaggtcacaggtctccctttccttcttcatcttcctgttctgaaccatctgcagatctctccctctccctctccgtctccctctgcctctctgtagcaacattttctgcaggtgcctttactttggcctttagtccaagataggattgagtcgaaagttggtgt

SEQ ID NO: 39839 - DNA, 1028 bp, Homo sapiens
atcaagacatttgtagttttgctccttgtgtctaaactaattaattcacattttaaagtaaatacagactctcctccaccccacccgctacccattctgggctgttctggcagagttttaaatgctttgtcgaaatgtatgaaattggacagttttaaatagtcaatgtgcatgtaacctcctccccccgtgtgcattggttaacagttgtagctcatggatgtgtaagataaactcttacatcatcataatcattgttttaatcttgtaccaacctggccagaaatgctctgtcctgtgggaactgtctgactgagctgcccctgctgccctgcaaggtaatggggaaggtccttctagctgggttcaccttgatcccacccacctcctaccccctgctttctaaaggtgtttctgtgactgttttcccttcacggagggcaatatttctttgttggtttagcagcaaagaaaaattaagaacaatgactatttaaatcactgtgtatgtctgacagactgaggatttggcaacattgttaagtatttcaagtgtctttctagagcagagggagaataatggatcaaagtgagtatgtgtgaagagcgctgtgtcctggggtcaaagtagaggtgaacttgaaagtgatgagatgggatagagtgccattaccttggcagtgaggacccaggaaacagctattcacactcagccatgcacggtgggaggagagaacaaaaatagttcttaaaagcagactatggaggcatattggagagctgggcagtttttctaaattagcattcgagagggtcacagacagccctcatgtgtgtggcatgttttgggtgatgcttgatgacacgttgcagttactgggccagactgagaggggaaacctgggaacaataattagacacacattttcttatacagtaaagcctagaaaggacatattgattttcacagacaaaaaagatctaaataaaggactgccttcccagtgttctgtgtgtttcaagcacat

SEQ ID NO: 39840 - DNA, 1767 bp, Homo sapiens
atgttataatgaagttttaaattgttaatcattccatatggtgtctaggttttccgccatgattataaagcccttccctagccccatgtgatacaattttctttcttataatacttttatatttcatttctttttaagtctttggtatatctgacagcaatttatgtatgattcagatgtatatttttttccccaaaggtcccaacacctttactgaataatctttttcccataatttgagatgacacctttatcatacacttatatgccctgtatatttgagtctatatctggactcccttctggtataaagaagtgcagttgacttttgtataacgaccttatacctgtccaccttgttaaaccctcttactatttctaatatcatgtctacagattctgattttctgttaaaatggttaataattctgtctctctctctttttttttttttttgacatggaattttgctcttattgcccaggctggagtgcagtggtacagtcttggctcactgcaacctctgcctcctgggctcaagtggttctcctgcctcagcctcccaagtagctgggattacaggcgcctgccactacacctggctaatttttgtatttttagtagagatgaggtttcaccatgttggccagtctggtcttgaactcctgacctcaggtgacccgcctgtctcagcctcccaaagtgctaggatcacaggcgtgagccaccgcgcctggcccttaacatggttaataattctctgataaagattgttctagtctttttcaatcctttctcatccttttgattcaacttatttttcttatgtgctattgaagtccttcaagtctatgttgtttttttttatttctaaaaataaaaccaagaataccagaaaaccctaaggctgaagtaactgaaaaccaaactcaaaaattgatctgtagggttattcagttactctgttggttagtcaccaggtcgtgtaagtgcaagtcctaatcaggaaaaaccaagactttgtgaattaggatggggacactccagaggattcggagacctccttgactccatggagtactctgaactcaatgccttgagcctcctctgcttgtcaaagcctttccttcctcttaatcctcccgagggtgttttcctcctgacaccaaatgtgtgatgtccgttctaacaccagccatttctccagttctctagacatcaaccggatgtccaataattcaattaaattctgatactgtctgcctgcgttagcatccacccctacaagttaaaggctcagtcccacaatacttccctacttcagatgtcagctgtaaatggggtgcccaggtgatccacatttctgcccaggtgactacaaatttgggggttcccatggccccttcccctcagtttctataatttgctagaatgcctcacagaactcagcaaagccctgaagcactgattattctcattttattataaaagataacagctcaggcctggcacggtggctcacacctatagtctcagtaacttgggaggttgaggtgggagtattagagcaggtagttagacgtgagcagggcagaagagggtccttccaccaccaggaatgttaggcaaccatcaggtgatggtcaggtggttgttaactgtctctttaaaataataattggttgcagccagtgctagggaaaggcagtctcccaacagatagaaaacacctgaaactggtgactagcagcttcccaatatgatctc

SEQ ID NO: 39841 - DNA, 1052 bp, Homo sapiens
caggcacacctccttttcttttattgaaattctcaaagccaggtacagtggctcacctgagtttattcaaggctaatccgtaattagggaaataaaggttacagctgcctgttagtgactcaggtcgtataatcacattcctttaaggctcaaaataacgttccaatagctttgattttgaattacttattttcacaagttctataaaattacagagttctcatctatttttgttggcagctgtttgcctagcagttgaaagtgcttagcacatgatagtatatgataaacatttgtttaatttatttcaatattgtcagtccatattccagcttctttggcaaaggagactgttgtttttatatgaatttatccaaattttagttgtttccagctaagtttagaccaagagcccccacagaattacttccatgtcaactagtagaggaagagctttaatttaggatttaaatgccacaccacaattatctaaagtgactgaattgagctactgaataatagtccttctaaagaagattttagacacacatttcatttctgttattgctgacaagtgttttattttacagaataaaaggcatcttgcctgggataaaatttcgaaaggctgtgtttttgtagcactttcttttttggaaggatctctttttagctactctgtgtcatggtgatgttgagttctctgttggaagctagagttcctgggttttttgatgtttctaggcttttgggttttgtttaagatttgtgttttgggaaggaacatttccatggttacgcccattccttctaccatccttgaaaaaacgagccagtagagtaatctgattcctggattactactacacagatgtcttttgtatctgcctacacatgaaactgctaggcaagttccatttccatgcatttacttccttcagtgctttttaaaaatgaagcacttttaagattaggaatgaaagacttggattggcaagttaaacagggattggcctacgttatgttaatagtctaaactcaatgtaggatta

SEQ ID NO: 39842 - DNA, 1045 bp, Homo sapiens
tcacagtaagtctttatgtctgatagggcagcttcctctagtgtcttcagaaatttcctgactttaaaaaaaatccttattgttcatgcttttttaaagaattagctttacatgatgcaagaaaaagatctgttggaattttgattgtaattttgttaaatctataggtcaactaattacaatattgaatcttcttatgcacaaacatggtatatttctccatttattcaggtctttatttaatgtctcctaatgtctttttgtagtttttacttagagatcttacatatttgttattatatttactcctaggtacttggtattctctaagattattgaaaatgctgtcttctttttaattacattttcaggtatttgtcattggtataaagaaatgtatttgacaataatcttatattcaccttaaattctcttatttctaataaattgtactttttttggttttctacaaaaatgatcatatctaaaaataaagttagatttgtttattcttctgcatcattttgaattcagtttattatttcatgtgctattagaacctttaatttagtattatttattttttgatttgtaaatcggaatgcttttattatcttttcatttaggatgatgtttactgtaggttacttagatacgctctatggaaatctcttttattttttctaagaccttttattatgaatttaatgttgaattttatcaaatgctttctctgcatttattagaataattatgatttttctctatctgttattataatgggtcagatttatagatttttctcatactaagcctatccttgtattccttggataaatctaacttggtaatgtttacttttttcataacttttagctattaagtagataccaaattttctttcaaggtcaagtttgatagttataaaaaactagtgatactaagtcatagaaaatatactttaaaaaactagtgatactaagtcatagaaaatatactttattttataaaaagactttaactgtaaaaagtaaaaaaaaaaaaa

SEQ ID NO: 39843 - DNA, 1064 bp, Homo sapiens
cctggaagcagcgtgacgatcactttcattcttgtaatcatctgagtttgcctttgtcctagaaaattgagttcggaatctccagactccatacatatctcttgatttccaggggagaagggttttaaatgttcttacaaaatgtctcttgttgcctgaattccaaacgttttgaaatgttagggccgggcgcggtggctcacgcctgcaatcctctagcactttgggaggccgaggcgggcggattgcctgaactcaagagttcgagtccagcctggccaacatagcgaaactccgtctctgctaaaaatacaaaaaattagccggcgtggtggcgcctgtagtctcagctactcgggaggctgaggcaagagaatcgcttgaacccgggaggccgagatcgcgccattgcactccagcctgggcaacaaaagcaaaaacgccgtctcaaataaataaatgaaataaacttagtaaactatttttaaataatgttaaaattaacggtgtacgtagtagaactgtgagagatctcatcttggaaatagagtgatatacttgaaggcaagagattgggtcaggtactattaacacgttttacacatgaacaaaccgacactaagaggtaaggtaatttgcttatgattgagttcccaagtacaaagctgatttttgaactaaaatctgactcgaaaatctgctcttttcttatcaggctgcttcctacaaaaatataacctcgcttagcatctgcttgttaagcatccaccctcacagctctttggcattcaaatgtttgttgagtaggggtaatagagcactacgttcgaatcagaaaatgccttatttttccttgcttgcaagagcctattataaataaatgccttgttttcgctgtgtctctttcttgttgtcgagagctcaggctggtcttaatttctgcaaccatagtattatctcccaggtctccttctgccctgtgtattttgcagttatgctttatgtggagatgaagcatcctaagtgtggagaacgatatatggggcccgaacaataggtgctga

SEQ ID NO: 39844 - DNA, 1050 bp, Homo sapiens
gcaagaattgacctgatatagcttatggcttatcagtgagtgcagaggctgtttcaggactttgggacacttcactaaattctgtgcactttagccttttggtttcctgctgtccactgtcttgcatgcacttcacttcttgcctttggcaaaatttacatggtcattcctgttctggctgcttttatctttagttgcttacagatacctccctggatggttacttttccttttatttaaagttactactgttagcttctgtattgacttattatcttggaatccttacagccaattatttgcagccagtttgctgaggcaagtataaagaaaatatctatagacaaacatggcattttgttatgtataggctgggaacaattagaaatcaggctgcagaaatgtgagggttgggaacaaatagaaatcagtctgcctaattgtagttctctgcaggtcactagtttcccggtagttcagctgcacatgaatagaacagcaatgagagccagtcagaaggactttgaaaattcaatgaatcaagtgaaactcttgaaaaaggatccaggaaacgaagtgaagctaaaactctacgcgctatataagcaggtaaatgcctacggtcgaacgttatttaaagaattttgggcaaatgacttcttaaataaatacactgtgtgtttactaaaatgtggccttaacattttggtttgtcttgctccctcttctctgaagagtgtgtgtgtgtatatatatatatgccagttttttatattagaccttgaaatactattaaggcacaaagtgcctcagtgtcacacgagtaaaagagacttacgagatataatattcacatttgtagaccttacttagctcttgattagaataaatcaactgaaaaaggtatttttaagacaattggggaagttttgagtaaggacagagtgttagaagatacctagaaatcatcgttaatggtgtcaaggttatataagaaaatgttgatatttttaagaaaagtgtactaaggatataggggtgaaatagcat

SEQ ID NO: 39845 - DNA, 1027 bp, Homo sapiens
tgatggcctggaagcatagctggggtgcaggcagggttgtggccgctcgcagcctctaagccctcagggacagtgcacacgtggagagaagtcctttgggggattgagcagttttttgagcaagcgcatatgtaaggagcacatcagaagctctggagaggcaaagtcaagcctttgaagggcataggcccaagcactggctgcccaagagaagccccaggcccttctctgctggtagcatctgctccctccaggtgctggcggcatcacctagtcatgcaggtgacatggggcctcacacaaaaaaatgtaaataaaagcaagattgatgagcttggtcataccccatgtagtagttcatatccagagtcctgtgggaacatcgaagtgtggacaaagaggaaaccaaaagaacagtaagagggttcaagagacatgttcacaaaatagttatgaggagggaaaagaggagggaagcatcttctccaaatgcacgtatttgtgactgtcacttcctctcaaggggcactgaaatctccagatatgatttccttccctgaagaggaagaagttaaaggtggctcctttttatctgccatctgtcagccaggcagccttgtcactttgactttcttcaaagagatgtactccaccactatgaagcccagtagttccatttactcctgagtgaggggtgagctagggacgcaatttgtatctacgaggccacagggcattcttattttgcaactccatatcacccctgtgtacagctgggagcagggtgtgtgagcggtgatgggtgccctgcttccaggatataaatgtcatcactgcagtcctcttcactatggcagcttctataaaatatttctctgcagacagtaagaaacctaaattgggattttcacttaatttttattaatccaagcagaaccaagtttgctttatagagaaatcaacaactgtaagacaccctctcccattgcctgcccagactcttcctcgtccaggtgctgatttgtct

SEQ ID NO: 39846 - DNA, 1095 bp, Homo sapiens
ttttctctacggcatagcctcaggagttgtacagcgtcacctccactgtcaaggttatagaacctgtccaggttcacatagagagaacacaaaccccttcactcagtagaggagggtccattcattgtaatacaatcattggaaaacaccatctgccacaccggtttccttatcacctgtacccgcatcccccccgacacatgcacagaaacagggcagcctgtcacagaccctcagcgatcatggcatgggtttgtgctgggtaaataggtgcgtttgtgggtcagctctgcttctggtttgtagtttgacctggtcttaacctctctggatctcagtttcttcttctgggaaacaaaaaggctgagctccaaacccagtcattggaaactttaacgttttctcttaaccttttttataccctcatgcctattcctcagtggtagtgagggtcacggttcagtttggtgggggggtaaaagtttggaaaagcctccctcaaaagctctagaatcccttccagctctgacctccgtgagtgttgagatgctggtcatgctctttggctttttgggattttactttcctgctctgtaaaatgaagggtctactaaattatcagttaaactttttccagctgtcatgtttgatgttagtatgcgttttgatataatgaggttccttcatccacaccagtactgttccgctacggtggacatgtgcgttggcagaagaaatcctgtatttacaagttcctgcccaggctattgaagaggctcttcctttctgtggaatgatagaagcttgagtggcttttgcagcagggacctgagaaatcagcctactctccactttacagagagaaaactgatgcgcagagaagccgagtgattgccaaggacagagggcgagttattgataaatcaggctacagtcctgtgacctaaggcagtgtactttactgttgtgacctcatcctcttaatagaaaatatgtgagcatgaggaccctgagacataccacccccatctctcccatctgcattattcctatgaagggccagtaccctcaacagtgccatcttctttttatttc

SEQ ID NO: 39847 - DNA, 1014 bp, Homo sapiens
aataataagattaccaatggttcaacagaaacaaaaccaacagcctagtgtattgtgacagtcctgggacacagaggcagaattaggtacgtactgccttcatttaaggaacctgcaagcccagcggccttaagtatgctactaaggatatagtactagttgtcacataaataaaattctaaatcctgtcattaaataagccacccttatgcctttctcatctggcagcaagtttgtcagcacagggcagtgggtaaagagttgccgtctgctgcgtgtttccatttgccccgtgacctagcctggaattcctaccagccaacaacagaggaggcccaagaggaaggctttccccagaaacacgcagtcccatcccctggaaacagttccatgagcacattagcttagctgattatgagagtagctaggcatcagctcaggcactgagtaaagcagacctttgtaatggggctgagggaggaagcgtgtacaacagaggggaacagccaggccggagacagacacgcagctggggctgcctcacttctccgtttgcctccaccagccatgccttctgactggacattttcaccaaagaagatacgatggggtatagtttttaaaaaaatattagaaggatggcagattattaaaagccagctctcgccccctatttaatctagtacgtcatgccggcactggaggtagtacatgtgtgtcattcattgtttgtgggtgtttccccgagtgacatagttgtcgcttagttgccgctttcctaggaaatgcttttggcatcacatacttgcctgcagctgatcagggaagcagcttggcagggcaggagaaacacagagctgagtctgccgctctcactggcgtgctaaccatgggcaagctgcttagcttctcagcgtcatgttgctcctcatctatagaatgaagttgggtcagtgatttttctctaaggtcctttccagttcccatacttagtggttccagtgatacatattg

SEQ ID NO: 39848 - DNA, 1031 bp, Homo sapiens
ttttcccggtagtataagatgcaatagttattttctatccatagttatatcagaagctgagtatttcaaattagcaaacaaaaaaaggtgtataccccattcatagcttaaaaaaaaatgcaatgtatttctctagaaatggatctctggatcagagcccagctactaataacccaaataaacagggacttcctgtccatgaagagtacaccattaagaaacatcgagctcagcattgtttgtgtgtgaaatgcctccttcttgacaggagaagaaggaaggtgaattctacttgtgattcagaatgtaagaacattcatcggacaggggttttatcgtttatgttgcgtgcccagcaccacatgaagtgctattatggatataaaaggagttgctgttaaaaaggcaaaataagatgaaacgaattgaaaaatagaggcttttatgaaaagtaaatacattatggtgtacttattagtgttacaggaattaataggcgaagagggaaggcagtgaagagtgtggaggaattagtctgtttctgtgtatttgtgtaggcatagaacaagacattttctggtataagactattaatggtgattatctttggggagggtgaccagagggataagagagaaggaaaattaagcttttaactttatgcccttctgtgcttttaaaaattttatcccttgcgtatattactctgacaacaaaaagactaatgtaaggtttttgttttaattaaagtatttgaacttacgggaaaaaggtatctacaccaactgaacaaaatgcctcaagcctcatgatgggttgggtcaggtgatgagagtacagctgatcattcaggcaacaggaacttctggaagccagtgatcaaagcaggcattgggctgggccggcagctctcacctataaaaccagcatcttgggaggctgaggcaggaggatggtttgaactcaggagttcaagactgatttggtttgaatggctttttggttttgacaagtttcaggtgtatatacgt

SEQ ID NO: 39849 - DNA, 1066 bp, Homo sapiens
taactttctcctgtcctagtatcatttatggaataaggagacatttttgtcttagtccaacacaccagaacgcaaggccagaacaccctcaattccctgcattttgcttccaaaggaaacatccatccttttgctgaagtgactggtctgctttgctccgagttaccacgttttcctctgtgatgctagtaagcctgctccttcagctgtctgctctcctaaacctccccttcttcctctccacatagcatctccccagtccagaaagaagcctttggcttccgggctttcaagtcatgcttctgcccagctctttccccttctcctctatctgcagggtcatttgcactcataagcttcactgcctccccttaacacctcaaccccctggcatccaagcagtaaccccccatgctgcgctgaaccagctcctgcacagatacccagggttccaggcatgccaaaaacatgtgcgtgcctttgtccagtttgacctgtccaaagcgtctgaccattctggctggccactccaggaggctctcccagccctcctcactcctgcctccccttctgctggccctggcccagtctcgtctgctggccctcccactctgtccctctaaaactcaggcactgcccaagctttcattattggtccctctctttccctgtgatcacatccaccgccatgacacacctgtctcctgcaaggatgactctgaagtctgtctcctgtcctgacatctcacttaagtgtggtggttcagagcacaggtgttgaaaccggacaagcctgggttcagatctctgccactaaccagctgaccctgagcaagccacttagtattcctcagcctccttatgggcttgtctctcctcctggactgtggggttgctcaggcagagactagatattagattagattttaccatattgaatgcccacttggtgtcaggtgttacactgtgcacttgatgcagcccatctcggatgaagtaggtgtgtgtttgtattccctttatatctcaactcagagctatttgaatccaaaacccatttcttccc

SEQ ID NO: 39850 - DNA, 1035 bp, Homo sapiens
tctggcttggcatatgctctagacttatataatcaggcacagccaactcaggcacttggccccccccttcaaccaactcagtgtgtcatagtcttgaatcctcttgaagaccttccttgcctaccttatcatgaatcaccagtaagcacctatgttttttccaaaggacttggtttgaggttctgttagatattcctgttgactagatgctcatctgtttcagtaatctcacttgaatgtggaagcaccctttgtttcctggcagcctaatttctctgcacagttacagtggttagatgtgtattgatgagcattactctctaactgctcgtgtcaaagcacttggggaggctcatcaatcttgtgcgtttttaattgacatcaataatgtgtttgcatttatcaatatttcctaattgccgagttgtcacagtggaacttctataataaatcatgcccacagatagcttcagaggttacagcttaacattcctgtcaatattttgatgtattataaattgtttttatcagaattttttcctgtgagaaaggaggagctgtacagcaagagacaaaagaattgagtcactgtcaccatatacagttatgttaaagaaccaaatcattccaatggaaatagaaaaaagctatttcccaagctgatacaattcattcccataaagtttggcatcatcatctagattaatgcaaatatgtttcccctgatagtggtgtgctgtgcccagctcctctgaggagaggcatctggatggtcggacagtgagcactcttaggaggaaggcactgtaccaacctgcttttcagaagaggaaactgtgaggaagcttcgtgagctgcagttacttgcccagagtcaaactgcttttgcagagctggaactcaactcagggccgtctgagtccatgtttggactcttgacctcttagggacaagcttaaacccaaaggaggatgaggcctggatattagaaggcatgagtctccatcatctgttaaagcaggtagaggcagtagg

SEQ ID NO: 39851 - DNA, 1050 bp, Homo sapiens
agctggaactgggcatttgtccaagactccttcctcgccccaacttccccgcattctgtctggacacctcccaggcccactccctccacttcaccctcactaccttcacccatcccatgctgacttctaacctgggtggctgtgtccgtataccactctcagtcccccctgcaccctgccctccttactgtgaggtttctcaagtacagcagcaactaactgagctgtgtgctgggcactaggataaatgtggtagttggggaattcttaggaggaggaagttcagtggtttctccaattaaagaccttgtaaggagaacagagaactgaacccaatctttgactccagaacctgcacggtctcacccagccactccacccccttgcttcaaatttgccagtggcgccatgtggtttctggaatggaattcattcttagcttcacatggcactcttgttcttgcctctcgcttcctgtctactcttcatgtcagcaaatccaacttcttgcattttcttaatagtgccacacggctgtagaccttcatgtgattccatattgtttcctatgtttggaacacactttccttccttattagcaaatttttattcatccttcaaaattcaacttataggtcaactctgggtaagcactctgaaactgcccaacaccaccctgctccctttttttaattttttaaaggaaagaagaagaataaggaaaaaactatagttgtttcttattgtttttgggataaagtccagaatccttaccatggtctgtgtttcctgcctttctcgccttatgtcctgtcaccttcccatttggggatggtattgtcactctggcattttctcagcttcttaaatgctctgctccctggtgctcatgctgtccctctgtcttaagatcttctgcactcactcgcctggaccccagcaaggcactctgcagtcctgtaagttcacagccccatacacgtttccacagtgacacttgcaccacttgtaattgtacatttattttgttctgatctgaatcatggttct

SEQ ID NO: 39852 - DNA, 1031 bp, Homo sapiens
gaaatttctcatagctaaccgtcactttgccaattcagttaaatttgttgaaccatatacttaaccagatatttattagtcatccaaagaactctgtcactgtaatatgtagctttgatatgatgcttgtttgatgtttcattcagcaaacatttattgggtacctgccttgcgccagactcattgttccttgctgaggatgcagagataaacaaaacataacctttgcccaagaggcacctgtagttcggggcatagactgatagattccctgaaatttctacaacagcatggtgacaatataccaatagtgaaatggaacagaatattgtggaagcagataggagagacagcagcctaacccgaaaggggatcggagctgaagaaagcagtggtggctgacctgagctgtgaagggctagtagggactagctggggaagggaggcaggagcagatgagaaacaaacagtgtagttggtgttggctgtaaggaactactagcactctgtgttgctgatggcatgtagtgggagatgagggtggagacaggtgggactactaatcacagagagctttgtatgctgtgctaagataagatgctagaacgtggtcctcggcattgaaaagccattcaggtgttttctgcagattgcagactctcctttagctagctcaccccatatagaaaagacgcggaagacatagaggccagtcaggaggccattgccctagttgagtttactcagatgtttccagaggcctggctacagcaatgtgacagcacagggagaaggggactggctttgaggtatgttgataaacagaattagctggccttagtgtttggttgaatatgttggattagagagaacaaatcaaactaaggttatgagaatatcattggaagaagaaaagttattccaaatgaagcatcaaacgtagaggacactgccttcttggtatgaggaagacatttttcttgagtacctttgtgtacagtatcacttcctgagagcatctggacattgca

SEQ ID NO: 39853 - DNA, 1024 bp, Homo sapiens
agcccccagaaggccacctaagcaggctggatgctgcccagggctgggccacagcgtgtcctttgcaagtcagccagcccagcccccgaaccccatacacacacaaagacatcttgcaccccaggagcagccccacagtgcaaaggagtccatgcagctgctaatggctgctcgggtttgtctgatctgtctggggtcaggcacagcctccaggggcctctggcccaggttgcatctttcctgcagagcagaaaaacgaagcacagttaagaaaaccccaagaaggcagtcagtttcctcccttgagtttccggggtggacttccggcagagtttttggagaactgactgttgcagttaaacaatgtgtctggcaagaagcgagacttcctcccttcctgctgcctggctcatggggctgcagcctcacttctggaggtggcaagaaagaactgtggagtctgtgatctaagggatccctggcagcccacggcagccagagaaccacacccactggagaactctaggttctctacggcctcttgttactgccagtgcttgtgtggtttgaggtgggtaatgcagcagcctcctgcagccagcccaggactgggcagcatggggccaggtagttagtgtaggagagcgagcctaggcttgtaaagcaagacttggctctgtcactgggcaacttttttatttttttatttttttttgagacagagtcttgctctattgcccaggctgaagtgcagtggcatgctcaaccccttcctccctggttcaagcaattctcctgcctcagcctcctgagtagctgggactataggcacgtgccaccacgcctggctaatttttatatttttggtagagagggggttttgtcatgttggccaggctgttctcaaactcctcccctcaagtaatctgcctgccttggcctcccaaagtgctgggattacaggcatgaggcaccgcgcccagcctgggcaactttgaagaagttacttagcttctctgagcct

SEQ ID NO: 39854 - DNA, 1049 bp, Homo sapiens
gtgacagggcttgctggggaagtgttgggagacgaaggagggagcgaggagaaagagaaataaaagggatgagggaggtgagaagagggggcgatggaaacagaaaaagatacggagcgagatgcgggagggagctggaggaaaggaatggactcacctacctcccacccacccacacctgctcacacaccgacaatttgcactagacgcagcgttagctgcaggtcgggcattcctgggtcacgtctttcattcacctttaacactggcgagccccgaggctgggcgctgggagaggccgcccgatgcgatgaggccgcgcggagccagggtctcgcaggaaagggcagtgggcggcagggcggggtcgtggcgctgctgaccggtgttccctcctccccgcagcgtatctggtgcaggccgtgagagcagcgggcaagtgcgatgcggtcttcaagggcttttcggactgtttgctcaagctgggcgacagcatggccaactacccgcagggcctggacgacaagacgaacatcaagaccgtgtgcacgtaagtgtcctctctggccggctggacttcggttttgggggcgctactgaggtcggagagtgccgagcctccccgcctgcgctcagcgttcagcgccagcgcgaatccgcatcggctcactcttgccttctggctccaacccccaggcctaggaccaggcccccgggttagaacctgcgcttcccaaggggatcccacagcccggggtgggatatggaggaggatccttcaatatagacccagtcccagctctacgcggcctctcaggcttgcacagaggtgcgcatgctcgacatgctgggagccagggcaaggggcatgaaggattgctacaaaatcttggtgctgcaagatctctctgccttgtagcaatcttgatcattctttgctcttgcgtgaacgagtgacctgccaggtgttctctgaagaacagttagtttggatttgaggagtgtttggggtaatactacatttgcctaaagggaaagtcactcctctc

SEQ ID NO: 39855 - DNA, 1051 bp, Homo sapiens
ggctgaggtggatggatcacaaggtcaggagttcaagactaccttgaccaatatggtgaaacctcgtctctactaaaaatacaaaaattagctgggcgtggtggcacgcgcctgtaatcccagctactcatgaggctgaggcaggagaatcacttgaacccgggaggcagaggttgcagtaagctgagatcacgccactgcacttcagcctgggtgcttccgtctcaaaaaaaaaaaagttcacacatttttagacatttcagtgatgttttagaataaaggtgatttaagattggttttacaggcactcttgggctgtcagctagttggcttttcagatgatgatcataaagacactccccctcacgcaggtatatgagtaagtaaggtctaccccatccacactcccatactgactttccattcccaataattgcacagactgcatactctgatcgcttattaaacatttctaaggaagccgagatggatctttgatgtaattttctcatctgtatacccagccagtaagtcagtagcacctaagatttctttcccttcaagattgtattctaagcagtagaattaaagtgttcttcatagaaaaagtaacttttaattagaggctgtgcaaactctggagaatcagtctttgttaccagataataatgtttttagctttttctgctgagaggaaaaaatgctttgaagaataaaaaatactagagcataacaagcttggggagttaggaaaaaatatattagggcagtaagaaccagcattacgtcttctctgcaatgcttgaaacattcagtattaaactttggattaatccaaagtctgaagagaaatacaccaaaatgctaaagccgtttttggttaggatagtggactttttttttcttcttcagaatgtttgtaatgagcctatattttataatggaagcaataaatgcaaatgtgaaatttatctgagcctcctacaatgagtataataaatccagtggttgtggatagcttatttgtggccccaaaagaaacggagccact

SEQ ID NO: 39856 - DNA, 1094 bp, Homo sapiens
tcctatgttcttggcttccttttcgtcgccaggttttcagctttcctttagctcttcttctaatatggcttctgcccacaaaagcctgctctgtcaggatctcatggttctccacttgccagaaccttcttcagcctcagttcctcggcctcaacttgtacgtttaacccattgaccaccaccccccaaattcaccttcatttctttgaccctgctcctcactccttttctgttgaggaatctgttgactaactccaggctcactcaggctcaccgtcctgctctctgcaccagcctttccagagcgtgccagttctcatggcttcatctgttaactgttgatcacttcagtcctgatttttagacctaaatggtttccttaacgccattctaactgcctgtgactcattttcacttacagtgtttattgtaacgccaaaccaacaaatcacaggtgcttgcttctctccataaatctccccagtctaactttttgtcattcaacatgactcgtttatccaacctgaaatcgcatatagccccaagtatggtgttttgtacacaggtatttaataagtgacttccagttttggctctgctatgaataaaaagagatttcagttctcttcactttgaaatctaacaactcagagaacattgaagaaattggaatttagttgggatgaaatacttgtggtttaaaatatttctgttcatattttctaatttgttgccggaggtcttgggttttctatttgagtgcttgcaaactcaatgtgatttctgtcagcatatcttaggtttgtttgttatgaaacttatgcagtgtgaggttctatctgaaaatgttatttagctatcttctgggactatttaatgaaagtggggtcatgaatccttaaaattcttgtgcagctttgagaaacatttctgttatttgggtatcagtttgtaagtgtggtaaagccaagatggaaacgagcactttgctttcttggttgttgttactggtctaacctcctgcttgaactagtctgctgtcctgtcaaatgcatctttttatttacatgtcccttaaattaaagctgatcatg

SEQ ID NO: 39857 - DNA, 1046 bp, Homo sapiens
ttaaacatcaatcacgtgctgtgttctgtttgttttctagtcatcatatcacacacctttacgacagctcactgaaggaaggtgatactgttcccattttgtagatggaatagacaaaacctgaatttaagtagcttgctcaaggttccatattgaatatggaaagttcaaatcatctcagtaatgaatataccatatatacttgctgtattgtatctatgataattcagttacccacaatacccttttaaatttctgttaatgacatacctttaaatgtctccttgatgaacagaatcatggtctttaaaaacattttcatgggttgattgcattttcaagctctaaaggattgaaagataaatcttcacgttaaaggtaagagtgaagtatctgctcttgggttacagaaccagatagtactagaactaagattacagggtaaagctgcttttatcttttttctttttctttttctttttttttttgacatggggtctcactgtattgcccaggctggaatgcagtggcatgatctcagctcacggcagcctctgcctcttgggctcaagcgattctcctgcttcagctttccaagtatttgggaccacaggcgcacaccacaggcctggctaatgtttttgttttgtttttggtagagacggggtttcaccatgttgccaggctggtctcgaactcctgagctcaagtgattcacccaccttggcctcacaaagtgtcaggcttacaggcgtgagccactgcgcccggctcacagggtaaggcttctgtctggtgtgttgtattacggattttgcttaataggcacagtgaggcattaaaaagaaaattcagtatgcctgtagaaaggataatccttgtttaaagtctccaaattgcagtcaaagatgttttgactgtgcctttttttgttcccctgctgtcccttatgtagacttctgtcagtacccatggcagcctgtcatcttgttgacatctccttctggactgtgagctctgtatctggcttgtttttcatccccagc

SEQ ID NO: 39858 - DNA, 1044 bp, Homo sapiens
atcactttgcaaataggggctatcaaattacctatattggcattgctggattataaactctatatctgtaatataaagtgtttgagtttttaattgggctgttatgatcagtagttgattttgagaaagctctatgagctctaagtaactgcatggttttttgtttaatgtaatataggagacccttcacattcccaaggaatatattccaaaacatttttgtgaatatctaagtttgtgaaactactagggcatgatacagtaaggtgtaattacagaatttacgaaatgtaaatggcctctacagagttttatggaatacctggtactaacgtaggcagctgcaaaaccacactgagttacagctgtcagccctcctcattcctaaataacttgccttacatatcagccctcccacttctgaagttcaaattagtgcctcggaaatgtagaatttattatttgtcatttttttttttttagcatagattgagaacagttgaactcttaaatcctcagatgccaggggtctgctctagcatcagtaagtatttagcagaaactaactccgtaatgaatggaattcaattccacacatggtttgttcaagcacacttaataagtagcctattttttaaatgtctttttaaaatgtaaatatttggatgaagtttttctttgttttgatatattcatttgctacaccaactatgttttcagaattcatcttttgaacaacttggtttcagaatatgtaaaatgactttaaggatcttgtgtatcaaacctatccccggatgtgtgagaataatgtgttcataaagcatggatctcgctttggttgtatagcttcctcatttacttcatggtcttacatagctggtgactttcagggctaatctgccctctaaagcattgtcccaggagaggaaaaggaaatgggacctcagaagtagaagcctcagggaaggagtaaagtagaaatcagaagaaaagaagcttcacttgatagtaataaggtttttaacttcaagtaccttcaga

SEQ ID NO: 39859 - DNA, 1062 bp, Homo sapiens
gattcctaaagggaaataaagtcattgtataaatagatactcttatgtggtccaccagtggtacataacatgaacctttatagcaaggggaaaggtctttaaagcctgaaaataaatgtgatgaagatttattctttatcatcagtactagacatgattttctccttccctttaataaagtatttgagtagaagtatgttctaggaagactagaagagaatataacttgtttaccaagatatttaaattaagtaatttgataggtgttttaaaaattagagtaaacagctggtcatgatagtatgtgcctatagtcccagctacttgggaggctcaggcaggaggattgcttgagcccaggagttccaggcagcctgggcaacatagcaagacctcaactcttttttaaaaaatattaagtaaatggtgtaacggaactcctttaaaatatgtctttatgttcttttagcgtaagagacccatacagaaagtagaaatgggtacatcaagtcagaatgatgttgacatgagttggattcctcaggaaacattgaatcaaatcagtaagtagtcttacagacttggctgggaagtttttctcttaagtggaaattaaataccttagatttagtttaaaaaaaaaactttttcagtactatttaacattcatcttttccattacttgtgtagaatctagtatagtgattaattaagaccttaaaggtttattcagtgtgtagtcttcttatgctttaatttggaaattcttccagatctgcagcttatttatgaatgtgtgaattttctgtgttcctaatccatttcctgtctcttttctttctgttgcttcagtgcagagtagaagaggtgaggcatttaatttttttaatggtttttgctagagaattgggggctctcaaatagcacgtaaatattttacgtcaagtttaatgagtaatggaacaatttttcttactacattttattagaaaaactacccagtataacttgaaagaataaacctaaaatattacccgacaatttattttacagatacatttc

SEQ ID NO: 39860 - DNA, 1080 bp, Homo sapiens
cgcctctgcctcctgaagtactgggattacaggtgtgagccaccacacccggccagtgcctaggttttattaaaagaaaataattatggctgataatttattgagggctatattctcaatacttggcatgtattatttagttctgacaaacccactgagcgtagtcattgtcgaactgaagtttggagaagaaactggtcagggctcccagttcataaatagattggagaacacaggatccagacctagatctgttggccccatagcctgtgctgtactcagtgaaactcagctttgtagactactgtataattattgaagacttaatattgaaagttatgaattttcttggtcttcttacattttctgttttattctcatgtgcttttgaactttatgcctgtaggaagtataattttattatgctttttttcttccatttttgtagctacatccttgggtcttaaccttcaaatttgcattttgattaattgcttaacgtggattgggattgcctgattaatttttacgttctaacagatgctagttttcagatgaaactcttggactttatcttttcttcattcttctatttacctgcacagataacactaagctggaggtgaaggtgacttcaccaacacacgtaaccctgctgcttgattatttcactgccaaaaatacgcaactcttttttaccacatgatttggatgtgatctggtctgaaattgagacgcttattgaatgcttatgtgggagtgctagcgtacagacaaaagggtttcagcctatacagcaacttgaaccaatttctcgttagtaggtgactggagtgctctattggaagggattctgacaccaaagtccacaggaaagggtgccagaatccattagtaatgcctttttaaatattttgtgctctttccatgtgttctaatttttttgtctctattttgtttctcagattttccagcaaataacattgtgaagttcctggtaggctttaccaacaagggtacagaagattttattgttgaatccttagatgcctcattccgttatcctcaggactaccagtt

SEQ ID NO: 39861 - DNA, 1034 bp, Homo sapiens
ctgcaacatccccaaagaattggtaggcacattactgttcaagaggcactgctccaaaagttctgttttaattaatgaggtatgatgaaattcttattgctaatcccagcaaagctgtagagaagcaatatttcttcctaacataaagtgaagtctttatttcttttttttgagtcggagtcttgcattggggcattctcagctcatacaacctctacctcccggattcaagcgattctcctgccttagccttccgagtagctgggattacaggcatgtgccaccacacctggctaatttttgtatttttagtagagaacggggtttcgccatgttggccaggctggtctcgagctcctgacttcaggtgatctgcctgcctcggccaagtgctgagattataagtgtgagccaccgtgcccggccaaatctttatttttaaataatgatttttttttctcccatagtaatctcctcttaattgttctttttcttaggtagaagataaagaggaagaagatgtgtctggtgaacctgaagcttcaccgagtgcagatacaactatactgtttgtaaaaggagaaggtaatacagaagtattagttttaattcagatgtaggcattttaaaacgatgagcttgttcatatatatctgaatacccatatctgtaaagtaatattgttggcatttaaagggaatacgtaggtgatatagacacaataaaaaataaaccaaggggaaaaaataaaataaatactacctagtttaactagaaattgactgtccttttcaaagattttgtttttgagacagggtctggctctgtcacccaggctggagagcagtggccccctctcgactcactgcaaccttcacctcccaggtttaatcgattttcctgcctcagcctcctgagaaagatgatgttttaaaacttctttaaactgccacagcaaagtaactttgtcttttttttttttttttttttttttttaagatgtagtctcgctctgtcacccaggctggagtgca

SEQ ID NO: 39862 - DNA, 1069 bp, Homo sapiens
aagcgtctgctttagggtaaagtcgttcctttgaggctgatctttaatgatgtcattttgaattcagaagtgaacacacagccccacggctgtgctttctaaacagtagtctgctcctgttttaatggaatatacacctttaaaaattagccacagaatttttccagccacaacggtaggagtgtatctggttttatttaggaagcaatttgcatgtgatctggaccgctggtttgcaaacttttttcttttttgttttaaggtacgaggctaccccacgttattgcttttccgaggagggaagaaagtcagtgagcacagtggaggcagagaccttgactcgttacaccgctttgtcctgagccaagcgaaagacgaactttaggaacacagttggaggtcacctctcctgcccagctcccgcaccctgcgtttaggagttcagtcccacagaggccactgggttcccagtggtggctgttcagaaagcagaacatactaagcgtgaggtatcttctttgtgtgtgtgttttccaagccaacacactctacagattctttattaagttaagtttctctaagtaaatgtgtaactcatggtcactgtgtaaacattttcagtggcgatatatcccctttgaccttctcttgatgaaatttacatggtttcctttgagactaaaatagcgttgagggaaatgaaattgctggactatttgtggctcctgagttgagtgattttggtgaaagaaagcacatccaaagcatagtttacctgcccacgagttctggaaaggtggccttgtggcagtattgacgttcctctgatcttaaggtcacagttgactcaatactgtgttggtccgtagcatggagcagattgaaatgcaaaaacccacacctctggaagataccttcacggccgctgctggagcttctgttgctgtgaatacttctctcagtgtgagaggttagccgtgatgaaagcagcgttacttctgaccgtgcctgagtaagagaatgctgatgccataactttatgtgtcgatacttgtcaaatcagttactg

SEQ ID NO: 39863 - DNA, 1042 bp, Homo sapiens
ctgtgcctgggattctttccagcatttcctactttatacagagaagccaagagtggtgtctgacaacttctgtgtaactggattttctggaaatatccagtgtagctccagggacatcacttttattcttctacactttccagcacccaccagacaccatgcatagatttcctttcttaaaaatctcatttttctaccttgccatggggctgatttgtatccaaaagtaatgctgcgtgtctaggactgaatgatggttaacaggatgatctacttgggatggtgagatggtcaaaagcataaacttgggggttgggtagacctggctggctgaccttgggaaaaacctctccacgcctcggtctccccctttgcaaaactgagctaagatctactgtgtggtgtctgggcagatgaaagtacactgcttagtgtgatgcttagcatggggcagatgcttggtaaattgtaatcacttttgttgtcagttaaatggatatttcactgttgcctcttaaacgcttacgataatatatactaattatacatgttattatcagtttatatttattgaacatttcggggaagtaattataaaataatcttgtctactgtcttaccccattccttgtatccttacttaattattgtatgaaattttatgggagattcttttaggtttatatccatagaggatcctagcagacctaggcgtgagcagacacaagcccaggtgaccacgctgaagcccttcatccctggcacatgtggctgggttacactggacccttaaaaatgcttgtcctctcccgaccttgggctgaggcctcttgtacttcagttccgcaccttagctgctctctgacgggtcttaggtgttgaaatagtatttttacccccgtttgctgacatagtgaataacaacttagtcctgcctattttagtgctggtagaaaataaaaaagaaagcaatgacttagaacaagatgtttcatgaaaatgttgggcaagcagcagctttatgagatttaaatgaaagaaa

SEQ ID NO: 39864 - DNA, 1042 bp, Homo sapiens; identical to SEQ ID NO: 39863

SEQ ID NO: 39865 - DNA, 1042 bp, Homo sapiens; identical to SEQ ID NO: 39863

SEQ ID NO: 39866 - DNA, 1025 bp, Homo sapiens
tcctcttgcctcagcctcccaaaatgctagggttacaggcacgagccactgcgctgggcactctggtgtctgcaagtgctgaccccttcagaatacgtccattgggcgttgtattttgtattctttgtgaagtatccaagtacgtttcaaagaagaggacagggtatagggtaagactgtcctttgcattgtctgctttgtttggttgggttttggggtagggacagctatcacttggctgccctggagactcagacctagagctttcactgagggtgaggctgacgagggggctttttgctgaagcttccagagggcttgacgagatcagttcctgacctggcctcactcagcacagcagcatcgtacaagggttccaggttgttgggtgagggaggcatctgcaggcggttccccacagacacagtcacctcctggatggtttccctgtgtctccactgacacacccatgactgttttatttcctcctgttagacaccagagccggaagtggaaccgcccagtgcccccgagctcaagcaagggctgtatgagctctcagcaagcaactttgagctgcacgttgcacaaggtaagggggacgtcctgatgccagcttcagagaatcactattattccttggcgtgctgggcttttccttcctgctactcaagggctcttagatagcagcatcagtggcactgacaaagggtcactctagaggagctgttgggaccgttgttcagtgcacctcctctaaaacatgagttctccttttgtctgtgcccttatagaaacgccgagtctaatgctaagcacacgtgacccgcacactagctggacagtgcatccttggctaagagtgtttattgacagactcacctcgcttgattgctctttactttattgcactttggagatactgcatttttttacggattgaggattttggcagcccagcatctggcaggtctagcggtttttccagcagcttgtgcttactttgtatccctctgtcagcatct

SEQ ID NO: 39867 - DNA, 1050 bp, Homo sapiens
aacttgctagaggaagtgacacccaaactaaacctgaagggcagatagatttagctaggtggagtttagggacgaagtgtcagagagaatgtgtcccagggccaagccaagctatagtcctttgggaacactgcagatgctgcagtagggctcaggagtaggccacaagggaaggagggtggactctgggatagaagtcaagcgggaggtcagcagggccagaacaactaggatccagaacaacactttgctaagtttaatactggaacaaggccaagatttcatgctgagaacagggcagtgactctggagggatgggagcaggggagagaggtcctggagtactggtccaggagctgccatctgcaatggtgtaaagaaaggactgagagccccattgtcccctggacagagctgaagttgtgggccagctgccctgtgacctgatactcaatgtgcttgtactcttgccttgttccaggtgtggacactgccagcggctgcagccgacttggaatgacctgggagacaaatacaacagcatggaagatgccaaagtctatgtggctaaagtggactgcacggcccactccgacgtgtgctccgcccagggggtgcgaggataccccacgtaagttggaaggaagggggcacacttcctaggtggctcctggctacaaagaaagtcctagttaaacttttggtaaaggtgtgaagagatactaaatttaagcaggcagtccctgtcattagggagaaactgcatttaatgctgtgtctgttttagatggcttttatacttggataacctttaattcatcagtgttgggttttcctgtttataagagaatgtgtttgcaagagaaaaatgacggtcccgccatgctagatgttcaccggtacattttacacagtgtgcatggactgtcatcagttttggcttgcttttgctggtgacttattcgcaaacacccttcctatagttccttcccgtgtgactcccacagggctgttcctgttggaaagaaagtatagagtctgacagacgat

SEQ ID NO: 39868 - DNA, 1034 bp, Homo sapiens
atgtaatttttctagatttcctcagagcctgtaatttcacatattaaagtttaaagattagattttttttagttttgattaagtggctgtgatacatatacttaatgtcacatacaagagtgatcatcctactctacatttcttgaataaggtgtaagcaaaattattatccattataacatttagaattccttaattactgacagttaatgactcagaatggtaagaaataaaatataaaattcaataatgttcccacttgaaggtaggcctctgaaattccctatatatcctggcaactattgtgtaatgcatatgtgcatatacaagcaatgtgtacaggctctttgcattaggccattcttgcattgctatgaagaaataactgatcctgggtaattttataaagaaaagaagtgtattggcttatggttgtgcaggccgtacaggaagcgtggcaccgggcatctgctcagcttctggggaaacttcaggaagcttacagtgatggtggaaggtgaagggggagcaggcatctcacatggtaagagtgggagctcaggagaccactatacttatgattacagtctcattataaaggatacaactcaagatcagccaaatggaagagacttatagagtaaggtctgggaaggtcccagatggagagtgtccatgccctcctccatggaatctgagcacatcaccctcccaggatatcactgagttgttcaccaaccaggaagctctactgagcctcggtgtccagagattttactggggccttatcatatagacatgattgattaaatcactggccacaagattgaactcagtctctacctgtcccctcctctccctggaggttggactggctaagaattccaacactgtaatcacacagttggtctttctggtgaccagcccccatcttgaagctacctaggggccaccatggatcacctcattagcataataattcctgtcattcaggaagttccaagggcttttgaagttctgccccaggaacaggg

SEQ ID NO: 39869 - DNA, 1034 bp, Homo sapiens; identical to SEQ ID NO: 39868

SEQ ID NO: 39870 - DNA, 1034 bp, Homo sapiens; identical to SEQ ID NO: 39868

SEQ ID NO: 39871 - DNA, 1025 bp, Homo sapiens
ttgagttctggggtattgccggcactgtatacctgattttggttttctgttgtggagagtgaagctagctcgcttctatatccgcattttggaactgcaagttgtgaaattattttcttacgtgtgtatttgaggtttacttatagacaccatgatagaatgaatttgtttcttttttatgtgaggaaaatagaacattgttaactgtggtatgcggcacaaatctacttgaataatcttttggttaagagaaaaagcacttgataaattcttgacttttttttttaagtcaatatagtctcctaaaacactgagataacaggggaaatgacttcgtactgagttacaaccagtaagtgttgcagatgtgataggaaggttcagagaaatgggccttcttggtgtcactaattgttcaaaaagggaatgtttggtgcagtctggtgattgtctttgactttagaaaagcaaatttcataaattcagaaagtaaaccttttccgttgtgtgcctaaagagttaaaaggtgaattgcttcaaagggactgtaatttctaaaagtggatattctgtctaaacataacaatcctgatgaggaacaaaagtgcacctttgtcagatgtgttctgattagaattttaaaggacataacagatgacaaagtaagtggcagaagcctgtaactctttttttaggttaggctcagaatcttctgaaagtgatgaagctcctaacaactgccaaatggattttaagttatgttctcagagccagtgggggaaaaaaacaacgcaggaaatgatagaagcactgcttgggaaagatgatgtcatgttaatatgccacagaaagaaggcagagctaatcaactcctgtttttttttttttaaatattttcttttttaaaaatcaatgattgggaacctaattttcaatacttaaatattatctttgatatagctaaaattaatggttactgataaaaacacaactttttgaaaacaaaattcttctcttttaccata

SEQ ID NO: 39872 - DNA, 1025 bp, Homo sapiens; identical to SEQ ID NO: 39871

SEQ ID NO: 39873 - DNA, 1025 bp, Homo sapiens; identical to SEQ ID NO: 39871

SEQ ID NO: 39874 - DNA, 1025 bp, Homo sapiens; identical to SEQ ID NO: 39871

SEQ ID NO: 39875 - DNA, 1064 bp, Homo sapiens
ttactgccctactggttttctctttacctgataactctcaataattctaaagtttatcttagagaaaagtctttgagtcacctattttggaatttgagcccagtgaaatgataagcacctgcagtttgtatcacgtctctctctaaccaaatctctgagcattcttgtagcttgatagcaaattgggtgaactgctccattcactaaaagattgagttcagctttattgcaaacagaattatgaaggtctgttctcatgcatttactcagcctccttcatctgagtcacacaccactggaagtagcccctccttatattaagcaatattgacttgaaatggatcatttcctttttttaggtttactaaagaataccagagaaagaactgtatcttaatctatcttcctttccaatgaagtaaaaaacaaattatttgacctccaaatcctcagttaatgtaaattttgcatttgttgaaaacttggtatttcgcaggaaggacatcaggttttgtactgaacataacattgaacacgaagaacctttataagtcagtgttcactgggctgaaacttttactcctatctgaatatgttggcttttgagagctcttgggggattgatgttgttgtttttcaacttctatctcctacttaagtgatattaacagttgtgcttatgtaacatctgtgttgtgtgtgtatgtttttaatctctacttaggttgacctgacagttcaagaaaaggagaaatatcttaatgtgtctcgctggttttgtcacattcagcattatccaggcatcaggcaacatctgtctagtgttgtcttcatcaagaacagactatatactaattcccactagaagctgtccatgccatacagaagatctattaaaaatgttttaaatggaaaatgtactctagaccacaggactaatgtaaattaatatacagtcattcattatttgttgaagttgatagaatttttgaagtgtaaacttgtgtctgaatgttttatttgttctttagctgaagttttgcaatttttatgtcaaaattcaa

SEQ ID NO: 39876 - DNA, 1396 bp, Homo sapiens
gagctagaaagggatggtggaaaaccagtgttgtaagtgaaatagtctgggagatcccatcagaaatgtttttaaaatctgtaaatttggtgaggggagaaatctgttcatttctttgtttacagtaagtttatatagggaatgtcttccaaaaaagtagcagagttaacaagtcaaggtcattcataattatctcagactcaaagggacaagttccaaagtttaaactgtaaaaagaggtgaaagtggtaaccgtaacctcatcctttttgaaaaactctgtgagtttctggcaaaagtttcctgagggaaaaatgaataaatgtacattcttaaaatagatcatctaaaaatattgtcaaatggatcatctagttaaaaattattagaatagggggttgggtgcagtggctcatgcctgtaatccaggcactttgggagaccgaggctggtggatcacttgaggccaggagttcgagaccagcctggccaacatggcaaaaccacgtctctactaaaagtacaaaaaattagccaggtgtggtggtatgtgactgtagtcccagctactcaggaggctgaggcaggagaatcgcttgaacccaggaagtggaggttgcagtgagcccagatcgcgccactgccctccagtctgggcaacagagtaagactctgtctcaaaaaataataataataaataaatcattggaataaattaggaatttttagaagctttaggagctcttggaataaaaactattttttactgtgagtctgttgataatcctgactctagagactccaaatgtaaaatgtttaagttggagaatatttattttgctgtgttctgtatgttagtatttctttaaataataggcctgtaagcaacttatactagtcctcagtgacaccaaatgctgttctgaaatacaaatatcacacataacattgccctttttacctagtttaaaatctgggtgaacaacttgaacataaacaagcattagtactctattgtttggaaatgctttaccaaatggctgagtggagaattatctgaaatgaaagagcgatgaaaggactaaaatggtaagaaagaggtcagatttgaatcatcatatatttcagcagctgacatgaaatcaagttggagtaaaacttattgttacatctgtttgctttaactatcagcaaagagatttgtcgaagttgattttgaattttattcattcatttattcatttttggtaagaaagctcccatttcttgttagatttgcagctctttttattactggttgagcttttaataaatcgtacattttcttttgaagtccttgctgaggtttatatatggtaaagatttagaaaaagaacaaaatgctcttttacaaaat

SEQ ID NO: 39877 - DNA, 1101 bp, Homo sapiens
cattaaccaggcgtggtagctctgtgactgtagtcccagctacttgggggaatgaggtaggaggatcttctgagcccagggaggtcaaggccacagtgagtcatgattgcaccactgcattccagcctgggcaacagagtgagacctgtcttaaaaaaataaataaaagcaatatttaacaactggtacctatttatagttcctatttcagattttttatctctgtagtgaaagtgtaatataagtaatgttatttaaatgtggagaaagtttattggagctgaagtacattgattaccaccttcttttattccatgctaggttcaatatgttttagtagcttttcgaatttaaaatgatcatgaggcacaacttacctcatttcaaaacaaaaaaagcctgcaaggtaaagaggatttgctgctaaggtatctaagcatctctctcctggtggcagcctaaacacagtctttgaacttgagggagtctgtacttcattttagtgagactgtgctgctgtgagcatggctacccaacagggctccaagaacaatttctatctgaaaaccacaataacaaacttgttggctttttacgaaatatatatttaaatgtgacatatggtttgacatttaactttttaagctttatattaggaaaaatatcatcagtcgtcctttgtgatgacagccagcaggctagtgaacgtctgttcagacccacaagatcttgcttgctgtagcatcgggctgtcattaagaaggagagtatttctacatctaattaaaaataaaaaagatgatactgaagtgtaactcataaaccaagtgtttaattaaattttcttttcctctagcttatgcaggttttgcagtagggaaaagaaatactcggaaaaggagggaacttgtttggaattcctttgccagcagaatgaataaggtcataatcctatagtgcaaaatattcatagcactagctgcaaagttatttaattacgagtctaagtgcactggagggtacttggtttttaggcaggttagaagtgtttcattcagtacagcatgttaaagttagggttacattaataatatttagcat

SEQ ID NO: 39878 - DNA, 1066 bp, Homo sapiens
gcactttgggaggccaaggcaggtggatcacctgaggtcaggagttcgagaccagcctggccaacatggtgaaaccccatctctagtaaaactacaaaaatcagccaggcgtggtggcgcatgcctgaaatcccagctactccagaggctgaggcaggagaattgcttgaacccaggaggaagaggttgccctgagcagagatcgcaccaaggcactccagcttgggcgacaagagtgaaaccctgtcttaattcatctgactcctgcctcccttgctatcctccttcccgtcattctctcagccacaacatgtgccccagagcctgctgtatgctgggctgtttctacccagcatccttgcattactcttctcttttgttccctggtcccagcccttcccttcctctccacttcatttgcatttcccaagtatctctcggttcccactcattcctcggctgcatctctctcaggcgcctaaaccacattgaggtgctccttcctctgtgtgtgtttgtacctcatgtacacttcgggtctagctcatttcactcttactgtaattctttgaaaatctctctaaattataagctgtttgactcaatgattgtagcgacacatatttgtaacaccattgtctgaggtaattcctggcatgtgtaggtggtcacccctccataaacactgaataaatttttaaacgtatttctctatgcttttcaaggagtttcctctatactttctcactgtacctcatcactaagaaggaaataggaccagtgttattggccttcttttacagagaaagaaactaatgcttaggaaacttgagtggtttaaaggcacggcgctcagtttttggaagggccaaactttcagatcttctgactgaagtgtcttaatgtgtggggaagctctttgtcttataaactgtaaaataccgtaataattgaggtctgcgcaggccccaacctatccatggtttggggctgctatctgcctcataaagcaaagtggagggtttgtcttttggaaaaacaaagtcgttttctcctctgaaaaagc

SEQ ID NO: 39879 - DNA, 1035 bp, Homo sapiens
taccaatttactgttattagtccgttttcatgctgctgataaagacatacccgagactgggaagaaaaagaagtttaattgaacttacagttccacatggcttgggaggcctcagaatcatggcaggagtcaaaagtcacttcttacatggtggtggcaagagaaaatgaggaagatgcaaaagcggaaacccctgataaaaccatcagatcttgtgagacttattcactaccatgagaacaatatgggggaaaccacccccatgattcaaattacctcccactgggtccctcccacaacagatgaaaattatgggagtacaattccagatgagatttgagtggtgacacagcgccaaaccatatcaaaaatgttctataaaattaccttcaggttatgtgtataatgtatatatgaaacataaataaatctcatattaagacctgtgtcccattccccaagataccttactatgcagatgcaaatattccaaaacctgaaaaaaatcgaaatttgaaacactctggtcgccagcattttggatgagggataccaagtctgtatctattgttattctgcttttttagaatgtgaagttatattttgtgggatatgccccagctaacattgccatatgatgtccgatagctgaggttgcgttcttaagcattagagaaacaaatctcattccttttcatcaagaccaaatgtgcttgtttgacaatatcatttcaggtagcaaccatctagatttgagaaatatcttgatatatctttaatggcatctagaacaatatgcaataaaacttagtctctgattataaacagaaagtggttaggaatttgaatataaaatgttcttggttaatgtaagaagcgtgctccttctgtcgtaccctaatgtgtgtatatatcgtgtatctattgggcagtttaaatgtaataacgactgtaatactgacataccttgatacaaatgtttaatcctttagtgaagatttcaaaaattgtgcagctttttttttaatcataaaa

SEQ ID NO: 39880 - DNA, 1021 bp, Homo sapiens
cttttaggagaaacaagtataaaaacgaaaaagctataccattatcatttaggaatttgaaaaatatgtataatatgattgagtccaggacatcaactcgtttttaacttcgaggccttattcatggatgcagcatgatcagacttcacgttgagccatgtgacagatgggtcagaaagggaagaattgattataaacagtctcgtaatctaggcaagagaaaatggctgcctgatggagtagggtccgaaacagatattagatatagttatagaggtagagttaacaggaatcttggcaaaatatagaatgtgaggaaaaggaaagattcttaagatgactcccagatttttagcttgtgtttcatactaggtactgttaagtgagattgggaatataggaacaaacagtagatttgttttgaggggaaaataatcagctttggccattttaaatatgaagtgccagcagagcttatgagtagaggtatcaaagaagcatttagacgtagagctctggatctcaggagagaaggcagcgttggaaattcaggtctgtatttccagctgcacatcaaaggggtgagtcagcttgagcacaccatatcaccctagcaatatttctaaaaagttgaaggatgacagctaacacacttatggactgtcatatgccaggcaattttacatttatttcatatagtcctaaccaaaatcctgtgataggcacatttttaactcctcccacttttgaaggtgcagaacctaaagctcagaaaagttaaacgatttgcccaaggctcctcagctaataagtagtaaagccagatcttgaactcatatctgtcaaaattccaaagcatggggaaagcattatgctatactgctttcttatactattacctataattgtattgagtcattacaatatgcttggcagtttactaaattacaaacatctcagaagaaggtgactttgggaaagcgtgaccttctggagaaatgttttgatgccaataaaagca

SEQ ID NO: 39881 - DNA, 1049 bp, Homo sapiens
tgttttttgattaaacgtttttctaagtgaattgagatagtttggaacttggaagagaggcagcatttcaaaataatttagacagcgttatttttacttaattacttaatatataaagtcctagtgttaactttttctcttggaaaaaaaaaagaatagtcttcaaacattagcacagggtttctccacctttgtgtaatgatgtgtgtacaaagaaatgagatggaactttgttttttctgttttataatcgtacaccataggccatgattgattccggagcgcagttaatcaaggcataatggcatggtaagattcttttatttgtaacgttgagtgtggcaaagtatagttaaaatcacgttttttcaggttaatgacaccgtaatgacttttttttcatattctacctttttttggtgtgggacttttgtccttcaggtcggaaaactcaaaaataaactgaaataattgtgacttcaataggtcattgtaactcaacattatcactaattttaatttttaaatatacattgtatgccggaaatgctacctttttattccattttagcagttgaagttgaatatctgtgttgaatttaggaagaggcctcaggcaattatacacacctgtgatttttaaaatatatatatatatattttagtttcactgattactgtgagcttcaaaagcaaagcacaatgttgatcatttagtctgaaaactaattttaattccatgcttcatttttgctccttgcatcacaaggagtttggcccatttttttttttagatgatggttagtatcagtcattaatgtttgaagtggaagggatatggcagacattccccaatgatcacagttattaggtatcagaggtctttatcagtcacactttctcaccagtgatgttcttattaataaaacagcattctaaatgcaaggctttggtgggcaagttttatgagactgatgcctcaggcagaggaaacaaatttattttcatgttcatttcaaatgttttgtggggagtttcagtagcaatgt

SEQ ID NO: 39882 - DNA, 1030 bp, Homo sapiens
aggtcatttactctttctcgagatacagaaatgaaaatctcatgaatccttggaaatcagaaattctgttaggtaaaaagagaaaggctggcacctgatcccagactctggttttcacagttggaaagaatcttacagattcttgaatttccaatttccagttatcttttttaagatggaatcactctgtcacccaggctagagtgcagtagtgtgatctcaactcactgcaacctccacctactgagttcaagcaattctcgtgcctcagcctcatgagtagctggaatcataggcacgcgccaccacacccagctaatttttttgtattttattagagatggggtttcgccatgttggccaggctggcctcaaactcctgacctcaggtgatctgcccgccttggcctcccaaagcgctgggattacaggcatgtgccaccgcacccagccaatttccagttgtcttctaatggctctgcattcaagtactgctcccctcaaatggacaatagattcaaaccttgactctttgaattatttttaaagtatatattgagacagaaatgttttccttaggaactacaacatcactattttcattaatttaaaattaccttaaagacatttgcaaataatagtactttcattaaatacattaataaaaaccaaaggggagggagaataaagcaagcttatttcagagatttagttaagagagagacagagtgcacgagacagagacagagggaatgtgcctgtctaaagtcctagggtcaaagcaaagcgactactcatttaaacattcctgctctacctgcctctattctattacagcatgagaactgatctgcctaatgatcctagtgaaaatcctaaatgatcaatgattcaattatatttcctttactcagcttactaagctaagaaaataaaatatctaacaattagaattagtgtaaggggatactagatttaaattttaattggcaggaaaattacattaactaaatccttccttcttgaggat

SEQ ID NO: 39883 - DNA, 1051 bp, Homo sapiens
aatttggtcttcaattcaagagatgcttcataaaacacttatagccttaaaccattcaagggctaattaaaaaaatagttatgaaatcttagccacaaaaaataaatcaggtaaacattttaacctgtcgttaagtgttgtaacttcaaaaaaccaaaatgcttattttaatgtgatttttctaaaactattgaaaaattaatatttctataatctattaaaaaaaatggagaatgttttctctcaaatttcctctgacccatgggaatgaaaatacttaaatactgtaaagcatatctattaataattcccccaattttttaaactaacaaaatggaatgttaactgaatggaattaaacatagcaattgtcaagccatcaaaattatatatcgaaccacttaggcatgttacggggtaaagtcctcacccctgcatttgagaaatattttattatttttattttaaggcaaaacagtgtttactgtgatgggcagaacagccttttgtatctaggagtccatttgagttctttccaatatttccatatcgttcataaatgtgtctgggggcttccttgtttggaaaatatggatatcgctttgttttcctttgaaagtaattatatcttaagaacatagtatcatgaatggagtagacagggaggctgcagaagccatttctctttgtagataaaaagcattatctatgattgttgtataataaattgatttttacattaaatgcatgttgcgagttttatttggttcaaagcagttaaaatgtatgcctgcatggaattccaaatgacctatcacttgggagttatttttacaataaggcattattttagccatgaattttagacatttaattcttctcttgtttcagtgagcaatggattatatcattacctttacattgtattcatataccaagttaagctgtttcaaaaatggccattcactagaaaaacgtaagattagcagaggatataaagacgataattaataaattgctatataaagccacctagggaggagcactagat

SEQ ID NO: 39884 - DNA, 1064 bp, Homo sapiens
acaaacacctcccaccaaggccccacctccgacattggggatgacatttcaacatgagatttggaggggacaaacatctaaactatatcatggatctgacagcaatcacctgtggatggtaaaactattcggtgaaaattgaatagaaacttcataatgacgactcaatacctgaactcactgttcagtttgagtatcagtggaacagccggaaattacgtacctcctgatgtgaggcagtaggaagtagacagaaccctctgaagtattcgtaccaaaaacattacacctgagtctaatcaagcctgtaaatctaattgccagtaacaaaacgcatgtgtagagaaacaaatgatactacgaaacaatcatacaaacctataatattagaaattcttcataaaggatctagtttttctaagaaataaaagacatgaaagaatgggaggagcaaagagaactgttattggttagaagagacttaaaaaccatttcaaaccaatggaagatggaccttctttggatcgtgatttaaactaattataaaaagacattctggaggctaggaaaacaacgacatttttgagaccgagaaatttgaacatggattgggccattagaagatactaaagaattgttaatgttgatagacaacagaatgacttcatggttatgttaaaaagtctccctatcagaaggatttataaataaagtgatacctgagatttgcttataatattctatacttcccactcccctgccccccaaaatggtgggaagtggaattgataaatactagattggaatcatattgaaaattctgaatttcggcattggatgctgagtgttcatttgacttattctccttgcattagtgaatgtttgaaattttctataactaaacatgacatattattaagacagatggtaaaaaccatttaactaaaatcttttaatatcaagatggaccttttttttgagacagagtttcactcttgttgcccaggctggagtgcagtggtgccatctcggctcagtgcaacctctgcctcctgggttcaagc

SEQ ID NO: 39885 - DNA, 1032 bp, Homo sapiens
aagatccccaggtgacttacgaacattaaagtttaagaacctgaaaaattctgaaccctcaactgtgttcaatgaaagctttaaaaagtccataaagatggtgtctccatacttcttgtgtatcttcttgaagcatgatgcaatagtttggtaaagaaatgagaaaagtagaagatgaggcaatcgtggtggcttatttgactcttgcattgtccttctaggcaataccagtattcttaccttttcacattttttagtataggttggaattattgataagtagtgataattcctaggatgactaaatagaaaaatgttttaagttatagaaaaaaataagatcactaagatcccgtaatgtatcatagacttataaaagggttcattctattcatgttaattgcaagagagaataaatttgattctactttaaaaatatataggcaattttttttctgtgttctttggaagaaaacttccaaaaagaaatttaaaaaataaaattggatccagttgaccctgagaattaactgggagttaagaatgttaaggctctttcaaaacacactgaaaaccagatcatgtgtatgaaaatataactaggaatgcgaagtatatgaaatggatatcgtgagtattgtaaaagttcagatgaatgagtatttgattaattcattcaataaatattaagtgcccattatgtgccaggcattgttcttggaattggggctaactggagcttagattttagtggaggacccagccaatacacaaattaacaggccagtgaaagtctgggtaatacgtgctgtaaagaaaaaatagagcaggtcaggcgatggtgaatgactgcagcacaggccaggatgccacaagcagatgcttccctcttctttggtaactaggcccttgagatgatggggagatatgtaaggagttaccatttggccagactctgaataaaacacaagagccatgtgtgggaagtggagcataaccaaactgcagcaatagttctgtttgtaaagtcct

SEQ ID NO: 39886 - DNA, 1123 bp, Homo sapiens
aaaaacaaacaacaacaacaacaacaaaaactaaactaaaacgatagagacatatacagagtaaaaagttagtccctcccttttccttctccccatgcccactatcctccttgcctctccagcagtagtcactgttaacagtttgatgtgtggtctctggcatttgccttatgtgtatactatatgtacttgtacatacatgcctaggcaagtagattggagttggtaaacaatttatttctctaaatcaaatcccagaaagcagagtttgtgctttatgttatctgattgcactctgattttctttcttacaggaaagcattctttaaggcttaggaaactataggaattctttgaggcttttctttttttacctagtttatttaacttatttttattagtaatctgaataaaggtgccaaaattttaaaatatactaaacctggagggaaaaaatgtctatatttaggaatttggactaatcttgtcagcatgtgatggtgaggctgaaatgaagaaatattcaatagggataaaaattttaaattgcatttaaaattttaaaatgtgttatagaagtttaggatgtaagacttgatttcagcagtagttaacttgaaaataacctggtgatgtttgttggcaaggactagctgatgtagtgtctgaatgcaatcttatgataactgtaatagaagtatactatcctgatcaagaaggcacaaacctctttgtacccttccctaagcaggccactttcagaatactatattcaggtacaggaaatataaggtaaaacacaagtagcccagagattttatttctgtttggagcaatatggatactatctaagtgggtttgtatagcccactaattactaaatgctttgaaattaatggttatataataagtataaacaagtttgaatttcatcagatagctagataatgaaatacttggttgatttttagaaagtaagcaaggacttggtatttttgtaatagaaacacatcaaaaaatcaatcctttaattataatctaaaccaatttcaatagcctgtgcatggtctcattgttgctactcaaaatgtgacctttagcccagcagcttcagtatcacctg

SEQ ID NO: 39887 - DNA, 1047 bp, Homo sapiens
gttaccatctttcccaggtaggtagtagaaattaaaggtaaaaaggaaagaaatataagtttgtctttgaaattaaaaccaatgaaccaaccaaagatgaatgaaagataccttattgacttaagtttctatttgtaggatattttactgttaggattcctaggattccaaagtatccagcctttttctctttcgattcttcgaacgtatagcattttcaaggagtaaaaaatcaatttttaaagtatccagttgggtaagcctaatttttggttcttcaacaagggttccatttaatctagtttccttcaaaacgttttagtcagtttgggaggttcaggtgctttcatgttccgaaagagaatgttgaaaatgtgtcaagtagatattatgtatctagttatgttcagaaaacagggccctgctattcagggttaggtggatgatcgtctgggttggacagttggatatgtatcatctaacttgacaggtttgcatttctgggagtagacattgataaggggaaagaagttgcaccagaaacttctttaatggcccaatgtggtgaaaatacgccagcatcagtagctcatagtaattctacagttacagattcacgcatttgtagcttttcttcttaattgaattgggacataactgactttgacaatgaacaattctaataaatagttaatttatgacattttaaatctaaccatttaataattggagagcataacttgttctgaaatttatgtgacagtttagaacctgagatctgaggtcattcgtgggcttgaatcctgacaccagcatttaactgtgtgaccttgggcttcagtattttatcctgtaaaagatgataatatttcataaggttttcgggaggaacaaatatgatggtgccctttatgtgtctaaaacagtgcttggagtgcttagtaaatattaactattataatgatgtgtgttcttttttctcccatatctattttagttgagacacttcagaatgatgtctctgtcccttttgtggtcttaatatac

SEQ ID NO: 39888 - DNA, 1023 bp, Homo sapiens
ctccttcgcggcggccattcccgcgcgcagcccaccctccgaccctccggacccccgaacctgctctcgccaccgcccgccgacgcctggagcggagaacggcgtttcccgcgcgcggcacacaccctgcctcgggagttctggggttcgggccctaacggtcaagctcttgcccctctcctcccttcaccgcgcctgcaccccgggggtgtgtctgtgcactcgtgggtgcctcctgggtttgcagattggcttgggaagcggctgggtttctatcagtgtctgggctcggaggggcttctggtgtgttctttccgacaactcctctctctgcccgatttcccaggccagtcctccactctggattagtaacgcttctttctcctcggcagtaagctgtgtgtgtgtgtgtgtgtgttcacccgtgtccgatgaactgcctgacagtaagctgtgtgtgtgtgtgtgtgtgtgtgtgtgttcacccgtgtccgatgaactgcctgacagttttagtagcagagcctggttctttggttacaaagggagaacatctgttgtgccatcctcaaaggactggtctttaggcaaaatgtgaaatccgcgtttgtcttcagtggtccatattcagtgtttgcctcacccccttcccgtagggttttctctccacttcaggacttgttaaaataagcgcacttcctttctcttccccactccatctgattttgctctggctacccttttaggcacgtaccatctgcctgattatgtgtgaccacttaatcttaaaattccaacctttcctaccccgcccaccacagtgtatattccccttgcctgcttcatttgtcttctcttgagcatgtattagttagcgtactgcatattttgtttctttagcttgtttcttgaacgtctcctctaccagaatataggtttcaggaagacacagatttttgtcatttcgttcattgcttgctagatttctagtacctacagcagtgcctggcgcacagtaggtac

SEQ ID NO: 39889 - DNA, 1032 bp, Homo sapiens
atttactccagataaacagactcctactcagaatcctgtctgtgttcctcaggacttgctgggtttacctcaaggggccagacaaagtgttattttcttttcttcatttttctttttttagacggagtctcactctgttgcccaggctggagttcaatggtgcaatgatctcggctcactgcaacctccgcctcttgggtgcaagtaactctcctgcctcagcctcccgagtagctgggattacaggtatgcgccaccttgtccggctaatttttgtatttttaatagagatagggtttcgccatattgcccagactgctctcgaactcctgatctcaaatgatccgccgttctcagcctcccaaagtgctgggattacagatatgagccaccgagcccggcccaaagggttattttctgagtgcacccatgatgtgagaaaagttgttaagccctgactttcaaatttctcttcctggaaactgacctggattttactaatgtcctatctatggcagagtctggagtgaaccgaagactaagcataaatgctgcaggtcaggggctgtttcttatgcctgaacatcgcggggccttggacaccgtctttccaaatcaagacagcatagagcacaagtgctcagagggaatgagcgaggatgcagctggctgctgcctctcagagtcacagttggtgcacggaccccagcactaacaaacggccaccaggacgctcctctgtgtgcatgggctcatgtccctgaccacgaaaggctcagaagacgcacctttggcctggtgctggctgtagccttcggggcatctggaacctgaagtccttccttgaatgctgcaaaaataatctttgcagccaaagtcaggcccgcctcggcctcccaaagtgctgggattacaggcgtgagccactgcgcctggccgcaggcatgtcttttttaaaaagacaaagcatgtaatttttatattagtctcagtttggtcagagaaaatgactggtctgttgctatcagcctc

SEQ ID NO: 39890 - DNA, 2107 bp, Homo sapiens
attagccagcatggtctcgatctcctgacctcttgatccacctgccttggccttgcaaagtgctggggttgcaggcgtgagccaccacacccagctgattctggttcttctaaattgctccctgggaaagtagtttttggggaaacattggaattattattattattattttctagctagcctgaagggctccgattaaggatgaagggaaagtaaacaaaatgattcaatgggtttcatttttctaagtcattcataacctaaatagggatattcctggggtttcaattgtatgtttctgtactaaaccataatactcgcgaaatcttttcccaaaacttcgggttttggagagaggtccccacaaaggcctctaagctctgtaatacatatttaatgtctaaaacaaaaaatctcatttgaagctggggtattagaaagaacatatattctttaaaagaggcatgaaaaaatattttagtgtgtgtactcaaattttatctactgaaatgcatgtagtaggtaggtgaaggaacaagagaaagaaaagaactggatagttcattttctttaaatataaactgtagcaaatgggtttgagatactcctttagtgctccatttgcccttatcccaccacatgcaaagacttgatttggggtagctatatgaagctgaaatctctagccttcaacagtgttctgcagaaggactttgtttcagcccagcaccgttcatcatgcctttaggggtctgggtacccacagctgactttgacctaggactaaaacccagcaatcttttggctcctttctgctttgtttaatgtgtttcaagggcctcgatgcaaggaggcagtgctttaagagtcttcccatttagttcctgcatgcctgtttcgttcccatcaatgtgcgaatggcctagattccaagttatgagggagggtgtgggtcagggttcttacctggtatttaaaaaatgtttgggagtgccctgggcctatttgaaaagtttgaatctgtgatcactgtcagctcctccaagacttctcctctcaacagacaattgcattgtagggcaccccagaccccccttagcctacatggcagcaaataccactgtgccagttatatctggactctagggtagtcttggccaactccaagactggccaactccaagacttgtccactgtgtgcagagtattttaagtatgttatctcatacaatccataaaaacaaccctatagtgttgggtattgctatttcttttatacacatgagaaaatggaggcagtaagaggaagaggaacttgttcaaagtcacacaactgttaggcagaaatgaggtcattcaaatccttaatcttctcctccagaccacactgcctcccaggaagagatgtgggcacctcctgttcttgccaggcaggaaaccgctccttatcaatgtctacggggtctgctctcacacccaggaaggactgtgacaagcatggactaacctgcggctccactcagcctgctgtcagcaccctcctgttcagcaggatgcaacatctgatgttctgccaggaggctgtagagctgcacatagaagtagccagtgtttcttcccattccaaaatggaaatatcactcagccttttttaaaattgacttcctatgttcattttgattgtaggtgatgcagcaagcctcagggctggggattttcaaaatcttgttggctgactattatagatggccttggaatttgctcttgggggtctgaatataacgtaggaaaatgtcctttctcagggagtggggctttaaagttcgtttgtttgtcactccaattttagctgtgcactgcacctttctttgcacccctactctcttcatcttgtctcatagccacagctattgaatttggcctgtgatcataagttgggtttctgatctgatctcttgcattctggtgggtactgggggcagaatcagctttgttaatgattttctgggcagaaggtaaattcagctgcatctgaaggggcttcacagtccaatagccgtccttttgttttacataacagagagtgatggtcaaggccacccacatc

SEQ ID NO: 39891 - DNA, 1029 bp, Homo sapiens
ggcacagactgcgtctaccattggagctggtgcaggtgaaagtgctctgggcagtagcacgttaatcatgtttaccacctgctgtgggtggagccctggagctggtttgcctcctggctgcaggaggggtttattgcctctgttaggccacaccagcagcagatggggttctcataagctgattgtttccctctgcttctggctgaagcaggaggatctcttgtttcttggggaggaagcatggagcactgggctgctttcctttcttgggcaggctttggccactctaggtgtttttatccctccaaggacatgcgttcctaggctgcaggaggtggggttaatgtgatcccgcagtggctttcctgctggcacctaggttcatggaagtggagtatgtggcatgcccatcactgcctggttcctttggctgagatgagaggtgcccacttgcggaaggctggggccctgggaggacttcctttattcagctgtgggaatcctgtaggaaccccagcactataatggctggtttccccatcctctctctttctcgataataatctttcagttgtcccagcaggttcactgccatggatatggagcaaccagctattcgtcttcaaagagaagagccactgtgttctcccatgtcaagcctccagcccttcttgctttccagttctttcatcttcaagctctagactctgccctcctttcattgatttcccaaatcttctcaatacaatgctggggtctgctgggggcggagcctgaggggttggcacttcctttattaacccatctggtagttctgaggctcagtcgtttcatcctatcccccattccactcatgtgaaaaatggaaaacacggggctttgggaccacagaactgaatttgcaccctggatctgcacatatctctgaccttgggcaatcataatctctaagccttagttccccattttctacaaatgggggtgatggtgctggagtggtgcttaagtgagccaaagggaagcccctga

SEQ ID NO: 39892 - DNA, 1029 bp, Homo sapiens
aaagaagccaggcattgccaaatgacgagatctgtttgtccttggctctggataatgtgaaacaagagcttgtttccctaaatagttttaattctatggctattctgatagggaaacggtgggattggatcttggtctcttcagattgagggcccagtacaagtacagaacattattactgtgatcgataggagattatagccatgggcagtctctggaactcatttatatgcatattatttccttagtaatcaaatatgaatctgagaagtggtgctcaacgagcatcaggaaatctggctcctgatgaagacaggagttggtgaacatctgcaagcttggaaggctgccagccgataccttcaccggaatgctaactcctccctcctccctgttcagcctcggcgcctgtggctggctgctgagccctcttcctttgccgtgtttagtccctgccagtgtatgcagaagttggtgtgttactgatcattaatgtggtgttattgccagactggtatttgtattctcaatcaatttcctttagaaggggattcatttaatacttagagggggttgatttttatggtggagctggggagatgaaaagatacatatttaatttttatgtttttaattaacatataaaaatggtatatatcgatcatatacaatgtgttgttttgcaatatgtataggcttactttggagaattgtgggtgcggttccaggccactgcaataaagcaagtcagacacatttttatatttctcagtgcatataaaagttatgtttacactacactgtaatctgttaagtgtgcagtagtattatgtctaaagaacaatgtacatactttcattaaattttttttatttttaagtttccagttacttagacataaaacgttctatattaaatattaaataattgaaattcaatcccaataaaaatattgaacataaatataaagcacgtgaacatatattttcattaggataaagaattttccagattttttttaaactctag

SEQ ID NO: 39893 - DNA, 1107 bp, Homo sapiens
atccccttccctttgtaaagttaggcatcccaaatatacagaatgaaaacagtaaatttaagctattaaatgccagactagctgagatcatacttttatgataactagctttaacatgcagtttatagaaatgtatcatatataaaatgtgggataaacctgagttatgtgtttatagttgaatttctgtaactactatatgacataatcttagaacaagaattacatgcacatatattagtagcataataccacgtggtataatacaacgtagtccctgaataaataaaacagagatcttgggtctctttgttttttcttgatgattacattgcaggaagtgatattttttcatctaacatataatgtattttagatcatttgttttagccttctaatattttgattgggattttaaaatatgaagtaaatttatagttctattcttttaaatgtaacattaaaagaattattaaatctaacataaaatggatagatgtttaatgaaatatgctatcttacagccaaatttgtatcctactgtggggcttcaaacaccaggagaagtggtcgatgccaattttgggcaacatcctttcgtgtttgatatagaagactatatgcgggagtggagaaccaaaatccaggcacagatagatcgatttcctatcggagatcgagaaggagaatggcagaccatgatacaaaagtaagagtgaagaaatttcaattgatgctattcagaatctgttttttataagacatttattctgttggtatccacagaagctttttaatccactaatttatatactgacatatctattatattattgattttaatctctcaacgaaaagtaatttactccactatttaaacaaattaaaaacaattgtttgacacacgtacagaattgtatttcagtctgaattaatttgatgaaggaaataaaatgatgttaggtcacctaggctaggttaattcatttgctattcttagtaataggatttaatgatttctgtaggttatacaatttaacttttaataatgttaatggaaaagataaagttgagagataatctagatcttataatcaggatctgtgg

SEQ ID NO: 39894 - DNA, 1034 bp, Homo sapiens
caaattgcctacatattcattgccttttttaagaatttgaactggtagtctttgtcctcctgaattttttctgtatttgtaaaacacattttgccatatgtgtggcagatttttttttctagagagtcatttgtctttgccatttgtggcatgttttgtcatagggaagttttaaatttttatgaaatagttttatcagagaattcatgaatgttgattgtctttgatagtgttgatagaattattttttctgaatttgtaagaaaatttagatgagcagtcattttaaaaatgtctttatttagacaatactgaatatcatcattataaactgcttaatgaacagaattgtctttcactcaattgtgtttggcttatatgcttttgtgttaaagtatctcataactctgtagtgttttttctgtttttttgttttgttttgtttctgtttttgtgtttttaagacagagtttcactcttgttgcccaggctggaatgcagtggcacaatctcggctcaccagaacctccccatccccggttcaagcgattatccttcctcagcctcccgagtagctgggattacaggcatgcgccaccacacccagctaattttgtatttttagtagaggcggggtttcaccatgttggtcaggctggtcttgtactcctgacctgaggtgatctacctgccccagcctcccaaagtgctgggattacaggcgtgagccaccatgcctggcctgtttctataaagtctttaggtctcagttttctcattggtgaaatgggaaggctgtactatctcacctgtttttggcttaaaagtttataaacttgttagctctgttgattattaagaatcaatacatttgcatactttgctttaaccatttatttccataatccagtagtactttatatttttgatattttgatgtaatattttgtttctgatttgttctgcttgattgaacggttgtttttaaacacaccctctttgcattttactgtgaaatctatttaacatattca

SEQ ID NO: 39895 - DNA, 1080 bp, Homo sapiens
aacaacaaaaaaccctgccgcattatttagtaaatagtgatggaatgagtctttattatttatttttttaaaatacatattgttaggacaaagtgtaaagtaagttctagatggattaaagagttaaatttttaaaaatcccaaaataatagtaacaaaaatatgattcttttaaaaatccaactgaaaaccaagagaattggctaatggattggatctgaaaattacataaggtctgagaattgacaattgtacttagcagagtagaggtcgttggtgacctggacaagaaagtttcagctgtgggatggagacatcctgattggaatggattttaggaataggtgagttataggcagtggataactctggaggactttggccatggtgaggagtaaagaaatggagtagtagccagtggtggaagtgggggcagtagaaaaaaaaattaagttaggagattgagtatgctgatgaaaatgtcggtgtcgcatagaaagaggtagacagatgtgtaattgaggggatgggcttttgagaagagcattgtggggacaggcagagtgtgtaggtgcagattctggttagtgggttgatttggtctttaacagttaagagactggtgagaatgctgtaagtttcatttggagttggttaaagagtttagtgacttttttttttttttttttttctgttgtggcactaagcaactagtcagcgtgagcttttgttgttgttagctttcgttttcttgttcatagatagcggagatcatttggaaaaagcttggttgcttgtagacatgttgtttattttctctcccacttttgaatcaccagttatgttttttccctcaggtagccaatgatcatgtgcaactttgttgtaacaatgggtacagtggtggttttaggtttccttttagtgtagtatttttcatttttaatactgtaaatcttctgggacttccataggcttcatatcaattcttccttttaaaggaagcatcaaggaagtgtttatatcttctatacctgtgatctctcacaagctacccataccattgaatcctgagagaaa

SEQ ID NO: 39896 - DNA, 1028 bp, Homo sapiens
tgtttatggttgctttcctgttacagtggcagagttggatatttgtgataaagaccatatggcctggaaagcagaacatattagtagtccttcataggaaagctttgcctacctctggtctaggttctggcatcttccaagataaaatactgttaaatatttagttactattcccttatacttcctaagtggataatctgtgcccaaaacttgatacatctttagtttctgtctcatggaagattttcagaatgtatatttgtttactatataaggaaaaatagaaaggttttatttgagaaaataagagaaactttgcagtatataggttaatgtaatttgataattttttactttgttttattgaatatcgttcaccaattgaagatcacttttcaaaaagcctgacaaatcaggaaattatgaatatagaaaattgctttctgtgtaaaattcaaatagttatgccatcttgttaaagtggcatcttttcgtggtctgattgagcaaaaacatgttgtggtaactatatttggctgtgttaaaaaatgttaacctttggaattaattttgaatttttcgttagagtttttggtaaagtgaagatttcagtaattacagacaaaggatttttgctaaagatagaatatacagtgttgattataactagacatctttgagaaaaattattttatgaaaaatattagaaatatgtatagtttatagtatattaaaatattctcttgctttctgtattctttttacttttgtgaaatttttgggaaagttttttatttgggctgatagtacttgctttctgtgttattaatgaagttaaatgtaatgataatgttttacgtggggaaaacaggaaccctaactttgctttccttttaacaagccaccatgaatttactagtttttaaaaatcataaaaacagggctttactaactacaaaagcattaattttacacattattttaaaagtataaaatttattttcagtttgtcttttaactttattaat

SEQ ID NO: 39897 - DNA, 1080 bp, Homo sapiens
cattaagtgtggctgactgccacagttactacttgagactgtcactgagacagttattactgttactacttgagaccatcattatgagactgaatcaagggggacagacatagaaatgaaaacttaagacaaaggtaactactttaaagtaagggtaacatggggaaggagaagagaagaagaaaagggctccctgcttttagtgagcaaaggcagctgcctaagactctacagcccttaatatgtattgggtagaaagagcagcaggaggaggtaatgattggtcagctgctggattgatcacaggttcacattattgctaacaggtttcagttatgcctaatcagaagaaacacttgtgcctgggtggtggctgccctcagcattccttctgggcaacagacacagtttgtcagtttgccgacatcctgcttttatgagaaacagtttgctgtttgcacatatagcctccagtactatactgagttgatcacgacccttgacaattaaggattgttatatcttgtttgataattgatccttgatcattatgtactattcctgtttttctccgataattttccttgttctgaattctgctttgttagaaattaatataactagtccagctgccttttgatcagtgttggcattgtatgtatttctccatccctttaacctatctgtgtctttatatttagagtgagtttcttgtagacaacatatatttgggtctttttgttcactcttgtcagttctgtcttttaattggtatatttagatgattcacattgaaagtattgttaaagttgggttttagtgtctaccatatttgtttcttactcattatacttgttccttgttgcttattttaaaatgtactttttttttttttttgagacaaggtctccctctgtcacccaggctggagtgcagtggcgggatctcagctcactgcagccttgacttcctggactcaagtgattctcccacttcaggttcccaagtggctagaactacaagggcacaccaccacacctggctaattttttgtattctttatagagatgggattttgcc

SEQ ID NO: 39898 - DNA, 1006 bp, Homo sapiens
tctattaaaatgactcagctccaatcactagtttctggttgttttatttctttttccctactgactggcttatcctttccttcctatgtcaaattcctgagagacttaacagattggcctggctaattgctatgattcttagttgggcagagcttttcaatacagactatgttgtgaattggtggccttcaagtcaggtgctaacctgtgttgaatcagctgtaggaatggtggtaattataaaatacaaaataccctgctggtacaaggatagtctgggtctcacttctttcggtaggggcaatgtgtgaggcagtttctcctaggaagggttggcagttaaccataattgatctgaagcttgggagagaggtctaggtcgtgactgatttaggagtcacttgtaggtggtagttgaaactcagagtatttgaaagagagagggagaatagagtgagaaaaagcagtgggccaaagatggggaccctgaagaacaccaacattgaaagactagagggagcacaaaagaaatggtaggtccccagacatcaaggagattggtgtcacagaagctgagcacgggagggtgcagtggctcacacctgtaatcccaaaacttggggaagtcgaggtgggaggactgcttgaacccaggaagttgaggctgtagccagcggtgatcatgccactgcattttagcctgggcaacagaatgagacactgtctcaaacagcctccccaccttccctagaaatgaggaagtgatatttagtgtctgttgcaacagataggtttagtaggataggcacagatagttttccactacgtttggaaattagatcattgtgactttagggagagcagtttgaattgagtgatggggcaaaaaccagatttcagtgggttgaaagagtaaatgaaaggaccaagtagagaggatagtgaatagagattatccttgagaaatatagatgaaggaagagatgaggcatttcctagaggagga

SEQ ID NO: 39899 - DNA, 1043 bp, Homo sapiens
gaattctagatttcctgagttctgcagttgtttgtggttgtagatattttacaagactgagcctcagtttcttcctctgagtggtgtgtaagttgagctggacgattggtaaggaaatttccagctctgaatttccgtgatgtctaagattcgtgattactgtttatttagtactgtaaggtgtcttgattagttttagtcttttacataaaattgatgattaggtcagagaaaaatacacgtttatatgaaattagttggagtttggaatatttctgacactgctgtctcagttgtttttattcttggcctctttattactttctgttgtgtaatactaaggttcactttctgggaacataactgttttataaacataaatcattatttctggaagaacagattttgttgttatccttttatttttcctctcttctatctttcctttgtctctctcttaccccttgtcagaaagtctttttccctttctactgcctcttcctcttgtcttgttactgtagactgtgtgtgtgtgtgtgtgtgtgtgtgtgagttttccgttgttactgttgattttctgcgtgttttgtgagaggaccacgccgattgtggtgggcaactgtgtcccagtagcagtagcagtagcaaaggagaagtatcatagagagtagataatactttaaaatcacagaataagaagagtgaatttttatttaacctatcattgtgctgcattggttttacctaagtatcatgagacacttttaacagtaaaaactactattcatatattcacgtattacagaatttcaaaagaatgattttaattattttccagagtgacgagaattttccttatctttgaaatagaagtattttgctttcttttgctccaaaggtattctggttttttgttgttgttctggtgtttttgtgtatgtgtgtgtgataggatttcaactttgttgccttgatggagtgcagtggtgcgatcatggctcactgcagtctagacctcctaggctcaagggatccccctgcct

SEQ ID NO: 39900 - DNA, 1033 bp, Homo sapiens
acatggcaaagccccatctctatggaaaaaaaaaaaaaagaaacctcaagtaacacatataaagaagcaggtaggctacttaatcccagaggtgactttctggtgttacgtattctaggaggtactgagaccagaatatttaaggcaccagagaaggagaagagagaggagtagatcagaatctgacccatgttacgtgtttatttcagtattcattgaacgaaaagaagctgctggaattgagaacagaaatagtggcattggtaagaaacaagactgtgatttttctttgtctttgtactcatctttgcttcgttccatgcatggttgtttgtaatgataataggaagttacatgcaggtttactgtcatgggaattttttacattgtgctaaaatacacacaacataaaaattaggatcttaaccattttttaagtgtacagttcagtacatttaaagtacattcacattttggggcaaccatcgccactggctatcacagaactctttattttgcaaaattgaaactctgcaccctttatacattcccttttccagcctctggtgacctccattctactgtctatggatttgactattctacatacctcatataaatagaatcatagcatttgtctttttgtggctggcttatttcacttaacacagtgtcctgaaggttcatccatgttgttgaaatgacaggactttcttcctttttaaggctgattagtattccattatatgtatatgccacattttctttattcgtctgtcaagggcacttgtgttgcttccacccgttggcctttgtgaatagtgctgctgtgggcatgggtgcacagatgtctgttgggatccctgctttcagttcttttgggtatatatgcagaagtggagtgtcacaggattttttgcacttcacaaagtgtttggttatcgtaatggaagatagttatcctatgaaagatttaaactttcttaatgaaagtttccttttcttctttctttttttttttttttttttttga

SEQ ID NO: 39901 - DNA, 1032 bp, Homo sapiens
ttaatattatgttcaatcactattcaacaggcttttttctttttgttttttaaattaacattgccttatgtttagatgtgctgacatattaactgccttctttttttcctctatgtcaaaatttctttatatgagtttagtttttagatatttctcaagattcttttgtaacatagcagccaatttaaatcactataaccatagaaatgagaattgtcttactgagaaaattccatcaacatcatttatatactgaaatcaaaatgttggaaacaaggggatgcttttggtttttgtgttcttaagagttttctgttggcaaaaaacgtccttcctgccttccaaatgtgttatacatgggaagaattgtggtgtgtgtgtgtgtgtgtgtgtgtgtgtgtgtgtgtgtgtgtgtctgtgtgtgtttaagcttagagattaagaatagcaaatgctgacctgaatcctgggtctgatctattttaacacatagattgtgttgaacggccatgaatccatagcaggtagaacgcttttaaaactttttaaatgtgtgattatttatgttgaataacaagcataccaggttatcaaggttgggaagtttttgattaattcaaaccttttatctgttgatatttaccagtctgtcaaagatgaccaattttcaaagcagttagaatatactataaaatgttttaataattcagaaatctcttaaatctttgaataccttaggttatcattgtgattagctttgttatactgttggagtctgagagtttcgattaatagaaatttatggttaacattgattttgcatctcttcagcatttgttgccatattcactttctcacatctcactttgcttgtatgtattttttcttctctaaaatttttatttgccagagttttgtctattagctttgaatacaaatataattttatattgtttatgggaaaattaaatgcagatggcttgaaaacttctgtatgttgtctctgaaaatggagaggatgagaacccactc

SEQ ID NO: 39902 - DNA, 1039 bp, Homo sapiens
acaaagagcacaatgacagtatattccacaagagtaaagcaaaataagtaaaattatctcaagtaaactaaataagaaggctttccatgaactgggcaattgttggaactaagcagacttggagtggctgattctaatatgtgcctagaattacaatattgatccagatttttacattacctatccctcttgtttcttctgagcttgcatccagaggtcactggttggttcacaggaataagctgggtcagtctaaattgcagggaaaaactcaaaaacaacagacaaggctaggttctagtaacaggtgtactatagttattgaaacatagtttttctctctccagtctcccatttttactaaagacaaagcatgataggcttgatttgtttgcaaaataaactttagtcttattatacctggcctgattatttgtataaagtgcagcaagaataatttttgctgtataggctctttttaagttggctttgatggaactttcttccgtaaggaatcttagagtagacttcttattaaaggtttgagcccagccaggggtttgtgcttgcaaatacctgtgtgagttggataaattgtttccttctttcagggtcccaagataacctgggcctcctgagcctgtcagaaagtgacattctttacttaccacaggtcaagaaccctatgcagggactgtgtagacaaggcatgaggccagttttcccaaggagcttttattggctctgtaagtcaactttgattccttaaagaagcctgtttatatttgaaagcatgccatttcagtcaaagccttggtaaaataaccagtttctccaactgggccctgttacaaaagaaaacagattcttactgtacttatgcaaataattatattgccataaattacaaatacaaataatttccaaattctggagaaatcagatagagagaaagaaatatgcttcaaattttgtttacaggagtacactttacccaattggtgcaaaagtagttgcaatttcagaccatgaattttaa

SEQ ID NO: 39903 - DNA, 1084 bp, Homo sapiens
tatgatgaggcatgcctgaccccctcttcccatggtggcctaaactggcctttcaggtttctttggaatccccttggttgagaaggtggatccattcaatcatttggggggcttagaattttttttttttttttttttttgagacggagtctcgctctgtcgcccaggctggagtgcagtggcgggatctcggctcactgcaagctccgcctcccgggttcacgccattctcctgcctcagcctcccaagtagctgggactacaggcgcccgccactacgcccggctaatttttttgtatttttagtagagacggggtttcaccgttttagccgggatggtctcgatctcttgacctcgtgatccgcccgcctcggcctcccaaagtgctgggattacaggcgtgaagaattttatgtttgtttttcagtcttggctttagagcctgtgatctttctactgcatgaggctgcctcttagtaaagaagcaaaatgcttgcagagtactctgtatttctcctctgaatgtttaatatgctgaacacttcacaataagtgctaacacgaactacatggtcacatgagatttttgttttcaaacagttttattgaggtataatctacaagccataaattttcccattctaagtgtaccattcagtgatttttaggaaatttaaggagttgtgctctcatcaccataatccagttttagaatatttcatcaccccaaaaagattcctttctgcctagtttcagtcaatcccagctcccaaccccagccccagataagcataaccagctttgtctctatagatttgccttttctagacatttcatataaatgtccagaatcctatgttacgtatagtcttttgtatttggcttctttcacttagcataatattttctaggttcatccatattatagactatatcagtacttcattgttttttatttctggtggtacccatcgtatggatatattacattttatttatccattccccagttaatggacatttggattgttttcagtttggggctatttaaaaaagtactactgtaaacattcctgtgcaag

SEQ ID NO: 39904 - DNA, 1050 bp, Homo sapiens
tacagagaaggggtgagagggagggagaagggaagagtgaggtgggcggacaccttcatggagttttgtctagtgagaagagggagtttacaagcaataatcagcattattacagggacataatttaccaaggagtatagaaagggcagggactacctgacgtggtgactattaagtctgagactaaaggacaaaaaggagagaaccaatatgagtaacgagtgggcacgaaatttctatgcagaagaaactatgtgttcagaggttctcaggaagtacagagcttggcaggtgtgagaaaactgaaagaaggcctctgtggctggaatgtggcgagactggagaagttagcagaagccggtgtgaccctaacaggtctgttgcttaaggcctggcatgtcactacactgacaccaaggctttccgtggagaaggagtttagtaattatagagcagctgaaagaggagatgggaggaaaccgcacatcgcctccctgaggagtttgggtctagagattttaaggggtttggagtgggctgatgtctggggatcattgattggttgaagagtgcagggtgaggtcataggacgggagatagaactgcattctcacgctgatttcgttcctgtcggggcgggcgggggggggtcttaactggctgacttcagctgtaccactgtaattcagggtctgaagcacatcttaagcaattctttaaaaagtttatgattctaatgtcagcgatcctgtctataggaacagtggggatgcaaatgattcttaaacaaaaacgttatgattctaaggtcagatatcctatctagaggaacagtggggaggcagatggtcagtgtctagtgctatatgacttttggttacaaggaagtgggtcaaagtgcagcctgattacagtttaattataactatatttctgcccagaacttggcatgtaattcttgttagcctgtgaggatggtttcaccagatctcaaagggctttgtaaggggaaaaaagtacagttgactcttgaacaacacaggggttgag

SEQ ID NO: 39905 - DNA, 1014 bp, Homo sapiens
ccagtgaagtgaaaataaattgtacagtttatgaacatcatattttacattaaaagagtctgttaattctatatatgcagctctagcccatttatctgttttccagtgcaataatttaaaagcagcaagtagaggggaggagactgctagaattaaatagctggcagaagcagtgagtgagagctgacatccaggtgaccaatggtagagaaagaaaatttaggaaaggtagacataagagcccaaacaaacacaaaactaccatagattggtttcaggttaatagatgaagatgcatttctagctcagaagtatcaggggagagtactgttttgctgcaaaatgtagtcaatgatattcttaatactgatcctgagtcatcacaaaatgttaaatgagatatacaaaatcctctttaatgaaagaagtttgtaatatattttaaaaagctttttctcaactaaaatttcaaatactgtggatgcttaaagagatttgaaggcctgggtagcatctacttaatgaagtgtgctgcttagatatctttgttacctatcgatttctcctatgtggaacattactttttctaaagatgccagataaattatgtttttgtggtctgatcacatttaggaatcttggtttctaaaaaaggggcttggggtaagtaagaatatgaaaataaggcctggcgtggtagcacacacctataatcccagctctatggggaggctgaggtgggaagatcacttgaggccaggagatagagaccagactgggcaacatagtgagaccaaaataaaagtgaaacaaatagctgggcatggtggcacatacctgtcatccttgttacccaggaggctgaggtgggaagattgcttgagcccaagagtttgaggttacagtaagctacaatcgcaccactatactctagcctgggcaacagagtgagaccatctcttaaaaaaaaatttgctacagattttccgtttgtagtatctaacatatagtaaa

SEQ ID NO: 39906 - DNA, 1027 bp, Homo sapiens
caagaaggtgaagcattttcagagaatgattcctgacactacagaaacattgaccatttagaatcagaagaccctcagtcaaggctggcctcacaggaaaatcaaatgtaatgattcccataatgagttcaagccagacaactgaattatgcatctgacattaaaacaactgggggattgtaggaggaggagaagtttgggaagagagaggacagtgtaatcttctgggagtaaaatttattactgaacattaaaaaaagatctgcaagttaagttgagagtcattttgtttatactcgaaatgctacaatgtcctttgatttgtttatgcaagttttaggggacaagttacgtttttttagcatataatctacatttattcccaaaacactgctcctgagacaatccatcagatatttcctcaaggctgtggaaaaggggataaaaggcatatttttaaaggtgggcgtgtatgtgcaaaacatgtttgttttaaagagatctgaatgctgtagaaataattagccatgtgcgtgaacgaaaataatgaataccaaatggtacaatgtcctgcttgaatcctgtttcagaaacagaatgtgaaggaaacattacgttctctcatccctctcttttctctttcacccttgttacccctgaattttgtaataatcactattacccttttggctatgaatttaatgtctctatatatagagccacacccctaacacagattcttcttgcctctcagagacagttaaatgtctttgggtattgcactacttattctccataggggctcagacatattcactattgagcattttcattagctaaaataaattaaatgtatgtcgtaaatgtgcagcaacactgaagaagctgcgagctacatcttgtccttgggagtcatttacttagaataagtaaagactttctcacttgctagtttcaggcgtcttaccttgtgttattccttacaaatggacagggctgttctagaacccacttcctgaatacaggg

SEQ ID NO: 39907 - DNA, 1044 bp, Homo sapiens
gagaacagactaatagctgatttcagcaagcatctttaggcttttgttttcaaattattttacatctttttcttttcttttcttttcttttttttttttttttttttgacacagaggtctcactctgtcacccaggctggagtgccgtggtgtgatctcagctcactgcaacctccgcctcccaggttcaagcaattctcctgcctcagcctcccaagtagctgaaactacaggcatgtgctactacacacggctaatttttgtatttttggtagagacgtggtttcagcatgttggccaggatggtctcaaactcctggcctcaagtgatccgcctgcattggcctcccaaagagctgggattacaggcgtgagccactgtgcctggccacccacctattttccatctttagcactggccgttctcattcaaaatacgtactgctacactaagaggagacttaacttcaaattcactttgctccacggatgttgtatatgacctgaatagatgtaattctgacaagcttgtagttcattggaggctcacaatttgaaagaaatgcatgattaagactttagaacataaagaagattctagtaaaacaaatgattgcacccttttggattttttgcatattatctttatgtagggaagggaatgatatgttagaaagaatcctcaaacaggtttagacaaatcactggttgaaccataatctccaaaatatcgctacatcagaaaaagcccaacatagcctctgaggtattcgtcagaaatcccagtgcaagcattaggaaagaaatgtactccctgctcctcacctttgtaagtcagatttagtcttcactgttcatttcaggttctctgcctccataggggtcccttcagcacttgtttggttctctaattggcttatgatagtgggtcttacatcatcaactggattgtaaattccttcagaaagagatgtcaattaagtacacagcagagtcacagtatttcaaaattggaagtcatagtaagggggaaggagggccgct

SEQ ID NO: 39908 - DNA, 1038 bp, Homo sapiens
tgatgcgaaggatgtaaaagtgctccaaggggttaaaaggactttatataataaattcctacaaactgctataggcacagccatagctctgaaactagcattctcgtaaggctagtccaatccataagtttcgtttgcttcaagcagctcagatagacactctctgaagataaatgatgcataaaaacaccattgtttgtgatcagaataatcaggtaccactaaatagtcctgcatgtgtatgcatgataccagcagcctccaacttgcttctccaggagcactgtacttaacttggaaacccctttatttaatttctgtccactcacaaagcttcaccttgtcttctctcctctctgtcctcccgaggttaatccttgagagcctgtaatcaaggctaggccctgcccaccttaagtcaccctcccctctctctaggcctccacctcactggggagcgtcattgcagccagtggcaagaagctgcaaaattctctcatctgtgaagagagcccctaaaaccccaaatcccggaccagtagaggaaaccattgctgccctaatatcacatgttacaagtcttcgagcccatggtatctgagatgttaggagctagcattccttgtaattaaacccctggaacatcacaaggacccagttcagggggcttggttggttgactgattgatgacagcatctcaattatgtaggagatttctgtaaagaggagtgactggaaggaaaagaagataaccttcatttatatcatgagaccttgcgtagtagaaggccgtgaggatgggaacaaagtgaaatcatgaaaaacagcctgatgcaaaatgacaaagaagaatttcagggtcgttgagatcacacttgaacaataactgaacagagccagcactacagttttcagacctgatggctaacaagtgaaatgtattcagagagaggtgtgtgattataaagactccccctacccctggtgctctattccactgactgtccctttatgaaaaatgaattctagagttccct

SEQ ID NO: 39909 - DNA, 1047 bp, Homo sapiens
atagattatccaccatttccatcactctctggataccctcacatgtttaccaccaaaactcctgcgcagagactggtcctcttttgcaaactgcctttggctcccccgcgatctctcatcagaaaagcaggctaaggaatctgcttttgcccccatcctgttagaatgataaatagtagcctgatggccaagttgtatatttatttaatacatcgtctgtattgatagtttatgatgtcctggatatgaatacacgaaagcacagttgcatagtggcgaagaaggattttgatatcgtggagatctggatttgaactcaactctggcagttctccctgccttagtttcttgcccgtaaatgggggtgatgaggtagttgtgagaattaaatgagagactatgcaaattgttataatactccctggaaaatagttaaatacccaatagatagcatcactattttgaaatgctttcaaaattatactcgagttttacttctgcaaaatcaaggcagctttcttcagaaaagagagaaatgaacttcacccctaaaatgtacttggagaattttagagggtcttttccaagttgttataaagcacttctgaagtgaatttgcccatttctgcccacaccaatcttataacattccaggaataaaatctgcactcgagtttaaaaataaaacgggtggaacaaactgaattagaagtccttggcagacatcccccccagcagaatgttctctcaattggtggtattgcaataaaagagatgtatattttttagtctgctcttcctccctgataatttcagccagttgtatttctctattctaaaaacctggtatgcttggatttaatctcaccactcctatctacgctcctgctcctacccccacacccatttcccccaaaaaaaccccacatctgcacagaccctccttcccaagaaaacatggaggcgggctgctctctgataccgtacatgtgcattccggactgtgctgaggaaggtcatagaaacatgagagggctctgctgttgt

SEQ ID NO: 39910 - DNA, 1086 bp, Homo sapiens
gttaaggggaacctgggccctaacagtccacttcctgtaccttcaaccacggctctaccgcctccgctaggagatggcccgaggacattccttagctggcttcagcttgctctttttcccctgcggtccacccctgtctcctgcttggtcatcagtgatttccatgccatcccatgtcattggaccagttgtgtgtttttaataggagttctcatctcactttctccacagctttgccaattctgctctccccctcctgtctaaataccttcctcccttggcttcctgaacaccactgtcttcgggtgccatcatccctttctggcccctccttcctaagtcttcaggtgttccctttctacctgctttctacgcctctaagtgttggagttcctcatggcttagtctctagaccactttgcttctccacttaagtgttctgctagatgatctcatccaaactcacagtgccttgatggatccatgactcctgcatccatgtttctaggccagacctctcatcatcttcgggcctgtgtctccagctacctactctgcacctcctttggggtatcacaatgtcacctgaactcagcacgttcaaagtcaaagttataacaatcaccatcccaccaaacctcatctacccaagaattccccatctcagccattggcatcatctagttacccaagacagatgcctaaaagtcctccttgaagcatttctgtccctcttcctctgcatctaatgtgtcaccaagtcctactgatgcaatctcctcagtgtctttcgaatgcactctctctcttccggcccactatcaccattctagtcctaaaacctaccttctttctaggagccacagcttctctggagtttttacacctcttccaactgttcccatcaccccgttcttttctttgacaacattttttacatataaaaataggtatttatgtgattatatcatgaatgtcttttctccccaactaagaagcactatgagagcagggagcttcctgtttctccccgttcaatcctcagctcctagcagcacagtgcctggtgtatagcagattctccat

SEQ ID NO: 39911 - DNA, 1056 bp, Homo sapiens
tcagaacaatgtgaccagaaaagaggttggaggcccttcaaggtagagcagaaaagacagaggctcaggtcatcagcaatatccgtatgaatctggtgggagaactccaccagtgttcctcacctcgctcctttgtgggatcctgccagactccaatgtccttgggttctaaataaacacctaccaaggggctgagtcaaagagattccagtctctggaagtgtcttcttgtcattgtcatcacccagccaaagactcttttccttccaacatgtttttccctttgacctcaaaataaacaatgtgttctaaaggctctggggcactctcaaaatgcttctctgacctcggataggaccatgcttacccattaatttccagatctgaccttttcactacacctttaagcataactctttcaaaaggcaaaaatagaaatgactgtttcatttcaccaaattcaagtcgccaagagtgagaacgtgtggttttcaccggtacgtttggggaccagtttgttgtcactgaaactgcctgatatcgggtcggagtggctgggtatttttcagtccttggggttataactcaaatgttggaagtggtatcttttataggtaaaattgagggaggggagcatcaaaatgtgtgcgatgcagataataatttgccaagttttctaatttttttcattaaaaaagaacatacagaagagtctacaagtagggcaggcagccttcattcctatgctcttttccttgagggacaccttccctaaccaaataattgaaaataaatgggaattgtgggaacagaggaagacaagaaggaaaactaaaaacccaggacctaatcttccaggggcaggcaggccacttttgtagctcagattctgaccttttctccaatcaaagagttcgaacagactgactgattggagtgctctgtcagcattaaactcaatgcagggttctgctctggcacctttaggggtggtggtttagaccctctgcgtgccatgtcttatcaccagcactgctaactgaatgggatgcattt

SEQ ID NO: 39912 - DNA, 1050 bp, Homo sapiens
cggcttcccaaaatgctgggattataggcatcagccactacgcctggcacattttggatctttatatgtaaaagttgaagcaagaacttgggatgcctaaagaatgatgcctcccagcattagtaagggcagtgtttccaactgaactttgtacagaaaaacccaaacaaaactaaagatgtattttttaggtggtataaattcgaagtgctcaatgttcaagaatccacaataaagaagggcagggatgactgaatagtgataagaactagttgacattgtttagtcatagaacccaaacaaaatctattggttcttaacaacacataaattactccttaggactaatgtaaacagacaaatagaaaggtaacttcattttttaattatctaaatttttcacttttgtaaaagaatcatattataccataaaaatattaaccatgtctccaacttaaattcatgttaaatttccagtggtagctatgtaataaattattgctaagtagaattgtagactgaaagaattaatccatcttctataaatcctgaagattatgttaaccttttccagacacctaaacaagtatgttacatgattcagaaaaagtcatttttgacaagtataaaatgattttgaggtgtgatagcaaattagctgtttcaaacctatgttagagaaattaagttttcagagcaatttttttttgtatttgtgcttatattcctgaaacaacttgcttaaggagagtctccttaaatggaaacataaatggtatacaaatggctatcctctatcataatcttttatttccaaaactcagacaggtttttatcatcatgctctttggactcttaaccatcttcttctacttttaaattctacttctttctcaatacatttttaaacagcatcttgtgatcatttcccagtcttgagtgcctggcactgggaggtgacctgcccacattgctgtcagaattcgctgctggacccctgcacaggtcccaggctgttggttacgtgtttcaatctgcacatcagccatc

SEQ ID NO: 39913 - DNA, 1022 bp, Homo sapiens
aaagcatgctggggccagattgtgaagatcttcagcatcaaataaagaatttcgaagatgttcagtaagctgtaggaaccaatgaaggtatggatggcacggggaagttgtgttatatctactttaggaagttcgatccaacagggatgactcaaatggtttagagagagaaagcattgacaagaagaccaatgagcaggctgctgtgagaggaattcagtctgagctagcatggggcggtgaagatagaaagggtgcagaattggtaggacttggaaaccgatggaatgtgggagaaagagtagaagatgatgatgctgtcagcttccatcagaaattaaagaggaggagctgggtttggagcaagggactgggaaagtttgaaataaacataatttgtttccactgcatatatccaggagtttgtagggggagataccagggaccaggatacagatttaagaacgataaacagtagaaggaaatcattatagaaagtgaatagaactgagcagatagccttaggaaatctgtcccctagagttagaaagaacagagagagcaaaaaactgcagaggggccataaggagtaatataaggaacccaagaaagtaccatctcagagaaattaagaatatttgtttattttggttacaatagacaaattaaactcaaagtgattcaagcaaaaaaaaaaagaaatgtattgtattatatgtggattggttttctattgctgtatgacaaactacaaatatagtgacttaaacaacacctatttatttttttttgtgtgtgcatcttttctttttttattttttatgttattattattatactttaggttttagggtacatgtgcacaatgtgcaggttagttacatatgtatacatgtgccatgctggtgtgctgcacccattaactcgtcatctagcattaggtatatctcctaatgctatccctccccgctccccccaccccactacagtccccagagtgtgatgttccccttcctgtgtcc

SEQ ID NO: 39914 - DNA, 1050 bp, Homo sapiens
cctgaagttaaaacattttggaaaatgttttcaaatatggaatacaaacatgaggtgatattattgctaccatattgcttatagtcaagaaaaaaacttaatcctttttgataatctaatacagactgtgtcatactatatgttgcaaaaaatgtatagaacttgacattcgaagagatgagtattttggctctgtggtttattagctgtgtgtccatggctgacttacctaacctttttgagcttcagtttcttttctataaattgggaataattatgttactatttattagggttgttaagtaattatattctgcaactattatgcatgaaaggcacttttaaaactacagaagagcatagtcaacagtaaccatcatggtctcacttatggcctaataattatgcctactgtagaaatagatcaaaatgtatttggattcccttttctaggataccctctcagattgtcccaaatatacaagggatgaaagaagaaggaacaagtgtgggctgaatatgcagaagaggatggaaagttgacaggagcatgtggttggaagaggccatgttgacatgcagattgtgtgatagccacattgccagagctgagagggtgcaggagggaaggcaagagggaagccttggtatccatgtaaaaccagtgaccacttgctagggtgtgtccataagcattgcatgcctattctttttttttttttttttttgtattttatttatttattttactttaagttctggggtacatatgtagaacatgcaggtctgttgcataggtatacatgtgttctggtggtttgctgcacctattaacctgtcatctaggttccctcccctccccaccccagtccccaacagaccccggtgtgtgttgttccccttcctgtgtccatgtgttctcatttttcaactcccacttatgagtgagaatggcatgcctattcctttttttttttttttttttttgagacagagtttcgctcttgttgcccaggctggagtgcaatggtgcgatctcggctcaccaca

SEQ ID NO: 39915 - DNA, 1050 bp, Homo sapiens
agacttagggagtccatctttctctgatgatattccttatttgctcttcattattccctgtgaaggaataaaaacgatgaaattggatttgaagactggattaagacaaatgacttttcagatttttttttttttaccttagctgtttccaattttcctagaaaagcacatagtcactatataaagagtctgagtttattgcattaaatcttcctaaatagtgtgcccttgaggtttgatgtggggaattagtttagaagattcaggggcttggagtacctgctaactgtgtgatggcgtgtgtctctagaaattttatatgcccattgatttttatagagcaagcagtacaatagaagggaagcaggatgctgcttggtcttaaggaagtctttcctgcctaccaattgccacacccctttttctccaggtagagttgactatgttttcttctgggccattgctgtacttgcctaatacttttaataaggacttgcaaatgtgcctgtaggtctcttctaactaggctgtaaaccactcggacagaggaattgttttatttcttgtaactctaacacctaacacaaggccctcaagataacctgtcaaatgaatgaacagatgagctgaatacccgctgtgtgcctgttcttgtcttaagacatgagggacaacctgtaacacaggacacaatgtggctgtgtctgctctgaaatggtagaatatctagctacagcttagaataactgggtaaggaaataaatgctggattataacccaaagaataaaatatccaacgagtccaatgaataaataaataagggaaaaggaatgactcttccctgcagcagaatttcagttaataaacaaacgaggaaggaagcagtatgaaaacatcattagaactcatagtaagaattgccacgagaaagtcccaccgatggatgcattagatgggcagatgtggattagatggattagaatgagcgggcaaaagtatatgcagaaacaggaaattcgtagaattttaaaatatccctaccccaaaca

SEQ ID NO: 39916 - DNA, 1037 bp, Homo sapiens
acaccaccacgtccagctagttttttgtatttttagtagagacagggtttcatcatgttggccaggatggtctcgaactcctgacctcaggggatccacccacttcagcctcccaaagtgcagggattacaggcatgagccaccttgcctggccgaaatatatatatttttaaaaaggttattttcatcccagcactttgaaaggccaaggtgggcagatcacaaagtcaggagttagagaccagccttgcaaacatggtgaaaccccatctctactaaaaaatacaaaaacaattagctgggctggtggcgagtgcctgtaatcccagctacgcgggaggctgaggcaggagaattgcttgaacctgggaggcgaaggttgcagtgagccgagattgcaccactatgctccagcctgggtgacagagcatgactctgcctcagggggaggcggggagaaggttactttcaaccccatgaaaaagtgagcaaaggacatgaacagacacttttcaaaagaagacatatggccaataagaatatgaaaagcagctcaatatcgctggtcattagagcaacgcaaatcaaaagcacaatgagatactatctcataccagtcagaatggctgttgttaaaaagtcaaaaaataaccagttggatgctgatgaggttgcggagaaagggaacacttatacactgttggtgagtgtacaaattagttcagccattgtggaaggcagtgtggcaattctgcaaagagctaaaagcagaactaccattcgacccagcaatcccattactgggtatctacccagaggaatataaatcattctaccataaatttagacacatgcacgcaaatgttcattgcagcactattcacagtagcaaagacacagaatcaacctaaatgcccatcaatgacagattggacaaaaaaaatgtggtacatattaccatggaatactatgcagccataaaaaaggaatgagatcatgtcttttgcaggagtatggaaggagctggaggccattat

SEQ ID NO: 39917 - DNA, 1051 bp, Homo sapiens
cacagtggtacctagcatttagctcatgtgttcatttagcaggctctaagtcatcttgtcacatgtcatcctcatgtcagctctgtgtggtgttgtcgacccacgagcaaacgttgcaaggtcccctttagggtgacaaggctgattcaggatgtgtctcactgccccaggaaggatgcctctaacatgcggaacatggtgccagtggctgaggggattagttggggaagaagagtgaatagggaaaggaggttgttacatgatccacccctcactggccagagaggaaaaggaaggcatctcattaagagcattagctgtagcctctcatttaaacctcctcactaccccatgaagtaagcattattgcttttgttttacaggtggtgtgagacaaaagtgaaggaatgagactaattaataataagaatccatgccccaccatagctacgatgcagtggagcatggattctaaaccagctctaacatcacatgccctattttcgagcactagtggcttatttctgagctcttctcttcctctttcctgttgatgcttgagttttagttatatcatggcaaattgaaaaattcttcaaaaaacatacagaggaaataaagtggtgggatctgaaacaaaactcttattgattagccattctaatgaagatttgtggctgagatgggagttttgcaatcaccttgggatttcagaaccctgcttttaataattagaactaaagaagggagagtcctatagaagtgtgggtcataaaaccaaggatgtgaatgaggagtggcaagacaggtatcctggagactttatttcagtgagacttctggggcagagttgggactgatgggggacaagtcagctttggaatgatacagaatttttggctgtgacacctgtgtgattttagtgctttgcaccatatcaagagctgagcagagtgtggcaccaatattcaagggactcaaggggcaaatataggtgtcagtgagtgaaagcagatagcgagatttgcaatgcagtgtccaggagtgtcca

SEQ ID NO: 39918 - DNA, 1030 bp, Homo sapiens
gagaccccaagagacagatatcgcattagtccttttttgtttgtttagcaggaaggtttttaagtaaagctcctaaatgatatgtctcattctcatggaaattcatcaatattgttttactgtctcctatctggttactttttattttaggtaaccactgtgatacaatatacacaagtccctggatcatgaaaataaattgaagagctaatgttaatagtaagttctcaaccaggggttatgctggaacccaggatacataacccacaggagggccctccgtgaactcagttttcatggaattgtcccataccttcacaggtagaagcatggctatgttaaaagtggccaatgaaagtatagtttctttatgccttatactttgtttggtgaggatttctgccagaggtgtttgtttcctttagttttctggttgctatgattttatacagctttggtgacctctatgagtaccagataaagttaggtatgataaaggcacaaaaagaccgtagaagccatttgtattctaaatataaatatacagactaaatttgtatgcatttgtgtcttcattcttcacggtgctgtatcctccgtgtgtgtgtgtgtgtgtgtgtgtgtgtgtgtgtgtgtatttcttctttgattccaggctgcttatacgaaaatgctgattcatagtgtcactgtcttttctttttcctgcgaaattctaaatccgtttctaaactttttctacaactctgagtttaatctctctaaagtttttttttttccctcttgcggacacaaggcactttgctttgtttatgctaataaatgtcagactagcccccaaaaattagaagaaatgccagtaatttcaaagggctcttgagcatgattttttttcctgtttcttaatacattgtacttttcagagtttaagtttaggtgcatgtaggtggtattagaagattcttagattttattggtagcatccagacaatcttgtcatcacccgatatatatcacctctatgtggtag

SEQ ID NO: 39919 - DNA, 1033 bp, Homo sapiens
agacctctgcctgtatgggaggtctgggctcgttctgactaaggttttgaacccagatctgccaatttgagatcttgggcccattacttagcctgagcttcagtttccacatctctaaagtgaaaatatagaacatggaatgtacctgtaagaacacaatggaatacaggtaaagtgcccagcacactgcttattccttagccttcatgttttagaaagtggttgctattgtttttgttgttggtggtggcggtagtggtcttcttcttattattatttatatatttacaatggccaaaattatatgaaatgttttccaaaaattaggtatttgtacccttcatatgaatgtgtgtgttaattgggtataattgtctttcttgagtctttaaaatagacaaatcttttgattacatttgttaatattattgtacctacctatatctgacttgacttacaattttacttcattaaatacatagcaagtcatctgagaacccaaagtaatcatacagattacttgccatatagttaatttgtgactgtgatatggctgctaaggtagaggtttgaatttaaaagcacaaagaaaaatgtttacttcaatggttacaaatagattaatcatataaagtacatatttgcagagtctcgctcagtcgcccaggctggagtgcagtggcatgatctcggctcactgcaacctccgcctcccaggttcaagcaattctactgtctcagcctcctgagtagctgggactacaggtgcgtgccaccacgcccggtgtatttttagtagagatgaggtttcaccatattggccaggctggtctcgaactcctgatgtcaggtgatctgcccgcctcggcctcccaaagtgctgggattacaggcttgagccaccacacccggcctattctaaggcttgttctaaggctcacagatggcaccttctctgtgtatcctcacatggtggaagaggcaaagcagttcctgggggagttctttgataaaggtgctaattccattcaag

SEQ ID NO: 39920 - DNA, 1033 bp, Homo sapiens
aaatcctgtctttactaaaatacaaaaattagcacacgcctgtggtccccgctactcaggaggctgaggcaggagaattgcttgaacctgggaggtcgaggctgcagtgagctgagattgcaccactacactccagcctgagcgacagagtgagactccatctcaaaaaagtatacatatatttttcacgaaagtacacaaaaatgcacaccagccagatcactgtttgttttctctcctttttctcttcttttttccctactttttcatctctcatccttcttccttcttttctcgcaccatcatggagaacaaagaagaactgggtcagaacaaacctttaaaaagtgaaggcgagcgttccttgcggggatgcccagtgtcatgactagtgttgggaattcttggtgagatgacaatatttttgcctcactcaaatgaggcatgcccttccaagtaaagcatgctatgttttgtagcaaacagaacacctgagaaggatgatttcatatgactgtgccaacagatctctcacaagcttgtcaggttataattcacaaatcttaactctatagtctatagacattttttttttatatggggtctcactctgtcggttgcctaggctggagtgcagtggtgagatcttggctcactgcaatctccgcctcttgggttcaagcgattctcctgcgtcagcctccggagtggctggggtttcaccatgttggccaggctggttttgaactcctgaccacaagaaatccacctaccttggcctcccaaagtgctgagattacaggcatgagccactccacccagccagtggttctttttcatttgagatggagttttgctcttgttgcccaggctggagtgcaatggcacgatcttggctcactgtaacctctccctcccggattcaagtgattctcctgcctcagcctcccaagtagctgggattacaggcatatgccaccacacccagctaattttgtatttttagtcaagatggggtttctccatgttggtc

SEQ ID NO: 39921 - DNA, 1161 bp, Homo sapiens
catgttgccctgtattcgtcccacgtcggtcccatcgcacttcctccttcaagtgccatactctgttttttgctccagcctttagacatgttgttcttcctccttagaacccagctcctctctctgcactgtctggctacctttccctcattcttgaaatctcagcttagagtctcttcctcacgaagcccttggactagggactatgttatttgctaccttttctgggttcccatagcaccccattcttccccttgtataatacttcacaacccctttcctggcccagcgataggagggactgccctctttccagtatgtggcatctagtgaatgggcaatacatacgggcattccccctgtgatgcttatgttacaaattggatgtgattccatctattaatatggactgtgatgtatataattgtggtgtgtataattgtggtcaggaaccagcatggggtcctgtgaaccacagtggtggaaaaagctatggcacctgtttgttccactggctttgtgctttgtccatcacacagtgagtgaaaaggtgacaaaaatgtgtaagaagcctgtgctaaggagaaagaaaggtccaatgatgaattttctggaaagaaagctgtacgtaatagagtgctgaattcgctcaatcatatttaagttttatagtactgcacttataaccacacaaaacactattattattgaaattcaatacaggaaaaatgcttttgtttttgaacgtctaagactgtcttcctcctcattgaaaaaattcctactgaatttcgattatatgaagatttttagaaatgcagctattgcatcgaatgaataaatgaatttgaggttcacgttcttaacatctgttttctgactttgatcagtctcctttaagtgctctcgtggtcatactctgcaactcaggtgaaagtttctagtgagatagttatcccaaggagatacttttatctggaagagagtagttctgaagttctaagtgaggttggttggttagatttaggttaaggtaccacatggaaaggagaactgcttaaaggggtagggtgaccatgaaaccttcttctgcaaaccctgctcgtcaagtatgaaaccggtggggtaggaggtccatctaatcttatctgtgcccttttg

SEQ ID NO: 39922 - DNA, 1041 bp, Homo sapiens
agaatgtttaatgatcttttgaaaatatggtttcaaatggagtagtcttccaggaccctacagagtgagtatggtgtgctgttggactggtagtttggaggctcagtttctgttgcctgccctgcaacaggatgacttgtgctactcactgtaccttgctgggtctcagttttcctgtctccaaaacacaaggaggttgaaagaaatgatctctcgggactcttctatctctgacattgtacagttccatgaatagattttattgtaattcttgctcccggctcccccaagacctttgcttctgtcaaacatcatttgctgttgtttgactttgttagattttgtatttaattagaatttatattttagctattattatgtcattatttatagagtaagtcataagcggtgcctaaattcatttatcaccccatctatattagtttcatacctgaatacttcctccgctcctttttactgttcttgctaccatgtcccaaacaacatccatttctggaggtggaatgcagtataactggaaagaatctttcagctgattgtgggattattttttgcaagaggagtgcagaagctctgcttttctaagcagtaatatcaagggccatattctgcttttaatttgcaagtagaaatcgttttgatgtcatttggttttacctgcaggtgcaggttttagtctctaggtaattccttttctcttctgcgtcaactttcccaattagtgtgtgcagcattgccttgtctttttggttaattcataagcagttcatacagatgcctcttgattcattgcaattattaatagtttctttaggcagctagtgcaaatagaaaaggtgacatttgagagggtttgttgttttaatttatttgtttcatagacagagagggagggtgaaaatgaaggctttaaagtcagggagattgaggcttgaatccttctggctctggctcctggctttgtggtccaggtcacattccttaaatctgtgatcctcaatttcctcatctgttgaatgg

SEQ ID NO: 39923 - DNA, 1028 bp, Homo sapiens
cagaatgtttcctgctggaatcattgatctgtctaggcactgatgctccacaggtttgggaacccctgggtcggccggtcttccagcaactcttcctaagttatgttctgtagacttagttggtgagaagctcattctacttttagcaaatctcccatttgaaaatttgaattttcaaaactcatttttcaagaggtagatggatatttgctttataacaggttcatttaaacaataattgaccagatttctttgaagaaagagctgcctctttaccgtaagagccaatttttaagttacatataaattctctggcatcttagataagagcatggagctccgtaatcaacccatctggacttaagatctggagctgccactatgaccttgagtagtcctatgtcctttcaatgcctcagtttattcatgtataagatggaggtaatattagaactttcttatagggctgctgtgaggatggactggagtaaaatagtagatatactgtgggtagaatagtacctggtgtatggtttgtatcttttaacagatgctatcaagtaacttatccctcaacaggttgattgttatggtcatgttttatgatggttgctcctgaaccatacatgactagaaatatgtaaatatacctggaccttggtctttggacccaccctgtagacatctacggctctgcaaagccaaggagccttttatttgtttttgctgaattttaaattctgaatttatcacaactctctgactgatgggatgcatgtgtggtttttttttttttagattgttgtaaaatgaactgatgaattgcatgcataaatgtggttatttgtggtctgagtaaaaataaacaaaaacctgagtgactgaagtattatgcctcaggaaaaacagccaaaaaagtcccagtgggggacaaggtggaggagggaagagtcatcacagacacgatactcttgtaaaatatggaactggattccttacattttattggctgtggattagagaggtgt

SEQ ID NO: 39924 - DNA, 1053 bp, Homo sapiens
acaagaattccttcttttgcatatcagtcctcggcaggcaatcaatgcttaaataaatgcttggtgaatggattagttagaagtaagaacattttggctactgttcattactttgaaaagtgctggaaagaagtggaagttattttcctttccagctgggctgtgctcttaaaaatagtgagtgtgtatggatgaaaataatcatgagtaccgagatgtgttgccatgtacccaaggataattggctcacttacctgtttacggattattcacattggagatcatattcatagctccagaatagtttctttctgacatccaatataaacctgggcctccttcttcctactgttacctggcgtgagcttaggaaacccaaactaagtttaaaatcagcctaagcaaatgtgcagatcagctccagtaatcaaagactgaaaatcagtccagcattcactagtttggggatgattttatagtaaccctgctactgattttaaaaaaatttttttttctgtttaatgtggataattggtaattaccggtatttaagaatataattttaatggatagggctaaaaaaatacgttagcagatcgagtcctcaacttcttccgtttctatgcataggttttacctcacaaaaactactacaagcaccaagctccctgatggaaaggtatatggaagattcattcattctttctttcattcatccattcacacattcactcattcatcatacaatggaaaatttttacttaaccatgtgcaaggaattgtggcaaaatgaaaatgagatgtacattcagtatttaaataaagtttagtggaaagtttagtgaatataaatgcacactttacactttttttctgcattttttcctttcttctattccattggactggtatgctaatagctgtgcactttcatcattgtgtttcaagttgcatgttgatagataatatatgccacattaaaattaggctttggctcaattactattcaatccatgcccattttcacctgatactccttgtagttaccagcat

SEQ ID NO: 39925 - DNA, 1245 bp, Homo sapiens
caaggttatcagaagcaggccctccttattttgataaaagcattgaaagcaatacattgtagaaatggtaatagaaataataatttctgttttaggaccttacatatagaacttccttttctaagataagaattttaagtcatcaattatgttcacattttattttcatgtaatttagtttaataaaataaatgtactcattcaaaatttttttaagaagtgatatacagtgtcagttttacagaattttttaaatgttggctgaaagaacggtaattacattgagatttttaaaaatatataaatgcttaaaattacagaagtaataaaaagaatggttttagacaaatcttatggaaagttttttattttattcttttataattatatttatggatatttgtctttattagtgtagtaatatattttataacgctcataatttgaactttcaggctaatgtactataaatatttgtattacgcattactaccatcccaaatgtaccaaaacacgtttagagagaacaattatggacaaaaaagcaacaagcattatattttgtttgacatatttcatgttagcagaaatgtttcattgatttttctgtaacttttaatgcatcccatttgtggagtaatgaaaatgtaatgataattgccacaatgtaagcaaaaattgtatcctacctgaaaattactttccagaaaattcatggtagtgtactcagaatttgagactcaagagggcagaggtttccccgattgtgatgttttgatttgggctaagaggaactctttttttttttttttacacttaggtgccctttaacatgacaagttttgaatgagttaggtagcagaagtttttcgtgacagttattgtagctactaacctatagcatctatccttctaacgttcaaagaaaatatatttttctgtcactgtgtatggcaaactttattttcttgtgcccttaattttgttcccctttctcacattatctcctggtacttactgaccattacctcagttttgtttaggccgtctttcttgttaatcttccaatattaatagtattgtattatgttgctctgctgggttttaaaaatattgagtattccatttttggtgtatattattgtataaaatgtcctataaattattttctggtatattattttgtaagtttttgcagtgaatacgtgctgccttgcttgtattcttgccttcttccctctgatg

SEQ ID NO: 39926 - DNA, 1056 bp, Homo sapiens
aaatgcatctccccagacagtgaaaggagcctgacaatcctgctggtgtttattgtgaacagatcaacaagtatttggtacttgttagaaacctttcagagctcactaaagcaacatttcttttgcagtctggtgcctttggccttgcagtcagtcacttaaccctttcaagtgtgaagagcgttcatcatttggaacctccattgcccatagcgatggctggatttctaaagggtttactcaggggaataacttattcggaaaatatattcccattgtcacattttaaaacttgacagccatcataacaaaaactggtactgacagtaggcagacattctgaatgtattcattcttaatttggatctattggctgtgatttgaatgatctttggtagtaagttaaaaggatttttttttccttagctaagcgagaaacgatagaggcctatagctagaggactgatagtgcatggtgcttttggacaataaacatgtactttattttaggatgtaatttagtgagcagttagaaagcagtattctagtctttgcattagggcaccactgataaagctggctaagcaaagagaaataatattatggcaaaaaggaaaaaaggaaaagttgctttagttgctgaagctctgtgctgctcaggcaatccaactaagtggggcagggggcgggcgggggggagtattttcataaccctggtatttgaaagaaaagataattgagaattatgtcttgatttagttgtgactgccagtcagtttacaattttatggccaacaaagctaaactggtaaattttttcccccagggctaggattgagagagctactcaactctattcccagggggtttatgagtttttaccgttttgtgagtttatgtggttggtaaattcattgtggcctggtcagatgaagcactgctgtagttaaaatgagctattatttcttctagctactcaacttttataaggtggtaaatagatgggaagcaaggatgtcaatattacacaatgccttggaggtcctggattctatt

SEQ ID NO: 39927 - DNA, 1028 bp, Homo sapiens
taggaaaaacatgtcaactttgtgaggtctccttctcaaagagaagtaggtaatggagtacaaatatcaattaatgctcagtagagtctgcacatttgctggtaacgcagctatgttttagcaaataattgtctctcttttgtttcttgattgttagcagggggaactggggagataaacgtgttgcaaaggtctgtgctgcatcattgtgggaaggatgttcagttcatctaagagaaagtaaaaaattagccaaaccctgctcaccagatatcagagctgcaggaacatgatttccttctttagattctgtgctgagttctgctggcaccctgcattaatatgaaattaacaacacactactcacacggaactttacatctaaaaaaagctcacattatgctttaagccttttattataaaatagtggaagtcatgaggttaaatttgttcatacagttttctctggatcagctgtacaattaattttatataggggatgaaagtatattccatgtggatctttgtcagttgagaaagcagtaaaataactagtggtgaagcctgccttccccatcccaccccaagcacatatatatgatttcctacttgcaagcactccagatattatttttttgcaaatatgaaatacccctggtgttcacattcattgtcattgttaatatttgctatgtgtcaacagtgtgactcatcccaactaaaagcctctaggagaatagaggacgatggctgagaaagaaattccattcaataaattaccattgagcatttactatcattggcactgtaaggccagagtccctaaagagtgcacgatctagtatactgtgtaaggcagatgtacagataactataaatcagggcagaatagggtaaatgtcttacaagaaattattaaaatgtggtgccgtgggtggatcaccatttggaaaggctcagcaaaggttttgtagagaagatgataaaggggaaaaggatatgtaaaccagatgtgggctgggctctcc

SEQ ID NO: 39928 - DNA, 1499 bp, Homo sapiens
gataaagactgctgttagacgcaggaaataaaggtcacattggtgttgtactcaattttaacaacagctggtgccctgctttcagatactggattgtactttgtgctggggttatctgaagtcagatctgcctaaggacttctttaattttggaattttcctcctttctctttcgttacagaagccccaccctgcctcacccacccttttttaaataaataaatagctagactggtgactgattcttcagcaaaaatattttatgatccagcagattattcactgatttgacatagtctggctgtacccaggaatggagcctgcacggtgaatggctttgtatagaacctctttgtctacaccattatgtgcgctgataagcgttcatggaacgcgttgaaattgtaattatatctgaggaattctgtatagattagaattctgtatagattagagagtgttgaaacggatgatttctatgctgagtttgtgctggtgtatgtgtgaagtgagtgagttgggtgtattgtgcgctaaacttttctgatagaggaagcctgattaaagaatggtccgtgctaaggacttgttagatctagttcactctccatttaataattatatgctatttctatattttcattctcctatcacctgtcttgcctttttcattattttattatgaaacttgtgtaaatacaattttgtttctgtactttttggcataacataaatctgtgaacttgaaatttgaattttgtgttagagatttttttgttgtttgtttagtcttgtctcagattttattatgtaaatcccattattcaaagttgcctaaatccatttggaaatctttaaaaaaaaaattggggattcttaaagttgaatttattggcttttctgatccagttttgtttggaccaaaaaccagtattgtacaaagtattaagcatatatttttatatttactaaaatggactgtggtgactttggataataaggaaaagtttaatattaaagccatgtttattacagtataattaacatgttaaaccatgggataaatgccatcaataaaaaattatgacatactttttgttctagttttacctcataatgaaggcacacagtattattggggggactttgtaaaataaagattaacagtgtctcattagaagaatacattgacatgatttagacaactcctaagagaaagggaaagtatctgaaagtatctgaatgcacaacatatagaaggtaccctacttcttgcctggtgctaggaatcatgcctaatttgcatatcgacttaggtaccttttttaaaagttgaaaatacacacattcatttctctttgtgcttctatcttccttggtaagttactggatagtgtttattaaagttcttggaaatacatacacaaaaactacagttgtctcttggtgtgtgcaggagattgttcccagaactgcactcccccccccccccagttctc

SEQ ID NO: 39929 - DNA, 2075 bp, Homo sapiens
aggattacaggcgtgagctactgtgcccagccaagatgttagaaaactcttgactctgggtagcagcataactgtccaaaaaaacacaaaacaaaacaaaagaaaagccatgctacaaagtctagtgaaggtcattcccacagaaaacacaaagcattaatttttgtcatacatagaaatatagttttagtaataatccaaaagcatttttgataaaaatgaaaaactttaaaaaaatattttaaagtttttcatttttaaaaactgatgtgttattttgttacatacatacaatgtgtaataaattagggcatttaggatatccatcaccttgaacattcatcatttctttgtgttgggaacatttcagaacttctagctattttgaaatgtacaataaattattgttaactctactgtgctctcaaatactagaatttattccttctatctagctatatgtttgtattcgttaaccaccttcccttcctaccaccaccccaacgaagcctctgaaccatcatttgttctctacctttatgagatcaacttgttttttagctcctacacatgagtgagaacattgaatatgtgtctttgtgcctggcttatttcacctaacataatgtccttcagtgccatagatgttgtagtaaatgacaagatgttattttcttttaatgaccaaatagtattttattgtatattaaaccacattttctgtatccatctgttgatggacacttagattgattccgtatcttggctgttgtgaatagtgctgcactaaacatcaggtacaggtgtctctttgatatactgatttcctctcctttggataaatagccagtagtgggattgctggatcataaggtgattctatttttagattttttgagaaacttccttactgttttccataacggttatactaatttacattcactccaacagtgtgtaagtttccatttccttgccagcagttgttaatttttgtccttttgctaatagccattctaagaggtgaaatgctacctcattgtggttttgatttgcatttcccttatgatagtgatgttgagcattttttcaggtctattggccatttgtgtgttgtgttttaagaaatgtctgttcagatcctttgcccgcttttcagtgggattatttggttgtttttgttttgctgttgagttctttgagctcattgtgtattctggatattagtcccctgttggatgaatagttagcaaactttttttccctttcaacaaatttttcactcctgattgcttcttttgctgtgcagaagcttttcagtttaatatagtccctcttgtctatttttgtttttgttgcctgtgcttttgatgtcttagccataaaatctttgcctaggccaggggggtcctatcttttggcttccaggggctactttggaagaattattgtcttcggccaaacacaagatacattaacactaacaatagctgatgaactgaaaaagaaaattgccaagaaaaaaaatctccacgttttaagaaagtttatgaatttgtgttggacggcattcagagccatcctgggctacatgtggcctctcggttggacaagcttggcttagaccaatgtcctggagcatttctcactatgttttcttctaggggttttgtggtctcatgtcttacacttaagtctaatccattttgagttgatttttgtatagggtgagaagtaggggtctagtttcatactgcatatggatctccagttttccaagcaccatttactgaagagagtatccttttcccaatgcgtgttcttgtcatcattgtcgaaaatcagttggctgtaaatacgtggatttgtttctgaattctctattctattccattggtctatgtgtctttttataccagtctcatatagctatatatggtaagtatagctttgtgtagtatattttgaagtcagatagtatgatacctcagcttttttctttttgctcaggattgctttagctatttggactcctgtggttccatatgaattttaggatttgttcctccctccct

SEQ ID NO: 39930 - DNA, 2030 bp, Homo sapiens
agcactgtctctacaaaaaacacaaaaattagcctggcttggtggcacccgcctatagtcccagctacttaggaggccaaagtgggaggattgcttgagctcgggaggtagaggttgcagttacctgagatcatgctactgcgcttcagcctgggtgacagagtgagaccctgtctcaaataatgataggccgggtgcggtggcttacacctgtaatcccagcactttgggaggccgaggcgagtggatcaccaggtcaggagattgagaccatcctggctaacacagtgaacccctgtctctactaacaatacaaaaaattagccgggtgtggtggcgggtgcctgtagtcccagctactcgggaggctgaggcaggagaatggtgtgaatctgggaggtggagcttgcagtgagccgagatcatgccactgcactccagcctgggcgacagagcgagactccgtctcaaaaaaaaaaaaaaaaaaaaaaagataagccaagctgtgcaacctgtgggctgcatgtggcttaggatggctatgaatgaggctcaacacagatttgtgaattttctaaaacattatgagattcttttgcgatttattttttttttttattttttaatttgttttaaagctcatcagctgttgctagtgttagtatattttacttgtggtccaagacaattctttttgtccagtgtggactagggaagccaaaagattggaccacccccgcctcccctgctgatacaggcaatagataatgtactgatcgaactgaataaggaatggaggacataaaattaaagacgttgatttcaagctgctgaagtcaacattcagatgtatgtaatgtgaccaggcatggtggctcacgtctgtaatcccagcacttcgtgaggctgaggcaggcagatcacctgaggtcaggagtttgagaccagcctggccaacatggcaaagccctgtctctactaaaaatacaaaaattagctgggcgtggtcgtggatgcccgtaatcccagctacttgggaggcagaggcaggagaatagcttgaacctgggaggtggaggttgctgtgagctgagattgtgccactctactccaccctgggcaacagagtgagactctgtctcaaaaaaaaaaaaatgtatgtaaggcctttggatacaccctttgggtggagatacggatttggggtcattaatccatagttttgatatttgaagtcatgagagtagagttgagtgtgttcactcaagatggcctgaaatgaaagtccgctaacttacagggagtggcaggaataaagcttttgaacagttaatcttttaaaaaggtgcaaccagaaaggaaaaacaaaaactacatggcactggttgcttcagaggaagatggatttcaaaggaacaggatcagaggtctcaataaaaaagctgttactcaagcaagagatgggttagtggtgggagtaatggggggggttcatgaaccagaatagcagtagaagagtcagaaattgattgaaatagatttgagaaaaatgtagaggaggaggagtatccagccaagctaaccaagtaagacagtggagtcaccaactaagagactacagtgacaagctcagaagtgtagattgcaggtgtagattaggaaactgttttttggggatttaaaaaccactggagtaaatgagagtttgtgaggacagtgggccaagatggaaccccagggagcaatttggttggcaagatggaagagaacatacctataaaatgtagagatcagttaggtaactatggaagaggtggcgacagttgtaggccatctagagaagtaggaataccagaatgaatggcttcactgtcagcactatattttgggccttaccaagccgttcttcctgtgccacctctcccacaaacatgctagttttgcttaagatttgtcacctctgtgtatccttttcctgcctcttagtcatttcttccttctttgcacacttgttttaggttgtcacttgg

SEQ ID NO: 39931 - DNA, 1054 bp, Homo sapiens
atttccctaatgcaaatgatgttgcatttttttcaggtgcttattgtccatttaaatatcttagggaggaatgcctttcacgtcctttacccattgaacagtttgtctttttgttactgagttataagagttcttagtctggacactagacccttaccagatacgtgatttgcagatattttttcccatttatagattgtcttttcactttcttgataatttccttgaatggacagaggtatttaattttgatgaagtccatttttttcttctgttgctgtgcttttcgtgtcatatctaagaatacattgccaaatccatggtcttgaagctatactccctaggttttcttctaagagttttatggtgtttatgtcatatttaggatattgatccattttgaatttttgtttattgtgtgaggtagggaaaggtttttttcaaaagtactttacctactactttttaaattggcaaacacttaaaaagaaaaacttggttattagtatatttcattatggaaaacttgattctcagaagtagaattgtagactgaatccccatatactatttagccagcttcaacttttaccattttgacccatcttgtttctttttctttcttctttttttctgagacagtctcgctctgtctcccaacctggagtgcagttgtgcaagctcgtttcactgcaagctccacctctcaggttcactccattttgcctcagcctcctgagcagctgggactacaggcgcctgccaccacgcccggctaatttgttttgtatttttagtagaaacggggtttcaccatgttagcctgggtggtctcgatctcctgacctcgtgatctgcctgcctcagcctcccagaatgctgggattacaggcgtgagccaccgctgcctggcctttttgtttgtttgtttgtttgttttgttttgtttttgagacggagtctcgctctgtcaccaggctggagtacagtggcacgatcttggctcactgcaacctccgcctcccaggttcaagcaattctcctgcctcagcct

SEQ ID NO: 39932 - DNA, 1086 bp, Homo sapiens
aggcactgtacctggcctgctcctgaaattttaatacttgctttcttgctttcacttcttctgaacatattcttatagatgttactttacttttttatacaaatatccacctctaagattgtgtgtactccttagaggaagccacattttataacacagttctgtgtttttcagaatttaaagtgagatttttaaatttaaaaggaaaaaatacttagtgtctttggaataatcagtttgcttaatgtcttttttgtcactttatttttctaaaaagctctttttgtatcatttcttaataatttggaaaaccaggtacaaatgacctctccgagcagcactggcagtcccatgtttaaattttcatctccaatcgtaaaatctactgaggcaaatgtactacctccatcatctgtaagtaacaagcaaggaatagtatatatttactgatttcaaagccatgttatatttttatcaaatctaagatgccactggtggtgagaaacactgttatttttcttccaacttaaaaaatactctgtgtaaaaaacttttgaacaatcatgtattcttcactacataatgtacatatgtatgcatattcattttcttctgtaccatttgaaagttaaaatgcaaacaactggatttccttaattcttctccatgtgtcccttaagaaaaaagacattcctttgcatccccacaatacagctatcatacccaagaaatttgacatgatataataacgacatggtccatattcagatttccccattatccccagactgtcctttaattgctgttttatttctgttggtcctagagccaattaaagactaggacctaatcaactacatgatattgcatttagttaaaacatgtgtcttgatttacctttaatctagaaaagttctgggcatttttttctttcatgattgaaaagtgaatgtttggggtaagaataacacgtagtttaatattcaaattgccccagatttggcatgtttatattattttaatatgtcattttctagttttgactgtgtccttgtcttctgacacaagtagatgttacagatcaaa

SEQ ID NO: 39933 - DNA, 1049 bp, Homo sapiens
ttacaaaggtattagatagtgaattgtgaaatgtgtgttctacttgagatgtctctaagcatcaagttagcagaattcttggcttttttttcctcttagattagtgggacccacttatgatctactaagtcaaaatttgggggagtagaaatcaaatgatagaattggttcaaggtcagctgggcgcggtggttcatgcctgtaatcgcagcactttcggaggccgaggtgggcggatcacgaggtcaggaattcgagaccagcctggccaacatggtgaaaccctgtctgtactaaaaatacaaaaattagctgggcgtagtggcaggtgcctgtagtcccagatacttgggaggctgaggcaggagaatcggttgaaaccagaaggcagaggttgcagtgagccaagatcgcaccactgcagtccggcccgggcaacaagatcgaaactccgtctcaaaaaaaaaaaaaattggttcaaggtcagtaatataaggaaccagtgtggacaagtgtgtgccttaaggagttggcatgagagagtagattatatagttgatgtttttagggttctacgctggaggttggacagagaagagaagcttccctacaaaaatagccagatgcatcttttgtttgttcctcctccctcagttgattatgacaaatttcaaacatgaaatgttgaaagaactgtgcagcgtatacacacagtagcagttagattccaacattttgtgttacatttgctttatcaaaaaagaaaaatttacctgtccatctttttttattttttggtgcattttaaagatagttgaagacattagtacacttcacccccaaatacgtcagcatacatagcgtgaagtagagttaaatatttgttgttctttttataacatagcaaaattgacatatagtgaaatgttaaattcttaggtgtgccatttaataaatttgacaaatgcttacatctgtgtaatgcaagccctatcaagagattgaatatttctatcatcctagaaatttcagttgtcctccttctcagt

SEQ ID NO: 39934 - DNA, 1043 bp, Homo sapiens
agatacagtcttgctctgtcgctcaggctggagtgcagtggcgcagtctcggctcagtgcaacctctgcctcctgggttcaagcaattcctgtgcctcagccacgcaagtagctgggactataggcatttgccaccacacctggataatttttgtatttttagtagagatggggtttcaccatgttggccaggctgggtcgaactcctgatgtcaagtgatccacctgcctcggccttgcaaagtgctgggattacaggcgagagccaccgtgccctgcctgtcttcttcttgcttgcctgtttctccttttttgatgttgtattgtgaaaggtaactgtaagttttttaatttcactgcttatatatttatccagtttgaagatttaccgtaatccattctgccatcaggatacattttggtagatttctaatacacattaaagtgaatatgcacttttctgtctgcacacgtgcagtattttctctagagtatttatctaggaatggaattgttggattataggggatgatccacatcttctgctgtattagatgttgccatgttttctcttcaagatagttttgcagttcaacatttccaccatatgacaatagatagatcttggggcatccttttgtgtgttttttggacatttgagttttctcttgatccatttttttcctatggggttatttcctgtagggatatatatataatttcttatatgtatattaagaaatatgtatgtatatgtatatataatttattattagaaagagttctctatatattctgaccataaatgtttggaaaagatagggacagatttaagattggttacattaacctttctgtctatatattgctctttttttctaactactttaagttgaatgcaagtctcattttagttgtattataaatgcatttcagcttagcttaaccatttgagttttgatacatagtccttgtatttgtcatttgtttctaattaaaatttcaccagtgactccctcattgaccaatgagttttaggagta

SEQ ID NO: 39935 - DNA, 1073 bp, Homo sapiens
acgcctggcccatagctagttttaaaatatcttatttgcagctcaaaaaatatggacagtaattcagggaaaatgtgacaaaagtacattttagttcatgcatttaaaattcactctgggccaggtgcagtggctcatgcctgtaatcccagcactctttgagaggctgaggcagaaggattgcttgagcccagaagtttgagatcagcctgggcaacacagcaagacctagtctccatttaaaaaaaaaaaaaaaagccaggtgagttgcctcatgtctgtaatctcagcactttgggaggttgaggcaggcagattgcttgagcccaggagtttgagaccagcctgagcaacatggcgagaccctgtctctacaaaaaaaaaccaaaaaaattagccgggtgtggtggcgcacgcctgtgtacacaggaggctgtggtgggaggatcacccaggtctcacctacagtgagctgtggtctgggtgacagagcaggagtccgtctcttaaaaaaaaaaaacaaaaaactgtaaaaggtttgatctgtagtgctgttttgaatatagttccattttgtatgcatgcatgtgtgtgaaaagtcattaagtctggaatgaaatatagagtatccgtgaagccattttagaattatatgtgtgtatatttatgtgcataggtatatgaatacataccttaggttccattattatcagtttttcctcttatttgtttgtatctactgtatatttctctgggaaatactcatggtctttaggtcatgttagctattgtcaaaatttagatatgaatcattgatttatatgaaaataaatgtttttgatttctctttacctgtaaggtggattctcaatatcctcctgttcagagacttatgaccccaaagccagtttccatagcaacaaatcgaagtgtttattttaaaccatctctgactccttctggtgaattcaggaagactaatcaaagaatagataacaagtgcagtgtgagtatatgtatatttctaccagtctttgaatattgattagaataagtaagactaaataatgtaa

SEQ ID NO: 39936 - DNA, 1049 bp, Homo sapiens
aaagtgttgggattacaggcgtgagccaccgtgcccagccccctgttaactcttgatagtctcctttccaatactgtgcatatttcttttccgtagtagttttttaaaaatttctaatgtcttatagttggctgtgcatcataaacacatattctgtgtaagtctttaacggtggaaatcaactcgaaggtcggcttttatgttaacttctcattgatttttcagagttgatattaaaaatatgtttataaatatgtgtttggtagacaataagatactaattaaaatggtggtcttttaggtaaaattctattgtagttaagcttataatcatggttatgtataccaaggccttaattagaataacaggtcactgagtttttgatggtttcagtatagtggttctcaaacattaatttgcagaagaatcaaattcaagagcttattaaaataaatttgcctttctaatgagctcataggctacaccaatgctgctgatctgagaactacactttgagaaccactgttttagtccttttataagtgactagatatataaactacagaactaaagattacacagattgtcacacatgggtatgcacacaatttaaagggaattttgtgagatttaaagctattttaagttttactagatttagcatttattgataaggttaccagaagctttgaattgcatgatccaaggacacgcctgtatttgggtcttagcacctttttgttcgttcagtccatagtacttcccactctctctttttttttttccttgagacagagtctcgctttgttgctcaggctggagtgcagtggcgtgaactctgctcactgcaacctctgcgtcctgggttcaagcgattctcctacctcagccttccaagtagctgggtctacaggtgcccaccaccatgcccggctactttttttttatttttagtagagacggggtttcactatgttggccaggctggtcttgaacttctgacctcgtgattctccctcttcagcctcccaaagcgctgggcttatag

SEQ ID NO: 39937 - DNA, 1021 bp, Homo sapiens
gggaagaggttactgtttttatgttaagtgtcttttcaaagtctaatttacagccaagaacagcaaaagtaccccttggctttgtgcctctgcggcgccccggagatctccttccccgtccctcttcctttccgagaagccgcgttccgttgttgaactacgtttcccagcgtgccgcgcggccgagagcgtggactcgaccagcccttcctctttgcctatcagctcgtcgcagcatgatgatgcaaatgcgtcgggcgccgatgagtgacgacattctggctcgcgaccgcggcagccgccttagcaggggtaataggcgcaacggcggcggaggctgcagggacgacgacgacgacggcggcggggcgggcgctgtgcgcacaggggaggggtaggcgggcgtcgccagcggcttcaactgcggcagctacggctagggcgacggaagaactcccaccagtcggcggtcgagttaggcctcagcaccgcggggaactgttcgtgctgtcctctgcgggagatctccatagagaccgtgacacacacagaggcgggggtccgcagaggcggccggaccggagcctcctcggcctctgcggccgccacccccttccccgctgccagcactcaccctctctccgctcctgctcgcaacctcgcggttcctggggtgcttgtgcccactgtgtggacagcgcgggcggacttttgggccggggccgggcggcgggggaggctctctaaggcctccgcctctgcctctcccgcccccttacccgccccggagcgggaagcggcggaggctccgccatggcctcgggagccggaggagtcggagggggcggtggcggcaagatccggacgcggcgttgccaccaggggccaattaagccttaccagcaggggcgacaacagcatcaggtatgggaccccgacgccgcggtggcctggcgggtggggaaactcggctggaggggacgggcggttcgaggccccggcgccccacgtggagcagaca

SEQ ID NO: 39938 - DNA, 1048 bp, Homo sapiens
atgtggatctccatattagaattgaatgagttaggagagtatgctgcagtggaacttcatcaggcaaaagatgtcaacacaggaggcatctttcaacttagacaggtactgagtttgttttgggtttttttttaatgttttctctctgttccactcttacacattgtttctggggattttctaactatttgtatctttattctctaatccttttccccttctttatcccgttccttttcattatcattcctggcacccatactcctccccaccctcttcagggtcattcccgtagagtacaagtcacggtgaaacctgtgcagcattcagggacactgccacttatggttgaagccatcctgtcagtatccatcggctgtgtaactgccaggtccaccaaactccaaagagggctggacagttaccaggtaagacaagcagacttaaaatagtatttaacaaagcttggttaatgcaggtcccagggggacctctttgccaatataacagaactctttgccttaaccgtagatcttcccccagttcacatttccatccattgccttttttctagctttaaaatctgtttgcttagtgtcagttaataataattttatttataaacacacgcatcctaatgctatagtagtcattaactttaggcagattttattttatatctggcccaaaatatgttgtatctttggcattactgcctgacctgatccactttttgggtttttttgtgtgtgttttttttttaaaagatagggttttgctttgttgccaggttggagtacagtggtgtgatcatggctcactgcagccttgacctcctgggctcaaacagtcctcccaccttagcttctgaagtagctgggactacaagcacacatcaccacgcccagctgattcttttattttttgtagagaagggcatgtcattctgttgcccacactggtctcaaattcctggactcaagtgatcctcctgcctcagcctcccaaagtgtagggattacaggcatgagccaccgcacctggccac

SEQ ID NO: 39939 - DNA, 1045 bp, Homo sapiens
tactatgcagccatgaaaaacaacaagatcgtgtcctttgcaggaacatggatggaactggcggccatcattcttagaaaacgaatgcaggaacagaacaccagataccgcgtgttctcactaataagtgagagctaaatcatgggaaccgatggacagaaaggggaacaacagacactggggcctgtgggaggaggagggagaggctcaggaaaaaaaaacaaaaacctgccaagtactatgcttactacccgggtaatgaaataatccatacatcaaaccccttagtcatgagttgacctgtataacaaacctgtgcatgtacccctgaacctaaaataagtcaaaatatttaaattttaaaaaacaaaagtatctgataaagaaggtggtttgcttttaaccatagtgtttttcagttaaatagttaaaaatatttttttgatttcccttaattccagattgattttctttggggcttaaattcttaaaagaaaggaaaagtgtagaagtcgggtacagtggcacatgcctatagtctcagctactccagaggctgaggcaggaggatcacctgcgcccaggagtttcaagctgtagtgcactgtgatcatgcctctgaatagccactgcactgcagcctgggcaacacagggagaccctatctccaagaaaaagagagagagagaaggaaagaaagaaaaagggagggagagaaggaaggaaggaaggaagaaaaaaaaagatgagatattttgggaatgtcattcaaagacaagaatagttgcattattgattttgtcaggtttcactggataaaagtaagatgtcattaattgtatgtggttatataagaagctggaactcttacctaagtaaattgttgatgggttgtgaaataatgaaggactcttacctacatgaatgttgatgggttgagaatcaagtaaatttaaacgctggtgagaattacaaagaaagccacagatgtcgtttattctctttgtacacttagaatgtagtatgaaacaagatataaatttgt

SEQ ID NO: 39940 - DNA, 1043 bp, Homo sapiens
tgtcatcaaagttgtccgtgagaaaggtgtttgcagactaatgttagggatcagaggcgaaacaaaaccccagcccctagacctccaccgtagctgtgtgtggtgagggcggatctgggagttcgggaatggggcttacaagactctactgtgggagtctcagaggaaggacggattgagttgctctgtcttctgtatttgcacttcaatttgtggccactcatcatgcctagtgagtagtggtagtgctgtgtcatgacagctgctggtgcagtttcaaatagcctcactcacgtggcctgtgtcagcatggaaccttggggtgagatcccctctgccccagtcatttgggatcatgtgtgtttctgcactactgactaacaatggaaatgtggattatatatcttattcagtatctcgtagcaaaaaccctataatgcagttttataaaacggtgtgttttccagcttctctggaaaagatttataaacactgttaggacagttgggctccatctaaatataaatggatggcaagtactgtagcaccctgtcctttcttttttaaacccagagcctatatactgtttgagaaatatgtgtatatatttttttaattctgaaagaacttttcttctctagagcttacatttaaaatgtcttcagatgccctcaaaaaaattttaccatatttctcatatttttttagaagttataggagtttgtcagaagttctgatgcttaggaatacataggttgttattatatagataatattttacccacccaggatctatgtttgcataagattttttgtttgttttttggtttgggttttttcccccagtttatattcttttctttctttttttgagatggagtctcactctgttgcccaggctggagtgcagtggcacgatctcagctcactacaacctccgcctctgggttcaagcaattctcctgcctcagcctcccaagtagctgggactacaggcacatgccaccacgcctgactagtttttgtgtttttagtagagatag

SEQ ID NO: 39941 - DNA, 1053 bp, Homo sapiens
aatcaccaaattcaaagggtagcaaatgctgtccttttatgtgtttaaaacagattgtcactcctttactcttcagccccgctctgccatagtatagtacatgacacaatgcccccaagagctgcagtgtgatacagagattcacaaaagagaacttgtcccccactcccgctgtggggacacaggtgacgggtgcctgtgaatctacaaacagcagctgaagttgtcaatccatcctcagcaactaacggtttttagcacttggcatgtacaaaacaccaagctaggtgctgagggagataccaaggtgtgtataacatggtcttgttcagtggcagttcagaatctagctggggagataaggcaattcatgtttaatgacattgtagatattagtcataagaaaaaacaaccaaatttgaatgctgcttccatatggcccactcacaatggaaagaaaactttaatatctagagaagtgtcttagagggaaacagtgtatccaggtactgagctgtagtttagaagtgtggatgaaattgcatatatcaagctcttaatacacagccctgtacttagtgggcactcggtactacacttttaacatttttttgaattgacataatattgttactaacacaaatatgtcaagaaaaattattctttttattagtttttaatatttgtcttgttttttaggtcaagaagtggttttcaagtgccttggggaaggaattcttgaaaaagcctttcaggggtataatgcgtgtatttttgcatatggacagacaggtaagaagttgcttttatagaccagatgtgggggatcatgcctataatcccaggacttggtgaggctggggtgggaggatctcctgagcccaggagtttgagaccagcctgggcaacatagtaagacccgtctttataaaaactaaaaacattagcccagcgtggtggcacacctgtagtcccagcttcttgggagactgaggtgggaggatggcttgagcccaggagtttgagactgtagtgagccatgatcacaccact

SEQ ID NO: 39942 - DNA, 1052 bp, Homo sapiens
cccactttctgatttagaaacacgtaattctctagtgggggtataatggcattgtagtgggttggttggagcagttgaagaatatgggctcttaagtcagacttggttcaaatcctggctctaacaccttctatctgtgtaaggccgggtgagttactgaatctcacgatccttctgtttcctcatatggtaaataaggatactaatagttctgatctcatagggttgatctgagggctaaataatgtattcatttaaagtgcttaatccagtaagtacctggcgacttagggaggaggaagcactgccttaatgtttatcgttgtctttattattgtctcattgtgacaggagtcagcactttggaaagaaaatgcaatgtactgagatttatgacaactggttttgccacaaactgctagaccttgggcaggataatttctgtgggtctctgttcttcatctgtgaaaggaggagatacagcctggaatgatctcagatcccctccagctctctgataaaacatgaatcagccattttatgttggccacacagctgttccagtggacttttcagaggcaaattaaaggcttatttgttaagccattcacattgcattgaatcatgctttgaggtattttacattttatttatttgtgtttttttttttttttttttttttttttttttgagagggagtctccctctgtcgcccagagtgcagtggcacgatctcggctcactgcaacctccgcctccttgggttcaagcgattctcctgcctcagcctcctgagtagctgggattacagacatatgccaccacacctggctaatttttgtattttttagtagagacagggtttcaccatgttggccaggctggccttgaactcctgacctcaagtgatcagcatcccaaagtgctgagattacaggcatgagcgactgtgcccagccaggaattattttacatttgaaatatattatctcttcctcctattagcttttggctaggtagttgtaataatgtttgtctggcagataattctg

SEQ ID NO: 39943 - DNA, 1022 bp, Homo sapiens
tttttctctgataattgtgtatatttttaatagcaacctttttttgttcatcctaaattctagccatactatgtcaatacctgagattattgagctgctagatttgttgcaatatggaaatcccattgcatcctttaaaatacctttttgtttgtttatcaaaatcattgatacatttcccccaaaatatgttcctccaagaaaattctgttatcaaataagtttggggaatgctgctgttgaaatgttgcattgaatatgcaaggagagtaacaacatatattagcatgtcaaagtctctgaaaagtactgccataaagaaacccatatttaactgtgttcagcagcatttctcaatttagttgatgtcagaagctttttaagggcttgacctttgttaacatcccgttcaatttctatgcttgtgaaatgctggtctagagaaatgattatttttaagtaagttatcagaaatattctgcattttctgacagtctctgaagtcttcactgctgttaaatgcaggcagtcttgccccaaaattgtaggattgtggtggtgatttaagtaaatcctcacaactggattatgtttaactcactaatgtaaaaaaattatttctgagttcttattctgtactcagccctacatgaatagatgggattggggacagggattatataccacgtgacctggcctctgttttcaaggggtttacatcttaaagatatatgagactcaaatgcagacagttactgaaggcatcagaactttatgtgtgccaataagtgctaagctgttttgtcgaccctaggagtcttgggatagtagaagtagtgaaggccaagatagtcttcaaggctggtgaggaattgagagagctgagccttgaactgtgtcttcaagagtgggcaggtatgatccggcagagtggaaagacaaagtggggtaaaggcatgtaaattgcatgagttgtgtggtaaaaactcatggtgtgggtgacctggaagagatcaaactgc

SEQ ID NO: 39944 - DNA, 1031 bp, Homo sapiens
aaaacacagataacccatgttttagaagagtggacccaaaggagtgtccttctaaataacctcactttcctgatttttatggttatcatttctttcttttttttttttttttaagtttttcatttaactatttatccccaagcaatatatttttagttttgccctttttggtgaattaatgtaatagaatcatgttgaatatattattcacgggcttgctttcttctttcaacattatttttttcagattcatccacattgatgtgtgaaactgtggttaatgtccttccactgctgtaaactgttgcattgtatggagtaccatggtttatttttccatcctccaggtttgtttcttcactggtgtttggaaaacaacatggactccaaactcctcaagtcaccttgccacagatcccttgagttgggggttgggaatttccaaattgttggctttccttagtggaaatactagatgttctcatttctggagaccttctagagaatggactgtgatggacttttgcaggggctgttagctgttgacctgagtctcctgggtctggagttaaagccctgtgtctgcaggatcttgtcgatgagccctcccctggggtcactccttctagtgacttgaaataagttaaattggacttgaagtgagttaaattgttgtgggcccaaaaatgcttccagtgttgttaattaaaagttcaatgtattgtgtttgatgcccctttttacctgatttaaaagcttaagtttctctttggattaatcaataaaagtacttctataagtaaactctgcagattttttagtcactcaactaataggacttgcaggaaaagtgaaatgtctataagcaaaaaacaaaacttctactgggggaagctttggagctttaggtagattggggccagccaagagcccaagtggtttaaccagaagcaggctagtcttcagagcacaggacgacaccaagagtttttgttcttcccactcttggctttccaagggcattctcctcc

SEQ ID NO: 39945 - DNA, 1681 bp, Homo sapiens
tccctccaagagtgactgttagctgcccttgctcattggttctcagacttaaggatttttaaaaaacagtagaaataaaaatttggataaacagagagttcccagcctcttttaaatatgccgagtaatcacactaaaacaagagcaagccggacgtggtgactcactcctgtaatcccaattctttgggaggcagaggtgggaggatcgcttgggcccaggagcttgagaccagcctgggcaacatgacaaaaccccatctctacaaaaaatagaaaaattagctgggtgtggtagtagtgctcacttgtagtcccagctacttgcagggctgaaatgggaggatcacttgaatgcagaaggtctaggctgcagtgagccatgattacaccactgcactccagcctgggcgacagagtgagaccctgtgtcaaaaaaaaaggaaaaaaacaaaccgctactaaattttaatattttattataaaatagaggtcagcttaacaccagaataggagaaaggacataatctcagaatttaaaacttggatacatttaattttgtgaagtgatcacattaattatctcttttcctggaaattgatggaaataccaccatagctatgtgaactctgaactgtgaagtacagttaggtgtccctggtgtgtgcgatgtctaatagtacatcagctattggagttctgaggatcttgggtccttcaggccagatcatactaagaatcattaaaggatattttcccttaaaaattgaccagtctctgttatttgtatgtagactgaattttttgagtggtagcctacatctttgtttttgtattttgatgtattgaaataacctcaccaatctttttaaaagccgaaataaaattgaaatttgtaaaagtgttgtaaattactttgtctctgagctgcagcttttcccttggaaatctcttatttgctttttgcactgttttgatagatacctgttgagtataaataagtagttttgtaaagcactatcaagtgttgtagccaagagtgtgctctttggagacaaactgctcaggtgaatggatataaggcttttaagtggttataacctatgtctgttcagtactcctatctgagcctatcactaacatccctagaaagaattcagtaagaggattagggaaaaggaggtgcatgtcattaacactcatggccaggcctatccaggacgcagatatttaagtcaaatattgcattaagattaataaagaagggggttaggggagaaaagaaaaggaaagagaaaagaaaactacctggtaattgaagcaggcaaattgctggaagcatgtaagcgatctgaaatctagttactttcacactgccattggatctcctctctcagcatcctgatatatatatataatttttgtatttttagtagagacagggtttcaccatgttgaccaggctagtctcaaactcctggcctcaagtgatccccaccgccttggcctaccaaaattttgggattacaggcatgagtcaccatgcccggcctgcttttatgtatttctatacacaaaaacttaaattgaataaatggatcaaaaactgttctaagaaagcatgcatgaatcccttatttaagaaaacacggccgggcgcggtggctcacgcctgtaatcc

SEQ ID NO: 39946 - DNA, 1519 bp, Homo sapiens
ccaagccatcctcctgcttcaccctcctcagtagctgggattacaggcatgcatgaccatgcctggctactttttaaattttttgtagacacaaggtctcaccaggttgcctgaggctggtttcgaattcctgggctcaagtgatcttcccacctaggtttcccagagtgttggaattacaggcgtgagccatcacatctggcttgtttatggttagttaattcattccagactctcagcctgaaaacactgagaatgtttgcatgctagttttccacatcatatacaatattattaaaatactcatttggaatagaattccatatgggttaaccagagtactgttgggatggttgtggctatttgcacgtagcagatttcctgcttttattcaaagacaatattactggattttaaaatctgcttttaacattatttttccttttcactatacataggtctatgaaaattatcctacttatgatttaactgaaagaaaagatttcataaaaacaactgtaaaagaggtaaatatttcagtctttcaagtttgactttagaaatataagacaaaagtaattacataaaatactccatatttttcaaaatattcatgtcactaaatatcacatttgatcctcacatttcttcataatagggaaatttatttcttctcattcccactttaaagcttaaaattaaagtttgaacagttagtgataagacctgaactcagattatgatgtggcctcatggtgtacctgggtagctgggcatctcaacgttgctctcacaaatacttgaggaagttcctgtctacgaggcaaaggtgaggggaagatcagcaggtagctgtaattctgtattgatctcaactgatttttgaaggacaaaatagtaaaatagatgtggaaaaaatgggataaaggtttatgatttatggcaaaataatgtttctctttcattacagctaatttcttgagatagaggacagagaagatgactcgttcccatagatttgaagatctgatttataccattataccagcaaagagaatgtatttccttttctaaatccttgttaagcaacgttagtagaacttactgctgacctttttatcttgagtgttatgtgaatttgagtttgctgttttaaattgcatttctatgccatttttagtttaaaatcttgcatggcattaattgttccttgcttttatagttgtattttgtacattttggatttctttatataaggtcatagattcttgagctgttgtggtttttagtgcacttaatattagcttgcttaaggcatacttttaatcaagtagaacaaaaactattatcaccaggatttatacatacagagattgtagtatttagtatatgaaatattttgaatacacatctctgtcagtgtgaaaattcagcggcagtgtgtccatcatattaaaaatatacaagctacagttgtccagatcactgaattggaacttttctcctgcatgtgtatata

SEQ ID NO: 39947 - DNA, 1035 bp, Homo sapiens
ctaagattgttggaaaagtgcagtattagggtgggagtgacccaattttccaggtgccgtctatcacagcttcctttggctaggaaagggaattccctgaccccttgcgcttcccaggtgaggcgatgccttgccctgcttcagctcacgctcggttggctgcacccactgtcctgtacccaccgtccgacaagccccagtgagatgaacctggtatctcagttggaaatgcagaaatcacccgtcttctgcgtcgctcacggtgggagctgtagactggagctgttcctattcggccatcttggaacctcccggggcaaacaattagagtaatttaaatgatgaactatattttagagggttggcatactacagcctgtgggctaaatccattctatcttagtcacctggttttgtaagcaaaattttattgtaatacagccacatctatttatttaactattgtctatggcagcattgccactacaacgcatagttgagtagaaactgactggcagagtagaaactgactggcaaaattgaaactatttgtaccatctagccctttacagaaaaagttgctgaccctgaactatacagtggaagtaaagcctacagggtgcttgcagactgtgagcttatagagtcaggacctgagtcaagcagcaagtataacaggactgagaaaattgacaaaaggcagaaatttagtcaaattttaggagtacaggactcttgagaccacctgggtcttaggatttaactttagggagggactgagcagtggagtagaggaagcagttcattgcttttcaggttgtggaatcataggtagggtgctggataataacaagggttggagaagaaagaagttttccctaaaagacacttggcagatgacttgccaacataaagaacttagttctgttatctaagatctatctggatgttttctttacccatgtttgttggggttttttgtttttgagacagggtcttgctctgttgaaggggtgggttgcccctccacacctg

SEQ ID NO: 39948 - DNA, 1052 bp, Homo sapiens
ttttccatttgcttggtagatcttcctccatcccttcattttgagcctatgtgtgtctctgcacatgagatgggtctcctgaatacagcacactgatgggtcttgactctttatccagtttgtcagtctgtgtcttttaattggagcatttagcccatttacatttaaggttaatgttgttatgtgtgaatttgatcctgtcattatgatgttagctggttattttgctcgttagttgatgcagtttcttcctagcatcgatggtctttacaatttggcatgtttttgcagtggctggtaccggttgttcctttccatgtttagtgcttccttcaggagctcttgtaaggcaggcctggtggtgacaaaatctctcagcatttgcttgtctgtaaaggattttatttctccttcacttatgaagcttggtttagctggatatgaaattctgggttgaaaattcttttctttaagaatgtcgaatattggccctcactctattctggcttgtagagtttctgcctagagatccgctgttagtttgatgggcttccctttgtgggtaacccgacctttctctctggctgcccttgacattttttccttcatttcagctttggtgaatctggcaattatgtatcttggagttgctcttctcgaggagtatttttgtggtgttctctgtatttcctgaatttgaatgttggcctgccttgctagattggggaagttctcctggataatatcctgaagagtgttttccaacttggttccattctccccgtcactttcaggtacaccaatcagatgtagatttggtcttttcacatagtcccgtgtttcttggaggctttgtttgtttctttttactcttttttctccagacttctcttctcgcttcatttcattcatttgctcttcaatcactgataccctttcttccagttgatcgaatcggctactgaagcttgtgcatgcatcacgtagttctcgtgccatggttttcagcgccatcaggtcatttaaggacttctctacactggttattctag

SEQ ID NO: 39949 - DNA, 1074 bp, Homo sapiens
ggtctgaaattctctttgtttgttgtctctctgccaggctttgatatcaggatgatggtggcctcataaaatgagttacggaggattccctctttttctattcattggaatagttttagaagtaatggtatcagttcctccttgtacgtctggtagaattcagctgtgaatccatctggtcctgaactttttttggttggtaggctgttaattattgcctcaatttcagaacctgttattggtctattcagattcaacttcttcctggtttagtcttgggagggtgtatgtgtccaggaatttatccatttcatctagattttctagtttatttgcgtagaggtgtttgtagtattctctgatggtagtttgtatttctgtgggatcggtggtgatatcccctttatcattttttatttcgtctgtttgattcttctctcttttcttattagtcttgctagcggtctatcaattttattgatcttttcaaaaaaccagctcctggattaattgctttttttgaaggtttttttgtgtctgtgtctccttcagttctgctctgatcttagttatttcttgccttctgctagcttttgaatgtgtttgctcttgcttctctagttcttttaattgtgatgttagggtgtcaattttagatctttcctgctttctcctgtgggcatttagtgctataaatttccctctacacactgctttaaatgtgtcccagagattgtggtatgttgtgtcgtttttctcattggtttcaaagaacatctttatttctgccttcattttgttatgtacccagtagtcattcaggagcaggttgttcagtttccatgtagttgagctgttttgagtgagtttcttaatcctgagttctagtttgattgcactttggtctgagagagagtttgttaaaattttacatttgctgaggagtgctttacttccaactatgtggtcaattttggaataagtgcgatgtagtgctgagaagaatgtatattctgttgatttggggtggagagttctgtagatgtctgttaggtccgcttggtgcagagctga

SEQ ID NO: 39950 - DNA, 1028 bp, Homo sapiens
tagagatagggtcttctgattttgcccaggctggtcttgaacctctggcctcaagtgatcctcccatctcagcctcctaaagtgttgggattacaggattgagccactgcaccctgctttttgaaaacacttagaaagtttaagttattggaggaaattatatttgcataatcaaagaatttctcattctgcaaaaggaagcactcagtaataatagttaatatttagtgtttactatttgccaggtactaccaaaaatacttttcatctgttaatgtatctactccccataaaaccataggaactattgtttcttttgttttgtaaatgagacaagggcccagagatgtactggggctggaatttgaaaccaggcagcttgctgctagagcctgtactctttgaactattatgtcgtatatttttctttagtgcttgtgcagtatatttgcagtcttttagaaattttaatagatgacaggcctggttgtccgtttagaaaaactgtagaacattatcctttacagcagatatgaaatgtagaaagatgtggttttgttatacagaagtaagattttatggagatggcttgttatttattattataaatgtttatgctttgacaaactgtcactactcacaatttgcaggttttaaaatgatgtcatgttgtgtatcacatctaaaattttaatggcaagccttaaaaggctttggaagtattttagttatctaattctgattttctaatttgaatggagattgagtaattattgatgatattgtttcttttgctcaaccttcaaccctttcagtaataacttactttcttgtacctgcaagtccagattttattaccgtttaactaaaaaatgatatataatcatgattattgtattctgtgtattaagtgtgctaaagaacttaagaatttttaggattccctttcagagcctaatatatagttcacatgaactgggtggacacttaatgaaccttaaaacttagtttaagttcgtcataaaaaa

SEQ ID NO: 39951 - DNA, 1027 bp, Homo sapiens
actttatggcttctctttggcatgtttgaattgccaacattactacttctgggctttggggccattattaagtcacataagggtacttgggcacaagcacaatgatactgcaacagttgataggataaccaagatggctgctagtgactaatgggccaaggttctgggagcatctacagtgtggatatgctggacaaagggatgattcacatcccgggcaggagtgagcaggatgacatgagatttcatcacactactcagaacagcatgcaattttaaatttatgagttgtttacttctggaattttccatttaatattttcagactatggttgacaacaggtagttgaaaccacatgcagaaagagaaaccatagataaagggagactgccgtattattctttcttcttttttgagacagagtcttgctttgttgcccaggctggggtacagtggcacgatcgatactcactgccacctccacctcccaggttcagcaattctcgtggcacagccaccctagtagctgggtccacaggtgcatgccaccacgcctgactaattttttgtagagacggggtttcacgatgttgccaggctggtctcgaactcctggcctcccaaagtgctgggattacggggttgagccaccgtgcatggcttcctattctttctaaagcttcttgtttatgtacttctatcttcagagttctctctagaattcctgatttagatcaaaatttgattttaagcaatagctttaagaaagttaatgagtataaatccacttgtgcttatcagaacttaaaactaaaagctattaaaaacttgataattggaggaattgtcctgttgattgctttgtctggttcctgcctttactgtatatagctccaataattcaaaatctaggaatcagcaggcagtgtagcctgtatgccaagtccagcctacagcctgtttttatacagccctcaagctcagaatggtttttccatttttaaatgattgtttaaaaaaatgaat

SEQ ID NO: 39952 - DNA, 1057 bp, Homo sapiens
tttttttgccttccttcaaaaagtgcttatgtcattcctctgattctgtaccttcatggttatcagagacagggagaatccccttcacgtttttgaaacttctgtattactgatcctttaaaaatttaggttatagtacattgtactatctgacattaatggcagctgttcatttttatttgttcccctttagaacatctgaaatagttgatggtcctgattgaaccactcagcatatagagaagtagcaaactcgaatctttaaatctcatgacaatttggaaatcagctttttctttattctttttttaaaaaaacttaacctaattttccccccattttgttaaaagactcagtcttgtctccacttaggttaaataacaagatgttaaccattgtgagtattttcaacattatttcctcaatgccatataatttttattataatcactaaagttttcaagatattttgaaagagacttaaaatgggggtcagtacttcacttatttttgagacagagtcgtacgtcttactctgttgcccaggctggagtacagtggtgagatcatggctcactgcagccttgaactccagggttcaagtgatcctgccaccaagtggctagcaatttttaaattttttgtagagagaggttcttgctctgttgcccactggcttttgatttctgaggtaaccactttttgattgctcaagtcagtgaattgggagtatgctaaatgctgttagggttacagaagatattttccaagcaaatgccatttgatacttagcattataggatttctaaagaaggaaaatcttcatgcctcttgaggaaaggctttgggtagaagtggaagtactaccaattcaagttgaccttgggaatggagaggaaagttgtacgtgtgaacaaagataaggaacagggaaggcagggtgcctttgactaactcgtggttagagttgtgtgcccagaagtagagcaatgagagatgaaactaaggtaatgtaggttgaacccatgctatagagaacccatgaagctgggcattg

SEQ ID NO: 39953 - DNA, 1600 bp, Homo sapiens
aatctatgaagggcctgatgcagtagcttatgcctgtaatccctgccctttgggaggccgaggcaggtggatcacttgagctcaggagttcaagaccagcctgggtgacagagtgagactgtctcaagaagaaattagccaggcgctgaggcacgctcgtgtaatcccagccacttgggaggctgaggtggaagcctgaactcaggaggtcagtgctgcagtgagctattttcatgccactgcattccatcctaggtgacagaatgagatcctctctcaaaataataagtatatgaagaaaaccgagcctcacataaaaagaatatttttaaagtctttttagataattgtgtatattctctttttgataccatacaataccaaaactctacataagttgtagtttcctaaagattagttgtaatgtttaatgtaggtctgaaaccaggttaattaacttgggtcttgtatgtatagttttgtaacatgcatttaccgcttgtaaatattggttccctgaattatgtcttccaaatgttgacgttttattgaacactgtcattaaatcatgctcattaatataaatatcatctcatcagaaaaattacttaggccttggtaaactatcaagttcacagtagtagatgtgaattttccagaattctagttcccacttgaaatcataacgtttatcattggcgataaatgctctcagttttccttgaagtgacaagctcaccttgttcatgtttgaaaacatctctatcaaatacctaagtctgagttagccatatttgttcttttaaaaagtggtgttctctgggaggtgaagcttgcagtaagccgagatcgtgctgctgcactccagcctgggcgacagagcgagactgtctcaaaaaaaaaaaaaaaatgtggggttctatgaaaaaggagcttggagcgtgtttagctcacaactcagatacacaaatgcttttccttcagaaaaccattgaacttcagttgtagccatatttatgtatatcttccattttgtcacagatattagaaagacatgtacttgagagttaacacagtatttattgttttatcaaggacattattaagtgaaaccatttgccttgtttgtttctgctggtgtgtggttgtgaggaatacagtgactaatatatgttgcttccttgattagtactaaggtgccatcaattttacccacctttgctttcctttgcttttgcaattagtacaaatgtcaacacagtgaaaagagcagataaatagtgttgctattattatgaaaatagtttctacctcggagactccgaaaaaggtctcaggaaaccccaaagtccttgaaccacactgtgagaatctgttttttcttgtcatatagaatcttaactcttatgtcagtttttcatatgtgattctgtgatgattactccttaatctgatagtatcgagctcaggctattttcttttttttttttttttttttttttttggagacagcgttttactctgttgcctagactggagtgttgtggtacaatcatggctcaatgcaaccttgacctcctgggctcaggtgatcctctca

SEQ ID NO: 39954 - DNA, 1163 bp, Homo sapiens
ggttggctttccctttatattgtggagaacatatgtaagctttcctatattaacaccttggtttcttccattttctgtttcagatttagaaatgccatgttaaagagcatctgtgaggttcttgatttggagagatcaggtgtaaatagtgaactagtgaagaggatcttgaatttcttaatgcatccaaagccttctggcaaagtgaggatcaatttttatttttttcataaatcagttattcatagcctctttatatgaaacaaaaattgattaataacagcattgctgtcagtattcgttcatatctacattcaaagactataccttctgttgacgtatctgcagtaatttcctgatagaaataatatagatgccataggggtatgttgcttcggaaaatcagatacaagggatataaggttaagaatagtgaattaatgtcagaagggacagaaagtactagtagtcagggttaggtatctagaagacactggaagaataggaagaggttgggctgaggatgaggtgcaaggctggagggaaggggtgcaacctgtaatcaagtgaagacaaaatagggagtatattagaactggatgttttcctagatcctggaataaagtattaaaaagtgacatttaaaagctaactcttacaagtttcctatattgggtttccagaatctgcagcagagcccaggagccagacagggaagtaaaatggccttacagttttctcactcttcctaaaagctagtaggtttgccctaattatttaatggtaacgaatgacataggtgacttaaaatgtctgttgaagtgttacatgaccttgcctttttagtgtgatttaggtctgtcagcaaatgtttttatattcttccccatcttgacaggaaaggaagtgtgagagatctagcaggcctaggagttcaggggaatgccatctctgatgggagatggcattaatcaaaaccagaaaatagctctaggacttcgttttcgtccgcccttggtccttattaccattagctgcacgaggacagataaacagcagttaaagtgtaaacttttgttatacaactacaaacgcaaggggtatgatgatttttggtgttttaaattggcttgtttaaagacaaaatacttcttattttctaa

SEQ ID NO: 39955 - DNA, 1885 bp, Homo sapiens
aggttttggggactttgttctacatgtgtatctaataaagttaatacaatgtttaagctttttgttaattaagaaatactaaattaatttctagaaaagagtctcatcgtggaaggcaagagggaaaagaaaaaagtagagaggttgacaatgcaagtctcttccttacagagagagccatttacaattgcacaaggtaagtttattctagcttcctttcattttgtggtgaaagtgcctaaatttgtgaaaatgatggtttgtagcttagtatcagcaaggtagtgttttatacttttggtataattttatttaatttgctctgtaagagcagagttacatgtaaattatgctgtgaaaataattctcattaaattaactttgtaaatgtattagtaagccataggtatttaattgtgatttttttttttccccaggaaaggggcagaaactttgtgaaattgagaggatacatttttttctaagtaagaagaaaaccgatgaacttagaaatctacacaaactgctttacaacaggccaggcactgtaagacctttttacactttaaacctacttgtatattacttcacaatggaatcaatttctgtaaatgttagtgatccactagttcaatttccacactttatgactgagcagactgaggtatatacttattaaatgatttatcacaggaaacacagctggatattagcacttggattataatatccagggctctgtcttcttttttctttttctttttcttttttttttctttcttttaagacacggtctcactttgtcacccaggctggagtacagtgtgcaatacatggctcactgcagcctcaacctcctgggctcaagtgttcctcccgcttaagcctcccaagtagctgggaccacaggtgcatgccaccatactgtgtctggctaattgttttactttttgtagaggcagggttttgccatgtgcccaggctggtcttgaactcctgagctcaagtggtcctcccaccttggcctcccaaagtgttgggattacaggtgtgagccagtatgcccagctctagggctctttctcctgtagtagtttttattccaaactgaaatttcaaattacgaaatccaaattgtgatgaaaggttttagtgacctttaaatgtattgaaagaaattcatgtttttggattttctcgacattcagaataagtgaatgtcggtatgatttgtatgagatcatacatatgatctcatttgtatctcatacaaataagaggcaaaatcatttgtatctcatacaaatctcatacaaagtgaatttggtgtaattgtatctcatttttagcaaatacctgataaattggatgatagttctttgctaaaggattgttattatactgtacatatgacttagtatattatataatcgagggaactgctttaggttgtacgtgggcaaagtaaagttgggtgttagaatgtctgaagtagaatagaatgtctggtgcatgacataatttattttcagtgagtctgttaatctcatttaatccttaaaccaatttaatttacacaagtcccataactagtgaacggtattagctttttgtggtactcgctattctttactttgaaagaataaagtccttcttgatttggaaaagaagaattactagtaactttattacttatgaaaaggatatatttttaaatagtaactttccacatcccctggtactgtcaggtaacttttggttgtggtaaaaactccccagtgaaaatttgttcaaattgttcttttcagagacttaagtttgtaggatttttataatgttaatatgttaatgacaaatacatttttcagttttgaataagaaatgt

SEQ ID NO: 39956 - DNA, 1023 bp, Homo sapiens
tttcacccaggaaacagttttcttgctcttttggtgtttagaggcgtgaagtcggagtgattttcagcgagaatgtgtgcacaatttatctgcttttgttttgagcgatggcgtagaattgactttgtgtattccggtttttaaagtatttgttagcgtggtagagatgtattggagtgcagccgacttctcgtccgctctaaacgttcgttaacatttcatcatttgacgggaagtttgtaggtcttggatttgatttttttttttacctgtgtgtgtgcacctttgaagttgctaagtggatgttctaattttgtccttttcattacacatcttttgccttttgaagttattgtaaggtcttggtgcagcccgttaagactgaagttataaggctagacccggaagtatttgaatactttcgaatatttttacatttaccaaaaagtttccctccctggcaaacagcggtgaaagctgttgctacttgagaaagtagttaaaaatgaagaaagtgaactctgaaagaaagttaaatgtgagcccagcactgtctcggtttcgaacctgtgtctgttttaagggagggcgatatgagccctgatttgactggaggtgtgaaacggaaacttgactgaatagaggagtgtgctgcggcagtttatccaggatgcatgcagtgtctgtttcaggtgtacccgcttcttgacatgtttccaaacatttaaaaatccgagtcgcatctcttagcattctttgatattagcttagtctgcggttatttcgtatatgtttacgactcagccacacttgggaagaggttgaagcgctcttcctaaacccggattttttttaagcctcaaccagcctgtggtcacaatctgggttaagattacaaggtgtgccttttgtttgtttaaagtggtatgtgccctaagaagggcatatttaagtaaagcatggctttttaaatataagttttcacataaactattgcttaacaacatgttattttaaaattat

SEQ ID NO: 39957 - DNA, 1103 bp, Homo sapiens
agaagaaaaagttagtgccacaatctagaaaaaaagaaatttcacttaatatgaatacacagtttcatttttggtttatggatatttaaaggagccttacaacacctgcatagagaacagattgcatcatttttctttacaaggctgaatgccagaagaaaatgatgaaatttcagtggggttttaagttaaagatgtcgagccccaatcctggttgtcttagatcagtttcttctagaatcagactttgagccaatgcccctgtgtgcaagttgtttattttggaggtgtggagaaaatcaggaggtaagtgagaagtgaaacagaaagacaaggaatgtagccagtaaaatgttaaatattaaggccgctaccactggagttaatccaatttggaagcattgggaaacagtacaagaacacatgctccaaaatcttcatgaccttagatttggcaatagattcttaggtatcataaaaacacaagcaacataagaaaaaatacataaattggacttcatcaaaattaaaaccttctgtgcatcaaagggcactattaagaaagtaaaaacaacctatagaactagagaaatcatatctgataaatgtctagtactcagaatatgtaaataactcttttttcttttaaatttttttttttgagacggagtcttgctgtcgcccaggctggagtgcagtggcgcgatctcggctcactgcaggctccgttccccagggctcatgccattctcctgcctcagcctcccaagtagctgggaatacaggtgcccgcaacctcgcctggctaattttttatatttttagtagagacggggtttcaccgtgttagccaggatggtctcaatctcctgacctcgtgatccgcccacctcggcctcccaaagtgctgggattacaggcatgagccaccgcgcccggcctgtaaataactcttgtaactgagtaacgaaaagataatccaatttaaaatgggcaagggacttgaatagacattcttcaaagaagatatataatggtcattaagcacattgaaagatgctcaacatcattaaccattagggaaatttaaatgaaaaccacaa

SEQ ID NO: 39958 - DNA, 1039 bp, Homo sapiens
ctttgtagatgtgacatctgtgctcagctaggcttaactaagcaaaaaggaaactggggggcacacattccgggaagaaggaagagcctatgtaaaaatcctgaatagggaaggtgtgcagtgcattagcaaagaactgaaagtggccagtgtgattagagttgagagcaagggggaaagcagctcataatgaggctgataatgtaagcaagaaccagaccattcagggcctctggctacattaagcatttcagagtttatcttaaaggcatgagaagttattacaaagttcaaagcagagcagatcatgtaatgctaaattttatgggtgaaagtttgatgagaaacaggatatttatatagtgtcaaagtactttgccacaaaatacttactgactgccaagggaaaaaaaataaatagagaaagctatcagacaccactctaaccaagtgatcaaagttaccattaccactaatggatgaatcagcatcatgtacctcctcatgtaatgcactgagaagaacataacatcactctgtgatacttctgctaacaacgcatgcctggatcagattgtgggaaaacataagacacacacaatgggagggacattctacaaagttccctgtattcttttaaaacacacacacatacttacacagtgaagtatcaaaagacagggaaagactgaggaactgttccaggttgaaggagactgaggagacatggcaacatgtgatctgggatggattctggaccagcacttttttctcttgctataaagggcattagtgagacaactggaaaaaattgaaaaatatctatagattagaccttagatcaatgtcaatttcctgattttcataattgtattgaggctatctcaaagaatatccttgtctttgcacactataatacttaagggtagaagggcatcttgtgtgtaacttactctcaaatggcttaggagaaaaagtagagatagaatgaatgagaatgagagttactatgaaaacaaatgacccatgataaaacatg

SEQ ID NO: 39959 - DNA, 1033 bp, Homo sapiens
tcagcgcctgcagaaggaaccagtcctgcagatatcttgattttggacttttaacctcaagaactgtgagagaagacatttttgttgttgtaagccacccagcttgtaatttctcacagcagccctaggaagctcatgtgcgttgttttatgattccccaccttttgatgaattaacaaccgtcccctgatcctgatcatacaggataaggatgcctctaccgtctgcatctctggctgttcttgtcacatctccatttgttttattaaaaccataaactcttgaataatttctacatcattttgaatgtaatcagaattctgaaattatcaaagggaaaaaataaagggcatttgtggaaaacagtcacgtgcttctgaacatcgtggatttgggggtttgacacaagaggagcatggaaatcagttcctgtcaacctcactttcagccacatagtcttgataaatgtcctcaagagatgtttattttctggcattttttggatctcctcgtagtaagaaatctctgatgttacccacaaaactacagaatatttaaactagaaaggacattgttgttagggaaataatacagaaaaaaaatccgcctgaaaattgcatgtgattcagttctgtgattactgagtggccctactatctagttctcgaagggtatgttgtctttttttctttttgtcattattaagcagtgttatttttccctaccaccgtaaaggcaggctgcctcactaccataaatccctcttcctgggtaatgtcagttaacatccatggagagtacataccaacctgaaattgacaaaatgttttaaatcacaaattgccagttagagaggtattttaccagtgtttattctcattacaggcatgcgagcaaaccacaagttcatcagaatggaattgatttaaccctactattgcagttgaaatatcttgtttcggattttgtcaagagataaagtagtattttgaagttgaacctggtgttttaaagcagcctgatgtatagccat

SEQ ID NO: 39960 - DNA, 1065 bp, Homo sapiens
tcgaaccatcataaataagtcagggactgtctgtactctaacatacactcgctaagctgcctctttcttcccggttggcattagaagttgaagctgtggatctcagccctggctgaatattaaaatcaccttggaacttaaaaaaaatttttttaaaagatgccttatcccccaacctcccacaaattctgatctggattaggattctaaaatcagtcactttaaattttaatttttcaaaaaaacagatctttggttgattccagtgttgagagctgctatgttgagaagtcctgctagttagctactgtacactttgtagcctatctaatacttgtgaagctttatagttcttttaaagtagtatataaagtacttttgtagtactttcacgttccatttagtgcccaccacaatctggtagggtagatgttattagtatcccacatacccacttaaccttgtaagtctcttatttgaggttacttttcatgatggaaccagactgaaagaaggtgactccaggcccaactgggtggacctgagccacaggaaaaatttcaggttacatatatatggggtgtgtttgtgtgtgtgtgtgtgtgtgtgtgtgtgtgtacatgcacatacattctatattaaatacatatatttgtattatatatagattttatacacacacattatatagtaaacataagtatatattatgtacataatatatacacatattaaaaatatatattatgcacacacattattcagacacatgcacatacaaacatgccattggtagtgatctctatctgtataaaacttgacatcccgggccccggtcaaggttgtaaaatcaccccctaacattccacctccttattcagtgggatcccttcagcagtgtgtgcccctcactccttatggaggcccagaattctttactcaggctcttatttttagatgggccccttctgaccctctgtaccccaattttctcccacctcacctccagggctgctggggaatcatcagaaggcatgctggactggagtcaggacacctgagttc

SEQ ID NO: 39961 - DNA, 1034 bp, Homo sapiens
gccgctttggagggaggaggaacaggaggtggtggaagtgttcgtggtgaggatctggatgtacgcgcccggggcggcggcagcggcggcggcggcggcgaagccggggctggctagcagtgcccttttgtccatggaggctgcagcggcggcggcgacgacagccgccccctccccacccccggcggtcaccaggtactgctccagagcgggctggattccctttctcatctctcgctcctgctctttttagtgttatggtatattaatgtattgttttcaatttctttattatttgcagtcggagtttccaagtctctcctccttctctcctccccgcccggcgcttccgagccccctctctctcttttctttttatttttccgcaccgcacaggccccgggggccaaaaataatcggggctctggagagaggagggtcccggccgcacggatatcgggccccaagcggggatggaggcgtcgggggcggccgatgcaacggattgcgaggcggcggcggcagcccgggtgctgcggccggcagctgaaaaatggctccaggaagctgctgctgacaatgaatgaagggatacggtttacgcgccaaggtcctcccgcgaaactcggatttcccgccggcttttcaaaccatatttgcatatccccgcccctcaacccgccgaggaccgttcccacagcccattgggccgctacctccttacttcagtcccaatcatggagcagggccgcgacttgctggtttccattggctgccgtgcatcatggttaccggggcgacagggaccctatttgcataggcctccttgattggctggcagaagagcagtttttagggggtggggcaaagaatttccttctctcccacggaagaccacgcctggcctaggctccgcccctgtccccgcccgcccgccgggccggcgctactgacctgggcagggactccgcgccccgcagactcagtgtagatctagtctagagcccaagtttcgcttttggaaattgtcaagg

SEQ ID NO: 39962 - DNA, 1091 bp, Homo sapiens
gctgatttttgtatttttgtcgagacggggtttcaccatgttggccaggatggtcttgatctcttgacctcgtgatccccctgccttggcctcccaaagtgctaggattacaggcatgagccactgtacccgacctattttgaatttttatggttacatagtaggtgtatatatttatggtgtacatgagatattttgatactggcatacgatgtgtaataatcacatcagggtaaatgggatatccattgcctcaagcatttatcatttctttgtgttacaaacattccaattatgcttttaaagttatttttaaatgtgcaaggtacaatacctgacatcaaattatactgtagatctatatagtaactaaaacagcatgatactagcataaaaacaaacacatagatcaatggaacagaatggagagctcagaaagaaatccacacatctatagtaaactcatttttgacaaaggtgccaagaacacatattggggaaaggacagtctctaaatggtgctgggaaaactggatccccgtatgcagaaaaattaaaccagacccttatctcgcaacacatacaaaaaccaaatcaaaatggattcgatacttaaatctgagacctcaaactatgaaactactaaaagaaaacattaaggaaactcttcttcctcatttatgagctcttcatttaacatcctttcctcttctgtacattaactgaaagttgattcttccatgaaaatccatttttctcctgaagctctttcatttgaagtctgcaagttcaccagtatcccatggactttgaatctggcaatcagagttgactttcttctgatctccattctgaattatacactattttttgtctcctatgagtaaaaattatgctccttggcagtttatgccaagccctttgcagccccttcatagtcatccatggattttctgattactcttgctcatttactaatattttagtgcctggtcatagtcttttccatctggttaaattggacttttattttaggtgactttaaactttgctttgacagtcaatcttgcatgatagtccctcaattcatt

SEQ ID NO: 39963 - DNA, 1059 bp, Homo sapiens
ccataaagcagccattactcactgtaggtgtctgctttgatcttacctgaaccaaagtattttataacccataaactggaaaaaaaaaaaccgaaaaacaaatagtgtcacttatcagataaaattaggtctggctttctttcttttctttttcttttctttttttgagatggagtctagcttttgttgcccaggctggagtgcaatggcacgatctcggctcactgcaacctccacctcccggattcaagtgattctcccacctcagcctctcaagtagctgggattacaggcatgtgccaccatgcccagctaatttttgtattttgagtagagatagggtttcaccatgttggtcaggctggtctcaaattcctgacctcaggtgatccacctgcctcggcctcccaaagtgctgggattacaggcatgagccaccgcacctggcctggcttcttagaaacaaatgttcaagagaagcagtggcttaaatgagagaaaagtttattttttcctcaagaattcaaaggttggctgtccagggctggtaggcagtcccatgtcttcaaggacccagctccttccatcttcccagcactggcttgctttctcaaggcctctgtgtagtcctagatggctgctgtggcagcagaccttgttttctgttctaggcagcaggaagaagaaaagatgaggaggacaaaaagagcttccctcagaagttttattcaatagttccttttctgtctctttgaccagtgtataatcacatgaccacactaagctgcaaagggtgaggggaggttgggaaatgtagtctgttagctgggtattctggggccccagataattatgtgagttttattactaaggaataaatggagaatgttcactgaacaggcaatctttgccacagtcaccttcatcttatccttgagcctcattctctgcatcctagaccttcatccctcccttgtccatgtcctggcacaggaagtgatccatcagtacttgttgaatacccttctgtgctttgcccatttctggccccatctctgg

SEQ ID NO: 39964 - DNA, 1034 bp, Homo sapiens
aaggcagttgaaatttttggatcatatgaatgctatacttctgaagttgtagactaaagtagagtggcagttctgccttcttttcacttgagttcagtttttgaaaacagataacagcagtaacaggccatgtatattcagccttctaagttttatctgaaacccaaagttaggaacctatttatggcagaagagaaggggcaaattccaaacccctctggctgtcttgatatttttatattacataccactatgcagcatagtactttttataatgtatctcattgttttgcatttctgcattaataatttcttgcacggtaatagcaaaaacacctttttttttttttttttaagttagtgggcaaaaggctatgtgtatcttagagagtattcttcttcttttcaggttaccagatgtggtggtttacccaacaacattgtggatgtctgggagtttttgggcaaacctaaacattgccagtatacatgggatacacaaatgaactctaatcttggaataactgctgcttgtaaacttcgttttgatcgaatatttttcagagcagcagcagaagagggacacattattccccgaagtttggaccttcttggattagaaaaactggactgtggtagatttcctagtgatcactggggtcttctgtgcaacttagatataatattgtaaaatgcttttcaagtgtgggttttgccctgattgttgcaaatacaatttccaccttctggaaaggtaggtttgctgtggaggaaataatgtactagatcattgtcacagaaaaaccaactatgatttatggttgtgttttcagaattcaacattaaagattaatgtttatttaaacgaacacattcctgcattcaggatgtgaggccatttaataaaaagggcacaaagcctgtcagagttttcaacggtgcttatagctgccagctggattccaaacaggtaccacattgtctctgagctaatgtttatatttttccattcaggcaccgaaatagttaatatt

SEQ ID NO: 39965 - DNA, 1120 bp, Homo sapiens
cttcaggaaacttttccagtacaagacttgtccacagtggatatagcagctaaggggttaacaaaatgacgtcagagtagctacggtaatgggcaggagcctctcttaatctgcaaccaggcacagagatggaccaatccaagaagggcgcggggatttttgaattttcttgggtccaatagttggtggtctgactctataaaagaagagtagctctttcctttcctccacagacgtctctgcaggcaagcttttctgtggttttgccatggctcgtactaaacagacagctcggaaatccaccggcggtaaagcgccacgcaagcagctggctaccaaggctgctcgcaagagcgcgccggctaccggcggcgtgaaaaagcctcaccgttaccgcccgggcactgtggctctgcgcgagatccgccgctaccaaaagtcgaccgagttgctgattcggaagctgccgttccagcgcctggtgcgagaaatcgcccaagacttcaagaccgatcttcgcttccagagctctgcggtgatggcgctgcaggaggcttgtgaggcctacttggtagggctctttgaggacacaaacctttgcgccatccatgctaagcgagtgactattatgcccaaagacatccagctcgctcgccgcattcgcggagaaagagcgtaaatgtaaagtcactttttcatcagtcttaaaacccaaaggctcttttcagagccacccacttattccaacgaaagtagctgtgataattttttgttgtcttaacagaacaaatttctaaggacccccccggaaagcattagactatggtcttaaagttgattaacagaaataacggtttggtcagtcttgcagtgtaggttatttctgaccttattaaggtgctatttggagagaagctgtgtaagtccactatcattcaggcctctagcttgctatgattagcatttgtttaaacaactttgtaagagtaagggaaaaatctggtaagtagttaactggcgcttactaggcatttttgcaaagctttgaaaagattagaaaattgtgtcttgcgagttccagtgtcttcctcaaaatgcttaggaagattttctcagctca

SEQ ID NO: 39966 - DNA, 1057 bp, Homo sapiens
atttgacattagccaatgggagaattcctcacagcctacctccagtcagtataaatacttctctgccttgcgttctaatgtagtttcattacattttcttgtggcgattttcccttatcagaagtagttatgtctggtcgcggcaaacaaggcggtaaagctcgcgccaaggctaagactcggtcttctcgtgcaggtttgcagtttcctgtgggccgagtgcaccgcctgctccgcaaaggcaactactccgagcgcgtcggggctggcgcgccggtgtatctcgcggcggtgcttgagtacctgaccgccgagatcctggagctggcgggcaatgcggcccgcgacaacaagaagacccgcatcatcccgcgccacctgcaattggccatccgcaatgacgaggagcttaataaactcttggggcgtgtgaccatcgcgcagggtggcgttttgcctaatattcaggcggtgctgctgcctaagaaaactgagagccatcataaggccaagggaaagtgaagagttaacgcttcatgcactgctgtttttctgtcagcagacaaaatcagcctaacagcaaaggctcttttcagagccacctacgacttccattaaatgagctgttgtgctttggattatgccgcccataaagatgtttttgaggtgtttttaatggctttgagtgtggcacttttagtaatttgtcctgcagaaattagatccatagaaacctcaggaattctaggtatgtgggagaagtgccatgcagcacaaaacatgtttacaggggtgattcgcgttaagtttcacacacagcagttactacattttagaggaaggaaattatacccatgagtgcattcctaactatcttgaatggaagtgttaaaacccgcatgccccacacaagtttgaatatgtcataccatttgctgtagcaattaatggcatacacaattgagagcacacacattaccactgaacatttgagtatgtatttcccaaaatgagcttttttccagtttggggatgttttgctttgttttggggtgga

SEQ ID NO: 39967 - DNA, 1089 bp, Homo sapiens
tgaagaaacagaattatcatgaaaatttaggtggaaaccatttcgcttttttcttcaaaaataagggaagcatgtgcccaaccacccctgggaaaaagaaccttcaggggcaaaggagcgaacaggtaatttataagaaaaacagaaagtggtctctgactgccccagacttccttcggagttgggggaattggggacgcctggacgcgttgtttttgtgtttgtggaaaaaataaatgaagagcatgaagcccgaggcttctgagatcctttcctgaccaaacccaagtgatttggtgcggggaattttaatatttttccccttttgtgaggtggaacaaacacaacttgggagcagcgcagcggctcagagcctgccagccaggcgggcgaccagagcaccaatcagagcgcgcctgcgctctatatatacagcggccctgcccaggcgctgcttcatcggcgctttgccacttgtacccgagtttttgattctcaacatgtccgagactgctcctgccgctcccgctgccgcgcctcctgcggagaaggcccctgtaaagaagaaggcggccaaaaaggctgggggtacgcctcgtaaggcgtctggtcccccggtgtcagagctcatcaccaaggctgtggccgcctctaaagagcgtagcggagtttctctggctgctctgaaaaaagcgttggctgccgccggctatgatgtggagaaaaacaacagccgtatcaaacttggtctcaagagcctggtgagcaagggcactctggtgcaaacgaaaggcaccggtgcttctggctcctttaaactcaacaagaaggcagcctccggggaagccaagcccaaggttaaaaaggcgggcggaaccaaacctaagaagccagttggggcagccaagaagcccaagaaggcggctggcggcgcaactccgaagaagagcgctaagaaaacaccgaagaaagcgaagaagccggccgcggccactgtaaccaagaaagtggctaagagcccaaagaaggccaaggttgcgaagcccaagaaagctgccaaaagtgctgctaaggctgtgaagcccaagg

SEQ ID NO: 39968 - DNA, 1431 bp, Homo sapiens
ttgaaaatatctccaagtttaaatagacaaatcaagatatgaaattaacctttctaaacttaagagggtaaaaagaaatcacttggccaatcacaactagcgcgcgtctttttaaaacgttgatcaaagccagtttcagcgccaacatttaaaaaaaaattaagacacgtcatcctagtagctagacacaattttgccaaggaaaaccaaagtacgttttaaataaaagctagaaacatggcacagaggggaaagggttgaaaacaccagcagttaaagatggacggaggaaagttttaatatttggtctacatgcaggagatgttctgtcagggagtgggcgtctccaccaatcgagctgcaggggaaaggctgccttgtccaatcagaacaggggtgtctttatatatacgggtacgaaaggctagactttcgttttttcgtcatttagcagggtttagaagttcgcaatggctcgtaccaagcagactgctcgcaagtccacgggtgggaaagcgccacgcaagcagctggccaccaaggctgctcgaaagagcgctccagccaccggcggcgtgaagaagccccaccgttaccggcccggcacggtggctctgcgcgagatccgccgctaccagaagtcgaccgagctgctgattcgcaaactgccattccagcgtctagtccgtgagatcgcgcaggacttcaagactgatctgcgttttcagagctcggcggtgatggcgctgcaggaggcctgcgaggcctacctggtggggctgtttgaggacaccaacctatgcgccattcacgccaagcgagtgactatcatgcccaaggacatccagcttgctcgccgcattcgtggggagagggcgtaaattgtcttgtgaatgtgtgctaaccaaaacccaaaggctcttttcagagccaaccaccttttctataaaagttgctgtttactgttgctgtccgtaaactggaacctctgttcactcaaggtaagtaagcattcttgcctctatccgttccccctcccctcacggaattggtgcaaaaagctttattataattggggagttcttaaaacagcctttaaggtactcttatatctccttgttttgggggccgctttcttaggcttggatgcctccggcttgggaactttcttggccacctttgaccaaccaaccttctccagcagcctccaccagcaaaagcttttggggtccgcttagtactctttttcggaataaggacgccccaagctttcttgggcctctcggctgccaggacagctgtcttgggcatgactgcagcggcttttctggcctcggtcttgattttcctaacactgcctggtttggcgggaatgaacctgaggcgctgcactccttagcacgaagatgccctcgtttgttttcaaggccc

SEQ ID NO: 39969 - DNA, 1052 bp, Homo sapiens
ttctttgcaattggttggttgttctagccaatcaaatagcgttatttacaattcgacctccaagtataatagtttctcacttgctaacaaaattcacttttacatttttgtcttcattgcttaacatcgtttttaagaattcaaaatgtccggacgcggcaagcaaggcggaaaggcccgagctaaggctaagacccgctcttcgcgggccggactccagttccctgtgggccgcgtacaccgcttgctccgcaagggcaactactccgagcgagtcggggccggcgcgccagtgtatctggcggcggtgttggagtacctgaccgccgagatcctggagctggcgggcaacgccgcccgcgacaacaagaagacccgcatcatcccccgacacctgcagctggccatccgcaacgacgaggagctaaacaagttgctgggtaaagtcacaattgctcagggcggtgttctgcccaacatccaggctgtactgctccccaagaagactgagagtcaccacaaggccaagggcaagtaaaacgagaactcttatattggctttttaaggaagcagtcttaacaaaggctcttttcagagccacccatgtattccttaaaagggctcacattttctgtgtaaatagctattttgcagttttctttaataatttttccatttataagtgggtgttcttaacactgaatcgtgaaactaaccgtccattttaaagatgccataaaaatacataagcaaattggcggggcgcggttccttacgcctgtaatcccaggactttggaaggccaaggtgggcggatcacagggtcaggagttccaggacagcctgaccaacatggtgtgaagccccgtctttactaaaaataaaaaaatttgtcgggcgtggtggcgcgcgcctgtaatttcagctatttaagaggttgaggcaggagaaaatgttgaaccccggaggcggaggttgcagtgagtcgagatcgcgccactgcactccagtttcggcgacagagcgagactgtctcaaaacaaacaaaaac

SEQ ID NO: 39970 - DNA, 1033 bp, Homo sapiens
attgcccaatcagagctggatattttgaattctttatttgcatgaaaggcctataaaaggagagactctagacacgagcttttatttaagtgcgttcattctcactgctgttattgttttctgacagcatgcctgaaccagctaagtcagctcctgctccgaagaagggttccaagaaggctgtgaccaaggcgcagaagaaggatggcaagaagcgcaagcgcagtcgtaaggagagctactccgtgtatgtgtacaaggtgctaaaacaggttcaccccgatactggcatctcatccaaggccatgggcatcatgaattccttcgttaacgacatcttcgaacgcatcgcaggcgaggcttcccgtctggcccactacaacaagcgctcgaccattacctccagggagatccagaccgccgtgcgtctgctgcttcccggagagctggccaagcacgcagtgtccgaaggtaccaaggctgtcaccaagtatacaagctccaagtaaatgtgtgcttaggtgctttaaaactcaaaggctcttttcagagccactcaagtctcacataaagagctttaatattgaatttcaccgttttctagggaataatttttccgattttgtaatcccagcactttgggaggccgaggcgtgcggatcgagaccagtttggctaacgtggttaaatctcgtttctactaaaaatacaaatattagccgggcgtggggcagtcgcgtgtcatcccagagactcgggaggctgccgcaggagaatcacttaaacccagcaagcaaaggttgcagtgaaaagacatggcgcttttgcattctagcctgggcgacaaaggcgaggcttcgtctcaaaaaaaattgatcaggagatactcctgttctgtgttggcaagatcctgtaatcctagcactttgggaggtcgatgcatgaggctttcttcagctcaggagttaacagatttgcctgggcaacatagaactcgtctctgcaaaaaaatgaagctaaccaggtgtgacgg

SEQ ID NO: 39971 - DNA, 1137 bp, Homo sapiens
catgagatagtatctcattgtggtatagatttgcatttctttgatgattagtgatgttgaacttttcagccacttgtatgtcttctattcagaagtgtctgttaacgtctgttgcctatttattaatgagattttttttgtttcttgatttgtttaagttcattatagattctggatatcagacttttgtcagatacaaggtgattggtatatatttgcgaatattttctcccactctataggttgtctactttgtaaatagtttatttttctgtgcagaagcaatttagtttacatcacacctgtcaatttctgtttttgttgaaattgcttttggggacttagccaaaaattgttggccatggccaacatcaagaagggtattttctaggttttcttctaggattttagtttgaggacttattttaaaagctttaatcgatcttgagttagctttgtatacggtgaaagttaggggtccagattcattcttctgtatgtgactagccaactatcccagcactacttattaaataggtagtcctatcccaattgcttattattgtccaccttgttgaagatcaggtgattgtgagtgtgagtctttatttcctggttttttgttctgtaccattgatctacatgtgtgtttttgtacaagtatcatgctatttttgtgactgtggccttacagtatagtttgaactttggtagtacaatgtctctggatttgttctatttacttagaattgcactggttatttaggatctttttaggttccatatgacattggtagtttgctaggaatagtgtcgaatctttaaattgctttgggcattatggctatttttatgatattgattcttcctatccatgagcatgtaatgcttttccatttattagtgtcatcttctttttctatatggatgcctttcatttttttctttcactttattactctgactagaacttctagtatatgttgaataggagtggtgagagtgggcacctttgtcttgcagttcttaaggggaatggctccagctttggcctatttggtatgatgttggctgtgagtttaccatagatggcttttattattttgacctatgttttgtgatgccaactctgttgag

SEQ ID NO: 39972 - DNA, 1059 bp, Homo sapiens
ttgggaaatatgcatgtttcaataaacactataaattgtttctggaacctgtgcatctttcttctgccaaattgcatttggaacatttttatgaaattaattgtacaaccttgttaatgagtattctttttgcagctcatcataatttttagaggtcattatgattttgtcacattattttaatcacttatttgcatattatttgtataatttggtaaaaatgagacattaaaataaataatgagatgaaaattagtttcttggaaaaaacatctctcattcctctggaatgagttgcatgtctttgttcaagtttgtttgctattgttgtacgtttttaaaatcgtgattaatacatagtaaacaacattataggttgtttattaatttcaaatacacagagttttttcctgaaataaatatgatcagatagtagacatggatttgataactttaaactgaaatatatagttatttaatttaaaatcaaacctacaaaaattgtaaagagatacagaaggcactgacttatttggtgtctttaagaacaaaagtgggcgaaggacatgaacagacacttctcaaaagaagacatttatgcagccaaaaaacacatgaaaaaatgctcatcatcactggccatcaaagaaatgcaaatcaaaaccactatgagataccatctcacaccagttagaatggcaatcattaaaaagtcaggaaacaacgggtgctggagaggatgtggagaaacaggaacacttttacactgttggtgggactgtaaactagttcaaccattgtggaagtcagtgtggcgattcctcagggatctagaactagaaataccatttgacccagccatcccattactgggtatatacccaaatgactataaatcatgctgctataaagacacatgcacacgtatgtttattgcggcattattcacaatagcaaagacttggaaccaacccaaatgtccaacaatgatagactggattaagaaaatgtggcacatatacaccatggaatactatgcagccataaaaaatgatgagt

SEQ ID NO: 39973 - DNA, 1077 bp, Homo sapiens
ctcactgcaacctccatgtcctgggctcaagcgattgtcctgcctcaacctcccaagtagctgggattacaggcacccgccaccatgcccagctaatttttgtatttttgtagaggtggggttttgccatgttggccaggttggtctcgagctcctgacgtcaagtgatttgcctgcttcggcgtcccaaaatcctgggattacaggcctgagccaccatgcctggcctgtcctcatttgtttatccatctcattttttgtccttctcaccaaagttatgttgctttgtcttgtgggttttttttcatgtggattcctgaaccccatccagccccttgtcccctccccagccagctcacactcttttctcacagctcctgggactcccgttgacacacagggaacagccacccacagtggactgcactgttctgtttgcacccttaaatttatcgtgcttacagaatgacacttctgcaaactagtcaagtagggggaaatggtttgtggatatgcacccttgtttattctctttgaaaatgtaaccagctctgaattctttctcctctgaggaggagtttcacttgtcgcccaggctggagtgtagtggtgcaatcttgactcactgctacctccacctcccaggttcaagcaattctcctgcatcagcctcccaagtagcttggattacaggcatgcaccaccatgctcaccgaattttttttttttttttttttttttttttagtagagatgaggtttcaccatgttggtcaggctggtcttgaacttttgacctcaagcgatccacctgccttggcctcccaaagtgctggaattacaggcatgagccaccatgcccagcctcagttctgaattcttaagaaactcgagagggtctaggtgagcattgatagaacctctgcagtgctgggtgtggtggctcacacctggaatgctagccctttgggagaccgaggtcagaggatctcttgagcccaggagtttgagaccagtctgcacaacatggaccccatctctacaaaatatttaagatgagttgtggctgggtgcagtg

SEQ ID NO: 39974 - DNA, 1063 bp, Homo sapiens
gtctgtaatcccagctacttgggaggctgaggcaggagaattgcttgaacctgggaggccgaggttgcagtgggctggagatcgcaccactgcattccagcctgggtgacagagcaagactccaaaaaaaaaaaaaaaaaaaaagaaagtgaacttggattgattgtaaatatctattgcaaacacaagaacaatcaccaaaaaggtttaaaaagggaagtataattgatatgttaagaaaggataaaaatggaatcttacaaaataaaaccagaaaagagaggaaaaagtggaagataaaaaaaaagaagaaacaaaggacaaggacaatgaatagaaaacagtaacaaatatggtagatatcagtccagctatataatcactttaaatgtcaatagtttgaatatatcaattaaaatatagataattagctgggcatggtggcatgttcctaaaggcccagcaactcaggcgaggcagggagggactgaggcaggaggatctcctgagcgagcccaagaggtcgaggctgcagtgagccatgacactcaccctgggcgacagagtgagaccctgtctcaaaaacagaaacaaaaagagactcaatcagaaaacaagatccaactatctatatgttgtctaccaaaaatccactttaagacacctatagattaaaagtaaagtgatggagaaacatataacatgttaacactaatcaaaagaagcttcagtagctaaactgatattagacaaagttgacttcagatcaaggataaagaggagcattacattacattgtagcattataatgatggaagagtcaatcatcccagaagacatacaaaccttaatgtgtatgcacctaacaagagagtgtcaaaatatgagcctaaaaccaatagaactgcaatgaaaaatagtgtattagggatggagacttcaacacccatctaacagtaattgacagatccagcaggcagaaaattagtaaggatatagcagaactgaacagcaccatcattccactggatctaattgacatctataaactattacattcaaa

SEQ ID NO: 39975 - DNA, 1054 bp, Homo sapiens
ctatacatactgtactgcttttccctacacatacatacctatgataaagtctaattgttataaactaggcacagaaagagattaacaacaataataaaacaactataatagtatactgtagtaaaagttatgtgtggtctctcaaaatatcttactgtattgtgctcatacttcttgtgatgatgcgagatgataagatacctatgtgatgagatgaactgaggtgaatgatgtaggtattgtgacacagtgctaggctactcttgaccttttgacaatacctcagaaggagtttcatctgcttcaggtgatcctggatcatgaagccatggcaatgtccatggttggatgtcaggagcagacaatgtcgtggatgtgctggacaaatacattcatgtcccggggggatgaaaccggatggcatgagattttgtcatgctactcataatgaagcacaattttaaatttacaaattgtttatttctggaattttccttttaatattttcgaacagtagttgacatcaggtaactgaaaccttggaaagggaaactacagatagtgcaggggctactgtacaaatctggtagacatggaccataaatttgccaagaaacattctagggcgttgcttctcaaaatttaaagtacttatgaatcattcagggtcttgtttaggaggtctggaaagaggtctaggattcagcatttctaataggctcttggtgatgctgctgatctgcatactacactctaaaatactagttactacagtgacttcttcaatatgaaataacgaagttttggctatgaattttgagaaataaaaaattaaagcgaatgtgccatttaagacattgataaaataatagtgaagcttttagagattggcaaaatgaaaaataactttgtaaaaaaactcaaaattggccaaagaaatcccatcacacatagaatgctaaaatttataattttggctgctagaaatacaaaatttgaggaattgaataagtactaaaaataactaacattatatttaaaaggtgatatttag

SEQ ID NO: 39976 - DNA, 1059 bp, Homo sapiens
tatctttcattgtgaagtacttccagaggtattctttatggctacctgctttgcaaacataccttccttggtgtcatttctgttgatgaaaacatatttatttcttgaacaatcggctgtttccaaaccctgtattgtattgatgtcgtccctcctgtagaaattctactgctgtgaggctgcctacactaatacgtgctgtgctgttacctgtagtgccaggtgtggaggggatgctaggcagctctgaggtctgccgcactgctcatgcttgcggtgatagtggtagtggtagtgatagtgactgggcttgcaatatgggaaagattcaggatcctctggggtctgctgtaaactcctgataccattgaatctgttctttaagaatattgccagcattgactaccctgcttcttttagttgtcatctcttttgttttgggcaacagtttacttcctgattatgtactttcctggttatgtttcttctgttgttttatgtgtttgctgataaactgctttctttcattggtatattttattaattctgttaccctgactattctcaaggatcttccctctgcctctgctctttttcacatatatttctaaggctttagctattcttgtccttctttttttgagctgatactttccatcctacatttgaacatccttgttattctgatgttggcatctttcacttccacaaacgctactatagtccagctctccatttcttttcttaattctcaaaatgcctagacttgaacttgttagtttctccctgctaaattatttctctactatttacaactcttcccatatctagcaatgatgtgattatttcttcagtgttccaggctgaaacacatggggtcttagctaataaatctttcctgtttgttctgtctttaaatcatggttcttggattttttgttttgttgtttattagcaaggaatcccaattcaaactgcccccttcagattcagttcatctctgtctactcttagccatctctgttgtcacctttttagtcaactattaccttaaatgta

SEQ ID NO: 39977 - DNA, 1030 bp, Homo sapiens
gaaaggacaaagcagttcaaagctgttgaagatatttctggtttagtattcaatactgaaagcaaaagcaaatgactccaaggtcataattccttcaaatttcctctagcaggtttcctgtgctattgtcatttgaggctgtgaagctactaggatcagaccctcagctccaaactccctttctgctggtttctcacaaatacctgtgaacaggtgcatcaaccgtgactagcaagtggagttctagggggagagaaaatccaagtctcttgtctcagaatgctcctttgaactccacttttctcaactgaattccaattcagtatggatgacttatttcatctaaaagctggaagctcttaatgcacctagaaaattctttgttactagacttagtaaccaggcaccaaaacatcttttactgtagtatctacttaccatactacccaagaatggcacactgctcacatcttcaaaagcttaaaccaagagcactacacaggtgcgtagtcgtggccgagtggttaaggcgatggacttgaaatccattggggtttccccgcgcaggttcgaatcctgtcggctacggtttggttttagcctgacttctcccaaatagtttccttctaattgcaccccaaaggcaactgagtctcctggattacaattgtgtcatctcctttggtaacactgcgttgaactctgcattctagctgtcatcatcattattaaccctgcgttgtagtttacctctttctctgagtccattactttcctcctcctccaacatccgagacaaccgtgtctcgagtaagagagaatctattgctgtggtgtaaacaccacctaacgttaatcctgatttgaggaaggcaattctcttttcctcacctacaagctctgagaatcgaagtcagactccatcgagttttctctgtagataagtctaagttgcttgtctggtgtgtgaagattttgcctatagtgtattaagtgttttgttagcccaagtttagggactgtcattcaa

SEQ ID NO: 39978 - DNA, 1050 bp, Homo sapiens
gcccttgcggagcagtcggtgcactcggcccacggggaactggagaccggcacgagaagagcgggtcttggctttggcgcgagctttgcctccctgcttgccgcgtcccgacatgacgaagaaacgataaatggaggaactgagaacagccgagagaagttcaccagagctccactacttatagtcaatactgggcgcgaaaataaagctgtgccattggctcaaattacagttttatttcaaccaatggaatcgctgttatgaaacatgcttctttggattggacaaacgtgtatatgacgtcatctagaatcgccaccagtcctacacactattttattaatcacctcatttgcataagaattcgtgaacaggacgttacaacacacagctttttcttcttcttctttttttgtttttttaagacagggtctccctctcgcccgggctggagtgcggtggtacgatctccggtcgctgcaacgtccgctcctgggttcaagtgattctcctgcctcggcctcctgagtagctgagattacaagcgtcagccaccatagcccggctaatttttgtattttttagtagagacagggtttcaccatattggtcatcctggtctcaaacccctgagctcaggtgagccacctgcctcaacctcccaaaatgctgggattaaaggcgtgagccacagcgcccggcgactttttttttttttttttttttttttttcccttgagacagggtctggctttgccgcccaggttggagagcagtggcgcgatcgtggctcaccgcaacctccgccttcctggccgaagcgatcctcctccctgagcctccccagtagctggggttacaggagtgcatcacgcgcccagctaattttttacatttgtttgaagagtcatggtttcgccatgttgttcaggctgctctcgaactcctgacctcaagtgatccgcccgcctccgcctcccaaagtactggaattacaggcgtgcgccgccgcgcccggccgctttttcctattccttgtaccctttctgc

SEQ ID NO: 39979 - DNA, 1097 bp, Homo sapiens
ttttcctttacgttctttaactttttgtcaaatcagtaatgacacctcgtaattaaaatagtgcaaggcaagtttagatttatcaagcttatatttaaacaggattttgatgcatgaaaaatcctagacttttgggggatttttttttgtttccgtttttgtttttctttagctagcaaaaccattttacgtttcttgacccaaaacagaggcggaatgtctccctttcactagcagattaaactgggagccaattccgtgtgtgagacgtggcatggcacagtctactgtccaatcagaacgcgagggcagctataaataccgggatgatcagtttttttctctcatttgtgttgagtaggtacgtctacttagccatggcacgaacaaagcaaacagctcgcaagtccaccggcggcaaagcgccgcgcaagcagctggccaccaaggcggctcgcaagagcgctccggccaccggtggcgtcaagaagccccaccgctaccgccccggcaccgtggccctgcgcgagatccgccgctaccagaagtcgaccgagctgctaatccggaagctaccttttcagcgcttggtacgggagatcgcacaggactttaagaccgatctgcgcttccagagctcggcggtgatggcgctgcaggaggcttgcgaggcctacctggtggggctatttgaggataccaacctgtgcgccattcacgccaaacgcgtcactattatgcctaaagacatccagcttgcgcgccgcatccgaggggagagggcataaatattcctatcagcccaagaagtctgtccaaccccaaaaggctcttttcagagcccctcaattgtcaccaaaaggaagctgtagcttttgagacgtgtcttagctccatgttaaatacaagctgtggacaaaacgtggtagtggcccaacacactataatgcaggagtcaggtcacaggctgttggtatgctaaatcaatttcacatacagaacctgttcctactgataaggattatcactcaaaaaagacatgtcatggggtcaattttacagatgaagtttagttttgaaaagtattcctgttttta

SEQ ID NO: 39980 - DNA, 1018 bp, Homo sapiens
gcgcccagcagctgctataaaatgcgcgtccctgtaggttcctttcactcactttctgacttaggccacaggtcgttttaccatgtctggacgtggcaagcagggcggcaaggctcgcgccaaggccaaaacccgctcctctagagctgggctccaatttcctgtaggacgagtgcaccgcctgctccgcaagggcaactacgctgagcgggtcggggccggcgcgccggtttacctggcggcggtgctggagtacctaactgccgagatcctggagctggcgggcaacgcagcccgcgacaacaaaaagacccgcatcatcccgcgccacttgcagctggccatccgcaacgacgaggagctcaacaagctgcttggtaaagttaccatcgctcagggcggtgttctgcctaacatccaggccgtactgctccccaagaagactgagagccaccacaaagctaagggcaagtaagggctgaactttaaaaatgtaaacttacaagacaaaaggctcttttcagagccacccaccatttctacggaagaactgagcactctgttctccaaacctatcagaaatttgtggccgagttcaagcactgaggccattactttcctattgggtaaaataaaagtattgaatcaggcctagtaaatactatccaactgctaccttataacatgaaggaacctccttaattgtcccctccccacaaactgtcctgggtctttaaaaaacttggggccgggcgcggtggtttatgcgtccttagcattttgggaaactgaggcaggtgggtggggaggggagaaatctctagggacctggagttcgagaccaccctgataacgagacccctgcctcttaaaaaaaaaatgactgggcgcggtggctcacgcctgtaatcccagcactttgggaggccgaggagggtgtatcacaaggtcaagagatcgagaccacccaggcaaacatggtgaaaccctgtccctactaaaaacacaaaaattagcc

SEQ ID NO: 39981 - DNA, 1064 bp, Homo sapiens
ggggggaatgtctgtagaactgcaacatcaatgcagtaagtgtagtaaaagctttagtttatggtgagtcattactcagcatcatggagtccacgatgaagagaatctcttttcaatctgtgcaatcaacaagtttttgaaaggcttttgtttatagtggaaccctcttttccccctagaagaaccaccacaaggaaaaatgctgtcaccataaggaatgtgggaaagttttcagccacatggccttatttgacttcaaagaatccacatgagagagagactgcataaatgtaataactgaggaggcctttgttcagcaaagaaaccttatacaaactcgtataaagaatgtaggaagaccttcacccagaagccaggactgactgtgcaccagagaatctgcacaataaacatgatgaatgtggagatgcttgcttcagcattggagaattcacagtaaagggaaaccctgccagtgtgatgagtacggaaaagtcttcagaggttggaacttgggaaaaatcagtgagtgaattcatattagagaggctcttataaatgagaggattgtggaaacttgtatagacagagatcagacctcaacaagggagcctccacagtattgaaaagttaatataattaatgtaagtgggcaagttgtatggggaatgggtagtctaaattgctcattttagccagtaaaaacattaaattagtttcttagatcaagaaaaggaaatgttagaagttatttttcccttccagaggggtctatatgtgtaagcaaccaggacttttgaaataagttgcatctctggatttgtgatctgtctcctggatgattatctctgttttgggagacaggtattttttcttcatgcctgctctagtctcatctcatatctttaattcattcagcaagtatacacaatagtattatcgtctactgtttgttgtaaatatatatatattattttctttttggtctgagtaggcttgtattggtaccctaggacataaaaatcacatatatcatgtttcagtaaatgcagtgaaaggaacta

SEQ ID NO: 39982 - DNA, 1020 bp, Homo sapiens
agttacttaatatactttaaaatttgagaagcgttgagttgaatgacagctgacttcatggctgtctgcgaagtggggaagcctgaacacagtcctataaactaaaggccactgcagacttttagcacaaggagatccttacagggaacatgtgccatcagctctttggagtgaacaaggaattagacccccatcatgccaaaaaactaggatttttaggtggtctttccatcccttcagatttaagtattcaaagaaagagagacagacctacattccaagggtcttctgagtgcaaggccttgtgttgtttgtttatttaggggagggcctggtgctcttctctgttttatgctttaccttcttttatttctcagatctcatgttagcactatgttctgaattccctaataatggctcttgagaactgatttacattttgttggtttgtttacttcttgagcacataaaaggaccccaaattagagatactatcccttgggcttctgaaaaatgaatcaaccaaaactggttgactctaaccttgccttgctgagtaaaaattctgctttggatgagaacctgtcttgattattttagtggacaacagataagccacatggaagtacacatggctcctgatctgtctttttatttacagaaatcattcttaatctctactgagatggcctgttatttccttccttttctaccctgccacagcaaactccacagtttctgggactaacttcctactacaccccaacacaactccagtcctctcttctcttcacacttctagctggttagtgggtttgaagtggtgagacagtgacaaaaggggaaggggaaaaataaaagaagggtaatctgcattcttccttagtaagtcccactcctaattacctttctacacagccctgtgtctttgtcccatcttctcttcactcctgtaatatactccccagccccattttcttagtgcccctgtctcttgcctctctagccataaaccctgta

SEQ ID NO: 39983 - DNA, 1114 bp, Homo sapiens
ctgcaatcctagcactttgggaggccaatgtgggcagatcacctgaggtcaggagttcaagaccagcctggccaacatgatgaaagcctgtctctactaaaaatacaaaaattagctgggtgtggtggcaggcacctataatcccagctactcaggaggctgaggcaggagaatcgcttgaacccaggagtcggaagttgcagtgaaccaagatcttgccactgcactccagcctggacgacagagtgagactctgcctcaaaaaaacaaaaaaaacagggtttggacatgttaattttgagattcctattagaatccaagcagaaaagttgagcaaacaactagatataataaactggaattcagtggaagggtctgtgctagaactacagaattggggcttttcagaatacgcatagtatttaaagccacgagataggatgagatcatgaagggagtaatgagcagtagaaacagagtagctagggaggtacaaagaatgggattcttagatgcagacaaaagtaatttggttttaaatgtgctgaatttgtattgccaaccagttctttctctgaaagcactgcaggggcatataatggagtttacagcttgatttctgaggcctgaccagagatcccagaatagaaggcacagctcgcagtactggccttttcccccggctttcttttttcaaaatatgagatatcaaaacaccgttttctatacatctgagatagcattttgctgactctcgcttttattctgaagactgaggctacaaaatgaaaatgtatcagggaaatagaggcagtatatggtgatttcttagttataaaatttaacctttgaagagaatgggggagtaatttgagaacctgttgtatgccaatccctgtgcaaggtggtttatacaaatgttatttataatctcagagagagtaagtaactagcccaaggtcacagagctactagactaagagagagagtaagtaatccatgtgattccaaatccctgctttttacaataccttgctgaagaaacctgttatttttaaatgcaagaggaaataagcccatggaagaatgggagccacccagtggctgaaattga

SEQ ID NO: 39984 - DNA, 1034 bp, Homo sapiens
agtggtggtgggtccctgtaatcccagctactccggaagctgaggcaggaggattgcttgaacctgggaggcagaggttgcaagtgagccgagatcgcaccactgcactcccgcctgggcaacaaaagcaagactctgtctcaaaaaaaaaaaaaaaaaaattaacaaccagatctgcctgtgttctctgctatctcatactaccttctgcttgtctaaggtaaataaaatatatgggcttatatcaactctatgtgtgcacatgtgtatacatgtgtatatacgattgcaaatgcatagaaaaggacacattccagtatttaagactgtttatttcagggtaatagaacttggtgaaagaattctatattcctctctactttttggatttaaaaaaggttctgaagagaagtaatggtacaagataaattgtgactgagggtgaaaggtgggactcatacagtacatgacatatgagtgggcagttggaagagggtgagctgaaatgggtaaagaagacttcagagaggatgtgagatttgaatcaagctgcagagattgggtaaggttcgaataagggaagaaggcaagaccaagctcatggcgcagggatgagaaacgcctgattagaataatgagaagaaaaacctgactggagctgagagtttttgcttgtggaatagaggaaaccaagagtggagccagacaacagaagctaaaggtctgactggttttaaactgtgcttgagagtttgggaattcatccaattagtgaggagccatagatggtgtcagcggaggtgagggtcgtgggatatatgatgataaaggcacatttgtattacatgctgcttagtcttcacctacgtgcatgtccttggttaacagcatccttccatgaggatgatggtagatttgggggtgttcagcttgctgaggctctaggaggaaccaactttaaaatgcagatgtattttttaaggtaagacttattatgctaattatatacctggcatatacattgaggttgtgat

SEQ ID NO: 39985 - DNA, 1058 bp, Homo sapiens
gatactccgcaccaaatacaaactggtcctcgccctgaactttaaaaactaaggtcatgaacacattcagctaaaaaagcaggtctgtttgcatagttctttccacctctttcacaagagggaatcacgcacagacacataaaccaagacgcgagttccgggtggatggggatgacagctcctctgttttctggttgcaaacatcaaaaataacatcttgctccagacccccaaacgcagctgacaaactggagactcgatctcagagtcctcagagtccccgtgctgcgtcggcctaggcgtgggatttctaatcatgttcttaagaaccgattctcttgggatttgttggatattaggtactggcttcctgtccctttactctcaggtattagaaacagcatgggagacaaatgcaaatctcagctgcaggacaaaggactgggactaggaacctatttgtagattttatcggtagttgagaccgctacggaatcatttgtgtagaaatgctctgagaaaaaaaaatagtaagacgcagaataatcttgtgtcttttaaatcattaagatgagtcctaatactggactagcgtggtagcgtggccgagtggtctaagacgctggattaaggctccagtctcttcgggggcgtgggtttgaatcccaccgctgccaggtttattgcaaaattagtagggatatctaaagctcattgagatttgcaagaaaaacattttccactgcgagcacaaggtaggtatttaatcctgataatggtaggttgaaaaccaaatagcagctgcaaaatcagactgccatcagttatttctaagacctcctctccaagggagtatgttcctttttatgttttaaaaatgctcatacaaaaagtacaactcacatgattcaaaattacaaaaattcaagaatacatacataatgacagtctatttgtgcccccaccccatcctgccggacacccaattctggaccctcaggcaaccaaccatattaaaatctggagttctattaaaggcatattctttgcatatagtt

SEQ ID NO: 39986 - DNA, 1145 bp, Homo sapiens
cagtttaggggcttaagtttaagatttaaattcgtttttagttgacttttgtgcattaacatcttgtcttgtctcctcacctggatctacgtttcctctgcagcactcacagaactcgtctttatattctctggcactatcgcgcgcgcgtgtgtgtgtgtgtgtgtgtgtgttggcagctccatagaggaggtttttttaaaaaggagagaatctgaagacataccagaagattcaatcttggaacttcgctccaggtggacggaaactgacaaagaaagttggctaacagcagtccttgaaatagatgacggctgtgagaggatccaagggtctttcggtccagaatgcctttctcctcttgacacagcgtcaagacaagattccattcagaagtttcagaaacaggagttaaaacatagcggactttaacctatcatgccttaagccctcacctttagataatagcatataataaatcagtaagaaaacggcattgtaagtgggggtgtagctcagtggtagagcgtatgcttaacattcatgaggctctgggttcgatccccagcacttccacaagtacatttccttatatctatcgttgaacatttcgtttcagtctttgaatacttagttccagtcttttcttttttctttgtgcatacactagcttgtgtttttcctactcacagcgaaggtaagccatttggtactcattcatttgtactatgggtcctaacactccttcagcctcccaacctgactgcttcagcacagctttatagttatttactgaaatagagaagctgcttattcaagatcccctgagagtgaagcaacaggcatgccggtcatagaagactcgttctcctagaccatcctggctaacatggtgaaaccccatctctactaaaaatacaaaaaaaaaaaaaaattagccgggcgtggtggcgggcacctgtagtcccagctactccagaggctgagacaggagaattgcataaacccgggaggctgagcttgcagtgagccgagatcgcgccactgcactccagcctgggcgactgagcaagactccatcacaaaaaaaaaaaaaaaaaaaaaaaagactcgttctcctttgctgccgtttctcattactatta

SEQ ID NO: 39987 - DNA, 1033 bp, Homo sapiens
cctttgatattccgactgagcaaacaacaattatgaagcgttttaggcaggaaaaggctgaatttcaatggctttgtgttatatctggaagaaatcaaaagaaacgaaaatcagaacttgattcttgccaagcataatagaagcagaccctaagaactcaacgtcttcaggccacaaaggaaacttcttgtggttattatctgacacttttctaatctttcgtttttcgtttcaagtcctacacagtattctaaagaatctgtatcccccattagtaccaagtatctcctgctcagagtagctctccacgctctatggtactgaccactattaccagcatgctcacggagtctcagaaaatgaaagttacctcctgaaaattattacaaatgggtgttatagtaagggggtgtagctcagtggtagagcgcatgctttgcatgtatgaggcctcggttcgatccccgacacctccaagtgatggtttccctctggcagttctcaagcgacagacctctgcctcctcacatttttctattctatttctgcacatatagtaagtaaaaatgtactccaatgcattgccttgaactatctccaacctctatgctgtgagcctcaacatcacataaggcgattgcgacagcagaaggaagacaaaaaagtaacgagggggaaagaacaggatcgcaacagtggtctcctgacccaaacaaaagcatgaacattcacaggcggcttgcgttcgctcccattttgttttgttttgttttgtttttgtttgtttgttttgttttttgagacggagttttgctctcgttgcccaggctagagtgcagtcgcaccacctcggctcactgcaacctccgccttccggtttcaagagattctcctgcctcagcctcccaagtagctgggattacaggcgcccgccaccacgcccagctaatttttttgtatttttagtagagacggggtttcaccatgttagtcaggctggtcttgaactgccgacctcgtgagccacccgcct

SEQ ID NO: 39988 - DNA, 1050 bp, Homo sapiens
taagaaaacctcaattcagcgtatctgccaggcacagtggctcatgcctgaaatcccattgctttgggaagttgaggtgggaggattgcttgaggccaagagttcgagaccatcctgagcaacatagtaagacctcatctctacaaaaaattttttaaaattagggtggtagtgcacacctatggtcccagctacttgggtgtcttaggcgggagaatcacctgagcccaggagtttggggttacaatgaactatgaccacaccactgcgctccagcctaggcaacagagcaagaccctatctcttaaaatcagttcatgatggatattgtggcttcagatgtgaaagaaaagatacggggctaaaattctgtattttcagagtattctggtaaccagctaatccaagcagtaatttttgaaatgtgaagtttagaatatattctaaataaaatacgtgcaacctccagtgggaacctcttattattggggaggtagtagaaaggcgctgggtgttctaaaataggctctcctggcccacggctgactgtcttccttgtgtctctacagtggacgtgactctggacccagacacggcctaccccagcctgatcctctctgataatctgcggcaagtgcggtacagttacctccaacaggacctgcctgacaaccccgagaggttcaatctgtttccctgtgtcttgggctctccatgcttcatcgccgggagacattattgggaggtagaggtgggagataaagccaagtggaccataggtgtctgtgaagactcagtgtgcagaaaaggtggagtaacctcagccccccagaatggattctgggcagtgtctttgtggtatgggaaagaatattgggctcttacctccccaatgactgccctacccctgcggaccccgctccagcgggtggggattttcttggactatgatgctggtgaggtctccttctacaacgtgacagagaggtgtcacaccttcactttctctcatgctaccttttgtgggcctgtccggccctacttcagtct

SEQ ID NO: 39989 - DNA, 1046 bp, Homo sapiens
cttttctcaggagcaaatccagaaccagctcgaccatttaaaaagagtgaaagatttaaagaagagacgtcgggcccagggggaacaggcacgagctgaactcttggtaagggttgttggaattcacagttggttctgctggtgctctcctcttctgtagagctgatgttacttcccttaaacttgtccagcatgtcacccagaacttgtaggtagaggtggatcaaccgcacatggcagtgggaactcacccggagaactaagattcccttacttttggggaaagcatggagaagccaagtttggaacccttggaaatcagacctgtcagtttactttaacctgctaactgcgtagaccagggttgatccttggcaaagctgagataggtaaaattattggatacagttagcttgcgttggtaccattctgcagacaattgctaatagtggatttgtgtaatccccactgttgcttctctttggcttattctcctttcttaacaatgccttaattctgaattttttactctgccctcttcctccagtctcaaggccttaacaagtggctgatgtgttaatttatattaggggtatatgggaatttttttttttttttttaagacagggtctcactgtcatccaggctggagtgcaatggtgaggttttggctcgctgcaacctctgcctcccagttcaagcgattctcccacctcagcctcccaggtagctgaggctacaggcgtacgccaacagactcagctaatttttgtatttttagtagagatggtgtttctccatgttggttaggctggtctcgaactcccgacctcaggtgatccgcccacctcagcctcccaaagtgctgggattacagacgtgagccaccgcgcccagcctggctccttgtttagaacaaaagtttataatagagtcctgttggtggtgggggttgggtgaagaacgaaggacagtaaattatggcaaacaaatgagcgccaagagggaatcgtggggagagcacctctccccctcctacccaaagc

SEQ ID NO: 39990 - DNA, 1072 bp, Homo sapiens
attgagggcttagcagaatgaagcaggacatgattaagtctgagattagtgagtgaggacactactggttaaaagtgtgggctctggagtcagactgccagggtatcagatccaaccacatgcaaacattttcttagtctctattccccatgtcctcatttatgaaaatgagaataacagtaatacattcctccataggttgggtacaaagactattataaattgtgcattcaggtgcctaggttggcccttgggccatggtatatgttgcgtgaatgttagcctctgtccctgctgtttaatgagttccttgacagtagtgggcatgtattgggagcctggagcaagtgcctaagcatcccctctagggacgctccttcccaggaactaagaagagtaaaagaatgatgactgctagaaggtaatggatgagatggctgctgagtgcttccaaccttaaacatctttgtttaggaactctgagcatcttggaaataatttgctatcaaactgaaaaaaaatcttgaatggacaagggcaaaaacatttgcctgagactttaaacattttttgtgtcatcttggagagtgcttttttgaagctcaaattttcttttattttggcactgatttttaaagtgattctcagatttttgtaagacagctgcaagggttggatgggccctgtcattcactgacctgttaagagccaatttctgaacttccactaaagcatgggctggttgaatcttagaccagtacttgaaaaactttccactgtgattatccaccttggaccagttggacttaatttgagtctctcttcttcccacagtgaaatatccgctaggaaaagagaagaagtctatggagtagataagcctgcagtttggaaaatgaatagttggcatcagaacagcagcaggaggctgggtgtggtggctcacgcctgtaatcccagcactttgggaggctgaggtgggtggatcacgaggtcaggagttcaagaccagcctggccaagatggcgaaaccctgtctctactaaaaatacaaaaattagctgggcgtgat

SEQ ID NO: 39991 - DNA, 1072 bp, Homo sapiens
cccaggctggagtgtagtggcgtcatctcagctcactgtaacctccacctcctgggttgaagtgattttctcacctcagccctcagcctcctgagtagttgggactgcaagtgcacaccaccatgcccagctaattttttgtattttagtagagatggggtttcaccatgttgcccagctggtctttaactcctgagctcaggcagtctgcttaccttggcctcccaaagtgctaggattaaaggtgtgagccactgtgcctggccttttttttttttttttttttttgagcagttttagtttcccagcagaattgagatgaaggtacagaaacttcccatatgcttcccacatgcatagccttctacattatcgacatcctccgccagagtggtacatttgttacaactgatgaacctacattgatacatcataatcacccaaagtccatagtttacattagagttcacccttggtgttatatattctatgggtttggacaaatgtataatgagacgtatctactattaaatactttacagagtattttcactggcctaatccaatggacatttattgttacttcattatggttgggcacagtgctagatgctgatgattaagagagggcatgggatttggtcttgtcctcaagggtagaacctaggcccattgcatcttcaaagcccaggctccttcaaagcccagtgtagtagcaactgctgtaccttgcctgtgccctttgcgtatctcactcctctatctctctagaaagttggagagaaaagtgagcaaggcatgaggaacaaagttatttatttattcttcattcatctatttattctttcattaccgtttgtgttaaaacattccaaacccaaacaattatttgtatggtcccctgtgtattacttgtggtttcccaagaagtagttgctaagcttttccttgtatggtttctgtgaggtaaggaaggaatgatgtgattttctccagtatgtagaatgcagttccaagaggttaagtaatttacttacagttatttagccaaacaaggttactgcaaggtata

SEQ ID NO: 39992 - DNA, 1995 bp, Homo sapiens
ggacggagcccgggtggatttccggtgtgaccccgacttccatctggtgggcagctcccggagcatctgtagtcagggccagtggagcacccccaagccccactgccagggtgaggggaacagctgcctgcatgcagctgatgaggacgcttgtgtgaggatgggagtggggtgggaatggataatgggaaagaatggagagctataaaaatgtgggggaggacactggaaaggggagatgaaagtccctttttcctccatcacctgcctcaaacttcctcttgcagtccccggtatcctctgtaggttgggggcttccttcctttaccttttaaaaaaatcttcctgctcccgattcttagacctcacgttttctcttttcctttatgaatctcacctctctcaccttcttcaggtttaaatactccaattttccctttctctaaacttagaaatttccatgcatcaccctcttctagaattcatccctcaccattccttatataattgatttattgtaaagactcagaaataaatcaaacattctactaagaaaaattgagaaggggagctctgggggtggaaacatattagggtaaaagacttaaaattggaggcagcattatcagaagatgaagaacaactcagggatggggtgggaagaagacaggtccttttctgtacttcctagacaacctccattattccctaagggaatcagtgttgtgtctgtctacttttttttttttttttttgccacgtaattttacaaactctcccttttctaggcacccgaactctctgccatcttctctcctgggatgcagtcatcccatttgtatgcctcatacttcctctaccctggtagattctttcaagatccttgggctttactttcctcacataactcagttattctgcttctagtttaccattttattctggaaattgagagtcccatccaggggtggacttatgacactactgaaacttagacttcaaggttcctcacctacagggccctcttcctgtgctctaataatatagagggctcgatggatatgtgttcatatggtaacaggcttttgtaaaaattgcagaaataagattttaacagcaattgcttaaagccaattgtatgtgtaattttttttcttaaagactcccaattttgtaatattcaggcaccacagaaccaagatctgccccaaacttagctattggcattcccgtctcaaattctgttgtcctatgaaaaatcgaagaagaaaataagtcctgacccccttacccccagacccaccttgttcttatccccaggcaccctcccctcagaaacgcaggcttctgctctccccggtcttcagcatggacaggtgtgggagggggctggggatcaggccagggaagctgggcgccagtggtaactcttctctgatccccgtctttcctgctgccagtgaatcgaacgccacactcaggtgagatgagaaacccttaccgcgcgcactgcaatgccctccccttcactctgcaccctccacccccctgaaattctgcccttaggctacggggcgtcgtcctttcgcaccttccccaacccaccccagtttgcggccacccccttccctccctacctgtttcctgcctccagtcccggttttccacgaggctgcggtctctccttgtccctgcttggctacacttccctgggctccacctcctcccagactgagcctcgccggtgtcaggcagagcccagcagagggcggcagggtgctgggagaccctgagctcccaccacgttttcccctgtggggttccttgcgaccttcgctggaaccttttccagcctgctgcctcctaggatttcacctaatggactttctcagcctgtcccacccatcccaaccctggccaggcctctcgcgctcttccccacatcttttccttccgtgtaccccttccctcgtcttttctcaattccatgtcctg

SEQ ID NO: 39993 - DNA, 1046 bp, Homo sapiens
tctgcatcactggaggttcccaccacatggccctgcctccctgagtttctgtgcagatgttatggaggagtatataagcagacatccctgggccatttgggaagcaggaaccagctccttgtcagggcagctgtggtccctattttcatcatatgtccaagtgttaccttgtctagcccccaggaacacagtccccaggaccatgttttttggggcacccacagcaggggcagtgcaggtctggttgctcctgctctcacctgcagcatctcccgtagaggaattgtcagttctggttccctgtgggcagtaaaggtttccttgtaggtcactggggcattggccagaaaaaggttgtgaaaatcacatgctaatttctcaaaattcctgctttcaatgttgatgtccaataaagatgttcataatttcagctggatattcttaataggatttcctccaataccgatgctgtaaagcatattgaatggaacaggaattcaaatttgaaactctctctctagaagggtccatgtgggagatggtggctgtggctgtggcaatccccaggtgcagagtgggcggaggcagcctcaggctgaggggtctcaagaaatcccttattccatagggagaagaagaagatcctctgtgggtgtgagggcagtggcctgggtggaatccctgctaggaaccagacaggaaggccttgcagcctcaccaagcagcagccctggggtggagctggatttccagggatgagtggaccaggcaggagcagggcatcccaagtgcaggtcatggacctgggtgtcaagggaagcagagccttcttgagcaagggggtctccagggtcaggtcaggtgcagaccccatggcagccacgtgtttccatcctgggcctgacaggcctgctgggcttcctggtgggctctccaggtaggagctgcctgctcaggactggaaggggaggaacactgagctgtaggtggagggcggaacccacagtgggcagggcctgccctggtgtgcaggtgcttctgcagga

SEQ ID NO: 39994 - DNA, 1082 bp, Homo sapiens
gttatctgtgaatagaattgtatgttttcctttttatctggatgcctttaatttttaattttctgccttattgcactggctacaatctccagtataatattaaataaaagtggtgggattggacatccttgcattgatccccatcttaggagaaaagcattcagtcttcagtctttcttcattaagtttgattttagctgtgggttttttatagacgccctttatcagagtgaagaaggtctcctccattcctattttgttgaaacttatgaacatgagtgatgttaacatttttgtcaactgtttctcctgcatcttttgagataattatgtctttttttccattaatacagtgcattccatgaactgattttcaaatgttaatccaaccatatgttcctgggatgaatcccattggtcatggagtgtaatccttttttatgtggctttgtattatctgccaatgtttgttaaggatgttttcatttatgtttattggtgacactggtgtatggcactcttttcctgtgagtcttgctgtgactttgatatgagggtaatgccagttctgtaaatgggctggaaagtcttccctcctctcttcttgtctgaaagagctttcaaaatatttgatagaattcaccagtgaagatatctgggctttggcatttctttttgagaaggtttttcaatttctgacttagttcacagttctcttcaggttttccagttaatttgggtcagttttggcaatttctatctctgcacgaattggtcctttttatccaagtggtctaacttattggcttcaggtttttcagagtattcacttataatgttttttaacttcctaagggtcattagtgataatctctcttttgttcacaattttggtaatttatcttatttctcataatctcttttttcactgttggtcaagaaaacagacagaggcagcagatggagatgtgacagattctctagtgggaaggctttgatcataatacctggcaagccagaatgatgccagcaaccccaaaggagctgccaatggatcttgacaggaaaatcactgactctgg

SEQ ID NO: 39995 - DNA, 1048 bp, Homo sapiens
tgaaaacacagtgccagcactgtaagaagagctgagcagccgccacagttcccacccagccctgcagccctcctttttattatttgctggccctgtagtcatttgagtttacagccctagtactgattttccttatgtagcgaccccagcccttctgctgccttactgacagctaactgcccctggtggccttccagcctctcactaaaacaacaacaaaaccttaatgttatcttattcatttactcttccataacttgaatccttttgaccacctcctgataaacagccatctagtttttgctgtaggcaacccattacacctcaggcagcctgatcctaaactctcctccacatccctttctcacttgcatccatcccccagttcccgggttttgtcgttcctcagtggccacgcactgcatgcacccttcccctgcacctccttgttgcttaagtccccagaaacttcccccagccctgccaacctctcagcattctctcactttgtcttgtactcttttttccttttacattatttgtctccccagttttaccttctgtgtttctctttgatctctgtctcttttagtctctcttgctaattttcctcttctattctctctctgccatcccatttcctttctgtctcacactcagcttcttcctctttctctgggcatgagccgagccgtgctgtgccctggctccccttgtctgtctgcaaaaacaggcagctctgcggaaatgactcagcagtaacctttatcaacagcttttagaagccagctgccacacacagctgtgccgctggctctctcttccttcaggtatagcagcttaactctctctctctctctttctctcacacacacacacaaactttctgagcttccctcagtatttccttaattggttttttattccatccgttaatcttttgcagtttcttagtaatattacatcagcttttagttacaaaattaacctttaaaaggccttgccctactgggtcctctggatttaatcctgaatattttttcacttg

SEQ ID NO: 39996 - DNA, 1034 bp, Homo sapiens
ttgagatttcttcagatctgaaagtcagcctgagtttttagacttgcttctgagttttagactttggccctgggaaaaaggaaatcagtactccaggaacaagattttcctcgactttgtctcaacccaaagacgctatagcagcgcagttttcaaacgtgctttgaaaataaatgggacagtgtgtccacactggattttgcctttccctttttattacagcccgccccttttgtaaaattgttacacatctctctactgcactaaaaacggctctatcaaagatactttgagaaagatttaatgacatgaaaatatgaagcccccttaaaagagagtttctggagttgggttttaattaacactttggtttttaaaatcctgtaactatttgggtgtgtggcttatctttataatattttcaaacaaatattttttcttaaccaccacacaaatccaagtttattatttttatttttaaattttatttatttatttctgagacaagatctcttgctgtcacccaggctggagtgtagtggtgagatcatagctcactgcagcctcgaactcctgggctcaagctatccttcagcttccagagctgggattacaggcctgagccaccgcgcctggccaaaatccaagtttattctgtaatataaaattccaacatttcagagaaggtgaaagtcacaacgttatcccagtccctggggtccctgtcaaaattttggggaataatcctccatgttttcccctacttaaaatatatattatgtaagtggtattactggtattataattccatatatcctcgtccttttaaaaatggataaaagtaggctgggcacagatcttctcataacaatacttacaaatttatcctcctctttttaaggactgcgtggaattttatcgcgtggctattctttaggggactatggaaatgttatttctttatcttcattgtggtagtggatatgtgggtgtgtaaaacagccaagcagtacaactcaatgagctgtgcattt

SEQ ID NO: 39997 - DNA, 1016 bp, Homo sapiens
ttgaagacacagtaaggaatagggaggaactaagggtttcatgaaatcagcactcactgtggaggagacgtctgtctcagcaggtagctcctaacactgaacttaaagtgatgctgcccatcactgaggatcctggcacaattctcatccgacacaagccctgttccaaaccagcctgctctagtcacctggaaggagacagaggttaggactagaagaccccaaagagggaagacagccagagggaggaatgaagaagtgaagtgtgaaaagatacagaaaataagtgggtgggagagtgggtgtccctctgtgtatggagcttacctgattcacgtaggtctcagaatcttcaggcatgtcacaggtaaaggcagtgttcacctgctccatgtccatgcctgggcaaaatagggttggtagccaaagaattggcctttaaaaatcttttggggtcattctcagacaagtacagaagagcaaaaactgttagtcacctgaggtgcattctccttctcaggttcagaaatgaactacatgtaaaaggaaccaaaggctgtaattctcatggcacccagaaaactggactagggacctggagagtcatgtgcctgtcattgctccaccactcacgagctgtgtgacttcaggagaagctctctactcatagggcctctgattcatctgtgaatcatggacaaatgcctccattctagcaaccttactgaaatgcagggaggaccaagtgatcaatgcggaggaaaaaagcaaagtgatgacatttactcctagacaagactctttaggaaaatgcactttaaaaggaggagaaaacatagtacctgccatcccctgccaaaaagcctctttggtttagtaattatgattgttcatcatctttctataaaattagggcaaaactagctcactcaatgtctcaaataaattaaacacagtttgtgattctatgtccacaacttttgcactgtgtgaaactgaaaagaaatgggaacaca

SEQ ID NO: 39998 - DNA, 1077 bp, Homo sapiens
ccaccgcgcccgcgtcttcatcctcagactcacggcgtcactgtcgacccgcacgaactgcgtgtcgtccacgtagcccacggcaatgaagctgggctccccgcggcccggccaggaaacggcggtgctgaaatacctcatggagtgggagcctgggggcgaggaggggctgagacccgcccgaccctcctcccggcgcggctccccgggtcctgcgccccagccaggtggacctttcgctcctcacggcagaggccgtttccctcctgaccccgcactcacccgcccaggtctcggccagggccagggtccccgagagcagcaggaggagggttcggggcgccatgaccccatcgtcggcgtctggggagactccgagtcccggtgggtgcgtggggactttagaaccggggccgcgcgacgctgattggcttccctagaaacccgacactcagtgggagtgagaactgggtccgcgtcgtgagtgtccaggaagaaggacccgtcgcaggctgggagagggagaagagaaactctgcggagatggggaatccccaatgctgcacctccccagcccatgcaccgccttcggggcctgagaccctgagagccatgcctggggctctgggacttcgccctgaccccgctcctcctgtgacaaacgctctgtctcaatgttccctgagtcttggtccaggagctgtccgagaaaccaggaagaaaccctcagcttgggccccgtccctctcctttcacttttcatccgggaattcctgtccctgaaatggactccctgcttccccgctgcttacctgttcccctggactcttcaaaaagaaaactcaccccagggagcttggtgccagagagggagctctccctgggaatggaggtgtagagacagaggtttttttcttttatttcttttttctttttctttaaatctggaaaagttgtgcctgggtgcatgagatagtatagagaccagtttgctttttgtgtattaactacagtgggtagcagaatcttggtaacccctgaatgatcaggaatctaatcggtaaaaacatgtgactt

SEQ ID NO: 39999 - DNA, 1227 bp, Homo sapiens
gcccttctccccttcctgccccctgcagaagaagctccaggaccagaggcagtacattgtggctgagtttgagcagggtcatcagttcctgagggagcgggaggaacacctgctggaacagctggcgaagctggagcaggagctcacggagggcagggagaagttcaagagccggggcgtcggggagcttgcccggctggccctggtcatctccgaactggagggcaaggcgcagcagccagctgcagagctcatgcaggtgagaggccgtccctgggcagggcgccagggaccaggacggtgggtcccagccctgccattcacttgcaggaccttagaagacttgggggctcagttttgtcatctgaaacatggagatgataatccttactgctgccaattagtctgtagattgcatgagcataaaatgaaataactggcatgctgtcacttcaaaaaataaactttttacacaaaactgttcaaaaaactaaatggtatagtagaaaatggaagggaagattattaatatcatttaccatcctccatcctcatcactgccatcacaagccctcttaacaagtcattggcagacacttagcagctggtggaagctttttatggtgttgtggttgggggtggctgagggagggctgaccagcagctcctctcaaagacccagaggatctggaagagatagggtaactggggaagggagacagagatggccaggttttctttggcccatgggattaccacacagagaacaagatggaaagcagacaagggggcctcggggcacctcctagaggagggggctttgatagtgagaaagggagggtttggggctgaagaactggctgtgaagctgaaatggcaccacatctcctcccccccgggagcctctggggatcacacttaccctgaagagggcccagtcccctttggaggggtagagggctcaaccttcctgctctcataggctgggaggggaggggctctctgatggtattcccccacttgcactgtttagggtggctgggtctgtctgtcagcagcagagccacccaggatctctaggaaggtggagtcccaggctaatggcagggcaatagctaggagggagagatagcaaggcagactctgcagtatgtgcactgggacagactgcagaaggaggcggccacctgctcctcattgttgtgaattcagatgtacagaatgagg

SEQ ID NO: 40000 - DNA, 1026 bp, Homo sapiens
agattacggggcggggacgagctgtcgcgctggttgctcgtgcaggagcgggacccggaacagaccgccgtgagagaggaggggtgccggccgggattcgcggcccggagctcgggaccggtgagtagggggtgcacatgagacatacagcgaagcaacagtctcgtacgctcaccgggtttggggcgacccaacgcagccgccgggcccgggttcaaaacggggccaggcccccgggcgggctcaggagggggtcaagttcgctgcgtcctccctgccagccagatccctcctgtttgcttgtccttacattctccccctcctcttgggtctttctcgctttctggtatcctactcagactcccatccattctagtctgcggaaccagaagtaagcggggcctggatgaccgtccggttgcttggagcctggtagataggcgactaatccagctccctgaccaaagtgtcatgctttctttctctttcttttttttttttttttttttgttcggagtaaaccggtttagccacaaatacttggagctgtgctttcactccttccagctcattagcatttttcttactgattttctccctatttggccttagaaaaaaagtgtaaatttaactctgtggagtaaatgggagggacacacttccaaatctccagtagatttcaaattttgacccacgatttgtgtgtacttcaaaagaggggagaatgacattcgtttatgcatgccttaacctcctgtttttaactcttagctgaaatcataatccctaacatgtttttccccaagttcaaaaaaatcacctttaaaaaaaataggctttttatgtttcaaaaattgcaattttattgtttaagtagactttatttcttacaacacttttagatttacagaagaattgagaagatagtacaaacttcccacatgctccaaaccggatcccctgttattaacatcttacctcagtgtggtacatttgttgcagttaaccaatatcaatacattatta

SEQ ID NO: 40001 - DNA, 1094 bp, Homo sapiens
ctacgctttctgttcaaaacccagtagttaatgctattagcattcaaaatgcctttttttccttttaaaaaggacagttaaacctgttattttttatcctgcagccagttcttagcacaaaagcaggcagattttagtagcacaaaattatttattagcttatgcctctaccagaaaacagaaatgttggcttaaaattgtttcattgatgtaacttttaccttttcctttacagatattcatttattcattctggccctaataccaaggtatccttcacacaaaagattcaaacagattctttgcatctttaccaatgggagtttcatgttttcaagtttttgtttgtttgtttgtttgttttttgtttggaggcctctttccaagcactctagtattcttaaaatcctgagattctgaatggtatgatttagctcaatatgtttatactaaacttaggggaaaaaaactaatatattttccttacccatcacaaggtttatgctgagacttcaataacaaaaaacagactaacaagagaaaagcatgcacatttattttatccaagttttacatgacatgggaactttcagaaacgaaaacccaaagaaatggggacatttgtgtagttgtatagacagtcaggcagatgtatgattgcaaggacaaaagtgtatgagctaacggtgataaactgagaagttggaaaggcctgtctattcagtttcttcttggcatacctgtgtggcagtccctccctcagggcataggagaggatgcctgttatataaggggcctcagatgaaggagggagaaggagggagcaggtcagagagtgaccttcctagattttgtggcctgcttcagggaagaaggggcgaggggaactctagtttctatggcctgcttcagggcagaaaggagcaagaggtcagagaaaccttcctgtttctgctattttctcaatttccaaggtgccatattttggggtggcatttcctgtaccctgtcatatacaaactcatttttagacagcggcctttagttcctcctgaggttaaaccagagctgctcaaggaatatacctactaaat

SEQ ID NO: 40002 - DNA, 1059 bp, Homo sapiens
agatttagcaatgtccagataatcctgacacctggagaacaaaggcacttctaattttgctttaaagataataatattgattcttgcaaaacatagtaattaaggaaattaatcctttatcacaaactcttgtagcagagcacatcttcccatgatcttcttttatcatatatatatatgatatatatataaagatatatatataagcattgtacctagggtggacgcgttcctcctcttactttctggaatgccctactctgtctatgggttagctcttctttcaccactgaacttgcttttgctgtgcactccagcagacttgccctgaattctttcttgcacgagatccaagaaccctctcttggggtctggattgggacctctttcctgtaacaggaccaccttccacaaatggacccaggttcagtgtccactctgattcactgtcccatgctgccttccctaaagcaggcactttgccactggtttcacacgtctggggtgaagaactcttcttggtttgtccggaacctttctggttttgcgtggaaagtcctgtgtcctgggaaactccacagtcccaggcatcctataccatgcttcatttgccaaaaactgtgacccaaaaaaattgtgaacaatgattttactgcaaaatgttggaaactctgtagaaagtagttgtatggtatgctgtgaaaatagggaattttttttgggtatttgattttgtaacacttttctgattataaaagcattaaatacacatttggaggtacttggagagacaaaggaaagcttaaagcaatgcttttcaagctttgttatgtgtaagaatatcttgcttgaaatgtagagtcccaggctgcaacgcaagagtgtgcatcaggaagagtggagtgttgcccagaaatctggaaggtaagagaaaaggctagccactaatagtagtttaaatgagtcgagagtctggtctacattttgcatgtctaatagacatctcaaaattagcatatccaaaatcagatccaaatcctctcccctggtctgtccctg

SEQ ID NO: 40003 - DNA, 1067 bp, Homo sapiens
gtgagttgagatcgcgccactgcactccagcctgggtgacagagggagatgccatctcaaataaataaataaatataaaataaaataaatctttacgtttccttcaaggccaacatcaaaagcctcttctttgaaggcttctctgactaaacactagctgtttccagaattcttgtggcatccaatctgactggaagatttaacatcagattatttgttgtaattataaatgtacagatcttaatattccattatatggtctgtgcatattatagacccctgcccactgcactttggggcttaaaacctattggttggctaattcagttattaaagaattcagtaaatgagaataacaccttgtctctcttgactcttggtccaaatctcttgcaaataggccacaccgtagtcatagagcaagaggactcagatacagtttggttggtcctttaccttcaaaagttcaagtgctggctgccgagacttctccaactcagtgatcagggtcccaagctggaccacctcctcagaacccttgatgacacggctgttcctccttttggtgagttcttgctctagccctaccagctgctccaacaggtactgttccctttctctcaaaaaccgatggccctattcaaacactgatacaatgtcttgcctgtggttctgaaatgttgtctacagtaaatgcagaaagagaaaagtgacctttttgagaggctagggaacaccagaacatgtgtgagatcttctgaggatgagttcagaacagaaatctctttgatcactctccccctccccattcctcaatacttcccccacacacataccccttcctctccttaacctatgccccgctactacctacacacacacccctgccctacacacatacacacattcatacagaacatttactagagacctctcttaccaccagggcctgaatctcatcttctcccatagattgagaattctgaatgctatccttgtatcccttcagaatcttccgatggtttagaattttgccctatgaaaataaacaaggatagtctcgggct

SEQ ID NO: 40004 - DNA, 1073 bp, Homo sapiens
cccacctgtgagtgagaccatgcgttgtttggttttttgtccttgggatagtttgctgagaataatggtttccagcttcatctgtgtccctacaaaggacatgaactcatccttttttatggctgcgtagtattccatggtgtatatgtgccacattttcttgatccagtctatcattgatggacatttgggtcggttccaagtctttgctattgtgaatagcgccacaataaacatacgtgtgcatgtgtctttatagcagcatgacttataatcctttgggtatatacccagtaatgggatggctgggtcatatggtattcctagttctagatccctgaggaatcgccacactgtcttccacaatgtttgaactagtttacagtcccaccaacagtgtaagtgttcctatttctccacatcctctccagcacctgttgtttcctgactttttaatgatcatgattctaactggtgtgagatggtatctcattgtggttttgatttccttttctctgatggccagtgatgatgagcatgttttcatgtgtctgttggctgcataaatgtcttcttttgagaagtgcctgttgatatctttgcccatttgttgatggggttgtttgttttttcttgtaaatttgtttgagttccttgtagattctggatattagccctttgtcagatgagtagattgaaaaaattttctcccattctgtaggttgcctgttcactctgatggtagtttcttttgctgtgcagaagctcttcagtttaattagatcccatttgtcaattttggcttttgttgccattgcttttggtgttttagtcatgaagtccttgcccatgccaatgtcctgaatggtattgcctaggttttcttctagggtttttatggtttcaggtctaacatttaagtctttaatccgtcttgaattaatttttgtataaggtgtaaggaagggatccagtttcagctttctacatatggctagccagttttcccagcaccatttattaaatagggaatcctttcctcatttcttgtttttgtcaggtttgtcaaagat

SEQ ID NO: 40005 - DNA, 1049 bp, Homo sapiens
aagtccttaaggaaacagcaaatcctggaccccaggaaaatttccagaactgtgactgcagacccagggcaggatcaggaaacatgaggaaagcaggtgtggtgactggaccaactgccctcctgaggtctgtcctcagtagggatcttcccttgtgacctgtgactgctgggaggtccccatcaccacaatcatcaaggtgataaatttgtccttcgttttcacatgtgcttcacaaaagagcaagtgttggcacacagggccccaggctaggtcggcctgtgtgtcgacggtgcttcccagtgatgaagcaagtcacaattctacctgtggcttgaaacccacagtggaacaagaaaacccagaccccacctctcaccccttccctacctgagcttttcttcctccacatcgcagcagcaaccacagctccagtgaccacagctccaaggagaaacaggccagcaacgatgcccacgatggggatggtgggctgagaagacggctctgggaaaggagagggaggtgaggggttctgacccccaggcctcagccctgccctgctgaaggtctcctgctttccctgagaggagacaacttacacccctccttaccccatctcagggtgaggggctctggcagcccctcatgctgcacatggcacatgtatctctgctcctctccggaaggcaccactacagccacccacttctggaaggttccgtcccctgcaggcctggtctccacaagctccgtgtcctgggtctggtcctccccatcctgctgccaggtcagtgtgatctccgcagggtagaggcccagggcccagcacctcagggtggcctcatggtcagagatggggtgctgggtcacatgtgcctttgggggatctgaggggaagagtcagaaaattcaggcactttgcattcctcataggacactccagcagcatacatgtgaccatcctgagaatggacaggacacctgggatggggaagggagcacagaacccagacaccagcctggacacaggaatctgggataatctc

SEQ ID NO: 40006 - DNA, 1970 bp, Homo sapiens
atgggttacaaaatagtatttgtaatccttatggtaacctcaaacctaaaaacatacactggatacataaaaaataaaaagcaaaaacctaaatcatatcaccagagcaaactaccttccctaaaggaagacaggaagaaaagaaagaagaagaccacaaaacaaccagaaaacaaataaataacaaggcaggagtaagtctttacttatcgataatacattgaatggaaatatggactaaactctccaatcaaaagacatagactggctgaatgaatggagaaaacaagacccattgatctgttgcctacaagaaacacacttaaactataaagacacacataggctgaaagtaaagagttggaaagagttattccatgccaatggaaaccaggaaaaagagaaggagtattgattttgatacaaaaactatgagacaaataaagtcactatacaatgataaaggggttaatatggtttccatttgtgccccacccaaatttcgtgttctattgtaatcctcaatgttggaggtggggcctggtgggacgtgattagatcatgggggtggatctttcatgactaattcagcaccatcttcttagtgctgttctcatgatagtgagttcttctgaaatctggttgcttaaaagtgtgtagcacctctccacaccacccgcttgccttggtctactcctgctatgtagatgcttgctcccactttgcattattccatgagtaaaagctccctcaggccttcccagaatcagatgccgctatgcttcctgaacagcctgtggaactatgagccaattcaacctcttttcttcataaattaacaagtcttgggtatttctttatagcagtgtgagaacagaataatacagaaaattggtaaagaggagtgaggcattgctagaaagatacctgaaaatgtggaaacagcagtggaactgggaaatagacagaggttggaagagtgtggagggctccgaagataggaagatgaggggaagtttggaatttcttagagatttgttaaattgttttgaccaaaatactgatggtgatatggacaatgaagtccaggctgaggaggtctcagatggagatgagggacttattgggacctggagtgaaggtcacttttgttaggacattgtggttggagacattgtgcccctgccctaggaatctgtggaactttgaacttgagagcgaagatttagggtatctggcagaagaaatttctaagcagcaaagcgttcaagacgtggcctggctgcttctggtagtctgtgctcatatttgtgagcaaagacatgacaagaaactggaacttatatttaaaaaggaagcagagtgtaaaagtttggagaatttgcagcctggccatgttgtagaaaagaaaaaaaccattttctggagaggaattcaagctagctgcagaaaattgcaagtaacaaggagcaaaatgttgatagccaagatagtgggaaaaacaccttgaaggcatttcagataccttgggggcagcctctcccatcacaggcccaaaggcctaggagggaaggatggtttcctgggccaggctcagggtcctgctgccctgcacaacctcaggaaactgctctccaaatcccagctgctccagctccagcttcagctcaaagggccccaggtatagctcaggctgctgctccataggatgcaagttataagccttagtggctcccgtgtggtgttaaattaagcctgtaggtgcacagagtgcaagaattgaggcttgggagcctccaactagatttcagagtatgtgtgggaaagcctggatgtccaggcagaagccagctgcagggacagagccctcatggagaacctctactagggtagtgtggaggggaaatttggggttggagttcccacacagcttcccctctggtgtactgcctagtggagctgtgagaaga

SEQ ID NO: 40007 - DNA, 1033 bp, Homo sapiens
attagttcaatcactgtggacagcagtgtggtgattcctcagagagctaaaaacaactaccatttgactcaccaatcccattactggatatttacctaaaggaatataaatcattccaccataaagacacatgcaagtgtatgttcattgcagcactattaacagtaacaaagctgggcacagtggctcacctcacgactgtaatcccagcactttgggaggctgaggtaggcggatcacctgaggtcggcagtttgagaccagcctgaccaacatggagagaccccatctctactaaaaatacaaaattagccaggtgtggtggctcatgcctgtaatcccagctacttgggaggccaaggcaggagaattgcttgaacccaggaggcagaggttgcagtgagccgagatcacaccattgcactctagcctggtgaaggagcaagactccatctcaaaaaaaaaaaaaaaaaagaaagaaagaaaaatacacattcagaggagacaaaaaataaaaaacaatgatgcatgcccacaggatctagaaaataacttcttaagggcaaatctaggagttattggccttaaagaagagatagagaaagagataggaatagaaagtttgttgaaagggataataacatagaacttcctaaacctacagaaagatatttatatccaagtacaagaaggttatagaacaccaggccaatttaacccaaagattacctcaaggcatttaataatcaaactcccacaggacaagggtaaagaaaggatcctaaaagcagcaagagaaaagaaacagataacatacaatggagctccaatacatctggcagtatatttttcagtggaaaccttacaagccaggagagagtgacatgacatatgttaaagtgctgaagggaaaaaaccttttaccctagaatagtatatccagcaaaaatatccttcaaacatgaagaataaacaaagacttccccagacaaacaaaagctgagggatttcatcaacactagactggtcccat

SEQ ID NO: 40008 - DNA, 1049 bp, Homo sapiens
tcaagtttttttctttgaattttgctaatgttttccttgaattatgagcactgacagaatgtgcttagcacttttggctattcacacagcttttgagcatgatttgcatccaatatttacattgctagcaataataagccatctgtgagttttgtcaaaagttattggggattttttaaattttagaaatgcaaattattgtttctttgaactaactcttatgcagttgcaaaggcatttccagttgttatagtttgtgtacaatatcaggtgttccagattatgattcattattaatatcattgcttccttgttccctctgaggtccagaagattcatgtttacaatatttagaaacaatgttaaaaaggtatccaaagtttgtcactttattattagtttgttcttaatattctgtttaagtttttgaattcatagatatcaaaacgctgcacaattatgatttccacaggaataacaacacactaacaataagaaccaaaaacagcaaataggctgcctacaagttttgacaatattaggataatgataatgacagtttttctaaatctcacagtaaagaatgcagcaacccagcaacactgctacctgtggcctcaggctgcagtgtcagctcttccctgggtctccagcctgccagtctaacctgaaaattatgtacttgccagcccccacagtcacgtgagtgaactggcccaggctggtcaccagggtcagtttctctgtgtgtcattaattcattcagtcttcagcagtctctttggagctgagatgtacctaccatctgccttttgggtgcttagggtggagaaccagaaaagtataacctagtgtgtatcctcaaagagctaacaatatggggtggtacctataggtctggaaacactttactgactctgtgaggcataccaggagacgtcagagaacagtccctcctcaaatgccaaatgagatgcagaagaaatagtttgctcaagttcatgggccagatatcccagtggtcagggagtttcatgaatgagatggaa

SEQ ID NO: 40009 - DNA, 1032 bp, Homo sapiens
catagtactggaagttctatttggagcagtcaagtgagagaaagaaagaaaaggcatccaaataggaagagaggaagtcaaattatctctcttcatagataatgattctatacctagaaaactccatggtctcttcctgagggcttctagatctgaaaaagaacttcagcagagtttcaggatacaaaataagtttacaaaaatcagtagcatttctatacaccaataacatctaaaccgagaaccaagtgaagaatgcagtttcattcacagtagcctcaagaagaataaaatacctaggaatacagctagccaaagaggtaaacaatctctgcaatgagaattttacaagacactgcccaaagaaatcagattacaccaatgggaaaacattccatgctcctggataggaagaattaatattgttgttaaaactgccatactagtcaaagcaatttacagattcagtgtcaaactaccaatgacatttttcacagagttaggaaaaaaaattcaaaaattcatatggaaccaagaaggagcccaaatagccaaagcaatcctaagcaaaaagaacaaagctggaggcatcacactacctgtcttcaaattatgaggttacagtaactaagacagcatggcactggtacaaaaacagacacatagactaatggagcagattagagaactcagaaataaagccacatacctaaaaccatctgatctttgacaaaattgacaataacaagcaatggggaaagaactccctattcaataaatggtgctgggataactggatagccataggcagaagaatgacactgaacccctatctttcgccatatataaaaatcaactcaaagtggattaaagacttaaatgtaaaacctaaaactatgaaaatactagaagaaaacctaggaaataccattttgagcatcagccctggcaaagacttcatgatgaagactccaaaagcaactgcaacaaaaccaaaaattgccaaataagccttaattaaactaaagaact

SEQ ID NO: 40010 - DNA, 1048 bp, Homo sapiens
aatattggagaagacaccacattttaactgagttccagtgatatgacaggctttcaattctctaatctcacagaagttagaaaaaaagtagataatcaaaatccacagaaaatatagaagattccattaactctgagaatgattctcaggtatccttaggacctcaagaaagctgttctctcctgggcctgtagagagttcaagtgccaggaatctaccacaaagtagccgggaggtgcagggcagcagggggcacagtgaagtgctgaagggcttctcagtcttctttaattagagtgagaagaaaagagcacctcctcattttagagtacatggtgtgaactcactctcagctgccaagtgagcttcaccttgggctgttttgcatgctttctcctagtgctttaagccaccctgagatgtacagaccaatactggccatcacaaaaatatactcgagtacatagaccattgacactataaagcaagtaaacaatgaagtctacataacagccaaataacaacatgatgataggatcaaatctgcacatatcaatattaaccttgaatgtaaatgagctaaatgcctcaattaataggcagagagtggcaagttggacagagaagcaagacccaactgtatgtcttcaagagacccatctcatatgcagggacaccaatagcctcaaagtaagggatggagaaagatctatcaagcaaatggaaaacaaaaaacagcactctctgtccaacaaaaacagaatatacattcttttcagctgcacatggtacatactcttaaaatcgaccacaattgctttattggccagaaagcaattctcaacaaattcaagaaacctgaaataccggccaggtgtagtggctcacacctgtaatcccaacactttggaaggctgaggtgggcaaatcacttgaggtcaagagtttgagaccagcctggccaacatggcaaaaacccatctcttctaaaaaatataaaaattagccgtgcatggtggcatgcgcctgtaatcccagctacttcgga

SEQ ID NO: 40011 - DNA, 1051 bp, Homo sapiens
cctgggcaacaagagtgaaactgtctaaaaaacaaacaacaacaacaacaacaaaaacacttattggtgggcaggttctcataagaggccatgggaaagccatgtcctatctcagggacacagggtcatctgggcctctggctaatagaggccaaataatgggactattttccctgtgaaatcctgaaaaccaaaaatggtggcgtctttatctgcattagcagaggtaatttgctccttcttgaaatccaaggtcacgtctactgtctggggattttgatccagggtcagtgtggtttctcctttacaggagagccgagtctcagaaaggtgaggtggtttgtgttggtcattggctacctcagattttagagcagctctaccttgattgtggggttgacctaattttttttgctgtcttctttcttctccaggtgaggaaagaggacttcctgtatatctctatccttttgtttccattactcactttctgtggctgctgctgcagaagccactgctgactgatgtggatacctcaatctttggtttacaaaaagcctaggtgtcttttggcctctctccaggttgatagccatggctcctgaaagaaataaaagatgatcatctttctaaaaagtcttaagtctgaattattagtaacttaactggagaatctcacttttcctactctcgtattttaaccacagttgctctaacacagacctttgaggatcttttcatgacttcattcacaaatacctatttatgctgtacagatgctactaggaaggaaatagggatgtctgttttgactgtggaacttaacttggtctcgtctcttcgtgcatgcaaccctgtccttgggatagctttcttgagcatatctacttatgttcaagaggtaaattgtcctgaaacccccattgctataagtatttattttattactcataatacttaatgctcctaaagttggggtatttttttttttggatacctaaacttcattgagatactttgaactatttatagagaaaacggaaccttctaa

SEQ ID NO: 40012 - DNA, 1052 bp, Homo sapiens
tggagtgcagtggcatgatctcggctcactgcaacctccgcatcataggttcaagtgattcttctgcctcagcctcccagtagctgggactacaggcacatgccaccatgcccagctaatttttgtatttttagtagagacagggtttcaccacgttggccaggatggtctcaatctcgacctcgtgatctgcctgcctcggccttccaaagtgctgggattacaagcgtgagccaccttgccctgcctcctgtggctgtcttgttgagtcatttgtctctgcttttcttgttgctctggtctcagtcttgtgatttactcctagaggtgctggcaagcctgagctcagatttaggaataatggggttgggacaggagaaggatgagatagggactagcagctgatgaaaaggaagggtggacatattcatcgtaggggtttcaggaactccattatctcacactcagcccctttgtcatctctgggatcaacacagtgttatcatcgatcagcccccagattcacttcagtgaatctgtaaagaacaagcatgtcctcctcatcccacgaattctgctgcttagaaagccacctgaaagtgatagcccttaaagtcctcagtctgcccctttagagcaccacagaaagatccctgaatggagatcctgacccttaagtatggaactgctgggaagagctatttggagattatcattacatggagggttagtaacatcactttctcttccctttatcctcatttttttcccttaaaaaaaaacacacacacccacacaaccatttctttgctatttgctgttggtatccagtatgccattgctttcttaattaatgagatacattttcccttcctgtatgcctattttaatggtcaatttctgatatctctaaacatgtctttgttgtcccctccctccatttccacttccactgtcctatttcagttctggactataacaattgcctccctacctttatctgagcatttggtctcactctcttgccacactcccagtctttcccctgtatg

SEQ ID NO: 40013 - DNA, 1040 bp, Homo sapiens
tgtcctcttgaaattcttgaacaagggaccccacgtttttgttttgcacagggattcacaaattctgtagccagatcttggtctaagggaatataaatggtacagcagtagcttctgttacaaaacctatttgtcattcctgtgaatttctaagcagggaccatttttatgcctgctgtctggtactatgcttaccattgaaggtactcaatgaatgtttgtttcaaatgattaaattttcttttccattttaatttttttgacaggtaaaagtcttgcagtgaaaaacccgaggacccttaccgcaagtgtcttttgctcccagctactgatactggattccactcgtgattctccctttcttagcgcattcatgatatagacatcagtctctgagctggaggaggacaaaggcagcggtcctgtgaattctatgctctagcttgggttaagggatttggaattgcacttgtttcagaggtatgttagaggcaggaagaaatcacatagcgggtgtcttgtaggcaggaagagtacttactaggacttgaagactatgttaaaggttcttatgttaattatctattgccctgtttttctccaaagattaatggttgaaaacaataaacttgtattgtctcacagtttgcgtggttaggaatctggaaatggcatagctgagtggctctggctcagagtctaatgtggttccagtcgatatcagctggggctgcagttctgaaagtgtgagcagggctggaggatcctcttccaaggtagctcactcatgtgcctggcagggtgtgctgggtgtgcctgaggcagaaggtgtgtttcctgtcacataagtctccttttagagtgtcttcatggcatggctgctagcatcccccagagcaagtgatttgagagcgagagcagggagaaagctacattgtttttaatggcctaatttcagaagtcacatctgtcacttctgtttgttaaaagcaagtcatcgagcactgaccacactcaaagggaggggaattaggctctgc

SEQ ID NO: 40014 - DNA, 1081 bp, Homo sapiens
attaagtgattttctgtaaagcagtggtttagttaatgccttatttgtaatgtgaaatttacttataaatagcttgataatacgttttacgattaaaaaaatcactgtcactcatgattagtatattttatttcatttaggctaactgcagcatccaagatgcatggtgatgaaattacaattggattatgtctgtatttcgtctggaaaacaggacttgaatgcaaaggcagcaccaagcatatctagagtgaagagtctcaacaagtagcttaacaagatagtttcaggccaaagatgatgtatttagtggaatttagagaatacccctttatttgaagttttcctatattgttgtactggaaatgcttcactgtattcagtcaactagagtgggtacatggaattttgatattgcacctgattttgtcccgtagaacaatttattcctccaacacctccctcaggtgaaaattcaagaatttgcatgggtagtcattctgatgcatatctccaagcttgtatcttcttcccgctgacaatgatgcgttacagtctctggctctatctacatgtgatgtgcaagatgtctgacaaaagtcagagaagcccgttgttgagttttgtctccagatctaaggatcggtacttttgccagattgggctgcttctgtttgaaaaagacaagcgtgggggtgggagagattgctggttatcttccagtacctgtcttcctcttcttcctgaataaaaaattttagctgggcacatggctggctgaatacaagttacatttttcagcatcttatgcaaccaggtatggccatgtgactggccagtaagggtgagcagagatggtgtgtgcagcttctggttcatgccccttgctttgtcccactgtttggagtgcagtacaggtatggcggtaagccctgtcagaccctgtggtgggcccagttccttagggtagtcacctccaaactttgctgcacattagaattagctggggaacttttaaaaatcccggttcccaggtcacaccatgtgtaccaatcaaatgagaatgtctcagggtggaagc

SEQ ID NO: 40015 - DNA, 1035 bp, Homo sapiens
agtcatcaatctttttcttatgaaggagttttttgtttattttttagaaaaaaaataacattcatttctgacagttccagaggctgggaagtccaaggtcaaggggatgcatctggtcagagcctccttactcatgggaactctgcagaatcctgaggtggtatggggcatcacatggcaaaggagcagagcatgctagctgaagcctcttttcctcttataaagccactagtctaactcccatgataacccattaatccatgaacatctcttaaaggccccacctgtcaatactgccacattgaaggttaagtttcaacatgagttttggaggggacaaacattcaaaccattgcattctgcctgtggtcccccaaacccatgttcttctcacatacaactatacttaatccccatatccccaaggtcctaacttgtttcagcatcaactcagaagtccaaaattccatctgtgaaatcaaaacaagttatctacttctaaggtacaacggcaggacgggcataggatagacattcccatttgaaaagggaaaagtaggccaaaagaaagggttaataagccccaagcaagtccaaagcctaagagggcagacattaaatctcaaagctggggaataatcacccttgactctatattcagcatcccccgtacctggaggaattcctttttttttttttttttttctgttgtagagacagagtcttactgtgttgcccaggccggtctcaaactcctggcctcaagcactcttcccaccttggcctcccagagccctgggattacaggcatgagccactacgcctggactggaggggttctttatacagtctgtgatatggatttgtgtcccttcccaaatctcatgtcgaatgaaaatccccaatgttggaagtggggcctggtgggaggtgattgagtcctgggggtggatttccccctggatgctgttcttatggtagtgagttcttgtgagatctggttgtttaaatgtatagcacctccccactctctct

SEQ ID NO: 40016 - DNA, 1066 bp, Homo sapiens
ggatttgcatcatccctttgcccagtatccacagtgtatatgcagcctgcctattagtcacttaatagccttcttatcaattttactgcctaagtatcacagtgcttatattcatggaacccttattttacatgacagtggccccaaagtgcaggagtactaatgatggcaacttggatatacaaaagagaagccataaagtgcttcttttaagtgaaaaggtaaaagttcttgacttaaggaaattttttaaatgctgagtttgctaagatccatggtcagaacaaatcttctatccctgaaattataaaggaggaaaaagaaatttttgctagttttactgtcacacttcaaaatggaaaagttgcagccacagtgcatgttaagcacttggttaagatagaaaagtcattaaaattgtgggtgggaaacatcaccaaaaaaaacttcctattaacagcaatcgggttcagtactatcagtggtttcagacatccaccggggatcttggaacatatctcccaagaataagagggaactactgtagtctgttttcctacagtggtgccattcctgatattttcatatttttaaaaatttgctgatatttttatttataatccttaataattccataacaggtcttgttttgcaggtaatgtttttaaccttttgtcagtagataggcatttacttcatttcctattgatacttagtttcctctttttttctgctacacagtattacaataataactttctgaacacatgtcatgtgctggtagatttttgtgagaaaggtttctgggtcgaaggatatggcatgtttctaatttgatggatgttgccatattgctttctcagtaggctgttaacctttacatttccttacaacaatgtatgatcctgctcccttcccacttgcccagcaaagatacatattatttatgtttttatttttttcccagccaataaagagaagtcttagttacttttaattttctcttcctttagtaattttgattatgttactgtttgccattcagattttctgtgcattttcaatt

SEQ ID NO: 40017 - DNA, 1295 bp, Homo sapiens
ttgatttataccaaaggattttcaacacaggaatatgcaaaaatgaactgtaataatgggatgtaattaaacaaattttaaatatacatttttaatatttttatatcaataagggaaaacagaagcaatcttgaaatgactgagtcatatagagcaaatgggcatataagcagtgtaggtaggaaactggttgaggtcagatatgatgagatgggagggatgaaggcggggtttaattgtccaagacttgtgagattcttactcatgaaaaggcaatatatctaatccccctccatttttttcattttttattatgaaaaatttcaaacatagagacagtcttcagcttgctttttatactttatagtggcttttattgttccagtttggtgacatagagctacctcactctttttaaagtctgcattattcattttgtagacatgtgatttattcaacaattttgagtagacatttaaggttctttccacatcttattaaataaaggctgtcgagaacatccttgtacatatctctttagatcgtcgtgccattatattagtaggataaatttctggaagtttggctgctgggttcgaaggcatggaaatttaaaattctattagatttttacaattatctttccgtaagtgcctggcaaggtgtcagagccctggcaccgggaagtggtcaactcgcaggttggtaaaatgaatttaccatacctacaaacagtataggtttgaaaaaaggaaagtttattagaaaggaagaactgaaacagcctttgcaaaatgatgactgagacagtgaaagaaatctaacgtaaccgactccatcttgcttctaagctccaagctgttcttgttcattcctgggcgtaggctgaactaactttgggagaaacttagtttataaacaaagagggtaacagccctttcccaaagcagacttccttcttgtctgaggactagactaacattagccacaggattagaatttttggtttagtagtcatgcagctggaggctgcaagattctgaccctccctaaactgctcctgtgatcagtgcttgaggtattttgcagaccccgtacttgatgggtcagctggcactacccacatcaataaactggctctttttttttttttttttttttttggagacggagtcttgctcttgtcgcccaggctggagtgcaaatggcacgatctcggctcactgcaacctccgcctcccggattcaagtgattctcctgtctcagcctctcgagtagctgggattacaggcac

SEQ ID NO: 40018 - DNA, 1061 bp, Homo sapiens
ttatctggccctttgttcacttcttacaatcattgatacagtcaacaaaaattggttaaaaacaatatatgccagacatatatccctgagttctgggacaataaccaaaattgaataaggcaatatcctactctcaagcaatagagggtaggaatagaataataataatataatacaatagctctatagcagtatgtaaactataaaagcattattttacgtgtttctattgaactgtcataactaaataagatggttagtactataattatcccaaggattcattcactcatagaacatttgttgagcaattactacctgccagtcacttccaagtggtaagtgagatagaaatggttctttgtggcgctcacaatttattggagaatggaaacacaattacaaaaaaaaagtgtgataagttctgggagaagggtggtacaggatcctgtggggtagtggtggctccatataggagggacattgggatactgatcaggaaggagtgggggacagggctagaagctgcattagtataaagttatgtcagactgccaaaacaaaacaaacacaaaaaatcagtagtctgtggtaaagaattgctataggaacagccagtaggggcagttaagctggtcttggtgaatcaggggaagcgtcctagaggaacagatgtccatgctgaggccaaatgctggacaggagttagccagacagggaaattgcattctgggcagaggagacagcaaaggtcaagaaacatgacaactttggaagactgtaacttgttcagaggcagagggtgcaaaggagaaatgaggaaaggtgaagctggagaggtgggcttggtccagctcttgctgggccttttcagccgtgttaaagatttagactgtatccagagggatgttgaactttaagcctaagactgaaaaggtgagaattgtgccttagatcactatggttgcagtgtggagactggtttggaaaggggagaaatcagaggcttttacagccatcccagggagagagaatgaacaccagaattagggtaatggaag

SEQ ID NO: 40019 - DNA, 1052 bp, Homo sapiens
cgagtatttgaggtacataggggcgggcacagaaccagcctcctgaattccatttactctggtttgggggtggaacaaagatgatccagtgcagggtctgagctagaacctagcaggtggccagaaccattttagggtttcacctcagcatttcggcagaaatcagctctctcgtgagtcagggcaccttaggctttgctgtatatccctttgttaagccagcagctagactcctagattgaattcttttagaaatgggagaatgagcttttttattgactgccagtgttgtctgtattggatgatagcaaaaagtgtagttggacaggttgcccactagatggagtgagaagtaccagactccttttttctctaaagcagatcctttcaggatctgagtcactgggcagtttctctaatgcgagcagacagaccctgttaaccaaggagcaaaggaaagtatatttaaagaggctaaggtgtttggccacatattgctttaggttcatctccattggtctcagtgtggacataactcctggaattcactccagtgcaaagtttaaataataccagcatgagaatgtacttgaaggtttcccaaaatgtgctagacaagaaagagaaaaggtcccagctgagagaaaaatccacctgtctcccatctggggctctttggcctcactgatagaaaaggaaaaggggcccaagctaagcttactttgagggttcatgatgttcagagatgctcaggggacttctccgctgcaggaggtggggtgaggacattggattcatttcctcaaaatatggagagaaaggagaaaaatcagaattctatttgtacctctgcttcctgtgctgtttatctttgcttgtctttatctttttccacctcaggggtttcatcaggggtatttgggagagtctaggggtggggatgaagaattgactgggagctgaggaggggggatttttatgctgaagacctggcaggaggcaactcctgacacccccacagggttagactgtaaaacctcttccatgacttg

SEQ ID NO: 40020 - DNA, 1130 bp, Homo sapiens
accttattagcccctagccccttgcccggacgggcttgacaggcatgtgcacatccctcccagacccctcaccgatgggactcccatcctcctcatctccagtctcttcccgctcgggcagcgggggctgctgctgtgtcggtggctggtgatgattctgcttctttcgtttcggcatcgtgtctgcggcaatggctgcagcgggatttggagggtagtgaggaaggggcacgcggggattctgtttccgcttccggggggtcggtgggcagcaatgctgaggctcccgccattccacttccggaaggttgcggagaacatctgcggcggccgcattccggagccaactgcctccctccgtctctgccaggcatggcggcaacctcacaccttccctttgctgcgtttctataaatgctttgaaaaaattactcttttcttccctcgctggaaaacaccacaaccagctcctcagagtgtgtcacagagtcaacaggctctcgggccagagggcctgagaagaggactgtcgcaccgtaagatcgccacatccggtcctcggttactatggtaacagctgcaggcacaacttcgtgccctttgacctccccccaaaagtccttgtcccgcttgggtttcccttctcgcccgcttttgcacttatgatctgtaaacctgctccttatcatcgttcccacaaggaatttgggtcccaacaggtcggcacccaggactctcagaccgccgccctcccctaaagacctctgaccgtgcccccggtgtagtccagcaacctggacgcagtctcggctttccactaaggtcaagcccggggctttgtagtatagcctcagcgtgtccacgccccctctcccctaggtagtaggccccgccctccgctccgccgccccctccaggtgagtggtaggttctcccgggagcgcaaggtagtgatgacacgcgccccccctcctccgaacgcgagttggtagcgtccgtgacggagttagcctggtcctcccacgcgcgcctccttcctcgccgccggggcgccctctcggtgccactggctctcacgtgccagtagcccaccccgcatcatcctctcgcctcgctcctggagggaagtg

SEQ ID NO: 40021 - DNA, 1069 bp, Homo sapiens
gtcacccaggctggagtgcagtggcacggtcttggctcactgcaagctccgcctcccgggttcacgccattctcctgcctcagcctcccgagtagctgggactactggtgcccgccaccacgcccggctaattttttgtatttttagtagagatggggtttcaccatgttagccaggatggtcttgatttcctgacctcgtgatccacccacctcagcttcccaaagtgctgggattacaggcatgagccaccgcacctggccaggagcaaactcttatgggaatgaatgtccctgggaacgagaagttttttcccttctcttttattatttccctccattttcctttgatttcttggtatcccttactttttgtacctctggaactcccgtttcaggggtcacttaggagtaattttagagataagatagggacgtgtgccattctgtgactggtcaggggcacctggtaaggtgatctgtcatgttcacaagggctcacttcgtcagctacctgagctataattcacatccaaagctatggcttgcctgccatgagaaacctagaataacaacaagaatatcctgtgtgaatcctcctgcatgtgcttcctggtcctcttgagcttatcgtgtcctaagttgaggcagggtcttcactggctcattttatgcctggactgtgtttgcaggtgtaggattatgaaggaggtctgatgatgccatttggtgctctttctttttgtagctatggagggcctgggctttctggatgctcttaattcagcccctgttccaggcatcaaaattaagaagaaaaaaaaagtactgtcacctacggctgccaaggtatgggctcccagaagtaggtttcagtgacagagtataaaaggtaaagtagaagaaagggcacagcagctaggagttgtcggggaggacaacaagaggcgttttgccttggatatagactggtgcaggtgagacattgtggagacagagtcttcctttatataggaactgttgggggactgtgcctgggaccctggactaattgccttgcccttggcttt

SEQ ID NO: 40022 - DNA, 1064 bp, Homo sapiens
cagaggtttttctaatatacccagtctctattttttttttaacattaacataaactaaacaggatccctgtccttaaacagtcaagtgaggataggtcaagggttgtctgggagactagatcatctgtaatctcagcactttgggaagctaaggcaggtggatcacctaaggtgaggagttcgagaccagcctggccaacatggtgaaaccctctgtctactaaaaatacaaaaattagccgggtgtgatggtgtgcctgtaattccagctacccaggaggctgaggctggagaattgctggaagccgggaggcagaggctgcagtgagctgagatcacgccactgcactccatcctgggtgacagagtgagactccgtctcaaaaaaaaaaaaaaaaggaactgattatagtttgggtcctttctcatttctctcttaccggtaatgctcgtctttgtcacgcttgtagaaccgcaaaaagagcaagtggacgggcagccccacaagccgccaccgggcttgcagggtccagttctcagggtggcgggtcagctgtaaaacctccaaacgaaggtgtgcaaaataattccaggccaggaaacggcagagggtcagtgaaagaatgtaccatgtccggcccctgtgaagaagggatgggaaagaaatctcatgatggcagaattagaaaaccaaactggcttctaaggaatggggaacagctgtgagaagcagtctaggaacttctctgggaagtgaaaagggtcatgtatatacctttgggtgcttttcctccccagtgccctacctgtgccccaattctcacttggtacgtatgttgaggatctcattgatgaattccacatccaaggaatacagactgtagtcgtgggactgaaggaagagcttgggaagctaggtggaagaagatggcatcaacccagtgggaaagaaaagataatcctatttttcagttttctaatttttttttttttttgagacggagtctagctctgtcgcccaggctggagtacagaggtacaatctcagctcactgcaacctccg

SEQ ID NO: 40023 - DNA, 1023 bp, Homo sapiens
ggtatactaccatgtgctggggctgggcgagcctctggccctgaagtctccccgggctctcagactcttctcccacctgcgccacccagtgtgtgtggagctgctgacagtgctgtgggtggtgcctaccctgggcacggaccgtctcctccttgctttcctccttaccctctacctgggcctggctcacgggcttgatcagcaagacctccgctacctccgggcccagctacaaagaaaactccacctgctctctcggccccaggatggggaggcagagtgaggagctcactctggttacaagccctgttcttcctctcccactgaattctaaatccttaacatccaggccctggctgcttcatgccagaggcccaaatccatggactgaaggagatgccccttctactacttgagactttattctctgggtccagctccataccctaaattctgagtttcagccactgaactccaaggtccacttctcaccagcaaggaagagtggggtatggaagtcatctgtcccttcactgtttagagcatgacactctccccctcaacagcctcctgagaaggaaaggatctgccctgaccactcccctggcactgttacttgcctctgcgcctcaggggtccccttctgcaccgctggcttccactccaagaaggtggaccagggtctgcaagttcaacggtcatagctgtccctccaggccccaaccttgcctcaccactcccggccctagtctctgcacctccttaggccctgcctctgggctcagaccccaacctagtcaaggggattctcctgctcttaactcgatgacttggggctccctgctctcccgaggaagatgctctgcaggaaaataaaagtcagcctttttctacatatggcatgcagtctgtcagtgtctcccaagctacagggctgagtttgggaaagaaagccagagggagcctgggagcaccgaactggagtctgggcagccaccacgccctctggcaaccgctggggtt

SEQ ID NO: 40024 - DNA, 1035 bp, Homo sapiens
cccagaccacgaattagaagatatgtggaagaaagaactcagggcgttagaaaggattggggtatattgatacaacttgtcctggaacatgggtgggaccagaaatctttatgaataaatgaaaagataagggatttggaagccacaggttgttttttgtttgtttgtttgtttttttaatggccattttattttatttgtatttatagttttttatttgtatagatttaggggatacaagatttcttacatgcatgtattaaatggccattttaaaattagctagtttcatgctcagatgtcataagtggcagctatctttagccagactgttgcagttattgctcgatgccactcatggtgtcctacctcctatttggaaaccatctctatttttttcttactgagattcttactttggggtcaggaacttgaagggatgcttggagtgagtagatttgagggtccagttatggagtgctactaaaacattttcttctctcctggcctctggaagcatctttagctttgactttgggcaagtctctgtacttttctggccagcttttccaggatttataaaattagagcttcggcttgacctctgtgataaataaatattcactctgtgccttatggtgtagtgtagttttttaaaatgtctaggtctcaagacacaaacttaaaaaaaaaaaagtcatagacttgtatttaattcatcattatcttctatttaggacaatttgtatgacatttcttaagatttttttttttttcttgagacagggtctcatctctgtcacctaggctggagtgcagtggcaccatcttggctcactgcaacctccacctcccagttcaagcaatagtcccacctcagcctcctgagtagctaggactgcaggcacacaccaccatgcctggctaattttcttttttttattgtttagtagagacggggctctactaaatttttgtatttttggtagagatgaggttttgtcatgttgcccaggctggtctctaacttctgac

SEQ ID NO: 40025 - DNA, 1051 bp, Homo sapiens
ctacgtctcaggctactaggggaagaacagatagatcctctgtcaagactcctgaaacagttgtccccacagcccctgagctacaggcttccgcctccacagaccagcctgtcacctctgagcccacatctcggaccactaggggaagaaaaaatcggtcctctgtcaagacccctgaaacagttgtgcccgcagcccctgagctccagccttccacctccacagaccaacctgtcacccctgagcccacatctcgggccactaggggcaggacaaataggtcctctgtcaagacccctgaatcaattgtccctatagcccctgagcttcagccttccacctccagaaaccagcttgtcacccctgagcccacatctcgggccactaggtgcaggacaaataggtcctctgtcaagacccctgagccagttgtccccacagcccctgagccccatcctaccacctccacagaccagcctgtcacccccaagctcacatctagggccactaggagaaagacaaataggtcctctgtcaagactcccaaaccagttgaaccagcagcctctgatcttgagccttttacccccacagaccagtccgtcacccctgaggccatagctcagggtggtcagagcaaaacactgaggtcttccacagtaagagctatgccggttcctaccacccctgaattccaatctcctgtcaccacagaccagcctatttcccctgagcctattactcaacccagttgcatcaagaggcagagagccgctgggaaccctggctccctcgcagctcccattgaccataagccttgctctgcacccttggaacctaaatcccaggcctcaaggaaccaaagatggggagcagtgagagcagctgaatcccttacagccattcctgagcctgcctctccccagcttcttgagacaccaattcatgcctcccagatccaaaaggtggaaccagcaggtagatctaggttcaccccggagctccagcctaaggcctctcaaagccgcaagaggtctttagctaccatgga

SEQ ID NO: 40026 - DNA, 1027 bp, Homo sapiens
gatagaggcttgtccaaaggtagtgagttatctcaattgattgttcagtcagttacagattgaactccttgttctactctttacctacttctcactattgcacttgattagtctttctttcttcctttctttccttctcttctcttctttcttctctcctctcctctttgagaccgggtcttactcggtcccccaggctagagtgcagcggtacaatctcagctcactacagcttcaactgcctgggctcaagcaatactcccacctcagcttcctgagtagcttggtctacaaacatatgccaccacgcctggctaatttttgtatgttttgtagagacggaatttcaccatgttgcccaggctggtctcaaactcctgggctcaaaggatccttcccgcctcagcctcccaaaatgctaggattacaggcgtgagccaccatgcccagctgactaggctttaaaaaaaaaaaagatggagaaaataggaacggaaaccagagcatcattttggaaactggaagtcagtagtaattgactaagcaggtatgacacagctgagcttgaaacctgcaaaagggaaaacaatgaaatgatctgaggctcaggagctggcagcacccagtgcttctccagctgtggtagactggttaaataagaggaacatgtgaaaagcaccttctcagagcccctcactgcctctgggtaatggttcctgccctgctccaacagacatctggaggtttattatcttatttatctattttatttatgttttttttgagacagggtctctcactctgttgtccaggctggagtgcaggtgcagtggcgcagtctcggctcactgcaacctctgcctcctgggttcaaatgattctcgtgcctcaccctcccaagtaatcctcaactgggattacaagtgcccaccaccacgcccaggtaatttttgtatttttttttttttttttagtagagaggggtttcaccatgtcggccaggctggtctcgaactgctagcctcaa

SEQ ID NO: 40027 - DNA, 1025 bp, Homo sapiens
catcaagatgtctcagagaggcggctagacacccagagacctcaagtgaccatgtgggaacgggatgtttccagtgacaggcaggagccagggcggagaggcaggtagggatccatccacgccgttttctcaggcttgcttgctagtgacccttcctcactggaataaactccttaccctatttcggccctagtttccagaacgtactcatttttatgtaagcaattagttcctacagtgcataaataataaagcagtgtgctaagtgctagggatgaggataacaatagtgaataagacaaatcctgacttaaatttgtaattaataaggaatctaaaatcctaagaggggagatagattgaccaccagctgatggtaaagcatggtatgaggcaagatgaagaagtgcaaactagaggtagagacccagcactgtggcagtgtgggttcattctgatggaagaaagcctttacagaggacatgctgtgggagctggccatgctgtcgtattatctgtaaacattcttattcttgtttcatgtgtcttttcccagatgtactgggatatcattctgccattttgctccagaataggattacattagaagaagcagcatgatgaagaaggaatactagactgggtgtcaggagacagagactctatttctagtttggctaccagctagaggacatttggcaagtcacttaatttccctagcctacagatcgctgctactaaagaaagaaagaaagagcgagccagatatggcggctcacacctataatcctagcactttgggagctgaggcaggaggatcacttgagcccaggagttcatgaccagcgtgggcaacaaagcgagactccgtctccacagaaaataattagctggctgtggtggcatgcatttgtagtcctagctactcaggaggctaaggtggtaggaccccttgagctcagaagttgaagactgcagtgacctatgatccagccactgcattgaggcctgggtgacacagtgat

SEQ ID NO: 40028 - DNA, 1141 bp, Homo sapiens
ctaccccaggcagcaacagtgcccagggctctgatgagtctctcatcacttgtaaaggtgagattctggggagctgaagtggtcgggggtggggcagagggaaaaggcctgggtaatggggattctttgattgggacgtttcgagtgtgtggtgggccgttcagagtgtcatcgcttaccatgactgacctgaatttgttcatgactattgtgttctgtagcctgagacagctgcctgtgtgggactgagatgcaggatttcttcacacctctcctttgtgacttcaagagcctctggcatctctttctgcaaaggcacctgaatgtgtctgcgttcctgttagcataatgtgaggaggtggagagacagcccacccccgtgtccaccgtgacccctgtccccacactgacctgtgttccctccccgatcatctttcctgttccagagaggtggggctggatgtctccatctctgtctcaaattcatggtgcactgagctgcaacttcttacttccctaatgaagttaagaacctgaatataaatttgtgttctcaaatatttgctatgaagcgttgatggattaattaaataagtcaattcctagaagttgagagagcaaataaagacctgagaaccttccagaatttgcatgttcgctgtgctgagtctgttgcaggtgggggtggggaaggctgtgaggagccgagtgtggacggggcctgtgcctagttgctgttcagttcttcatgggctttatgtggtcagtcctcagctgggtcaccttcactgctccattgtccttgtcccttcagtggaaacttgtccagcggaagctgtgaccacagaggctcacccatcgcccagggcagcccctgcacacgggagtccctgtgctttctgagacaaattttcagacccattcagctcctgccctccttctagggctcctcttctgctttggtctcctgccctctctcccttccctgattccagtgatcttcgtgctgactccaatcccaactcatgaatctaaagcagagcctaatttagatttgtatttgtttgtaaaattgggtccatagtctagaattgttccttcctgaagagagaaacctgatcgtgtgctgcagtgtgcaggg

SEQ ID NO: 40029 - DNA, 1030 bp, Homo sapiens
ggcatgagttttcctgagtttcctctgagggccccctctgctctctaggacaattaagggatgaagtctctgaggaaatggaggggaagacagtccctggaatactgatcaggggtctcctttgaccactttgaccactgcagcagctgtggtcaggctgctgacctttctctcaggccttgttctctgcctcacactcaatgtgtctgaaggtttgattccagcttttctgagtcctgcagcctccactcaggtcaggaccagaagtcgctgttcctccctcagagactagaactttccaatgaataggagattatcccaggtgcctgtgtccaggctggcgtctgggttctctgccgccttccccaccccaggtgtcctgtccattctcaggatggtcacatgggcgctgctggagtgtcccaagagagatgcaaagtgtctgaattttctgactcttcccgtcagaacccccaaagacacacgtgacccaccaccccctctctgaccatgaggccaccctgaggtgctgggccctgggcttctaccctgcggagatcacactgacctggcagcgggatggggaggaccagacccaggacaccgagcttgtggagaccaggccagcaggagatggaaccttccagaagtgggcagctgtggtggtgccttctggacaagagcagagatacacgtgccatatgcagcacgaggggctgcaagagcccctcaccctgagctggggtaaggaggggaatggggggtcacatctcttatcagagaaagcagaagtccttctggagcccttcagccgggtcagggctgaggcttgggggtcagggcccctcaccttctcctcctttcccagagccatcttcccagcccaccatccccatcatgggcatcgttgctggcctggctgtcctggttgtcctagctgtccttggagctgtggtcaccgctatgatgtgtaggaggaagagctcaggtagggaaggggtgaagagcggggtctgggttttcttgtccc

SEQ ID NO: 40030 - DNA, 1154 bp, Homo sapiens
ctcccacgagaagaggaggaaaatgggatcagcgctagaatgtcgccctccgttgaatggagaatggcatgagttttcctgagtttcctctgagggccccctcttctctctagacaattaaggaatgacgtctctgaggaaatggaggggaagacagtccctagaatactgatcaggggtcccctttgacccctgcagcagccttgggaaccgtgacttttcctctcaggccttgttctctgcctcacactcagtgtgtttggggctctgattccagcacttctgagtcactttacctccactcagatcaggagcagaagtccctgttccccgctcagagactcgaactttccaatgaataggagattatcccaggtgcctgcgtccaggctggtgtctgggttctgtgccccttccccaccccaggtgtcctgtccattctcaggctggtcacatgggtggtcctagggtgtcccatgaaagatgcaaagcgcctgaattttctgactcttcccatcagaccccccaaagacacacgtgacccaccaccccatctctgaccatgaggccaccctgaggtgctgggccctgggtttctaccctgcggagatcacactgacctggcagcgggatggcgaggaccaaactcaggacactgagcttgtggagaccagaccagcaggagatagaaccttccagaagtgggcagctgtggtggtgccttctggagaagagcagagatacacatgccatgtacagcatgaggggctgccgaagcccctcaccctgagatggggtaaggagggggatgaggggtcatatctcttctcagggaaagcaggagcccttcagcagggtcagggcccctcatcttcccctcctttcccagagccgtcttcccagtccaccgtccccatcgtgggcattgttgctggcctggctgtcctagcagttgtggtcatcggagctgtggtcgctgctgtgatgtgtaggaggaagagttcaggtagggaaggggtgaggggtggggtctgggttttcttgtcccactgggggtttcaagccccaggtagaagtgttccctgcctcattactgggaagcagcatgcacacaggggctaacgcagcctgggaccctgtgtgccagcacttac

SEQ ID NO: 40031 - DNA, 2389 bp, Homo sapiens
acgtggaggtggcagtaagctgtaattgtgccactgtactccagcctgggtgatagagagagaccctgtatcaaaacaaaacaaaaaacaaaacctgccttctgggattgggcttctggtttttttcccatgacacacgcatcctttcctattttgtcctctgggtcttcatattaactatcttcccccaggatagtataaaaagtgttaggaaagttgggctttggagttgtggtaatttctgtctttgttactttcctccccttcagggggttttttaattttaaagatgaatgcagtgaggtataatggtgtgtgcctgtagtcccagctattcaggagactgaagcaggaggatcacttgagcccaggaatttgaggctatagtgtgctatgattgtgccagtgaatagccactgcactccagcctgggcaacatggtgagatcctgtcccttaaaagtgtatctgctgctctgaatttggtattttaacaccacttactgatacctttcctgtaaacctgtagatggtttaattcttagtcaagagaccagtctcatctaaaactatcctgttgtggtctgacggcaagtaactcatcttgagtaatttttgtttctccttaagtggcattttgactgtccattgcagcattctgatcttaaaagacatccactttgctaatgcacacgagattctcttagttgaagtaggagaatcaaatggagcagttgtcctccccccaccccatgttcttagaagcacctctgatggagttattctgaccttgagtcactgcctcccatcatttcccagatgtttggtccttgctctccctttgagaatcatctcccattttctttcctctcccacctctatttgaggtaatggcatctgtgccattgggtggtttcactgctccttgacttcatttgcagtttctttcccatgatagtttttagttgggcagtcttaaaactcatctgataggaaggaaattagatgtaatgtgagagagaccacagtaaaatgtgggtatttttgggagtggggtggggttttcaatcttctctttcctccccatccccccatggggtgtattggagatcaacttcctccacccccccaggtttaacccccccactctgccctcctcccgttccccacccccttcctcccccccagccaatggagatcttcgtggatgatgagacgaagttgacgctgcatgggttgcagcagtactacgtgaaactgaaggacaacgagaagaaccggaagctctttgaccttctggatgtccttgagttcaaccaggtcagttagacgtccagtagggggatgagcattggagcactccagctgtagcagaaacctggatattaagtacacttttattgaggaaatcacatgtgtgatgtgggagagaataatgagggtataaatatcttaggggctgagcatgagtaaggtgggagctgcttttctattctatggctggcacgggtatgtcctcaataacctcaaggaaaataaacttcaaaaattaagatccttggccaggcacggtggcttatgtgtgtaatcccagcacttggggaggctgagggaggtggatcacttgagtccaggagtttgagaccagtcggggcaacatggcgaaacttcatcactaccaaagaagaaaaaaattagccaggtgtggtggtgtatgcctgtagtcccagatactctggtggctgaggtgagaggatagcttgagcccaggaaattgaggctgcagtgaactatgattgcactactgtgctccagcttgggcaacagagtgagatcttgtctccaaaagtccttgaaggattttaggaagttgttaaaagtcttgaaacgatgtttgggggcatgttagggttcttgaatgtttaattcctctaataactgcttattcaagagaagcatttctgactgggtgcagggcagtggctcatgcccataatcccagtactttgggaggctgaggcaggagcattgcttgagcccaggacttcaagaccagcctgggtaacatagggagacgcccgtctctacaaatagtaaaaataaaaaataaaaaaagtagctgggcgtggtggtgtgcacctgtggtcccagctgcttgggatgctgaggtggaaggatctcttaaacccaggagggtggaggctgcagtgacttgcgattgcaccactgcactccagtctgggggacagagtgagaccccatctcaaaaaagtgtttaattaatatacttgtgagtggtctatttgcatttaaaactgctttctagaattaggatagctcccttaggtttaatgttttggtgagcaggaatatcagttacccctccagat

SEQ ID NO: 40032 - DNA, 1953 bp, Homo sapiens
gctttattttatttttatttattttatttctttttgagatggagtatcactcttgttgcccaggctggagtacaacggtgggatcttggctcaccacaacctctgcctcccaggttctcgtgcctcagcctcctgagtagctggaattataggcgtgtgccaccacacctggctcctttattttttaaatgaagcctggcctcataaatgaaggaagttggttagattaagtcagtagaactgaattattgtcctgactgctccgactagccatgtaactttaggcaatcaccctcagtgtttggtgggggggacataaaatttttaaattaggtgccctctaaagttagttttagtttggaaacatgctaaaaattggtttagctcaaacagagtgggaaccctggggggattggactctttccttcctctgttttgagactctttgcttctggctcggcaggttgctgttttttttggtggtctgtctatcaagaaggatgaagaggtgctgaagaagaactgcccgcatatcgtcgtggggactccaggccgtatcctagccctggctcgaaataagagcctcaacctcaaacacattaaacactttattttggatgaatgtgataagatgcttgaacagctcggtgagtggcagtgctggggcttggctaatgctggggagttgttctttggagccaaatgatgtttatttgaaacaggagcacctcagtgcaaggacgactcttatctatcacccatgactgatggctctgggttccctggttggtctttattatgcttttaagcacagtaaagggtgtcatctatcatctttctatgatttttgtttttaacctttgagaataggggactttgataattttaggcataagtcatcaccaccaccaccgttttcattatagattcatatactgggagtcatagcggagattctaaactgaaagagaagacagtacccttctggcatctccagcacagcatttacagtcagaatttatagctgaataagtgtctagactcaggtctgggattaatgtagagagtgtttgtagcagtttgtgtgatgtggtattctagtgtgccaggtggggttaatggaagatttttctgtaagaattgaatcttggtgaatgagagtggggttggacataggccccataagtcattacaaatgatctttggcaattctatatggtgagctataaaggtgggctccaggtagggatgtcatatttgcctgacttgatagaaaagtaatccagagagtcatagatggactctgatatctggaatataatatgtgcttgatatttgtagtctgctgaaggctggctggggcttgggcaggaaagggttgggagaaggtcccataaagcatgttttgaaggccttgagagcctctgcactgggctttatccccatttcatagttgggaactttggggttttaccttatttcttgcttggttaaaacaaacagctggaatctgatcccacttcttgattccaagtccattgctctttccattgtgttgttactatttccagcaatcttcacctcactgggaagtctacctctaatctttgtttatcatacctgcttattttctcctacaatttttttccttgttcttgtagacatgcgtcgggatgtccaggaaatttttcgcatgaccccccacgagaagcaggtcatgatgttcagtgctaccttgagcaaagagatccgtccagtctgccgcaagttcatgcaagatgtaaatacccttctaccttctctccctccactccccgcccgctgcctcctccccttcctcgccctcttcctcagactcccttgtcattcaagtgccaagaaggcggcttgtgcccaactgggagtaatgactccttgaagagacatacagaagcagagacagctagtgttagg

SEQ ID NO: 40033 - DNA, 1021 bp, Homo sapiens
tgagtggtaagaaatgggcttggcatggtgaaaaaggtagagttatctggagactgaagtctaatttatcttcctccccccccaacttttagtccagcatgagtgcatccctcaggccattctgggaatggatgtcctgtgccaggccaagtcgggcatgggaaagacagcagtgtttgtcttggccacactgcaacagctggagccagttactgggcaggtatatttggggagagtgctggggaggggattttggttaggactataagggaagggtgtttttgtcctagctacatgatgcttgcagagccatgagcacatgacctctgttacccttgacaacctgacagctgtgggggatgttctgtcgcaagcgtggggttcatgatttagatcacataattgaagtcatttattatcggcccaggtgtgtttttgtgacagtcacttccctagaggggataatgaagagctacatttaccatatgtctccgtctacttcctgcctaaggtgtctgtactggtgatgtgtcacactcgggagttggcttttcagatcagcaaggaatatgagcgcttctctaaatacatgcccaatgtcaaggtaagccaaggtaaagagacctgagagtgagggtgtggcaagttggagggataagaaacttgtaggccaatagtctctttaattttggagaagctttagtttgctgtggtgtaacagagtgttgagttcctatgtaacaggaggattcgtaattgggctatggatgatgcttaacacaagaccacccttttcttactactttatactgactttgaatcatatcagtttaataattttggggtatgtggcagagaaagccggaaactttaaaacagctccagtggtgtgtgaatattgaggattctggccaagtgcacaatggcttacacctgtaatctcagcagtttgggaggccaaggcgtgtggattatttgaggtcaggagtttaagaccaatgtggccaacaggatgaaaccc

SEQ ID NO: 40034 - DNA, 1904 bp, Homo sapiens
tcagcatcaatgagaggcggcgctcggcgtcccttggtcttggtatttgcggagggcggggctcttctcaccttccttgtcctttcttgagctctttctcggccctcggtgggactgggaggaggagctggtttctgggcccagttggatttttctcaccttgacttgcccaacttaatttggagtgccttccaagtgtttacgatacgattggtgtcattgtatgtttctccaaaaggagtctcaccttcgtagcgtaacagtgatgtgagaccacttggtaaagatcctgttaaagcctgggcggggattgcctttctctgtcacctattagctttcttattgtagggtggagacatgaattttgtttttttgtggccgagccatttgtcttgcaccgcccctcccccccatgctaattacacaaggcttgcttaaacagcggaagggaggatactgagaagtgggaggctgagagctatgggaggtggacggcggccatatgatgttttcttttcgaaaggtgagcgctttgcgcagtgatgaccctcatctatcacccttgactgatggctgctgagttaggcatccataacggtgggattataatagggaaagcggagtcttcctttgaggacttttcaggactctacttgtcatctccattttccactttactaagttattagtcgtattttaccttttattatctattctatttcctcactgttactttcagatcaagaatttataagttggtcttccccttccaacttttctggtttccgctactgtgattgctaatcttgttgggaacctctgtcctaaccactttccctggtactgctttttctgttctgttatatttgcttttcgtttttatgttttgtatctgtttttctttccaggtaaaagtttcctggtttagggaaagtgggaactggggatggaaaagaggtggtgaaggctgtgctcgtgattaagtcttgcttttttttttcccccctccagctcttctgttagaaatagtatctttgttttcctttgctgttcctcaatcccctactcttcaccccttgttttcacctattttgcgagaacccatccagatcccccttcccttcttcccctgccggcccagttatggcagagaacgatgtggacaatgagctcttggactatgaagatgatgaggtggagacagcagctgggggagatggggctgaggcccctgccaagaaggatgtcaagggctcctatgtctccatccacagctctggctttcgtgacttcctgctcaagccagagttgctccgggccattgtcgactgtggctttgagcatccgtcagaaggtaaattttctcttgggcatgtagtgctcattgggctctttaagggtacaatacaaagatgtgtttgtcgttgctcaggtggtggtaagggtttatacttaaggctagatcagggccaggtgcagtggctcacgcctgtaatcccagcactttgggaggccgaggcaggagggtggccacttgagctcaaaagtgcaagagaagcctgggcaacacagcgagactcctgtctctacaaaacgttcagaaattaagcaggtgaaggttgaggcttcagtgagccgtgattgcaccactgtgcaccagccggggcgacagtgaggaagaaaaaatcaggggataagtatcaaaaacaattttggatagaggaggcttatacaggcttattctttctttcgtgatagcaccaaagtgctaatgatccaaaagtgacttccaggtctgccattcattcttgtgactggcttttcttgtctgcttatttttaattttgtcacttgacttctaattttaaatttccagaaaggtcctgcttggacctgtagtctcc

SEQ ID NO: 40035 - DNA, 1046 bp, Homo sapiens
aggatggagcttcagctgagacagaaccttgggcagctgcagtccccccagtaagtgtcaggaagtaatccagtgggtcatggcagctgaaagtcaaggacattactattttctcttttcctccccaggaatgggtccctattatccagcaggacattcagagccagcggaaggtgaaaccgcagccccctctgagtgatgcctacctcagtggtatgcctgccaagagacgcaaggttggttttcctcttccctaagcctctctctctatccaggtttccccgtcatgcctggaatcaaactatgtagagatggtgggagctcttgttattcagtctcccctcccctcgtttaatgaggaaactttttctgggattcagacttgctcttggttgttgcataaccatacaggacttgaccttagtctgtttgctagcagtcctgtattagttgctcagctgcctaatccccatgtgcttagatcccattttcctttaaggtgggtttcctcttgtggattacctagctctgaatcccggatggcttgaccccttctgcctttcgttttgaagagcacgttcaagcacattcactttagttttggctagtgccaaagagaattaggaaggcatttctgctgtaaaaaccacatcctggactcttaatttcccctctctccactagcatggagactcagtggagtggttgactcatggaaagggtgagccggatggtggcactggatctgacgttgatcctcttttccctcccaaccccctgtcccccagacgatgcagggtgagggcccccagctgcttctctcagaggctgtgagccgggcagctaaggcagccggagctcggcccctgacgagccccgagagcctgagccgggacctggaggcaccagaggttcaggagagctacaggcagcaggtgccaccttgaagcagaatagggatggtctagtgggaggggttgggctagggtccctcttccctggatcccttcagcgatgaactggtcagcctggtgctaccatttgtt

SEQ ID NO: 40036 - DNA, 1050 bp, Homo sapiens
ggctggtgtttattgttggtgaggatgggggtgggggccggacgcaggacctctggacaacagtctcatggagttttattaatctttactaaggagcaaagtcggtattgtagggttccatgtttttacgcaaagtctctctcccttaggccctgcagagtcctaagttgtggggttactttagtggcaggaaagtgtttttgactactttttctcatcccagcaggtctctgaggctgtggttgctacagggtcaccacgagcttggcttacttgtctcatccttcccttgcctggtatcattttctcagttctcccaaaagccatgtcccggcccttgctcatcaccttcaccccagccactgaccccagcgacctctggaaggatgggcagcagcagccacagcccgagaagccagagtccaccctggatggggctgcagcccgagctttctatgaggccctgattggggatgagagcagcgctcctgactcccagagatctcagactgaacctgccagagaaagaaagagaaagaaaagaagaataatgaaggcaccagcagcagaagcagtggcagaaggagcatcaggaagacatggacaagggagatcccttgaggctgaggataagatgactcaccggatactgagggcagcccaggagggggacctgccagaacttaggagactgctggaaccgcatgaggcaggaggagctggggggaatatcaacgcccgggatgccttctggtggaccccactgatgtgtgctgctcgagcgggccagggggcagctgtgagctatctcctgggccgtggggctgcctgggtgggggtctgtgagctgagtggcagggatgcggctcagctcgctgaagaagctggcttccctgaggtagcccgcatggtcagggagagccatggagagacaaggagcccggaaaaccggtaaggggaaactttagctcagacccatgtctcattgtgttctgcctctcccagccacaccacaccagacgccccagcacagtgctgaagagttctttc

SEQ ID NO: 40037 - DNA, 1023 bp, Homo sapiens
gatttcagtaagtgagaaggaaggctaacgacagtacaagacagtgaggagttgagctggttttatcatgtcggcctggggagaagggaaagccaaggtggcttccctgggtctaacatgttggtccctctcctctccccatcctcaggtggtgtgtaagaagtaccggggattcaccatccccgaggccttccggggagtgcatcggtacttgagcaatgcctacgcccgggaagaattcgcttccacctgtccagatgatgaggagatcgagctcgcctatgagcaagtggcaaaggccctcaaataagcccctcctgggactccctcaaccccctccattttctccacaaaggccctggtggtttccacattgctacccaatggacacactccaaaatggccagtgggcagggaatcctggagcacttgttccgggatggtgtggtggaagaggggatgagggaaagaaatggggggcctgggtcagatttttattgtggggtgggatgagtaggacaacatatttcagtaataaaatacagaataaaaatcaagtgtttttacgcaatggggatttaaagtgtgggcgacatggaatgaggggtgggtcagtgatcttgagctcagggcagaagccaggaattaagaagggaaatgtttgtggtggggctgctatgtttcgtgccggtccgccggtccgccgttgcgctgttctgaggtctacgaagcgtttgcagccccgtcgccagggccggccagatctgggtgggcctgggcagcgctcgctgggcggtgccgatttctggcaaggggggcgcagtctggatgtaatgggcgaggcttagcagggcggaatgggcgtggcccgaagaagccccgccccgtcccgcttagacaatgccccggagccgccagaccgtcgcgcccctgccccatcgtagtatatgagctcgcctacacaaggacccgcgctaaaagccagagctcccagtccccgaggcttgaagacggggactccct

SEQ ID NO: 40038 - DNA, 1060 bp, Homo sapiens
ctggaagaaatgcagaatgattaaacgaccacctttccatttgaagtccccatccctgaatcttcacgggtgtgcccaagctgttagtgtcaagttttttatatgagggtcagtcgggttgtactcagattaatgaagcagggaaactgaggcagaaaagagtcctgtgttcaggagaggtcggagaaacaaggaggttttcaggactcctccttaacacccccatccccatcctgtgggagatccgaggattccccttccggactcactccctacatcgtcgagtcccgcccccctccagtcccctccccaggttcagggcggggccggtcggtgagtcagcggctctctgatccagcccgggagaggaccgagctggaggagctgggtgtggggtgcgttgggctggtggggaggcctagtttgggtgcaagtaggtctgattgagcttgtgttgtgctgaagggacagccctgggtctaggggagagagtccctgagtgtgagacccgccttccccggtcccagcccctcccagttcccccagggacggccacttcctggtccccgacgcaaccatggctgaagaacaaccgcaggtcgaattgttcgtgaaggtaagaacacttctctcctcagccacccaaattcctggaagccaactctcacctttcccccggtccagccttaactccccaatcccttccctccttgactcccacccccaatcccacgtgcactctttggttgaggggtggttttgagaggggaagacattaacttgttagcaagtaatgagaattctaggatcaaccctgaaaagtttgtaaaagtgcaagtttctagcagactaaaggaagggaagtggagaaaaaggagaattcccaaaagtgagactggggtggggttagagggcgagctggtgaagggacagtgggggcccagcagggtttagaagggacagaggggaacctcagttaggacatgtgtccctacaagatctgagggtgagtagtgcagtaggagaggtgtgtgtgtgtgtgtgtgtgtgtgtgtgtgtg

SEQ ID NO: 40039 - DNA, 1024 bp, Homo sapiens
ggagggctcagctgcaaatgccacttcccacccctcgccatggccctttccatatcatggcccttcatgttccctgtcttggctctgggagctccagattcctccagatggcacatgatcaggaccccgtctcccatggagcctgaactcccagtgtcctctgcaccagtacttgtccccagctgattgtcttcctcgccatctgcagcattacaaggcttgttgcctgctcttgtgttcccttagtcctctctccccctcaaggaaagaaggaaagtactcccctcagaggggtctttgtgctggccagtgggactctgtatgggcaaggcctcactggagccctgggtgtctgcctgggcctccaggcacaaggcccatctctctgacttctccctcctccaccccagaaactctcagcagctgtgacagaggcctttgtccggcttcacgaggaaggcatcatctatcgcagtacccgccttgttaactggtcctgcaccctcaactccgccatctctgacattgaggtgcgccccccaacctggcctgtctccatctccaatctaccctggccctggccctggcccctgggccacgcctctaaatacccattttacaggtggataagaaggagctgacaggtcgcaccctgctctccgtgcctggctacaaggagaaggtggagttcggggtcctcgtgtcctttgcctataaggtccaaggctcaggtaggagccaggggcaccaggatcctgggctgggagtggcaggaaggggccaaggccaagaccacaaggccttctgtcaccccagatagcgacgaggaggtggtggtggcaacaactcggatcgagacaatgctgggagatgtggctgtagctgtgcaccccaaagataccagataccaggtgggggactgtccacagttagggaaggagttctggccaaaaagggctcccatccttatggggtggaggggttggacttaggcccctggctgaggagaggaaactgggttaga

SEQ ID NO: 40040 - DNA, 1049 bp, Homo sapiens
atccgctagccgcgcaggcgtggaggccaggaggctggggcccctgggctgcgtggaaaaagggctctttggcccaggagaattggggggtggggggtctggggcagaaaggtaagagtgggaggctgagcagatgcacacatcctgagagagggaagatgattccttggagagacttgctcttgagagtgcaagaatctggagctgggaaaagggttcttggaggccaggggaatacggggtcccagagaaagatttccttctcttagaagtgcatgtatatgtggagggagggaaaagggtcctatagaatgagggaagacaaaaatgttttattcctggctaaggctgcccaggggaaggttctgacatttctcgagataagaagggttggggggtgggtgggaacagggagggaatttggcaggaggacatgctcctgcttagaatagacctggggtgagggagtggtaaggggaaaagattactgagtcccagaaaaggaagtgggagacagttcttgcatgctggggaaatgagactgcgagtatgaggcttgctgaaatttgagggagaacaaagtaagacgccaggtaagagaacgtggggtgcgcatcctgggtagatattgggaagtgggggtacaatagcaagaaacaatggatagtcatgggggtgggggggatagggcacttagaaaagaaagaacacaagaagggctgttgggagggagggagaggagtagagacatacagtattttttaagaaaaaacatattttttaggattttttctggagtttggggttttagtttttctgcttttgttttccacaaaataaaaaacaaaaaaaaacttttttttttcctttacactctggcaactgcgtgtacatgactatcctgccctagacagcctctccctgtgatgctgcgttcttaatacctagaggtcacaactctgcatatcccttgcctgaaggagcccagccctaaacatgggagaggagtgtgacaagtgagctcctctggtcagggactcccccaagtc

SEQ ID NO: 40041 - DNA, 1049 bp, Homo sapiens
tcagggataggaggattccaccttctcaattaagttgactagacactttttggctcctgtgaagttgctggccccaatgctgtctgatccatctagcaccaggtagatgttcatggagcctgaagggtccaggacgatcttccgcttctgttgttcccctgggtgccaggagagtggctcaggctccagcattaacagttctgtcccttctccattttcccccagttccctgccctgcctcccttctctgtcttcaaacctgggccgtgcccatcctcagcatcgactccttctatggtctctgtcagggaagacaggaaagcttcggccacctcttgaggggtgtcgtacatgaaggagtctgggagagtcagaaatgaggtcaaatgtctgggagtgtcagggatacagtgaccaaagagacgggggatcatgggtttccagggtataaaaggctcagaagtgagatagttgtacagggaggtttaaacaaagtgaggaaagagcagggttgaggtggggagagaagacagtaggatggaagaccaggatctgacctgggggtacaggtcaaaggtcaccttggcaggaaggctccgtcccgctccaagagccaccttcctgacacgttcgccgctgggagccacgcagggtaagcccccggctgcagtggtaggtgacgctgtcttcaaggcggtactggctgcccaccttccttgtgccaatggggatgcccgggttggagcagtaccccgctgcagaggtatgagacatcgaggtaagcactgaagcctgaggccccgtgagcaaggtagagagcaagagttacagtgtccggagccgagtgcccactcctcgggctgggcgccgtcagggagacagcaatgtagggggaggggatgcttctcacctccgttgtcacagatcgctgtctgcccactccatcggccattcacttggcaggtgcgattggcagagccccggagagtgtaaccgtcatagcagtggaaagagatctcatcactcacattgtagtagggagaccgggg

SEQ ID NO: 40042 - DNA, 1026 bp, Homo sapiens
ggcctgccatggttgcttgtggtaatcggtacccttcctgtgttcccaaaccatgccacagagactcagagactggctttcatctggcagagaaggagaatgtgctgaaaactcggaacacttcattcccaaatggcagcagccttttgggtaggagtctatggggagcaaaggcccaaaaggagaaagggaaagaccacgggtatttgtttcctcgtgttaggagaaaactgctatggtggactgaaaagggaaagaacttgggatcaagctgtcagaggcctggctgttttcaagcccacccttgttgctaacttgctgtcccttgacctcctttggcttctgtttccacgtgtcaaatgtaggactatagaaagatctctgaagtgctcagagctctgtgattctaaggttaagtgaacagtgccaggaaacaagaatagtgacactgaggtagagaaggaggaatgaagaaggctttccaggcaactagagcttcaggtgtagaggaagaatgaattacttcaggggaacctgaggagagttgtgttctttattcccttgtatctccctaccgatcatttggtagaaaacatcttccaggttttccatatccttgactttgaacacatgttgctcattgtctttcttggaagccaaagcattgatgttcacttggttcaccaaaggcccgaccccaaacacatagacatctgagggataaaaaggaaggatgagggtccaagccctgaggaagtggggtgctgggtcctaggcaggttactcacccagataatcctcccttgggtttttgcgatccttgccaatgtatagcaagtcccggatctcatcaatgacagtaattgggtccccgcccatgttgtgcaatcctgcagaagagacaggaccatgagggtaggagataaggaagataaactggctaaaggcagggatacacatggcagggtgagcaagttgaggaagggttagagatagttgatcacagggcttaggaagaattcctta

SEQ ID NO: 40043 - DNA, 1064 bp, Homo sapiens
ccacttcacagtctcccttaggctgggggagccccctcactacaaccccaccacttcatggtctccctcaggctggaggaaactcccagaccactgcccctccctgcctctacgtgcccctctggaggagaagggcctccctagcatctctgacttgaattttggctgctgcctcttgctgaagtcctccaagatcttctccccattcacccggagcaccttggtggtgatggcagccatatctcctggctggagcttgaccacggtgtggtcacaaggccctgtgaaaaggggagagcagggcagacattgccatggacccaggcatcctgcttatactgctggcagaaaacagacatctgccacactctcaccttcaggcaggaacagcttgaatcccacgaggtcatctggatagggcacctctgcagtggctggccccctgtcctgtgggtcctgggacaagggcttatcacacaagaccagggttgtgaatactctgctggtggagttcgaggagacctgggggtggtcagagaggccaggagaggggggtgtgatgagtagacatcaaaggcagagaccagatacccacccttgggcaggaatcaggaagcaaccatgcagagctcaccagtagagaggggcaaccaagtcaagcgatcagagcagacttcttggggtggtgggaggaaggagtgagcatgatgtggtgatgggaagggagagggtgaaaaggagggcaagaggggaaaatgagggccctatgatgacgcaacctgccctggccaagtggggaaaatggagagagggcttgctccctcccaccctctggagtccaaattcccatcaccctcacctgtaggatcactcccaatgcgttgtgatgctcctgattcttcacaaccaccacccttcctgctgagagagacttcagcccgttcacagactccatgatgcgtcgctgaagagcaaaggacagatgggaggaggcatcacagggacagacacttggactaagtttagtagcacctagagtaacacgatcttctcttcccttctcc

SEQ ID NO: 40044 - DNA, 1049 bp, Homo sapiens
ctgaaccttggaaggaaagtgcttgcggaatcccaaatgtcgggctagagcagctgagcccaggctctgggggctccaggctccaggaggtgccagagggtgcttctttgggcatccaaatggggactccctaggtggcagcgtgagagttgcagggagggaggtctgggagatctctttaggaaatactgaaatgggacagtcaggactcgggtctgggacgtgcacagagcctgcagagaggatcctaaaacttgttcttggccagagctctgcactcatgactcacggttcagcagggctgggatggctgagagatgcctctgggggcacaggggctccgtcttcactctgtgccccttccaggctccccttgcctctgtctgtctgaacccgcactctccctcacctcgccgcccccgccccccaccaccagtacacgtgacacgccccgggtgggaagggcgggccccttatctcgcctggaaagaatttaatggcatagaaacaactggaagtggaactgagaggaactactgggaagcaactcggaaacaccacagctgctgcctgccctgcccctgcttcccgcatctccagcccctcctcttttccctgaccctgccttcaagtccctggggacccagcacctcaattcctcaaacttcctttgctcactccagacctagccactaggtgcaggaccagaaactgccttcctgtctctcattgcacccctaaccattttcagctggggcctggaaatcctttctcttaatttttccattcccaggccgattagctccccagaataaggggtatctggattccccaacctacccctccctgacacctccttcctacctggttccagcccaatatctgagacccccacattccctttttagtctcactcctagaatccttctaccttcacctctcattgccagattcaactgagggtgtagcaggagggtcagagggaggcatgggggcaggaccagaacccccatctgtggaacatcttttatggaagccagcccctctcc

SEQ ID NO: 40045 - DNA, 1046 bp, Homo sapiens
gccgtggggcgaagggacagctctggagactcgtgattccggaacccggtgggcattcaagtgatactggagcacgcagttttcggggacattaagctcgccccaggggtccacaggaaccctctgacccaacggtctctctggacaggatgatccagaacagacggtgaagagacaaaacagcgtgaaagggagcggcgatacctaaactgacctccggagggcagcatgatcaagggaaggagctgttctcgctccgctcaaacccccgcgcagcctctgcagcttactcctgcttcggaaggcggcgaggttccacccccaccaccccggtccccgccgccctcttcgcgctgaagctgcggagggtctttttcttcagcccccaaatcctctgctctgtggcttaagattcccaggcttaaacccataactgctagggtcatcactcctcaaacttctccctcacttgttttgctgatgacggacacaggggcctcacagactcagaagcatctggagtcatttcgaaggacagaactgtggcaatatcctctttccccctcctaatctctgagaacagtgtctgtatatggcacgggggtccctagtgtcatatagaaggactcggagatgtcctcatgggctgtaacggcccccggtgctattcagggatctctgttctttaaagaaatatcatttccccttatttctctacctttgtgccctcacctcgccctgaattgtttcttaaactgggctttctgggaaacgtttacttcgtgttcaacagcaaagtctcggcataaggcgagggcggcagggggtggggggcgggcgtttgctcgccttggcattaatttcagagctgctgaacgtggacaaaagagagggaacatcctcctttcttccattcctgtaaatatggacccacccaccctccacttaagatgggtggcttttctgattttaagatatcaagcagcctggcgaggtggctgacacctgggatcccagaactttgggaagccgaggcgggaagatcc

SEQ ID NO: 40046 - DNA, 1091 bp, Homo sapiens
cgctatgagcaggtgttctgggagggtggtgaaactcatggtgagtggtgcactgtgggtaggagggactgaaggtagagtcacatcacatggaggtgggttggctaaggaagttgggaggttgtgttggttgggccaggaggtgggtgtgattttccttcccactctctcctagatcacacgccgctatgcagagttctcctccgctcttgtcagtatcaaccagacaattcctaatgaacggaccatgcaattgctgggacagctgcaggtgagggtcggacaggagacacttcccagcagcagggctgcttccagtgggtggagtctgaggaggagccagatggggcccagatgaccttgctttctggtgtcacctcttcctctctgccttttcaggtggaggtggagaattttgtcctccgagtggcagctgagttctcctcaaggaaggagcagcttgtgtttctgatcaacaactatgacatgatgctgggtgtgctgatggtaataggtgctccttctccttgccttcctacccagaaaattcggtttcccccactgctgttagctctgtgagggcagagatgatgcctgtcttgttcagtgttttactcttggagtctggcacagtgtccagcttagtacaataagtgtggaatgaaggggacatcctgaagtgaaggactgctttccccaaactagacatttccctttgtcttcccttaggagcgggctgcagatgacagcaaagaggttgagagcttccagcagctgctcaatgctcggacacaggtaggggtgtggggaaaagggaagagacagccttctgtgctgttttcagctctctctctctctctctctgtgtgtgtgtgtgtgtgtgtgtgtgtgtgtagggagtggcataatggatctcaggtatgcggaattactgtaactcttgattcacaacatactgtcattattggtctattttattttattttgtctttggtttttttttttttttttttttgaggcaaagtgtcactctgtcacccaggctggagtgcagtggcatgaacatggctcactgcagcctcaacagcctg

SEQ ID NO: 40047 - DNA, 1061 bp, Homo sapiens
ggcaacatggtgaaaccccatctctaccaaaaatacaaaaattagctgggcacggttgtggacgcctgtaatcccagctactcaggaggctgaggcaggagactcacttgaacctgggaggcagaggttgcagtgagccaagatcacaccactatactctagcctaggtgacgagcaaaactctatctcaaaaaaaaaaaaaaaaaaaaaaaaaagaagcagggctagaaattgaacccaggccatatagcttcagcctatgcctttatcagctgacttcctaggtatttgggatttttattttatttatttatttagttttgagacggagtctcactctgttgcccaggctggagtgtagtggcatgatttcagcttacggcaacctctacctcccaggttcaagtgattcttctgcctcagcctcccaagtagctaggactacaggtgcctgcccccacacctggctaatttttgtatttttagtagagacagggttttgccatgttggccaggctggtcttgaactcctgacctcaggtaatccacccgcctcaggctaccaaagtgttgggattacaggtgtgagccaccacgcctggccgtatttgggatttttttttttttttttgaaacggggtttccctcttattgcccaggctggagtgcaatggcacaatctcggctcaccgcaacctctgcttcccgggttcaagcaattctactgcctcggtctcccgagtagctgggattacaggcatgtgccaccacaccaggctaattttgtatttttagtagagacggggtttcaccatgttggtcaggctggtttcaaactcccgaactcaggtgatccacccgcctcgtcctcccaaagtgctgggattataggcatgaaccactgcgtctggcccatatttgggatttttaaacaggtaggtgatgggatcagacttgtagtcactttgtttggctacagtgtgaagaaggagttgaaggagagactgagaatagggagaccagacaggagggctgttgtaattgtctaaacgtacattgat

SEQ ID NO: 40048 - DNA, 1182 bp, Homo sapiens
agggtcgggattggctggctctggaggcgcaggtggtccttcttctactgtcacatggtgcgcgctgttttctaatcacgtggctgccacccaggtaagaagaggccgctcttcctggggttgtttctccgtgtgacgtgtggcctttgagatcaactctcctgtaccagcgtaggccgcatgagtggggggcgggctcccgcggtcctgctcggcggagtggtgagtgaccggccccgccccgccccttccggtcctcgaagcctcgaccgctacccgcaccctaaatcccagaggttggccccctgaggtgtgagtgaaatgagcttttgctttattttccaagtttctctctcaccttcaggggcattcttcgggggtgcatcagagggagggcagagcctgaggatctaagcgaaggcttccccgggtgtaatttcctgggctgtttgtgaggagagatcgaattcgcctcctgctctcaggcctctctgctcctgtcttttgtttggatgccggcgctgctgcctgtggcctcccgccttttgttgctaccccgagtcttgctgaccatggcctctggaagccctccgacccagccctcgccggcctcggattccggctctggctacgttccgggctcggtctctgcagcctttgttacttgccccaacgagaaggtcgccaaggagatcgccaggtagggacctcgatgtgcagcgagaaaggatgatcatgaagggacagttgggggtggggcagaagagtgctgctttctcctttctccagctctggaagcctgtctctgggctgccagtacaaaaactggggttatggggtactctgaatgggactgtctcttcactccagggccgtggtggagaagcgcctagcagcctgcgtcaacctcatccctcagattacatccatgtgagtcataggagttggggggttaacctaactgtaggagctgactgggaacctctttcctgggggaaattctttgctccccacaactctccccctctgacctttcagctatgagtggaaagggaagatcgaggaagacagtgaggtgctgatggtgagaaacatttcccccacccaacaaaatatccccaatccctgacccctttagcccttacccctcttctgagaaactgaactcaatcccactccttg

SEQ ID NO: 40049 - DNA, 1042 bp, Homo sapiens
aagaccagcctgaccaacatggagaaaccctgtctctactaaaaatacaaaattagctgggcgtagtagcgcatgcctgtaatcccagctatgcgggaggctgaggcaggagaatcgcttgaacccgggaggcggaggttgcggtgagccaagactgtgccattgcactccagcctgggcaacaaagcctggagcgaaactccatctcaaaaaaaaaaagaaagaaaaaaaaaactttgaaaagtaacttaatacattcttccttacttctgctttcttcagctcttctgtgtttataaaaccaacttcagtccaggtgcggtggctcacgcctgtaatcccaacacttagggaggccaaggtgggtggatcacccgaggtcaggagttcgagaccagcctggccaacatggtgaaaccccgtctctactaaaaatacaaaaattagctggacatggtggcacacacctataattccagctacttaggaggctgaggcaggagagtcgcctgaacttcgcttgaacccaggagacagaggttgcagtgaaccgagatcacgccactgcactctggcctgggtgacagagtaagactccatctcaaaaaaaaaaggcaacatcttctgctgagctcatggaacatttattctattttacggaatgaagtgttgcctgattctagaatcgaaaataatgccaactgagatctttaagctaaatttgttataatgttgtcctttgacatggcttaagttgtgggacctgtgtataagttcaagtctgcctcttaaatagttttagggccaattcctctaatatgaaatcaaatgagaattctggctttctttcattcattcagcaaacatttattgagtgccttgaagcctcaataaacaaactcaaatagaatggggagagtattaggatttagctccggtatttgtacttgtcatgtgcagtatatgacttgagggcacaatctctgagtgtatctgttgtgtgtgtttttgtttttgacagagtttgctcttgttgcatagg

SEQ ID NO: 40050 - DNA, 1062 bp, Homo sapiens
aaggcagatcagcttgtggactcctttcctaagagcttggttgggaaggtggtggggatggtggcaggacgggaaggtccagataagcggccatcaggtgaagaccaggtacagcaaacagctgctctctcggcagaccatggagagctcagtgactgctgagagccaccagggtcagtcaggagtgaagcctcagcagtttttcatccttcctcacttccgtttccagcgccaccctcggcagtgcacaccagccatgctgatccactggtaacatgctgacccattccctgggcacgggctccacctggtcctgtgcctggagcaccccactcccttgccggtacatgcgcccatcctcagccactcattgtccagcacttcctgcctggccccataggcccatagcaccttgtacatgccccttcattccactcccaccagggtggttctgaactgttctgtcctttcccctcttattttatgagacaggggcctgtgtttactacaactctttactactaataactgtgagaaaaactaatcgctcacatttatcggcgttccaggcccggaattcagagcagcccaagcgtcacctcatttatcctcacaccaccggggacgtaggggctattattatattttcttttaaaagaaaggttaagttggccagtatgctttaaaaatgttcagtgcatgaaagacaaaggccgaggaacggtcccggattaaaggagactaaaagatacatgactgttaaatgcagcaggacatcctgtttttccatagattattattgagacaattgacagaattggaatatggactgtgcattagataatagtgttgtatcggtgttaagtggcctgaatttgatcattgaactgtggttatataagagaatgttcttgttcttaggaaatgcacactgaaatattatggggtgaaggggcattatgctcctactttcaagtggatcagaagaaggatatgtatgtacagatacagagaaagataaactgtggcaactttttttttttttaagtgtatttcatgggg

SEQ ID NO: 40051 - DNA, 1090 bp, Homo sapiens
tctcctgggtgcctggcctttcctcagctgctgttccaagttattgttagaacaacctcttattccatgaacgtcaaaccacttccttcccctggttgcccgttcaaacctttttgggccatagatagtttgggcagcaaatggaactccctgtgtttacccacctattctttgccccagccactaccagtccagatgggaagaaagatggtcctgggtgggacaccaggcggagaaaagctgggttaactaaagggcaaatcaataattcatacacaaaaccagagtacaaaaaccactgcctccatttattccacctcaaattgccctctggggagtcttgtggtccaccctaaacccaccaagtggggaggtggtggtgggagcgggaacacatgtaactcctcttacaccccatatcctattgtgtagttttaaaaagtcagtgtttatgggctttgccaattttgaatacagtttgtctaagaacacgtgtttcctacagcgctgagagcttaataaaagaattgcaacgtgggggaaggtggcacaacaaatgtaattgttgacctaacaacagagaaaggagcagatctttctaatgagttcattaggtgcttcctaaaagatcccggactgcacaccagcacccacttatgtagcacaaggtgcaactccgaggggcgtcctagaagagctgctgctcttcgcccaccagggagttctaactgtattgtatgcaagtttaagtataataatattggcccagtttgaaagaagttaaactttttcttgggtttctaataaggtaaatggtatttccaccttctcagaggagaattcaaaggtttttttgattctgttttctcagtcatccatttgaggcctggtccttggcattcctcagtgtggcagggagctagctcccaagccacctggcatatgctggccacggtgaagccatctcaacgttgctcacccccacttgtgggccccctgaagttatgcttttgaagagtgtcctaagaacagattatcctatttttaattatgtattgagcccatcgaaaacctggagttgtaaggagaa

SEQ ID NO: 40052 - DNA, 1045 bp, Homo sapiens
actgagctaatccccagttaactctgcaggtccccgctaagcgtttgcgttcttcctgagcccctgtaagcctgtgcagcaggtttgggtcctcagctcacgcagctgtgtgtgagtagtaggcctatgttcttgctttcctccaggttggcgctgcagctctgggattcattcattcatatagctcgtatttattgagcacctaccatatgcctggaacggtgctagggaaacagcagtgttaaacaggtgaagtcctgcccgcatgaagttttacattgtagttcaggacacaataagcaggtaagtgtacgtaagacagataagtactgtgatcgatagaaaatagggtagcgtgataaaagggtaatgttattagtggggcctttctgaggagatgacacataggtgagacctaaggcaagaggatgagccagccatgtacacttggcgggaaggacattccagacactgcacatgtccagaggcaggaggcagattgacatgtttgaggacagaaagaaagccagaatggctgcagggtagtaagtaaggtggagtttgctaaggtgaaggtccggagccaggcacagtaggatattatctgttctgattagctttagacctcattataaggccagtgagaagtcactggggatgtttagtgaggggactgatgtgccctaatttactttttaaaagactattctggttgtatgtggtgagtgggctatagggggcaataacaaaaaaagaggctggagagaagccgattatggtactataagcgacagatggtggggggttggatgaggacggcagcacagaagatggaagtggttggattcaggttatgcgcaggttgagtcagcaggacttgctgatatatgggatgtgggataaaggaaaagagaggaaccaaagatagcacctagatattttttggcctgggcatctaggtctaagatggtgccatttactgaggtaggaataggtgaagtgtaggaagaatatctcgagttcggtgttaagcaggttaaacctg

SEQ ID NO: 40053 - DNA, 1132 bp, Homo sapiens
gaagacttaaaacaaaaacaggaaaaaataactttctgtaagacttctcagtgctgttagttttgtcttttaattagaaaaaagttccatggtttctatttcttggtccttcacatctctaaatgaatcagacccacaagtgaatggcacatttgttccctggccttctctgatctggacacactcaggctccacttgagtgagcccagacaggtaccctccaggtcctagctacagatgcgctccgtgggcagacggcattcagcacctgccagcgagggcttcagacgcagatatccctatttgtaaccattcagaccttcatcagagcatcagaaagcaggggctgggccatctcaatgcaggctttgtggagctaagatttcatggggcacccttggcctttctggagggtggacacaggaacaagcaggtggggacgtgtttcttggctttggtgaggctcttgctgaaagtcttattctttgcatggctccaggcttaccgagatcacagacgggcatttgaatttcagattcatgttctttcccttttcggtcgttgaagacggtgacactttgtgtttttctttctgcctttgtgctgctgaaaacgtggggacaggctgggagtgggtgtgttgtcttaatcaggccgtctcgttgtctggtaccgtctgtcctcctgtttcctttaggtggtagcagcctctgctgagtggtttgtgtgagttcgcactgaatcctaccacaatccttactcagatgagggctctgagattccacctaacgggagacgagatggcagctgctgacattctgccctgtctgcaagctctcctagctcttccagctctcccatctctgcaaactccgacagcagttgctcttcctctgaggaagctgagcgactgcatcatcccccgaccacgtcgcctctgctcagccctcttaatggccgtcattccaagggaaaggcaggagccaggagcctctgggatgcagccccttggttacagtgtctgctttcagctttgcctctgcttctccagggtctttctcaggcagttaacccaatatttatcaactctctccctaggcccagcacttggcagaatttttttctattttgt

SEQ ID NO: 40054 - DNA, 1070 bp, Homo sapiens
tggtctcagtgaagttattgccagtggactgtgagagaaaaacagatgaggtgagtttgagtttctctggtttttattattcttcctgaggatattagcctccatcaggaggtaaacttccccagaaaaagaataggatcattttcagggagtgcttcctgtaatgtaccagagtcacattgtgttctgtgatgttcttgtcaggctcaattgtggcagtgaaggaatacttgaaatagaattgacctcccaaaatccaaccctgggcttgttatggacactttcccatcaaatgtagcatcggggactttgatctgcctgagtcaatctagggggatgcagtaggttgttgttgaaggaccctcaagctccctggcactgggaggaagggccggcgtttctaagcatcaggaggccaagttctcaattccacattctctgtctccagtggtgcagctgtggctctgaaaatgctgttctgatttgaaacatagggagtttgtttggaacacatcttaagtggaattagccctcttagtctacatttagatttgttttatgaagctctaatatggcgagcagccccatccatttatgaatcatgaaagcagcattatcaaggagctgggatgctgcttctggtgacagtctggagaagatatggggcagtaaattttcaggtcttaaattgtaccaggaggagtcttgtgctgccagagggcatgacttagtagtctaattaagtgtgcaatgcctggcctcccaagtccttagttaacatctctagtagcccaggggctgggaaagaaaatgacgcatggtcctctggccagccctgcattgactgtcttactcatgtaaatgagggggcatcctggtgcagataacggcttttatttctctttggcttcgggtgtgtcatagttgggggtgttttattacatccatttattggattcatccaccaaatatctttgcttcccaattgttttgtaaaaacagattcatagtaagtttaatctgccttctatcataaaaactgtagttgatgatgagaggaagtggcccag

SEQ ID NO: 40055 - DNA, 1732 bp, Homo sapiens
tttaggtatttgcgtcttctctctctttttcttagtctaaagttttaatttttcttgggtcttttcaaagaaccaactttggttttactgattctacttttttttttgacggagtctcactctgtcgcccagggtggagtgcagtggtacgatctcggctcactgcaacctccgcctcccaggttcaagcagttctcctgtctcagcctccagagtagctgggactacaggcgcgtgccaccacacccagctaacttctttgtatctttagtagagacagggtttcaccatattggtcaggctggtctcgaactgctgacctcaggtaatctacctgcctcagcctcccaaagtgctgggattacaggcgtgagccattgagcttggccaattctacttttaaaaattctctacatcatttatctgttatctaatctttattgtttctatccttctgctgggtttaggttttgtttgctcttctttttctaattccttaaggtgtaaagctaggttgttgatttgagatctttaggcatttacagctataaattttcctctgagtactgcctttactacatcccatcagttttggtatgttttcattggtctaaaaatatcttatatttccctagtggtttcttctttgacttgctggtttaagagtgtgtggtttactttccacatatttgcaaattttccagtttttcttccacatttgatttctagcttcattccactgtggtcagagaaagtactttgtatgagtttagtcctttgaaattaattgagaattcttccatgggctaacacctatgttagtaagggattttggcctgtagttttcttttgcacctttgtctgcttttgatatcagggaaaaactgagtcagaatgagttagaaaatattctctcctctcaattttttggaagagtttaggaaagattggtattaattctcctttagatgtttggttacaaaaaaaaattgaccagtgaagccatctaattctgggcttttctttgttggaaggtttttacgtttattaagatctgttttgtggcctaacatatcgtctatctgggagtgtgttccatgtgcccttgaggatactgtatagtctgctgttgctgagtggagggttttgtatatgtctgttaggtctagttggtttatactggttttcttttctttctttttttttttttttaagacagtttcactctcgttgcccaggctggagcgatctcagctcactgcaacctccgcctcccaggttcaagcgattctcctgcctcagtctcccgagtagctgggattacaggcatgtaccaccatgcccggctaattttgtatttagagacgaggtttctccatgttggtccagctggtctcgaactcccgacctcaggagatcacctgcctctgcctcccaaagtgctgggattggaggcatgagccaccacacccggcatggtttatactggttttcaagtcctatgtttccttattgatcatctctgtaggaatgtattccacccattgagagtaggggattgaagtctccaactactattgaactatttctaaacaaatacctcatgttcctatgtatgtggaaaataaaacaatcaaactcatagaagtgaagagtatattggccaggcgcagtggctcacgcctgtaatcccagcactttgggaggccgaggcggctggatcacgaggtca

SEQ ID NO: 40056 - DNA, 1025 bp, Homo sapiens
gccacctctaattgggatttgagtgttctggaaacttcccactcgcccatgtcagatcattatggaccattctaaagctgatccatcatcacatttactacatgatgagggtaaatggcaaagttcaggattacctttctgcagcctagtcttccaatggcctgcaggacttgtggctagagagaaagaactctaaagagacgccccaaaacttcggacgtgggtggagagaggaaatcagcccaaaggacaccattgcagctcatatcattgcggggagcagcactgcacttcctccatcctttgttgacatgccaggtggtagcactgaccgtctaagccagtttgagttggtgaagtaactgctcatccccagtcagggtggcttccatctctgggcacctgataactgttccaagaaagcctggtgttaacaagctatggccttgcttgctttctggtttccaacagatttaggctgtgaagggtttatttatgtccttgatcttgtgacacccagctaacatctcagcatctgaggatgtagccatgaggttccatgttctgtgttctgaataccagcagtgtgctaaacctaggacacacagtcctcacagaggcacctgcttgggtgacagatggcatgaaatgggagaggtgacagcctgggaaaagtaagccacgtggggggtgaagtaggaaggagcaatatcagagagagcttgggtgggaggaccatggaaggatgagacggagataagaaattcagaaaagggaagaaggacagtcattcatccgaaggctgcctggtgtaatagaagatacgaatgttgggaattagcccaggtctctgctccgctgctgacaagctctttgatcttgaacaaattaccatccctgctccctcctgttcagtgggggagaagtctactttgcaggattagtgtgttaaataagtgaaagagtgtgtgtgacaccaaagtcagtgtgtgattatcaaatggtggcacctctttggaaatgcc

SEQ ID NO: 40057 - DNA, 1025 bp, Homo sapiens; identical to SEQ ID NO: 40056

SEQ ID NO: 40058 - DNA, 1029 bp, Homo sapiens
attgcaggaaatacctggagaaatcacagtggaatgaatttttgctttaagagaaatgagagttggctgtctctgtaattgataatacagcttcatcctagtcccatctgcatttcagaaaataaccctcatctttacaaaacacaggacacttgtgggacagttaactcaagcagctatggggagggaggagattattgaatggtgattaaataatgcaaatggctcttctgtttcttaaagactgtggaagaggtcagactgcccagttgaggtgggcagttcatactgctcagttgaggtggcagtcatttattctgagtcctgttggatagagcctatctcctcaaggctacagaggcttccaggatatggagctgtgcatgttaatggctcagccttgcctccatcagggcacctgcctaacttggagcaagtgggagagcaccctagagtcatcctctgtgctgtttcgtgagttttgcagcggagacttcaccatccggaggagctgtgtttctgtgtcacttgggatatcacctaaaaatgaaacatttgatattttaaggtataaaaaaaaagtaaattggggaacattggctgcagtccctaaaagatactgttgtctgtgcatcaggttagcttgaggtcaccacaggtcctgggagcccagagagtttaggcatactctcctttggaggccagcagcctttcacaaaccctgcctctaaaagggcggtttcacatttgaccatgtttttgcattagcctcagaaactcttgtctttagctgataacctttgagggatgtgagaagcctagttggagcatctgagaaaatgatacctctcaccttcaaattaatcaaatagtttgtccttctagtccccttataaattaataaatggagggctggtcatggtggctcacgcctgtaatcccagcactttgggaggccgaggcgggtggatcacaaggtcaggagttcaagaccagcctgaccaatatggtgaaaccccatctctacta

SEQ ID NO: 40059 - DNA, 1029 bp, Homo sapiens; identical to SEQ ID NO: 40058

SEQ ID NO: 40060 - DNA, 2724 bp, Homo sapiens
tcccaagtggctgggattacagttgtgtaccatcacacccaatgtttcagaattatatctcttttttctcctttgacttgaaaataatgatataaatgtttttgcttctctaagatactgcacaggagtatcttgcttttaatagactcctcttcacaaattgcgcataggccacattgttgtaaatacactcatttctgtgtataatttatctcaaaagctagtagcgtttaaaaaagaattgctccttagtcgaggaactgatattttaaattgactaatttaaaggtattttgctgttagcacacttttagtacaaataactactctaaattactttttaaccactttttaacaactggaattaaagatatctttttactcagtttagtggtctgtgttataatacattgaatggtacccattgacaaatattaagtttagtggctaagtgtacagattagaatatgccctgttagagagaatatagtactgtatttgagctggtttgtgttggaaccctgaatagaggtggaattactgggacaggagccagtcgccttctgcgaaatgaaatgagtccagaagagtcttccaaaacagttgtgtttgcttttccatccagctccacattccaggaaaggatttttagtcattaggaaatatatccacagcttactttccattgacttcaatataattaacagtggtttcagcaaacactaaatgcaacccttgcctctggagattccacaatcgttaaactaccaacagctgctggatttagacaaatgtaacttatccggccttgttgccacttaacagctttctcttaattccatggacttatgaatacaagctgcttatcacaaagcttgctacacaggaagtaaatgtaaggactgccaagacagtatggtagtcatgaacttaatgtacacctagtaaacctccatcaatataaagtaaaaattatcagagttacggggaaagtcaactcaatagccatattgaagacttcaaaacatctcattttgtgcttgatagtccctatgaagaacaataaaatctcatttagaaagtgattgaaaagtggcaaacagaaaaatagaggttaaataacaccattaacaagattgagcacatagatatgttgagagagaagcttccacccaacaaagaatacgtaattttttcaagcatgcatggaaggataagaacataaccacatgttaagttgtacaggaatggttaaaaattccagagcatcatcagtattatagactgtatatactctgatagaatgcagtagaattagaaaccaacaacagagccagcttgaaagagagagaaacacaggtttggaaacaaaaaaatgttctaaataatccatgagttaaagcacaaatcatcatagaaataagcaaatagagcagaagagctgtgaaagcacttcacatcatgacttacgggatacagctcagtcagttctttgatgcttagatgcttatattagaaagttaaatggacgttaagtaaattgagcaatcaactcaagaagctggaaaaaacaagagcaagcccaaaggaagtaaagggacagaaataacaaggaaaggggtagaaattaatagaaaaatagaaatgaccaacaaaaccaaaagtgggttatttttatttgtctaataaaatagataaacttctggcaagactgataaataggaagacagaaataaatgaagaacaaaaaagggaaataaccacagatttataatagaggtttttaaattataagaatgttacaaagagctacaaacagaaagatctgaaaactttcatagaaattttccagaaaatcctacccaaatttacttttaaaataattcaggctgggcgtggtggctcacacgcctataatcccagcactttgggaggccaaggcgagtggatcacttgaagtcaggagttcgagaccagcctgccaacatggtaaaaccccatctctactaaaaattaaaaaattagccaggcatggtggcacgtgcctgtagtcccagctactagggagactgaggcaggagaactgattgaacctggaagatggaggttgcagtgagccagtatcacgccattgctctcctgcctgggtgacagagcaagactctgtctcaaaaaaaaaaaaaaaaaaaaaaaaattcagaccgggcacagtggctcatgcctataatcccagcactttgggaggcgagggcaggaggatcacttgagcccaggagttcaagaccaacctgggcaatatagtgagacctcatctctaccaaaaaaaaaaaaaaaaagtttttaattagctgggcatgatggtgcaccctgttgtcccagctactcaggaggctgaggtgggaggattgcttcagcctgggtagtcaaggctgcagtgagccatgatctgcgccactgcactccagactgggagacagagtaagagcctttctccaaaaaaacaaaaaaaaaaaggaaaaagaaaaatttgaaaacctacacatagatcattagtccttaaattaagtagtaatcaccttccttcctgccaaaaaataccaagatcagactagattaattttactaaaattttaaaatatgtatattcttgaagactatttagaggaggatagttacataccttttgtaagactggtaagatcttgattaatgattagcaaactc

SEQ ID NO: 40061 - DNA, 2724 bp, Homo sapiens; identical to SEQ ID NO: 40060

SEQ ID NO: 40062 - DNA, 2724 bp, Homo sapiens; identical to SEQ ID NO: 40060

SEQ ID NO: 40063 - DNA, 2724 bp, Homo sapiens; identical to SEQ ID NO: 40060

SEQ ID NO: 40064 - DNA, 1035 bp, Homo sapiens
tcattggcaggtttggggtttgccgagggattatatgtctgtgagcccaaagctgaggggtgggggtggggtgtcttcggaagatttagggcgttgtgcataagccatagccagctgtttattttacagtgcgctgggtagcctttatggtgtagtctgagaagaaaagacatttgatataataatctttgtgtgctgaaaatgtttcatgttaattgggaagaccaaaagcggtatttaacatttttgccctgacgttcctccactgccttgtgggaagactcttaggattaaattagctaggaaaataatgttttagaatcagtttctttttataataggtagggtactttaaaaaaaaatctcggcttcccaaagccgtttctgtggtgatgaagggaattcagagaagcacatgttttgtaaatccacaaaagagtagctgctttggaaattcataagatgcctgtgggaatgcatttctcgtgtgcatggtggtaaaatggcagttaaactggaaacaatgaaggacagtgaaatccaatatgttatattggattcagcagtgggctatggtggcagggccgcagtacagtgcagtgtcgaaatggggaaaggaacttgacccgttagttatgaaaagaagctgtggcgaaagagacagatggattgccaggagttgctgtccagaggtatttaggaggaagtgggaatttgaattactgcctgaagaaaattagttagtgaattgtgttgttaagggatcccatgtgtgctccctttcagcaaaacagaacgaaaggagatttggaaacgtatgctttgtatcctaccatatattgtaaaagtccccaaaacagatgcattgtaatagctaaccagggccatgctgtaaattatatactgttttggaatgcatatttgagtaaagtaaaattattggtggtgcttattgctccagagcctttattctcctcattatcatatcatgttatgggaaatcagatgggatcacaggctcttaactgaagggaa

SEQ ID NO: 40065 - DNA, 1021 bp, Homo sapiens
tgggaagaggcactcctcacttcctagatgggatggcggccgggcggagatgctcctcactttccagactgggcagccaggcagaggggctcctcacatcccagacgatgggcggccaggcagagacactcctcacttcccagacggggtggcggccgggcagaggctgcaatttcggcactttgggaggccaaggcaggcggctgctccttgccctcgggccccgcggggcccgtccgctcctccagccgctgcctcccgggcggcgctcgccggcgcggcggcaaagactgagacagctccgctgccagctgaactccatcctcccggcggtcgggcggcggcggctgccctgatttttccttagggaatcactctttccttgtcattagtccatgtggttctggagggattatttcacctctgactccagagggtgccataggactcaggagtggcccatgagatcagtgccttctatttatttttcatgtcttatttcactagctaggatctctaatacaatacttaataatagcagtgagaggagatattcttgccttgcttttgatcttaatgggaaaacatttattctttcaccatttcacctgttgttcataggtgtcctttatcaggtggtgaatgtttgcttctattcctagcttgctgagagtattgactgtgaaataataattttatttaaaagtcaagtgcttttctaggatcaagacaatcatatagttgttctcttttatgatgttgatgtggtttatttcactgatttttgtaaagttaaactaactttatattcttgtattaaatttttggtcataatatatttcactgtatatattgctggattctatttattgatatgttcttcatgatttgtgtgtgtgtgtgtgtgtgtgtgttcatgaaggatacaggtctgtaacttttttcttgtaattatcagattttcatatcataattatttcagcttcataaaataagtttaaagtattctttcctcctctgt

SEQ ID NO: 40066 - DNA, 1090 bp, Homo sapiens
ctgggtggggctcagcccttgatgatgacaaaatgaccaggaaagattcttggtttcactctgcagagcatcagaacagctggagtcctttgtgcttctttcttcatgcagtgatttcatagatgagaattaggaggaggctgggattttttaaaaaacaaaactcaggccgggctcagtggctcatgtctgtaatcccagcactttggttggagggggggggtcgaagtgggcagattacttgaggtcaggagttcgagaccagcctggccaacatgacgaaaccctgtctctattaaaaatacaaaaattagggcggtgtggtggtgggcgtctgtagtcccagctacttaggaggctgaggcatgagaattgcttgaacctgggaggcagaggccgcagtgagccgagatcatgccattgtattagatctatggctcacactgggcacgaggatagggggaggaaagcaaatgccaataacaaatatggtttcagtaattgttaaagttgtcactccagcctgggtgacagagcaagactgtctcaaaaaaaaaaaaaaacctcttcggtaaaatgtggagcttttgttagtatttttgcaaaggaataataggattcaacttttttttttttttaattttctttcatttttgagacagtctcgctctgtcacccaggctggagtgcagtggcaagatcttagctcactgcaagctctgcctcctgggttcacgccactctcctgcctcagcctcccgagtagctgggactacaggcgaccgccgccatgcccagctaattttttttgtatttttagtagagatggggtttcaccgtgttagccaggatggtctggatatcctgacctcatgatccgcccgcctcagcctgccaaagtgctgggattacagatgtgagccaccgcgcccacccggataaagtcactcgttgttgattgtaatacaaaagcaaggtgtacaagaagagtttttactaacttctaccactcttagcttttttctgtcatcttttggagaagtgaccacttgacctgagtaccatacagggtagtagaaggaatgaattt

SEQ ID NO: 40067 - DNA, 1090 bp, Homo sapiens; identical to SEQ ID NO: 40066

SEQ ID NO: 40068 - DNA, 1090 bp, Homo sapiens; identical to SEQ ID NO: 40066

SEQ ID NO: 40069 - DNA, 1090 bp, Homo sapiens; identical to SEQ ID NO: 40066

SEQ ID NO: 40070 - DNA, 1544 bp, Homo sapiens
acatttctactggtaccttaccaatgagggtatccagtatctccgtgattaccttcatctgcccccggagattgtgcctgccaccctacgccgtagccgtccagagactggcaggcctcggcctaaaggtatggttcccacacaaatcccttcagctatttgaagatagtttcttttgtgtaagggacaaaagcattcttagctgatgtcagctttagagggctctggcctgcaggcatttggtcaagtgctagaacctttgtcccatggcttgggacttggaatagaactagactcagttcttcaggccatccatgagatggccttaagcacagatagtctgtcactttcttcacccacacctgtacaaacatccagatacatgtggtatagaatattgagtaacttttcccgcagagtgcgttgtactattcccgagaagtccaaagcaaagccatttaccacctcgaaagaaacaagagtgttgtagttttcttgccaacaggagaagaaattagaaactggagtggagaacggatggtgtataccacgatgtgaaaggatatgcatgcatgtgtggtgtgaggagaattatcttctgattcttgggatcattgctagctcacagttgcttttttttttttttttttttttttaacggagtcttgctctgttgcccagcctggagtgcggtggtaagccaccgtgcttggcctgtattttatctaggttatggttctttgttacaaaactctgtaggagctgcagagagcataggttgaggtgaaaaaatgcgcagattcctaaatgtgatcatcagagggcccaggttcccctggagagttaccttatggagctcaggaattcgttatgaaagctccccaagggattctggtgattaggtagacataattttttgagacagagtctcactctgttgccgaggctggagtgcagtggtgcgatctcagcttactgcaacttccacctctgaggttcaatcaattctgtctcagcctcccgagactgggattataggcgcccagagcgacacccagctaatttttgtatttttagtggagatggggtttcactctgttggccaggctgggctcgaactcctgacctcaggtgatccaccacctcagcctcccaaagtgctgggattacaggcgttagccaccgcgcccagcccataatacgtctttttagcaaaagttgtctactacatcttggaatctcctgggagaaaaaaataccagtgcctatctgtgcttgatatattctgatttagttgggcctgacatttgtttttgccactcattacatgattaatttatttctgctctaaaaggagttcattctgcctgagtgcagtgactcattcctgtaatcccagcactttaggaggccaaggcaggaagactacttgagtccaggagtttgagaccagctaaggcagtatagtgagactccgtctacaaaaaaataaattagccaggcatggtggtgcacacctgtggttaagcccaggaactccaggc

SEQ ID NO: 40071 - DNA, 1027 bp, Homo sapiens
ctcactcctgagcaaagatgtcttgctagttcctctctaagcagattttcttttagaattcatagctacttttgagtatttgacaatgaatagacacctaacagcagcacatattttgtcaaccgtgcccttctgagggtgcatattggttcataaaggatcagcaaggtctgtgagctcaggggttgcagctcctgtcctggggcagcgggtacaggacacgacgggcacacacagcacagtgtgtccacggggatgggttatacgttcaaggacacttctgcactagaagaagccactcaagcattttcattgtgcccttcacctgtggtaacactattggcgaaggttgatactcatttatttgttctgttaataaatatatattgcggacttaacctaccttgtgcccagcagtgccctaggtgctggggatacagcagtgaaacagacaaaaacacaaatccctgcagcatggaactgatgttcagtaaaacatatggcaaatcaggtgatgaaagatgatagggagaaacaagagaagataagaaaaggggagttgggagtgcaactttaatcgtttattttacctttttaagaaatagagtcgggctggtggtggtggctcatgcctgtaatcccaggactttgggaggccgaggtgggcagatcatttgaggtcaagagttcgagaccagcctggccaacatgatgaaaccccatccctactaaaaatacaaaaattagctgagcgtgatggcacgcgcctgtaattccagctactcgggagtctgaggcaggagaatcgcttgaacccgggaggcggaggttgcagtgaggtgagatcataccactgcactccagcctgggcattagagtgagactccatctcaaaaaataataaaatttaaaaaataaaaacagagttggggtctcactgtgttggccagattgctcttgaactcttagcctcaagcaatcctcccacctcggcttcccaaagtgctgagattacaggagtgagcca

SEQ ID NO: 40072 - DNA, 1066 bp, Homo sapiens
tggggcttccttgtgactcactgggaaccatagatcttgcacttggtttggttgtcaagttgcactgctatgtgtaccatcactgactatcttcactctcttccaggggctccatgggccttaccccttcggccagtcttaaacgggtgtcagcaagaagaaaaattaacaaaagacagaaggcctgactttggggggttagggcaaggggttcctctggattgcagaccacatcgcacagacccctggctctgaccccctctcatcccggaagaagaggaagaagcagaacagactagttttgagtaaactcagtatgcatgtgtgaatgctgaatcacaggaatggtgttgaggctaccaagaagaaatccatgcagccactttgggttttgttataggcatcagtctaacaagtcattaggtcactcgggaagggggaaaaagtttaaaatgggggaaaaaaagccatctttttaaacaaaaattattttgcctacagaaaggttgtagttttgagcacatgttaatttttttccctctttccccacttttatttttttaaataagggataacatattctttatagaatagtgcttgttctggaagagattcaggtgaaaagttggcgtggcatgtttgaggactctgcggatcagtgctacaggagtacatctgccctgccacatgactccagaagtctctgaccccatttgtttttaatggcatcagccaatgagttatcacccttttcctcctcttttctctttaatcttctgttgatttacacctttgacatttgtattcgtcaaccctgtggcttgttagcatcagaacctctctgaagaccaaacttccctgtgtggccagcagaggaagccttgaggatagatctcgggtgacgtgggattttctaagcctgagaggtgtccttctgcacacccttgtaacaattaaaattgcttttcttccatgtttctcttggcagagagaaatgccatcatgcttactgctcttttggattcttcatgcagtggcttcccatttgctctgggaacagtgcctc

SEQ ID NO: 40073 - DNA, 1074 bp, Homo sapiens
atggtttttaaaaaatatgtaaggggagtagggggtgagtgaaggctgtgggagttgccttttggaatgggggactttggatggacaggaggatggttgacagggaggatgtatggagggaggagggatggaagtatggatgatagaggaaggatggagggatgaatgatgaagggttggatgaatgggtgaagggaggataaatgggtagatgagaagttcctcaacaggactgtagaggttagttaagagcaacagaaaaactattacagaggcagatacaacaagttgtttttacagagctttaaaaatacattcagcacactaataactgagttaaatgttttggcacaatcagaaggcctggttgaactgagcttgccctgtcatcagcccttgagtgtagaagtagggttttttcctattctttggctggttctcacgctcattctcagccagtgcatcaaatacatctttgaattttgggaaactgtcacatgaaagagacttgaacaggccaagtgcggtggctcacacctgtaatcccagcacttttgggaggctgaggtgggtggatcacctgaggtcaggagttctagaccagcctggccaacgtggtgaaatcccatctctactaaaaatacaaaaactacctgggcatgatggtgcctgtagtcctggctacttgggaggctgaggcaggagaattgcttgaacccaggaggtagaggttacagtgagtcaagatcacgcctctgcaggagaatcgcttgaacccaggaggtggaggttgcaatgagtcgagatcgcacctgtgcactccagcctgggcgacagagtgagaccaatgttaaatcatcttacagaagtccttctctcatgctgacgggtcctgctgtgccaccagcaagcctcccggagtagtcagaaggcattaaggaaagggcgctggtttgcacattactgagagagtgcccattgccctgctcattactccagtacagacttaattttatttctagttaatgagagactaatgggtttgatcaggtcctagtcagtttctggcccctg

SEQ ID NO: 40074 - DNA, 1052 bp, Homo sapiens
gaggaaagacgtttcacatcttaacactctaataaataaaatattttcttctaagctcctatttctctagtattttttcttgaatttaaccctccagagtctgtgactgttcagggtggtaaatgggccagccctgggctaagcatgctttgttagaatgagaacttcagtctgttgggtttaatgggaagatgaacattaaggcaaaacaaccaattgctcctgtgctttctctaatggaagctgcctcacccacctatgagctttctggcttggccatcgctgcagttttaggagagggctgctgttcttggccagggcactgtacttgtcttcctgaattgagagcccattaattgttttcctctcctttagggactgatgctttttaaccacctctgtgatggttgcacacagtcatcacagacggttgggaatggtgggctggtattttctgccagctttaattaaggtcctaccagggtttgcttcttttggaagggctggactatggtgaggttattgacttatttattggagttgatgaactagtattaatatgttatctaatttttttcctggactttgtaggatcatttagaagtagcatttgcaagaactgtagagaaaagcttcccattagagatagactgttgactataatgcgttgaaaatgtgaaacttagatgccaaagagaaattggggtctcctttttttcttaatctaagcagaatcttagaaagcaatttatatgaagcatcgagcaggttccctgaaggcatttctggctaaagttgagtcagctccactctagctcttagggctccttagaatagggtgtaggaagtagtcatcagtaaatattcatacatctgtgcactgttcagagcagtgtacatcgtacattaggagacttgaggaataaaaggatccctacccactaggagcccgcagtacagtaggggaaatgaaacatgcacaaagcaattagagagcagttcagtcaaaatgaagtatgaatttgctcaatagagagcaatacagtcctaat

SEQ ID NO: 40075 - DNA, 1051 bp, Homo sapiens
aaagctgggtgttctcagtctgctttaacttaaattatgaccttgagctcatcacttttacctctagacttcagattttttaaatctagaaaacgaagcagtttcattggatgatctcttccacttgtggttttattataacagatggtaaagtatctggctagcagctagttcttatctcagtgatcaaggcattctggtaagaattgggaatggtcattgtctatgaaacaagcttattaggccatctttaccttttctttactttttcatttgtttgattaaagtaatacagtaggcagggggtgaacgcattctggaatataaggtctagaagtggtacaagatgattgagattgtaccacgtagaagttgtattttgctgttcatgatgacccattgcagcagtaacttaggagggtcagaactgatatttattgttggtgtttataaatcagtggcttctcaaatgactttccttttatagctactatgtagaatctatgtacagagctgagcaatagccaacgcaaagagatggggaggtggcttaagtatgataagttctggtgagtcatactaaggacatttttggccagtgcagtggcttatgcctgtaatcccaatacttggagaggctgaaccaggaggatcgcttgagcccaggagtttgccaacctgggcaacatagtgagacctcatctctactaaaaatttaattaaaaaaaaaaaaaaagacatcagaaagaaagaaagaaaggaaaggagagggaaggagagggggagggggagggggaaagaagtctcactgtgttgcccagaatggtctcaaactcctgggctcaagtgatcctcgttcctcaaccacccagagtgctggaattacaggtgctagccactgcacccagcctaaagatgctttagttctaaagggagaaaaggggtggtggtaggttattagtcttatttatggataacagctttcagaatagctttctcataagcatttagtttcctgagctaagaatgaagcatatgacctgtagcttag
